United States Patent Application Publication US 2011/0183924 A1 - sequence listing, part 70

SEQ ID NO: 248693 - DNA, 336 bp, Homo sapiens
ggaaaagagtaccagatggggaaatattaagtggagtgatcagggaagctctctttgaaagaacaagatttgaacagagattgaaatgcagtgaaggagcaaaccatgcatagagttgggagaaaagcatttgaagaagtacaaatacaaaggccctgatgtggaaataagctttacatatctaaaggacaataagaaggcgaggtggctttctatagtagctgagctgaaaggtcctaagatagattcaagtctagagttgccactgtgggccacatgtgggaggacctcactgggatgccatggtttgaaggtgaggcatggaaccaacttgca

SEQ ID NO: 248694 - DNA, 491 bp, Homo sapiens
atactctgtctggtaaagttcttcagtttataaaatatgagtactttagtaaaagatcaggacaccagaatcttagaaataataaaaagaaaatatctttgatctttgatagtatgagattagcacctccaaatattttaagtgtttttttccttcactgggaacatataattttcagtttcaaatgaaaatgtttcctaatggaggatgggttttgtaccatgaaattactcatataacttttaaaaattagatttgggtggtatgcattgtataaaataactgtcttctctatcaaaccttatacttttgccaaatttgggcacatctacaaagacttctatatagatcatgaaataactgaagtcattaaaagaaatgtatcaagcaatataaatttattgatatctacttctccattctaatttatgaaaaaaaattagcttatagatagacatgtctccttcaaaatgaaatcagatttgttcatt

SEQ ID NO: 248695 - DNA, 486 bp, Homo sapiens
cggaatgcacgtctgaaagagtggccagaaacgagtgtgccgggcaggaggccagccccatctcaggctcacgtgcctctgacaggagaccagccccatctcaggctcacatgcctcgcggacagttggacgtggcctggggcccctgctcacttgagcatgtcgcccaccaagcttgtctgaggccacagagcagcgtcccagccctgttttccaggactggtgggtgccccagtccacggccctgccccacccgaactcctgcctcacggtgtggccttgtgcatccccatggcctgaccccgggaacagtcagaggaaggggtcccgccctcccaccagaggcctggacccaagggaacggcagtcagagactacagtccagacgtttgtgtctaggccttgctggtagctaaggaaatgccttctgttgggaaaaggtcaaatttaacatagcaaaatttttacttaattccactaatttta

SEQ ID NO: 248696 - DNA, 529 bp, Homo sapiens
agggaaggggcattctcagatgacccagtggcccaggaagggacctcatgagcttggccggtccactcaacatcttatcacaaagttaagcaaatctggtgtggaggagcatgctggctctccatgcacatagtgctggctggttctagagagatcatttggtctcaccattgcctggggctgctgaggagtaggggaagttgcctttgatttgtaagtccctttgagagcaagttcttgtgtggttccttggtttcccccacagtgtgcacaggaaccacatcttgcccttagtgcgggcttaatgtatgtttgcctgaaatacagttggtccttgaacaacttggtgtttggggttaccaaacttaaccactcctgcctatgcagccaaaaatttgtgtataacttttgacccccaaaactactaacagcctactgttgacagaagccttaccaataacataaacaacacatattgcgtggttatatatatcatagactgtattcttacgataaagtaaactagaga

SEQ ID NO: 248697 - DNA, 417 bp, Homo sapiens
cgctttctccacccgggcagagctgcggctcccgggcgttgcgcgtggcgtttttcatcacggagggaaagccgcggctccgcgggaaaggagtgaaaaccgagtgtgggtgaagaggagagggaggtcagggggcaagggaagaaagcagataaatgcatcttccctagcagccaagctggaaatttgtgctgaaagtacaacagcaagagttttcacatgaaaaacacgtgaagaacccgagcaagtgatagatccaaagacggaaaatgatcgtctattttgatagtaaaaataaaaagaacagaattgacatattttcgtctaaattacttttcatctgccgatatgaaacaccaacactcaaacaaaaacaaaggacaaagcagtttttaaaaacaacacaaaacaagcaac

SEQ ID NO: 248698 - DNA, 606 bp, Homo sapiens
tttggtttcttttcctaactgaactctgacaggtagagtcctcatgtccaggaataattccagaaaacaataaaaaaaaaaaattggttttcagaccaggacacaaacataaccatagtagatgagggctcactcatttactaaacttgaatgtggttattacttcattgctattgtaaaccaaaaataaaatttgaagccccctgccaccaacatctgaatggacccctcttctccgccaagggcattccaaagttagactgaaaaagtagtttcaagccatgctgggaagggggagtcagacatgcctcattatattctcctctcttttaaaattattgatagaacagactctttaagtctggttagaaacatttacaatctatctctctgaagtcttccacctggaggcttcatctgcgacacctttgtctctggaacaccttatggcaacccaggcattcctttctagagataatagttattgcaacaaattgccaatcataaaatttttgaacctctccaacttgaaagatcatgcttccagttgtactgcctttctggactgaaccaatgtacaacaccttaaatgtattgatctcatga

SEQ ID NO: 248699 - DNA, 187 bp, Homo sapiens
aaatacatataaaactaagagtttgacagacactttgagagttcagactgtggcaagctacatgttctccaaagaccaagaggacatgctgtgacattgccacagggcaacatcattccagctaatctctgaagccttgcctgccactactggcaccaccctcagccttgagggaccttacctgtgg

SEQ ID NO: 248700 - DNA, 504 bp, Homo sapiens
ccaaagtgctgggattacaggcttgagccaccgtgcttggccagtccatacacttttgttgagagttatggcattggtcttctggcaagggaagacttaatttaactggtaaacttatagactattccaaaaacatattcaaaccttttaagcagtgaaaatgaaatttatttataaatgttcaaatggtagattatggttattacatatgagttttcaaaaatgttgagtctttctggaaagatttattcttcagtatctgtgcaaagtttgaagtaatttgtctttgccatttggtttgtattttgttacataaatacatactcaagtctggagatggtttcaggcaacatccagtagcctaagaccattttaaggtagctggtgatctttttctgttttgtggggaccttttttgtaatgaacatttttttaaaattcagaatttagattaatcggttgtcaagagaggagagaaagcgataaaacagtttaggaatagta

SEQ ID NO: 248701 - DNA, 472 bp, Homo sapiens
atgtcttgcacatgtcagggccccaggtaggtggtggcaggagtctgggaccttgggtgggcctcaccagtcacacagccttggctgacctgtctgtcctcccatccagccagagggacacaaagacctctttgtctctccacccttccgcccagagcctccccagccagtgcagctctgagcgtgtcccccagggagggagacagcccctggtggggactggcagtcctggcagctgccctgaggcacaggccctgggggactcggtgctttgagggcaggggcaggtgatggagatcggctggggaaagggaggccgagaaggcggcagtgtggagcgtgtgaatttgttcatgaacttagctacaaaaatgtcttttccagtgtcacagctcttctagaatttgactagcaggttttccgatttttactggaaagccctttaaataaagaaagaaaaagaaaaaaaaac

SEQ ID NO: 248702 - DNA, 457 bp, Homo sapiens
ctgttaattcttaaagaattctgaatataaaaggtatcagtttatttaaagaatcaaggtgtgagtgtcacctttcctaaacttcagcaggctttgtggtttccccctggttttcttctgcattgggagccatccttgcactggccctgaagtggcaatgctgtcggtgtgttacaggtggacacagcagtgatttctctgtaaatgtttggcacaattcttgtattagacagttgtgaactgttcccaggtgtctagagtgtggcaagtcatccccaatgaatttattcttgggttatggaagtgactgcagacttgatagtcacccaaggctttttaaaaagttaacatacagcagaaaggaatcacgagcatggttaagtctcactattgctttgtaatctttaagatttattccttcaacatggcaacaccctgtctctacagaaaaaaaaaa

SEQ ID NO: 248703 - DNA, 406 bp, Homo sapiens
gacacctcctgacatcatcaacctgtctggcctaatctgaaaccaaaagccccattcccttttagcataagttgacatcccctttttgtagtgtatcaagaaatcctggctgggtgcggtcgcggtggttcgtgcctgtaatcccagcactttggaaggctgaggcgggcggatcacctgaggtcaggagtgggagaccagcctggccaacatggagaaacactatctctactaaaaatacaaaaattagctgggtgtggtggtggaagcctctaatccctgctactcgggaggctgactcaggagaatcgctggaacccaggaggcggaggttgcagtgagccgagatcacatcactgcactccagacttcagcctgggctgttaacaagagcgagactcgtctt

SEQ ID NO: 248704 - DNA, 550 bp, Homo sapiens
  misc_feature (19)..(19): n is a, c, g, or t
  misc_feature (389)..(389): n is a, c, g, or t
atgagattgcctaccattntataggatatttactatgtatttatacgttaagacctctatgaatgaatgtatcagagaatgtctttgtaactaactgtttaattcaatctgtaataaaaatctaactaactaactcatttatttctattaaaaaggtattgtcctttaggcggggaatgggaatccttgctgcactgttgcagtcattctgaaaggacctttccctgtacttacctttcaacatgcttcaatcttatcaacgctacattttgtatttttcaaacaagtataaattctgcaataaagagatgtagtttttttttaagattgagtttttgtttgttatttctgaatggttcatcagtatgttaactataccttttatctanaaggaaaatcaaatcaactataccttttatctgagaaggaaaatcactcactaagttttattcaggctctaccaacccccattatatctactgtttgtttgtttatgtcctaaattaacctttcatcctatgaagtaataaagttcattttaaaccaacga

SEQ ID NO: 248705 - DNA, 376 bp, Homo sapiens
tgaaacctcgtctctactaaaaatgcaaaaattagccgggcgtggtgatgtgcacctgtaatcccagctactcgggaggctgagacaggagaatcgcttgaaccggggaggcggaggttgcagtgagcagagatcacaccactgcactccagcctggtttccaataaattcatccctaattggatccaggtgaacgctcctatcagcactgcaaaacgtcaaagtctccttacaagctttcctaggcaatgtcagtcaaaaacaaccaagatacaaaagcgcgagaattgactagaaaacgacagaaataaacaaacaaacaaaaacaataaacccagatccatagaagaggcaggaagaggaactgcttctgggg

SEQ ID NO: 248706 - DNA, 511 bp, Homo sapiens
aattcaagaatacttaataagggactccattaaaaatttatgttcatttcaatatatgtatgtgattattttgaaaatttatatgacttcctagtcagagattcgttactttgtaaaacactcaccacataaagatggtttataaatacaaaaatgacacaaagctctatgtcaggcagcaagtcggtggcagaactggatttaggattttgagttctgacttctgtcctgtcatcaggccactaatctgcttgattttctgaaagaatttgaggcctgaggaaagaatatgccagagacacatttccaaagagatgagtcacattgggtggtttgatataataaaatctgtgtttattttgcaaagggcttttgaacagatattagagaaacaaatttcatcatcatgttcaactttatactttgtaacattgtactttctgttccaatagttaacagcactaagttcatagttcttctcttcctgttctcttttgggagttttctattt

SEQ ID NO: 248707 - DNA, 470 bp, Homo sapiens
gtggttttcaattaaacctccttgtctctcctaagaacccttttcctcatttatgaagatgggacaataaatagtagccacttaattgggctattgtactgattaaacatgcttatccagccttctaagcctccataagtggtatttactataattagctctttatttgcctcaaattcttctctttctcagctgggcacagtgtctcatgccagcactttgggaggccgaggtgggcagatcacttgaagccaggagcttgagactagcctggccaacatagcaaaatcccatctctactaaaaatttaaaaattagccagccatggtagaacacacctgcaatcccagctactcaggtggccgagacatgagacttgcttgaacccaggaggtagaggttgcagagagccgaaatcgcaccactgtaccacagcctgggcaacagagtgaggccctgtctcaaaaaaa

SEQ ID NO: 248708 - DNA, 476 bp, Homo sapiens
tccccgggctgtacgaattcggctttaaagaaataaagtggattcctcttccagtttcttgcctagcttaaagccatgtaattcttgccagctcacattgtgacttttctggctttcaacactttgattgggatttaccatttaattaaataagcttaggagctggagggtggtgctgtccggggtcagttcagtcaacccctggttctctttgcacttcacagaatgtggattgtctctctgttcatgggctctgctgggctctctgagctcagaaccttcagatttgttgggtgggaccacaggtatgcaccaccacacctggataattgtggtttttttgtaaagatgggggtctcactttgttgcccaggctagtcttgaactcctggccttccattgttggtattataggcgtgagttgacaggctccggcataggccattttcctcccagattctctcccttttgtgctt

SEQ ID NO: 248709 - DNA, 1107 bp, Homo sapiens
cggctccctggcgttagacgtgctgtgttgtgatcacgtgggcagctccgggcgcggcgcttgttttggtttccttctaacttgcccacggcagcttcggggtgagcgactttcctgcaccagctgccgcgcctgctcacaccctgacctcgttttcgggctctctgagcccgcagttccgcaagcccctggggcgggctcctgccatgccgctagtccgctacaggaaggtggtcatcctcggataccgctgtgtagggaagacatctttggcacatcaatttgtggaaggcgagttctcggaaggctacgatcctacagtggagaatagatgagtacagcattctgccctattcattcatcattggggtccatggttatgtgcttgtgtattctgtcacctctctgcatagcttccaagtcattgagagtctgtaccaaaagctacatgaaggccatgggaaaacccgggtgccagtggttctagtggggaacaaggcagatctctctccagagagagaggtacaggcagttgaaggaaagaagctggcagagtcctggggtgcgacatttatggagtcatctgctcgagagaatcagctgactcaaggcatcttcaccaaagtcatccaggagattgcccgtgtggagaattcctatgggcaagagcgtcgctgccatctcatgtgagcccttgggtgtggggtaactgccttgcttctgcccccggcacttgccatgttccagtggggggcagatcctcaggacttcacgggtatggttgccagctgtgttcctggcccctggacacacagtgtggcatcctcatgtttgcacactttccccaggctccagtggcctggatgtcaatgtttacaaaggggcaaggacctctcatggacactggcctctagccctctgtttttgtttgatgaattctgttataacctatggggtcaggatatgagtcctgggcattatttatccaggacccatcctcttgggtgggttttgggtgttggctgggtaaggggagccggggacttctgaaatagagctggctccctggggtgacaatgtatatatgcaaataaattgagaaatctt

SEQ ID NO: 248710 - DNA, 800 bp, Homo sapiens
  misc_feature (1)..(1): n is a, c, g, or t
  misc_feature (30)..(30): n is a, c, g, or t
naaccttaggctaggtacgaggctgggtgngctcggataccgctgtgtaggtgagtctccgccctgcagagctcggacgcgcagcagctttgtagccagaagaggcgcgctgccgtgggaacgcgacccagggaggaatgatgacatcgtaaggatggggttgtagagcgaggattggaagagtggaggaataaagggaagacatctttggcacatcaatttgtggaaggcgagttctcggaaggctacgatcctacagtggagaatacttacagcaagatagtgactcttggcaaagatgagtttcacctacatctggtggacacagcagggcaggatgagtacagcattctgccctattcattcatcattggggtccatggttatgtgcttgtgtattctgtcacctctctgcatagcttccaagtcattgagagtctgtaccaaaagctacatgaaggccatgggaaaacccgggtgccagtggttctagtggggaacaaggcagatctctctccagagagagaggtacaggcagttgaaggaaagaagctggcagagtcctggggtgcgacatttatggagtcatctgctcgagagaatcagctgactcaaggcatcttcaccaaagtcatccaggagattgcccgtgtggagaattcctatgggcaagagcgtcgctgccatctcatgtgagcccttgggtgtggggtaactgccttgcttctgcccccttggctgtgccggggggggtcccaggctccgggtggggcccgtttcgggcccggccggggcccttt

SEQ ID NO: 248711 - DNA, 1325 bp, Homo sapiens
cggctccctggcgttagacgtgctgtgttgtgatcacgtgggcagctccgggcgcggcgcttgttttggtttccttctaacttgcccacggcagcttcggggtgagcgactttcctgcaccagctgccgcgcctgctcacaccctgacctcgttttcgggctctctgagcccgcagttccgcaagcccctggggcgggctcctgccatgccgctagtccgctacaggaaggtggtcatcctcggataccgctgtgtagggaagacatctttggcacatcaatttgtggaaggcgagttctcggaaggctacgatcctacagtggagaatacttacagcaagatagtgactcttggcaaagatgagtttcacctacatctggtggacacagcagggcaggatgagtacagcattctgccctattcattcatcattggggtccatggttatgtgcttgtgtattctgtcacctctctgcatagcttccaagtcattgagagtctgtaccaaaagctacatgaaggccatgggaaaacccgggtgccagtggttctagtggggaacaaggcagatctctctccagagagagaggtacaggcagttgaaggaaagaagctggcagagtcctggggtgcgacatttatggagtcatctgctcgagagaatcagctgactcaaggcatcttcaccaaagtcatccaggagattgcccgtgtggagaattcctatgggcaagagcgtcgctgccatctcatgtgagcccttgggtgtggggtaactgccttgcttctgcccccggcacttgccatgttccagtggggggcagatcctcaggacttcacgggtatggttgccagctgtgttcctggcccctggacacacagtgtggcatcctcatgtttgcacactttccccaggctccagtggcctggatgtcaatgtttacaaaggggcaaggacctctcatggacactggcctctagccctctgtttttgtttgatgaattctgttataacctatggggtcaggatatgagtcctgggcattatttatccaggacccatcctcttgggtgggttttgggtgttggctgggtaaggggagccggggacttctgaaatagagctggctccctggggtgacaatgtatatatgcaaataaattgagaaatcttttgttgttgacttctttttcgtgtgtgtgtgtgagacggagtttcactctgttgcccaggctggagtggtgcagtgctgcaatcttggctcgctgcaacctccgcctcccaggttcaagcagttctcctgcctcagtcttctgcaggcac

SEQ ID NO: 248712 - DNA, 478 bp, Homo sapiens
cagtagaaatcataagattttttattgtaatgctcataaaacattaagaatacaaaaaggatgttatgtctgacaataattaaaactaaatataagcacaggcatatatttgattaacgtcttggtggatgaagagtttttattatttttaacctttcattttgagattattgttgatttacatatggttgtaagacatagccaagtgcggtggctcacgcctgtaatcccagcactttgggaggctgaggcggcggatcacgagatcaggagttcaagaccagcctggctaatatggtgaaaccctgtctctgctaaaaatacaaaaattagctcggtatggtggcacgtgcctgtagtcccagctactcgggaggctgaggcaggaaaatcacttgaacctgggaggtggaggttgcagtgagccaagattgtgccactgcactccagcctgggcgacagagtgagactctgtcta

SEQ ID NO: 248713 - DNA, 587 bp, Homo sapiens
tctaaaccactagtgggcatttcagcaaattaccttttcagtgcactaaaaagctcctcagtaacccaaaagaattaatgtaccaccaaacagtgggcaatttattccctcaccactgatgagggcagacagtttagagcattaatgggagcatttacattgagtcacagtgaagtatggagtcactgagcctttgtgaagctaacccatggagggtgaggaggtgtttatcactgtggagaagggaggagggacaaaggagatgatccctacccttaaaagctgtagataatgctgtcagccattatctggatggaattcctatatcatcatctgtatatttggcaataataggcaagttaacaacccatggtcatgaataattatctggttttagagttgtataaaagtattctttgtgaaataatcaaatcttttattttttcatgtactgaccattgctatttttatcctggtcctgtttgtgaaatgggataatttatttctgtcaactaaaaaaatcaatgacttggatgtaaatgaacctactacatgtaactggttttggttttaactcttctcctgtt

SEQ ID NO: 248714 - DNA, 513 bp, Homo sapiens
ctcttgtagggccatgtagggattttgagaaaagaattttgtctctgtgatattttataaacccaggctacttgatagagggacactataaaaaagatccatttccacagagtatgtatcttagaacatgaaacactttatcatgggttttttaaaaatctataataaagattttcatcaagtttggggaaatttctttaaggtactaatgatgcagatagtgtttttggacgttttagttcttcttgtaattgctatatggtataaaatctcatataaaatccaactgtcatatttaaataaaaattttaattaaaaattataatcaacacatctaaataactgtatgcatgtgcataaacccacatacacacaaatacacaaaaatttgacaactgtatcaactctacagaacaatgaatgtttacctgcaagactaacagcacctgaattaagagatagtaaacagaaaaaggcatacaatcctaaagcagtatctacaaattaaagggt

SEQ ID NO: 248715 - DNA, 515 bp, Homo sapiens
gtaaagagtctggttccactaactttcccatagacctgcttcttaatgcagaatgttactatcgatgccctgacattgaggaaatgtaatatttcccatttgctgcctgagttgaaggacctgctgtccctggaggcaccttggttactgtgaattaaaatgtattgaagaattacctagtgctgtcatagagaatgtcattacaatagacccatgggtctctgatgctctcaaaagaatgtgtttctttgcctttgccatgaaggatatgtctgattgtctagacgagagagcagattgagatggtccatatgcatccttaggggctgtccaaataggaaagatagtgaggctggcattagattgatcataataagaactcttcactctttccaacactcctgtccatattccaaaacaagctaataccatggaaaaagcagccttatgaaggaatgtggtgagagcaaccagctgtccagggtgatcctgggaattgatggtcttttttgaaa

SEQ ID NO: 248716 - DNA, 434 bp, Homo sapiens
atgtcattgtataggggtgctcccccatgctggatctgtgtgagtgaaggacagggactagaacagtggttctccaacttggctacacatgagaatcacctgggagtttctgaagtcctgatgcccgtgccatccttcatactcactaagtcagaatctctgggggtgggactcacgcatttgtgttgttttaaatttccaggtgattccaatatgtagccaagtttgagaagagtgtgtgtgtgtgtgtgtgtgtggtggaagggccagggtcggtttcttttgtctccttccaccttattaccccctgcccctcactctctcctaaggcctgtcttaatacatacgtcttggttgacctgtactgtttggtaatgggtaaagtcttattagcattttactaaacttagctaaataaaataagtaaataaata

SEQ ID NO: 248717 - DNA, 1694 bp, Homo sapiens
atctttacagtgtcagagagtgagagtacaaaaggaagtgctgattgccttcctaagctcagttatcaaaattcttccagtatcgttcgcctcactggtacaagtaacaacagtgctggtaaaatatcaggagaaagcatggaaagcacacctgagctgctcttaatatcatctcttgaagatacaaatgaaacacgaaacattcaaagtagatgcttcaggaaaagacataaaagtgacaatgaaactaatttgcagcagcaagtggtctggggaaatagaaaccgtaatcttagtggaggggtactgatgggatttatgctcaatagaattaaccaggaagcaacccctggagatatagttgaaaaattgggagctgatgcaaaaattctttcaaatgttatctcaaaaagcacgagaccaaatactcttgatattgggaagccacctttaagatcaaaaagagacagtctagaaaaggaatctagtgatgatgatacaccttttgatggttctaactatttggcagataaagtggattctcctgttatttttgacttagaagacttagacagtgaaacagatgtatcaaaagcaggatgtgttgctacacaaaatcccaagaggattcaacgtatgaacagcagcttttcagtaaaaccttttgaaaaaactgatgtcgcaacaggatttgatcccctctctcttttggttgctgagactgaacagcagcaaaaagaagaagaggaggaggatgaagatgatagcaaaagcatttcaacaccatctgctaggcgtgatttagctgaagaaattgtgatgtatatgaataacatgagcagtcctttgacaagtcgtacaccaagcattgatttacaacgggcatgtgatgataaattaaataagaaaagtccaccattggtcaaggcatgcagaagatctagtctgcctcctaattctcctaagccagtgagacttaccaaatctaaaagttacacaaaaagtgaggagaaaccaagggatagactttggtcttctccagccttctcacctacttgcccatttagggaagaatctcaggatacattaacccactcatcaccttcatttaacttagatacactactagtacctaaactagatgttctaagaaacagtatgttcactgctggaaaaggagttgcagagaaagcaagcaaatggtattcaagattcaccatgtacaccacatcatctaaggatcaaagttctgatcgtaccagtctttcttcagtgggagcccaggattctgaatctacctctttaacagatgaagatgtctgccatgagttggaaggacctatctcctctcaagagaccagtgctacttcagggactaagagaattgatctcagccgaataagcctggaaagttctgcatccttggaagggatctcgcgaagtttgcccaactgggaaatccgaaagcgacatcctactacaacgcgaagtaacacacaactctcgccagacaactatgcacagggagggccccaacatcaagaggccacggggagaacagtgatgtacggtccagactacgacaacccgatggagacacgagcgataccaaccacaaaaatgcacacagagacaaaagaaacacatagaacagacacaaccaacacagtgcaaaacaatacaacacgggaata

SEQ ID NO: 248718 - DNA, 233 bp, Homo sapiens
aaaggagttgcagagaaagcaagcaaatggtattcaagattcaccatgtacaccacatcatctaaggtaagtttggttagtatttgctacttttactgtcacacacacatatccatcaccaccaaaagccccttactcgttttaactattcttctaaacatagctttataaaaaggactcattgggtatgtaagttttgtaagtatcagaattggaactgaaataataacttc

SEQ ID NO: 248719 - DNA, 393 bp, Homo sapiens
tgtttgtttgtttgagttggagtttcgctctgttgcctaggctggagtgcagtggtgcgatctcggctcgctgcgacctccacctcccaggttcaagcgattctccagctactcaggaggctgaggcagaattgcttgagcccaggaggcagaggttgcagtgagccaaggtcttgccactgctctccaacctgggcaatggagtaagactccatctcaaaaaaaaaaaaaaaaaattaatgttttataaatatgtattttaaaatgttagagaagattcccttttctactcttttatttatttgttttatttgatttacttttatcctttaagcctcacctggaagaagattccctcttgatacttctctttttattaaaaatatctttgca

SEQ ID NO: 248720 - DNA, 654 bp, Homo sapiens
tgccacatggggtgaagtaggaatttaacttattttccagatgtttagtgagttgtaccaaatgattcactctttttcaatttacttaaaaagccacttttattacatatggcatgtgtttctgctttttatactatatatatttattgctggatattctactttgttccattgatgtgcttactttcatgttagtacctgactttaacaatttaatgttttataggcccggtggcggtcactcacgcctgtaatctcagcactttgggaggccgaggcaggtggattgcttgagatcaggagtttgaaaccagcctggccaacatggtgagaccagccaggtgtggcagtgcgtgcctgtaatcccagctactcaggaggctgaggcagaattgcttgagcccaggaggcagaggttgcagtgagccaaggtcttgccactgctctccaacctgggcaatggagtaagactccatctcaaaaaaaaaaaaaaaaaattaatgttttataaatatgtattttaaaatgttagagaagattcccttttctactcttttatttatttgttttatttgatttacttttatcctttaagcctcacctggaagaagattccctcttgatacttctctttttattaaaaatatctttgca

SEQ ID NO: 248721 - DNA, 1789 bp, Homo sapiens
tcaaactcgtagtcccatagtcagtgttaattacacacattgttaactattggatgaaaaatacatgctattgattgtgtccaaagcctcccgaggacctccgtggggatgctctggtagcctgaatacagaactgaggtgaaagtccaaaccttgaattttacagtagtaagttggtaaaccatgtgctctgtgctatgagttaattatgttttcccaaatactaatgtggcacaagtaccatattttatcagagttcttatgtacagtatggtgaagataagtgacaagcacacatttttcttgcttcactgctgttctatattacacaggtttgttgttgttttttttaaaaaagaaattaagcagtagttagtctctaaaaatacaatgtttcaggctaccacagtgaataaatagaaatgtaatcagggattaaaaaaaaaacttatgcagcttttcaaagttgattgtttcaaaattggtgtttatttaaaataagtggtaatgtacttgaatgcactttttatgacaatgattcagtaatggtaattttactattaaagaaagtgaaaggtttagttttgttagcatggctcagcatgtagctgtcaggtgtttttcacctaagggcaaaagaaaatgatagtaataattgcagtagttgtattgtattgtatttttgcacgtgtggtaagcataggcttgaagaggtgggtaggcaggtacatgtacttcctaaatttggagataattatctttctgtaagttcgttatgcttgactgtttccatgttctcccaataatgattttatagttacttatcactttactcatggagaattaaaacgtaatgtttttcaactgtatctttctttaactggataatactgctatatgatatgcttactacagactgcattaattcacgaaacgaattctgttatgctgtaatttgaactctcctcaccacaacttattaaaaaggcaccaatagtttcccattaagggtcagttgtggttattattaacgtttctggtttagttccccaagcttgacattctttaatagaaaattgtatatgatttgacaactttagtaatttttaatagtccctaagatggtttattgagttttctttcatgtttctttgtgctgtcttccttcttgcatctgtgatctgtctgccagcatgcaactcacacacatttaggaatataaaaatatgtacactgtctttccatatttcatcacaccatcacagaataatatggttatcaaaataccctcctttctagagtaagaagttgccctttgggtgaaatgtgttagctggactagggaacaattagtaacaggtattttgaaagtattcctgccttttttaagctgcttactttctctcactgtgattacaaagcattttaaattaatttgacatgaaggtatttgatggaagatattcactcacctttttctgcctacagtttttcccttttcactttggttttgagggggttttgcccctggctggggtgacactgtcaaccaaagcaagggatcccaaataggaagacataggagaaccgtgcttatatctgcaaggtatgttcatagctattgcacacacaaaacttacatatgtcctgcttacacaattttaagttggaaaagactgcatctttatgtttttgatttctctaaaaggttatttatgcttccttctgtttgggaaagataaattaagtcttgtgcgctatagaggattttttttctttaagaaaaacg

SEQ ID NO: 248722 - DNA, 296 bp, Homo sapiens
cgcatggtaaggaatcacttccagactgggccttcccatgggcttccctgagcttcctggactcaaatcatagtccttcttttcctctcccctttggacttgataaacgcagtcccattcatttaatctccaacttagaaatccggagaatgtgagccctgggatttactttcagacaccctcgtcgataaccttggccacttaggttgctgcagcctgtccccagggagacagttagaatggaacaatgacacaaacaacaccaacaataacaacagcagcagaagcagaagcaa

SEQ ID NO: 248723 - DNA, 171 bp, Homo sapiens
caaaggagactcttcttatgtttacattgtgttttatttttattttgcagagttgaggctaatctctttttcacctggaagaaatggtgaaatatttcttccaggataggttaatacttcatttttttcttcctttctattattttttccttttctggtggtatttgtcat

SEQ ID NO: 248724 - DNA, 526 bp, Homo sapiens
tgacacacctagactaggtatatctaagcaattattcctttatgaaacaaaagaaaatgaggtgacttcccttgatattgttatggaacattctcttaccttctggtcttgtgttaacaaaataactacagcttaaacaggaaaactttggcttcatatggaaggaggagaggttatgtaacatggaggttaagagagcagactcttgaggctaacattgctggattcaaattctggctctgccacattctaagtaggtggtcttgggcaaactcctaaccttctctggatctatttaatcatctgtaaaatgtgggtcaggtacttaacctgcatgatgacagtaaaagtatttagtgtagtacctagcacataaatagtacccagtaaatagtggcaatcatttttgtctttattaagagaataggaaatatagcatgttggccaactcgataaagcagaagcacagggaatccccaacgacaccactttttaaaaccaatttcaatggtaaggatgtttaaaa

SEQ ID NO: 248725 - DNA, 575 bp, Homo sapiens
tactactaccaaattcggcggccgctcgacggaagagcccctgtttagcctgcagcacacacatcatttccctttctatccctcctggcttcattgtacccacgcaccaccaaaacttacacagcaatgcctaaaaagtagcacaaaagacttaaaaccagtgccaatagagcagaacatttatcttgaaacctaaactcttgtctaaacttttttccacttggtgtactttgcacagacctaacttttggtatcaggaaggagtccttccctaaatacccagtcgatgtcacaatctactccttggtcatttaaaaccccataatgttacttatttattcatttgcaaccagtgcaacacttattatctgttagctctcagcttcaaacagctaggtcaaagtcaagtagaactttcaccacaaactgcacatcctgacctatttcaacagaggtcgtcatccctgtgaggaattcacttaaatgtgaattcattaaatgtgttgccttacctaaactgcaagagatagaggttcacaacttgtgatagcagacttcaaagtattatgcaaaaa

SEQ ID NO: 248726 - DNA, 484 bp, Homo sapiens
tatagaacagtggatcctccgggctgtaggaattcggctcgagcataatgacatggaaggtaaggctcgaatttagaattgtacttttcatatatttgtgctggaatgtagttgcacatagaaaaccagcccctatcccaaagcccctggattatagcctgcaatctacttcccttctctaccatcattgtgtccatcccatactataggggatttccccatttgcatgtagatactacattcattttcattcatgtaggccccatccctgccccagtaaacagctattccttagctacccttccagctgagagatgtgaacagcagtcgctcagtggctcaggctgcctttaagatgaccaatgcagggaggagacctaagtatgctgtggaacaggctgaagtcatatgggcagggaattttggttcctgtgtcccaggaacatgctctagaagagagacagagactctgacaatcggatct

SEQ ID NO: 248727 - DNA, 721 bp, Homo sapiens
atccttattgcaagtattcctacttcaggacaagcatcatagatccagtcagtaaaagatttctcatccagccttcttatttgtgcaaccaaaagactggcagctggtgtttgtcttttctcttcaaggcttaagggttagcatctttatagataatggcagtcctgatcataaacctgacttcatttgcacaaagcagtagggttagcctgtccgttcttggacttaaatcctggtttatgctcctcttttttgctaataagtgttctttgtggcattttttcccagaatagagtacttttgtttgcattaaaaacctgttcaaacaggctgggcatggtggctcatccctgtactcccaaaatgctaggattacaggcatgagccaccaacacccagcccatatattcatatttttaatggacttatacatgaaaatggtatctcacttttaaaaataaatgatatggaattatgcgttaaagggaaattaaatcttattatatcatgttttaaaatttttaatttttcatagctaatacatttatgtagttttaaaaatgtaaaacatttggaaagatataatgaaaaataagtctccttccatctcctgtctcccagccacccaattgccctccccgaagacaaccaatgttatcaggttcttgtgtctccttccaaagacagtctaagtgtgtttttacaaacatggatatataca

SEQ ID NO: 248728 - DNA, 506 bp, Homo sapiens
ctggcctcccaaagtgctgggagtacaggcacaccccgccacacctggctgatttttgtatttttagtacagacaggatttcaccatgttggccaggctggtcttgaactcctgacctcaggtgatccacctgccttggcctcccaaaatgctaggattacaggcatgagccaccaacacccagcccatatattcatatttttaatggacttatacatgaaaatggtatctcacttttaaaaataaatgatatggaattatgcgttaaagggaaattaaatcttattatatcatgttttaaaatttttaatttttcatagctaatacatttatgtagttttaaaaatgtaaaacatttggaaagatataatgaaaaataagtctccttccatctcctgtctcccagccacccaattgccctccccgaagacaaccaatgttatcaggttcttgtgtctccttccaaagacagtctaagtgtgtttttacaaacatggatatataca

SEQ ID NO: 248729 - DNA, 401 bp, Homo sapiens
gtctttctaggtaatccctgtaacagagcaagtttctttgaaccctagccatgtatgtgtagtgttccattattggaacgctaagcatgtgggagttatttatatcttactgctcacggtcatcatcaaggtctgattacaaaaattcaaaaaattacaacctcaggcataaatttaaagaggtggccatttaaaaataatccgttgctaccatttccacttaaaatggtagctctctgatgagttttatattggctctctgttagccaagcccgtaagagcatatggagagaaaggtacgattgaatgaacttctgtgagcggcataaagacatttactctgacaacattaaagaatttactggtactgttttttttccttgttagtttaattccatctg

SEQ ID NO: 248730 - DNA, 427 bp, Homo sapiens
gattccatttccatgtgatggggctagaaagatcttgccaattcagaagtcaaataaaatgaataaatatcacttgataaagtggacaaatccttcacaaattaaagtgagactgttactgaagccagatgagcaaacgttggatacacatgtgtatagcaaaagccaactggaacttgaagttttgaatgtcttacaacaagcttggccagggtggttaaaacaaactgtcatccataatgacccgtgccagatccagttagctttaaatagattatgcctgcctataatgtgaaaaaaaattcactggtcagttgaagactacctgaatattgtctgtttggtccatcagattggaagattggttagaaggatgtaaagatcattgtgtaaataaaatgattgatatttttctaatgacaacatt

SEQ ID NO: 248731 - DNA, 508 bp, Homo sapiens
ggtcacacacacacacacatacacacacacacacacttacgctcacaccccagagggggaagggatgacgagggggagaacgcctagcgatgggcaaaaggagaattagagggaaattattttgatttcttctgaaaagtttttaaaattagattttatgagcgtgaagagagtgtcattgaaaatgtttggaaaaatttttaatgggaatgaaacccccaccattttaatgatttgtgaaatatactggatttggattgttttcttctctcacatataagcacaatccaagtctggattctgctcattttatatcctttttagaaacaagtagaaacagggtaggatctccctattttttaatccaaagtataccttggtttaaaaggtttaatgatgacaaagcacactcctggaatttgcagctattgccacaaattcgatcggaatcaagggttcctatttatcccaaagatgattttaaaaataaactttccaatcaatccaa

SEQ ID NO: 248732 - DNA, 615 bp, Homo sapiens
ctaattcagaagaaatatataacatgtctatttggtagcttaaaaacattcttttaaaatacaaatacagtagacccaagtaggcttggggacttaatattagttactctagctacatgataaaattactggatattggaatctgaagcagcacaattatgcttcaagtaccatgctcatctgtcactgacacacacacacaagtgtgaatgcctgctttgctcaattaactctgtaaataagttcaggatttgctgtggaatgttccctgctttccattttcactatggtgaaagttatggaaactcgatccccataatttaagcaaagttgtacttaaagtaactcatatgtaaaaatttaagatactacctttagtgtcaaaaacattttaatccaagtaacgtaatctgcctgcttctaaaaactggcatataaagcaacagatctgttaggcagtcacaaggtaaacaggctcatcctactggagcagaagttttactcacaaatatgaaagaaataatctaaaatatcagagtgccacttaggattaagaccacaaactgcccccagtacacatcctctgtccttaaagatctgagctactaacatgga

SEQ ID NO: 248733 - DNA, 526 bp, Homo sapiens
cagtacacaacattaagaaagaggaaggataaaaactacaaataacagtttaacattttactgagcgtctgctatgaaccaagcactgaagcatcaacttacctaattcacagctactctacaagttacacactattgtctccattttacaagtgacaaaactgaggtgtataggttaaccaagttgccagaggttacataaatagtaagtggcagagcgggactcaggatcccaagcggtgtgattctggtacccaggctcttaaccactatgcaaactgcttccaaactctggtgggactgctcttctaagtcagaatcttgattctgctctatcagcctagcccccaaaaaaaaccccagtcaagcctgtttttccccttgcttgtcttctattcattctttgccttcttgacggttacagcctggggccaccttcttacacctattcctttgccctttctacttataattccagactcctccttgggaaaataaagggagtttgctcttagcaaccagttta

SEQ ID NO: 248734 - DNA, 176 bp, Homo sapiens
gtaaagctgagaatgcaggataatgatgttagttaccaaaacaaggtctggaccactaaagagttgtctcttcccccttccaagatcttttgcatttcctatcagactctttttagtgcactactagcaaattctgggtagcccctgagtgttagtcagcattcttcacatcctca

SEQ ID NO: 248735 - DNA, 394 bp, Homo sapiens
agcatgtattactttatagtagaaaaatctataaaacttttcatagctacagttgttactaggcctgggggcagtagcaccctccaccattttggttgtcccagtgacagataccattaaagatactaaggcttggcggtgcttacttttagtaatgaattctatactagcagctgtttaagcagtcagaaaatcctcagctactcccaagaccagttggagctcccaaactctagcccgagtgtgataatccttcccatttctttttggtgaacttgaccataccccaaaatgcaaatgctctgcagaagtgtggtgtgtggaaagaaagagtgttttcccaactggggcatcatagtgagaccccctctctaaaaaaaaaaaaaaatttagc

SEQ ID NO: 248736 - DNA, 374 bp, Homo sapiens
gccgcttcctgaggaagggaaaacagagagaggttgtggagggacatctcgactcctatctaaccaggctaagtgtgagatgctgtgtcagagatgaattactttcacctttccctttggtaaaagaatatcctgagttttggcacggcttttggcttctcaattaaagactacatttccctgccttcctccgcagtatgtgtggccacgagtaagtgcttccaatggaatgaagtagaaggaatatgtgtagcttccacgtgacaaaaatgggacttggaaagaaaaagaaatggagattatttccaaatctctggaagccaacatttttacaatatattctcctgaattatatcacagaccctaaaaaaaaa

SEQ ID NO: 248737 - DNA, 597 bp, Homo sapiens
tttagaaaatagatttttttgtttaattttagactccaggatagaaaatagaaattattaagctctaagttaaaaaaaaaaaccaataagcacaacacaaagaaatatctgcaatttagcatatacaaacaagctgacttatacaacaaaaaaccttaaagctacaataataataaagtaatccatcctactccaggaatatgataaaatatcaaccttaaaaaaactttaaaaactaactttactagttaatggtaattagcaaaataatgaaacagtgaatcttcaaaatctgaattatttcaaggtaaaaaacatttttaatctttatcgggaaaaactggtgacagtgaccaataaaatgagcataaagtataagcaacgctttcacaccaacaaaaaaattcaagaaagaatttcctgaggcagatgatgatttaaaaagtaatctgaaggaaattatccttcaatgcctttcaacagattgaactactgtgtcttataggaagtaagtaatgcagtggtttggtgtttgactaaaatataagtgaaaactttcttttatatttatggcaacagaattttactttctaatta

SEQ ID NO: 248738 - DNA, 480 bp, Homo sapiens
gctgggattatgggtgtgaaccaccgcgcccagccccggcctccattttaaatccatatggtggttctcccatggatgcttatctccccacgagaattttaagccccatgaagacaaggactagatctttcttttgttcactttatatcctggtgcctagcatagcccttggcatatagagggtgctcctaattatttaagaaacgagtatggttcatgcctgtaatcccagcacttcgggaggccaaggcgggcagattgcttcaggccaggggttcgagaccagcctggccaacatggtgaaaccacgtctctactaaaaatacaaaaagccgggcatggtggtatatgcctgtagtcccagctactggggaggctgaggcaggagaatggcttgaacctgggaggcagaggttgcagtaagtcaagattgcaccactacactccagcctgggcaggcaacagagtgaggctccatct

SEQ ID NO: 248739 - DNA, 465 bp, Homo sapiens
ccaagacttttgagcgagatctgttgacagccaagatccctgtcttggcacaagtcatgttgatggggagacagacaggaagctagtaaaaaggtaaaacataatattaaatagtgagaattgctgtgggaaaacgagatgatgatgagttgggggtgggaagtttgaattgggtgctcttgggccgggcgcggtggcacacacctgtaatcccattgctttgggaggccaaggaaggaggatcactggaggccaggagtccaaggccaacctgggcaacatagcaagaccccgtctgtagaaaaattataaacaattagtcgggcatggtggtgggtgcctgtaatcccagctactcaggaggctgaggtgggagaatcgcttgagcccaggagttcgaggctgcagtgagctatgatcacaccactgcactccagcctgggtgatagaacaagaccctgtctc

SEQ ID NO: 248740 - DNA, 179 bp, Homo sapiens
ttttctttttctttctctctttctttctttcttttttttgacagagtctcactctgtcacccaggctgaagggcaggaggcacttggattttcatgcattcttcttcgttccttaaatctaatcaatcactgagccctacaattttatctcctgtgtctggaaatcttttctacttcaa

SEQ ID NO: 248741 - DNA, 385 bp, Homo sapiens
agaaggttgtgatgtttcagtgttgttttcttgattttgacagctgtgctgtggtttgtaacattatgtccttgctttgattcaggaaacatacactgaagtattttaggggtaaatgggcatcacgtctgcaattcattcccaaatattcattaaaaaatcacacacacacacacacacacacacacacacacacatatacttgtatgtgtggtgtgtgcgcataagaaagagaagaggccgggcatggtggcacatgcctgtaatcccagctactcgggaggctgaggcaggaggagtgcttgaacccaggagtgggaggttgtggtgagctgagattatgccattgcactccagcctgggcaacaagagcgaaactctgtct

SEQ ID NO: 248742 - DNA, 388 bp, Homo sapiens
catagagtcccccttgatacggctgttcagcagaccaactttgttgtaaatatttagataaaaatgggctttagagcagccacatctgaagacccacaaggctgaatgttacacaggcaatcagaatctgattgaagataaactcatcctatttggatcagagcattagaagaaagaaagaactgacacttctcaaccttctctagttgaagacttctctttgctataactacttgaagagttcagcagaaaaattttactgaagaatccctgatcctcctttaagtagctgtagagaatattcactaagtgtaatgggacacgtctctctcatgcccacttcttttctcttatccctgcaagaaaatgaagttttgttggagtcaga

SEQ ID NO: 248743 - DNA, 392 bp, Homo sapiens
taagaaaaatacagttttagcaggtttgtccactgaggagcctgggctggccggtgatgaaagcgaaccagaggggaccctgctctcagccggtttatgactggctctggaccaaccaatgtaggatggtcgaagcaagagatgtaaaaccacccaggcccagtggttcatgcctgtaatctcagcactttgggagactgaagtgggagaatcgcttaagcccaggagtttgagactagccttggcaacatagtgagaccctgtctctacaaaaaataaaacgtaccaccactttggggatcaaattttagcatgagtttcttttttttttttttttctccttgccatgtttcacatttaataagattctgtcacttttacatccctttgtc

SEQ ID NO: 248744 - DNA, 397 bp, Homo sapiens
ggcaatattcttggtatttatgtatacttgtgatagtatttttggtttaaataatttaaaaaccatattctttttcaagcaggatttgttaaataattggcatatttgggacttaatctttagggcagaatgaactctgattatactaacgtatcacgtattaaaaagggggtaaaaaaagctctgtcagccattttcactatactttgtaaagatttgctgttatttagtaaatgagatgacatcttacctttccaaggactttcttggagataaaaatactattattactttttaactaagcctatacctttggattattaatttgaatacttgatactttagagttcaattgtaaaaataaaggaaataatacaatcaaactatttgtgaaaaa

SEQ ID NO: 248745 - DNA, 437 bp, Homo sapiens
caggctcccgccttgtgcgtaggtgtgatcttcacaggacaaggctgagtcttgcctgccttttggcatctccacactaccctgcagatactcaaaatacagctcttgtattggattgaaaaatagaggcccctggcctttgggcatggttctaccactgaagaaacaacctcaagccaccaaaagccttttgctttctcaataaagagcatacaagatttagtgggctgcaagtcatgaagaagcttgatggcaggaaaaccctccccctaccggatcccctccctgagtggctgggaccttgaggtttgggctgaagactgcctaccaactacagcagagagaaagcgtgacagcctgcaacggctcccgcaaagtctctagcaccattatcacaccagcaccataatggcaataaaaagttatttctattttaa

SEQ ID NO: 248746 - DNA, 719 bp, Homo sapiens
agtttaagcaggtgaggccatcttgaaggtttgccccagcagcctgggtgaatggagggagtcttgggagaatagataagatgcagtcaccacttttaactcttgcccttaaaaaatacttttacaacacggcttataatggaaagagcattaaaatggacattagaaaactgccagtgattctaaccttagagagtttgtacagactccgtaagatttgtttttttagtgataaagggaaattgtactggtcattccttaataacacatccagatttctgttatcacttaccaaaaatttatgaatttgagaattgcttacacagtatcaggtgctgggtactgggaggtacaaaacaaagtatagtcaggtaagggctaactttattactaatttggctcattataaaaacaacgggaaaacatgaagagagggctttattaaggagttaagtcagcataatggaccacttaatatataataaccacttaagagaaaaagaaaaattaggaagtccacataaggtggcgttttataaaggcaacatgctgttgttaagggcacttgggccattggtgttttgtgacagctgggctcaggcatctcaacaagcagcggtgtgcctgctgaccaacagggcctgccacggccagtgaaacacagctattagagctctctcaatccatttctgctcagaaatgtagagatggcaggggaa

SEQ ID NO: 248747 - DNA, 227 bp, Homo sapiens
atatatatatatatatatatatatatatgtacactttataggtatttttatctccatgaaaaattatgtgtagaattctaattgatttttaattcagagttatctttttgatatttaaaaaaacgtaaaaattcaaagaatataatgaatatgtggcttaactccatgtcaatagagtcatcagtcctgaggcacaatactaatcttcttaattaaagcaaaagtta

SEQ ID NO: 248748 - DNA, 677 bp, Homo sapiens
attgtaattcccaatgttgggggagggacctagtgggaggtgattggattgtgggggtggaatttcccatgctgttctcgtgatagtgagtgagttctcacaagatctgatggtttgaaagtgtatgacacttcctccctcacactttctctcctgccaccacatgaagaaggtgcttgtttccccttcaccttccgccatgactgtaagtttcctgaggcctctcagccatgcttcatgttaagcccgtggaactgtgagtcaattaaacctcttttctttataaattacccagtctcaggtagttctttacagcagtgtgagaacagattaatacaggttcatttctagggctcaaggcagctttcatggctctcctttgttttttctgcatgttcgtttgttcacctgtgcatccatcatccatcacccatctaccttttgttaaatgcctactgtgttcttaattttaaaacttatgcttcgtgtttcctctgaatcataataaaatccaaaataaaatccagtgttgtgtgctggtctttagaggctacaataaatgaagacactgggatcctttactaagattttatttcttttttaaaaaaatgttttcaacttttattttagattcagtgggtacatgtgcaggtttgttacctaggtatattgcatga

SEQ ID NO: 248749 - DNA, 670 bp, Homo sapiens
aagcaaacattttattggacactaaggtgcaccaggctctgtgctaggcttaggggaactaatacaacagttaatatccttatagtctaatcctggctattaactttcttaacatcaagagtgaagaaataatattattatatactattatattaaataataatattaatacatagctaattaattcaagccagatccattgctgcatgtagacactatggaggcagtaaccaatttgcctaaagatgatgcattcacaaatttcacaattttaaaggttacttaaaagggtatcacatagctcttaaatatagcttaaaatgcacagtttaagtctaataagaaaattgcagtttaaaacttcactgacatgctatttcttacctatcagattagaaaaatccattttccaggttatgtggaaacagaccgtctcaaaattttctggttgaagtgtaaattggtacaactcctatgaagaatgtggtaatatccatccaaatttcaaataacatcaccctttgacccagcaatcctacgtgcatttgtgcaaaatgacaatgtactagtttattttgggagtattttttataatagcaaaagattaggaacaactcaaatatccaccaacagagacctacttaaatatggtacattgatctagtagtgt

SEQ ID NO: 248750 - DNA, 327 bp, Homo sapiens
gctcgggtccccctccatactgtggaagctctgttctttcactcttcacgatacatcttgctgctgctcactctgggcctgtgccacatttaagagctgtaacactcaaggcgaaggtccacggctccgttctttaagtcagcgagaccgcaaacccactggaaggaaccaactctggacacaccttgagtacacgaatttgaaattacactgaggtgatcatgccactgcactgtagcttgggtgacagagacaccatgtctcaaaaatctacccagagttgggaaccactgatctaaaccattaaaatttttatttctgtcacta

SEQ ID NO: 248751 - DNA, 449 bp, Homo sapiens
gggtgagggaggggcttgggggagagaggagtgttaggggaatgggcacatttctccattgctgggagcagtttctatggtaccagtagtcctgaaggtagcatgctaagactgttcagaagcctgaagaatttggaagctctttgacccagcacagttttattcctaagactgtgtccaaagaaaataatcatgggactccctggaagattttgtttcaaacactatttgccattagccaaaaacaaaacaaaaggctgaagatgacttaagtgtccaggcttggagggttgggtacaatttatggtacagctctgtggggcactatacatggctcattggagatccttgggtacgtatatattatgcagccattaaaatgatgctgctggagattacttactgacacggcacttactaaaccatgcctagctttattacatctttat

SEQ ID NO: 248752 - DNA, 517 bp, Homo sapiens
gcccggctcccctttgtaaactttcttcttcttttggattcttggccctgtaaattctcattccctcagtggctttctgatgtctttgaacagatgtttattttatattttgtccattttgtgtgattcttatcagtgccaggattactccaaaataacctagccagctattgccaaagatagaactctatctaataatatctaagtaaaagtaaaaaagattagtcctagagaaaatatatagaccaaagggaaagtaatcgtaaactatgaggaagaattggtcatagagtatctgatcataaggttttaatatttggtataactaaaccataaatttgtctgtgttgtattgggcaatgctttgttattaaattatagtttctattcatcacatcactacattacacttaaataaatgatattatttcatatatttggtcttgaaggggaagatggctatctcttaagacaaaacatggcaactgaattcctaaataaattattaaacagattg

SEQ ID NO: 248753 - DNA, 532 bp, Homo sapiens
ctgtgggggttgagtctctccatctgtaatgctctttgtctaattggctcacactttctttctgctgaataatgtcacttctgtgcttgggagtggtccctggggtagaggatgccagttgccaagcaaaacctatccccctttcttcttgactgacagacacttatattattggggcagctaaagcactacatttcccaagtttacagacatctgtggccaagcgggtgtaagcagaagactttaggggtagaggatgcctcagagaaagttattcaaaagggggataattaaaacaggaggtgaactttcttctttgcccttcccccatggaatgtggccatgatggttggagctccagcagccatcttgggaccaatgtgaggatggacattacaagctaagagggctgagcagaaagaaagaagacatcagactctgatgagtgactgtggagctgccttgccagtcctagactgcccaaggccgtatttctctcaggtgaaaataaacctgtatcctctttaactga

SEQ ID NO: 248754 - DNA, 210 bp, Homo sapiens
gtttcaaaaaaaaaaaaaaaaaaagaaaagaaaagaaaaaagaaaaaaattagtttcaataggatatgctgtcttttaaaaattacattcagcaacttgttgctgataattaaaattcgctgagatttatttctgtatagagtgtgcattctagaaacttactaaaaatattatgtatgcacaaaatacataaaagaattgcacaatgaa

SEQ ID NO: 248755 - DNA, 528 bp, Homo sapiens
gagccagatggcggctctttaaacaaactcgttcttctctgtgcccctgtgacctcagctattaagcgggctgatgatccatcctgttcacctcagaagactgtttcaaggatgagaggtgtcagcatttgaaagccatggccggcacatagtgtgcatcttataaatgctggtgctcactattattattctttgttacgggatcctctactctcccttctgaccttgaactagtatgaattagatttcagtcacttgcagctaagaagtcttgattacgatcatcagtttgacaaggaagttaaaagtcagaggcccaaagccactctatgagaaaatccttacaagtagtttctagattgaccctctaacccttagctttttcttcacccagtatatgcattatctctccaaagagatgataaattccagcatctcactaatattgctttgctctaacatcattcccagcacggagcctagctggagtaggtgcttaataaaaaccatgagttatgtttggaaaaa

SEQ ID NO: 248756 - DNA, 474 bp, Homo sapiens
ggtggcagtacagtaggccttcttcacgggcaacttaagttagtagtctaacttttctttttggacactaaccctttaggctgctgccttaatcactttccgagcagtctagaaataagttcacccccaccatggattagaaccccccactctttttatgcccgcaccccccctgctgctccccgtagctaagctgtcactcctgtcttgttttatgttctgtttgtgtgtattttcttgagcactttcttttgtggtcattttgggtgtgggatacctttacctactgctgttcagaataaaggcagtgagtctcatctttttacctagtcagagagtattttgttgaatcctggagtgcagtgggtgtaatcaaccttgaactactaggctcaagagatcttcctgcctcagcgtcccaagtagctgggagtacaggtgcatgctactatgcctagctaatttaaaaaaaaa

SEQ ID NO: 248757 - DNA, 672 bp, Homo sapiens
gggtcatgtacccctgtcgcctatcccagactctgggttaagaaggcttggactagatacaatcaaaacccatccaagtcctacaggctcagatgcaggctcagggcgagagctcgtgtgagaggcagggaacgccctggtatcctgtgacactgaagccagggcaagctcagggtggagagtacagatgtgtggcttggtgcttaaggccaccaatggtcagcctggtgaaggccactgggccccagcctttcttacctcattggccatccctacttcaaggaatgtggccttaaatcctcttttcagcagcctttcggggattttgatgagtgaagcgtatgatgatcttgtccacactgaaacagcctcctagggaacacggtctcctgtctgcgtcccacctcccccaaccacttctaccagcctccaagccccgcggtccccatgcggacctcagcgccagctgaggttcaaggtccaggttttcaaactgggttccggagcaccctagaggccccaagaaggtagggccacgtgggagatggagcagggagggttctgagggacccctccttcctgcggaccagatcagtgttgtcacttctgttttgtggcttacaattccatgttaagattttggtgtgcattttgaaagaaagtcattgtttt

SEQ ID NO: 248758 - DNA, 489 bp, Homo sapiens
gcagtttcagcaatattatcaacaaactcacaatcatataagatttccatttctactatcataactaatccttacaagaaccctgtaagtcatacagattagtcaattatcacatctagctgataaaggaacaaaaaaaaaatgtgtccattcatagccaagactacaaatcagactatctgactcatagtctcatgtttccttacaccttcactaataatctattatttaagttagatttttttttctttaaatagtgagctaagtatttgaaaaatttgtgaactttactatctatacaaaaattagtcaaagtatatgttactgaaaataaattagaagtatcatctttatatttatttaaatccccaaacatactacaaaatagtcgaaatctcctctcattgtttattgtacccttcataagagttagaaattttcacagaataatggtatgtctacaaaagtgttaagaaaaaaggttccatg

SEQ ID NO: 248759 - DNA, 457 bp, Homo sapiens
ggaccctctggatgcaagtgtcctctgattattttcattaaaatcacttaaacaatggcatacagaaaacatgaatcttttatacttcctaatctgagttttattagttccaagttattttggtactataacatatacgattattttaaagatgagctgcttacgactaatttctccttttcttttctctttttttttttttttttttttttttttgagatggagtctcgctctctcacccaggttggagtgcaatggcgtgatctcagctcactgcaacctctgcctcctgggttcaagtgattcttctgcctcagcctcgtgagtagctgggattacaggcacccgccatcatgcccagctaatttgtgaacttttgtagagaccggttttcaccacgttggccaggctggtctcaaactcctgacctcaggtgatccacccaccttggcctccc

SEQ ID NO: 248760 - DNA, 656 bp, Homo sapiens
aacccagtttcttaaaaaagaagggggaaggggcgggcatggtggctcacacctataatcccagcactttatgaggccaaggcaggagaatcgcttgaggccaggagtttgagaccagcctaggcaacatagtgagattctgtctctacaaaacaaacaaacagtatcaaatgtaaatcaccacattaatacaaaatgtaaaaataaattaatgtaaacacaaatgattattttcattaaaatcacttaaacaatggcatacagaaaacatgaatcttttatacttcctaatctgagttttattagttccaagttattttggtactataacatatacgattattttaaagatgagctgcttacgactaatttctccttttcttttctctttttttttttttttttttttttttttgagatggagtctcgctctctcacccaggttggagtgcaatggcgtgatctcagctcactgcaacctctgcctcctgggttcaagtgattcttctgcctcagcctcgtgagtagctgggattacaggcacccgccatcatgcccagctaatttgtgaacttttgtagagaccggttttcaccacgttggccaggctggtctcaaactcctgacctcaggtgatccacccaccttggcctccc

SEQ ID NO: 248761 - DNA, 394 bp, Homo sapiens
cccttacataaaatggcatggtgtttggatataatctatgcacatcctctcatatactttaaatcgtctccagattaattatataacatagtgtaaatagttgttatagtgtatttttaaatgtctttagtttttccaaatattttcaatctgtggttggttgaatcaatggatacagaactgggctgactacacactacagaacaaaagactatcaataaaacagaaggaaaatgaaacgttcctccatcagacaacctatgtaaaaactaagaaaataatctgctcccaaatcagaacactgtttctcattgatatttcttttaaactcatactatttttaggttgtgcattccccaaataaagcaatttaagttcagtgttttttcaaata

SEQ ID NO: 248762 - DNA, 214 bp, Homo sapiens
ttgcattcaaagcttctgagctcctaagatgtttttcacatctgttgggggtctgtctatccatctacttctcaagccccacctcctgcttcccgctattatccataatgagaaacttttccttcccagcctggaaggtccagctgtatcttcttgaaattgggagggaggggggcggatctcagagaagaaagaaagggaaaaaacccacatt

SEQ ID NO: 248763 - DNA, 685 bp, Homo sapiens
aggggaaggaataaaaactagttcgcgttccacaataatacgtttcaaagagacttataagaatttgttcactcttttggccaaaactggagaaaagggaggataaaattgtaaatttctaatatccgatgttagacctcagtaacctttttttttttttaatagaagaaagggtgagggggaaacaatctgcccacgatacgcatgggaagcaagcgctaggtgagaccggcaggtcctgggagggcctgggccagccctgtccccggcgcccccgctgcggcctggtgtggcccgtgggcccggcgtcccaggcggcggaactctgcctcggcggcgcctggggactcgctctgcgcggaggtcaggccgagaaacgcggccaaggctcccgagggctccaccctcccctctttcactccctccccttggcggtcccctgagggaaacaggcggggcgcatcgctcagagacaagctggggggagttgagtcctcaacgaaaaaagctccgccgcctagagtggcggccgcgggttattaataaactccgcttctgcccagacgccgctaccgcggccggcccataaaatcggcaaggcctgcggcggaggctgagcagcgggagccggagcccgggcccaagcgggcccgcgccgccgcgctgagggcggcggccaggcgga

SEQ ID NO: 248764 - DNA, 345 bp, Homo sapiens
ctccacatctatcttgttgccctcatccctcggtccagaacggctcactactagtccagccaatgaaaagcagtgcattgcactccagcctgggtgacaagagcgaaactccatttaaaaaaaaaaaggcgttgctttcccatcccaggttgcattccttctgctatctcacagtggtcacactggctactgtgtacacagctcagaagccacacactttctactttgtcttacatcccactgccagaactgagtcacgtggcaatacctggctgcaagggtgactggaaaatgaagtctatatagacagctaagtgtcttggccaatactctgttgctatttat

SEQ ID NO: 248765 - DNA, 311 bp, Homo sapiens
gacctcgtaatccgcccgcctcggcctcccaaagtgctgggattacaggcatgagacaccgcgcccagcctatctttgtttttaaaagggaaaataatcacgggtacctctccagaaagctctccttaggatccacattatagaacctcaccttatggctataaacacatcttttaggactttaatataatgattaaattaagataagacttaatcatcatgtagcagtggataattttctagaaatttaataggaaagttattgaaaggaaaaggtgtctttactttttgggattttttttttttttttt

SEQ ID NO: 248766 - DNA, 767 bp, Homo sapiens
agttaacctccatccctcctctcccctccctggaggtcaagaggtggagctgaaagttccacccctctaatctcatgttcagctcccctggcaaccacaccccaatccttaggggctttccaaaagttacctcattaacataaacccaggtgtggtcgaaaaggggttgttatgaataacagaaagtgctcttttcacttgttatgacttaagatgttttagggttttaggagctctggccaggagcagggaattaagactgaaatgtatatttcttatatcacgggagaaacttggtgatggcagaagaggggacaaatttaaatgtgaggatgttgttcaagagcaggaatattcaaagagaaaggcggtcatgtagagagactcagaaaggaagtgatgcacatgggaagaggatgtaagtacctagaggacaaaggaagggaaatgaaaccgtgaaaaggggtaaaagacaacaaaaataaccttgtcattaacagctcactttgattgaacatctactctgtggcggttggtttaatgctcatgacagccattggagattaatattacttatatgcctattttgcagataaggtaactgaaatccagagataccacaaatggagtttacatagggtcagatgaataaggaaaaacccagatgttctaccccagagcctgcattcctaaccctgtgctatccaggcaatctaaaaaaataaaaacagaaaaatgaaacaaaaatgaggaaatatttgcagaca

SEQ ID NO: 248767 - DNA, 442 bp, Homo sapiens
gggtcgacgacttacctatatggactacatcaatgagcttccttcccctttgaggttatgaaatttattttcctactcccgtctcatgggttgtgcccttagctgactctgtcccttgactgaaggtcactgcttctctaaatgtggtcctctcggccgggtgcggtggctcatgcctgtaatcccagtactttgggaggctgaggccggcggatcacctgaggtcgggagtttgagaccagcctgaccaaaatggcgaaaccatgtctctactaaaaatacaaaattagctgggcatggtggtgcatgcctgtagttccagctgctcgggaggctgaggcaggagaattgcttgaacccgggaggcggaggttatggtgagcagagatcacgccattgcactccagcctgggtgacaagagcgaaaccctgtctccaaaaa

SEQ ID NO: 248768 - DNA, 866 bp, Homo sapiens
aaaatctctcagatggagcctgaaactccacaatttaacaagcgccccaggtgatttgtgcccaacaaagataaaaaatgaatgggttgaaactcaagcaaaagacaatgaagttggagcagccagctggactgctgtttgagtaatccagttgattacaacacacagactacaatggttaccatggagattcaagggcaagggtaaacctgagaactatttcaaaggaaacatcataaagaggtaaaagactggatttcagaaatggaagagagaaaagagaccaggagaactaggattgctgcctcctgagagtcagttagtgaccaagagtactcattaggcctctagatatcagggatattcttggcagtgagagcagagagaacaaagctaaaggtgctgaagtaaggtgacagcgctttaaagaagaagaaaaaaaaaaaggaaaaagaaagatagctaccaagaaaaaaagtgacctggtctacaaagatgaagaaactgtcgattagggtggaataaacttatcatgcaagaagttggcatagatactcgtctcaccttaaaggtgctttaaaaataaagtggggtcaggcaaggcagataggtggcatagcagttaagctcaagcagagataatgaacagaaataccagaggaattaggattaaaagcaataaagtcttgaatattggcgagaaaagatgaagaagagagtgtataaggaggagttctcactccaaacaacagtggcatgcgaaacccaagagatcagaccttgaaagctatgcactaataggttatttagttttcaaaatcttaaattaataacaattggcaataaagctcattaaaattcctttt

SEQ ID NO: 248769 - DNA, 375 bp, Homo sapiens
aaacatgggggtagttctgagttgttagaaatgtttctgaatcaagtttgtttgaagacacgtgtgcctttgtacccattataagatggtcataagacccaagaactgataagctttggttttttttttgttttgttttgttttttgcttcatttacccattcatgcctagggttccattattggaaccctaagcttgtgggagttatttctatcctactgctcaaggtcatcaccaagatctgatttttcataaaaaacatttgtgaccttcggcataaatgggttaaggtgccatccctgaaactgcaatgcagatatgttcagataacttttattttttaattaaaaataaatctttcaaaaggattgagtg

SEQ ID NO: 248770 - DNA, 718 bp, Homo sapiens
ctgtccccagatgcggacctgtccgtcaccgaagccagcagctccgacagccgaggagagagggccgagctctatgcacaggtggaggagggtctcctgggaggagaagccagctatctgggccctcccctcaccccagagaaggacgacgccctgcatcaggccaccgcggtggccaacctgcgcgcggcgctcatgagtaagaacagcctgctgtcgctgaaggccgacgtgctgggggatgacggctccctgctgttcgagtacctgcccagaggggcccactcgctgtcccgtaagtgcaggccctgggggccgcttggctttggtgtggttttgaaggctgagggttgcaggtcccgggccaagatgagatgaggctgagggtctgtccctgctgctcggccgcctgctgacctccctgttgcgggaggtgagggtgcggcgtcacagcctggactggcctctcaggtgcacggggggctggctttagagtgaggagggaacggacgcggttgtgagcgcggcgggcaggggagcagccgagtgcttgctggaatgtttctcacaggagtcattggctgaatgcgagctcgtccgggtcgcgcaggggccgggggtctttgtgctccagagacgggctcgggcgccccctgccggcccctctgtcgccttcgtgctgagactcgtttcgcgcaagggagatgggggcggccgc

SEQ ID NO: 248771 - DNA, 442 bp, Homo sapiens
ctgtccccagatgcggacctgtccgtcaccgaagccagcagctccgacagccgaggagagagggccgagctctatgcacaggtggaggagggtctcctgggaggagaagccagctatctgggccctcccctcaccccagagaaggacgacgccctgcatcaggccaccgcggtggccaacctgcgcgcggcgctcatgagtaagaacagcctgctgtcgctgaaggccgacgtgctgggggatgacggctccctgctgttcgagtacctgcccagaggggcccactcgctgtcccgagtcattggctgaatgcgagctcgtccgggtcgcgcaggggccgggggtctttgtgctccagagacgggctcgggcgccccctgccggcccctctgtcgccttcgtgctgagactcgtttcgcgcaagggagatgggggcggccgc

SEQ ID NO: 248772 - DNA, 895 bp, Homo sapiens
atttagaagacaatgagagggtaaaactgattactaagtttggaaacgcttggtgatacaggataaaaataaatacaatacactcaaatataggatgatagttcatgtaacaaacagagatatcatttgtcagattgcttacgcctgtatagagggggtatgatactctggccagcatatgcacacgaactgccaaaatatggtgtgaaggttggcttgacaaattatgctgcagcatattgtactggcctgctgctggcccgcaggcttctcaataggtttggcatggacaagatctatgaaggccaagtggaggtgactggtgatgaatacaatgtggaaagcattgatggtcagccaggtgccttcacctgctatttggatgcaggccttgccagaactaccactggcaataaagtttttggtgccctgaagggagctgtggatggaggcttgtctatccctcacagtaccaaacgattccctggttatgattctgaaagcaaggaatttaatgcagaagtacatcggaagcacatcatgggccagaatgttgcagattacatgcgctacttaatggaagaagatgaagatgcttacaagaaacagttctctcaatacataaagaacagcgtaactccagacatgatggaggagatgtattaagaaagctcatgctgctatacgagagaatccagtctatgaaaagaagcccaagaaagaagttaaaaagaagaggtggcaccgtcccaaaatgtcccttgctcagaagaaagatcgggtagctcaagaagaaggcaagcttcctcagagctcaggagtgggctgctgagagctaaaccaaacaattttctatgaggatttttcagataaagacaataaacttgtggacagc

SEQ ID NO: 248773 - DNA, 529 bp, Homo sapiens
gggaatttcacattggaaatggtcaggtccgacgcaatgcaggcggtggtgtttctggcaaaactcctccgacgggtttgcttttgtgcagtcccacagtaaccctcttcgatcgcactgctctgcgccccatcccgctcctcccccaagaaggcccttgctctctgcggggcccacccagcttcccccgccggctggactcgcagagctgcagactttgggcagagctgtgcagatgaggatccctgggtttgttccatgtagttttactgggcggcggcggtactaagagcctgtccctctttaacctacgatgggacttgaagttttcttacgatccgattattctgaaatacagggaatgtgacttgtgggggaccgaaggcttcgtgggtttgtggggttgtctgccaacttggtgctaattgggaataatctgagaagcaagtcgcctactcacctcccaccctatgtccctcctcccgcagcctttttccccagcctagtgcctccacagggccactttcaa

SEQ ID NO: 248774 - DNA, 377 bp, Homo sapiens
tcctttctccccctcccaccttacctcttatttctctttcccaagaattgcgatggaaacctacatccgccagaggcagctcatcatgtcgcctttgataacatcacacgtgattggggagaatgagccactcacttcagtcttgaataaagtgattgcagcaaaggaagtgaatcacaaagggcaaggcctttgggtatccttgaagctcttgcccggtgacctcacccaggttcagaagaatttttcacacttggttgatagatcaacagcaatagcccggaagtatgtagtcacggaagtatgtagtcacggaagtatgtagtccggaagtatgtagtccggaagtatgtagtccggaagtatgtagtcacgga

SEQ ID NO: 248775 - DNA, 640 bp, Homo sapiens
tcctttctccccctcccaccttacctcttatttctctttcccaagaattgcgatggaaacctacatccgccagaggcagctcatcatgtcgcctttgataacatcacacgtgattggggagaatgagccactcacttcagtcttgaataaagtgattgcagcaaaggaagtgaatcacaaagggcaaggcctttgggtatccttgaagctcttgcccggtgacctcacccaggttcagaagaatttttcacacttggttgatagatcaacagcaatagcccggaagatgggctttcctgaaatcatactgccaggagatgttcggaatgacatttatgtcaccctgatccacggtgagtttgacaaagggaagaagaagacgccaaagaatgtggaggtgacgatgtctgtgcacgatgaggagggcaagctcttggagaaagcaattcaccctggtgctggatatgaaggcatttcagaatacaaatcagtagtctattaccaagtcaagcagccctgttggtatgagactgtcaaggtatccattgctatagaagaagtcacacgctgtcatataagatttaccttccgacacaggtcatctcaggaaaccagagataaatcggagcgagcatttggg

SEQ ID NO: 248776 - DNA, 680 bp, Homo sapiens
tcctttctccccctcccaccttacctcttatttctctttcccaagaattgcgatggaaacctacatccgccagaggcagctcatcatgtcgcctttgataacatcacacgtgattggggagaatgagccactcacttcagtcttgaataaagtgattgcagcaaaggaagtgaatcacaaagggcaaggcctttgggtatccttgaagctcttgcccggtgacctcacccaggttcagaagaatttttcacacttggttgatagatcaacagcaatagcccggaagatgggctttcctgaaatcatactgccaggagatgttcggaatgacatttatgtcaccctgatccacggtgagtttgacaaagggaagaagaagacgccaaagaatgtggaggtgacgatgtctgtgcacgatgaggagggcaagctcttggaggtgcgcggcatggcccagaaatcctgctaccatcgcatccgtctttacaatcacgatagaattttggccgtatttcaattcttctttgcatcaggatgggtttgatttttcctgagaaaagaaatataaagcctgttaaatttgtgattagcagtgagcagtttcactaaggaagctatctagactcttctagactcttatttttatatttctcctgtgctaagaaatagctccagccact

SEQ ID NO: 248777 - DNA, 320 bp, Homo sapiens
cagggtgacagagggagagattagagtgatgcagctgcaagccagggagcacgaaggaaggaccccccccaaccgcccacagcattcagagggagtgtggccctgctgacaccttgattttggacttccagcctcccagccaagaagtttctgctgtcctaagcctcccggtttgtggtcctttgtcaagggcagccctaggacgtcagtgtcattcccatttccttctagtgactgcaagagcgatcagaagcagccactttagtaactccagctgcagagacccagagatgaaaagcttaaaataaaagcttctatta

SEQ ID NO: 248778 - DNA, 929 bp, Homo sapiens
gttcttagaattgccttatttcagaactgcagggctgaagatggatttgggctgcgtgtctgttggagaagactcatgagaagtttttgtagatcagcaaaattctggggcagtaatgacctcaggacttggggaagcagattcctgtggaaagattgtacctaatacagcagatgacttcatgacaatattgagtgtgcaaatctaggatcatgatctgctgtcgctagcagaagcagcagtcatctcaggggaggtgttgcctgagatgagtgtttccttgttgacactgtgcttagctacctgggcaactaagcactagagacaggattattccctgtttggatttctagcataacagttccatcaaaaacagaagaaactgcaaaagagcaagtacctttgcagggaacattcacaaccccagtgactttcctacccttcagaaatagctgtatttccaaactgttaaaatttttttctaaggaagaaagaaaaggtttgtagaattgagcatatgtatttttaaaagaaactttattgaaaaaaataaaattaaaggcaaacaacctgcaaaaaggttacatatagtacagatgaaagtttaatagcttttctcagttaaagcttttataaatcaataaaagaatgataaatagccctaatggaaaacaaaaacaggtaatttacaaaagaaaaacttaaatggtcaataaactttttaaaaaatttcatactatcaaaagaattttgatacagacgcacacacatgcatgcacacacacaccatcttttacctatacatttgaaaaagattagacatctttgtccttgatgagattgggcaaaaattggtcctgtatttcagttttgatgctaatggagatataaattcttcaggatagaaatagatagtctgaataaaaaca

SEQ ID NO: 248779 - DNA, 384 bp, Homo sapiens
aatctgggaatccaagggtcgtgctacatctagtcctctttgataaattctgccttcctgttcacatttttcgagaaaccattttgaattcccaaacagcaaaggaaatgctgcaggttcctggagggacctggtgatctggggcagagcacacggagtcgagattgctgcggggttcacgagcctcccctcctgggaccaggggcacctgggcagggtagtctgcaccacgcaggaaagcccagtacacgcagctgctcaacgctgcagacgccatagcgcagggctgacaaggcctccctctttatctgccctggaccacaagtggaaaatatcaagacaaagcaaaagccagtatcccttaagaactttccaattgttctt

SEQ ID NO: 248780 - DNA, 644 bp, Homo sapiens
taccttgaaaacaaaaatcaactttattgaggtctattttacaaaccatagaatatgcttaagtgtacagcttggtgagttttgacaaacatgtatatccatgaaaccaacaccacagtcaaaatacagcagttttccatcacgtatctccgcctactgtgcccgtttgcaaccagctctcttctctccgagccttgccttaggtaccactgctctgctctctgtccatatagattagttctgccttttcttgaattgcatactaatgaaatcaaattgcatgtccttctttgggtcttacttctttttgctcatcacaacatccttgagatacacagaaactgttttatgtacaagtagttccttcctctttattgctaagtaatactgtattatatagaaatactacagtttgtgcattcaactgttaatgggcatttgggttgtttctagtttggggctattatggataaagttgctataaacatttttgcaaatatgctttgttttgggacatgtgtttacatttctcctagctggatacctaggagtggaatttctgaattatagggtagatatatgtttaactttataagaaattgccaagcctgggcaacacaacatgaccccatctctacccaaaa

SEQ ID NO: 248781 - DNA, 646 bp, Homo sapiens
gggataggaactatactggaatagatttgatgagtgaatgggagatgaaaaactgaaggcagaaagtacaggtacctcttttgagaagtttggctgtgaagaagtttgcagagatgactgggtagctgggggaacaaacccaaattcagtgttagactttaataggcatactatttaaagcttcatctatcactagttcttttaacctttatttttttgagaaattctaagcatatgcaaaagtagaaaatgaccaaccctgccccatccacaatcctgtctacctcttcctttgcatcattttgaagcaaatcccatataatttcagttataaatatttcattatgtttccaaaagatgaacattaaaaaatgtaagcacaatgccattataacataaaaaattaatgataatttcttattaataaatatccgacttgtgttcacattttcacttttctcaaaaattgtcttagaattttaaaaacagattttaaataaggtccacaaattgcatatgggtgctatcttatttatttatttatttatttatttattgagacagagtctcgctctgtcacccaggctggagtgcagtggcacgatctcagctcactgcagcctcttcctcctgggttcaaacaatt

SEQ ID NO: 248782 - DNA, 534 bp, Homo sapiens
acagggaatgtctgtgtaaactcatccctgggaagacagagaagctgctctgacacctcaggggaacagaatggcaggggacagaccataagactgtgcaacatttctccttttccttgccttttcgccctctttcagaggccccacttctacaccccgttttcttccggagcacacaaatcccagcccttgggcgtcccctgttctcaggctgccatcgtgaggaaaatacctgataaactaaaccacacaaggatgaagagatgccctccagaaggtgcatacttttaaaaagaggaccccctagagagagcaatgtttaaaggaacccatctgatacagtagaatttcagaacctcaaggcaaccagagtttcccagtaccacttaaacatcacaacacacataaccttctgctctgctaggagtttatcaactgattagccgtaactcactttgtgtgcagatcttggaagaatgctaataataataactgatgtttactaaaatccaggtgttgtgtaaaaaaaattat

SEQ ID NO: 248783 - DNA, 816 bp, Homo sapiens
tacccattgggttagagaagaaaacaatttcaacctacatattattgagataaaaaggcagagaaagaagaacaagaccaggctcaaaatgaccttacagttgggtagttttgggtaacgcaatccttggtgaacctcagtttcctcatctttgaaatgggagtgtctatcttagcacagtgctgaacataggaaatattcaataccttgggtatctaccccagacgttatttttttcctagactcatacaacttacccttaatgtgcatgtgatttcttgttaatcagatattttgagctcaataatgtaaaactagggactattacagtcaaaatgattcatcctgaagccttctagttattttatttgtgactttgaatatacattttcatagaatacccttggtaaaactaaatttagaaaaacgaagccccacatttacttaataataccaaattaccttcttggattcaaattttacaaatgttggattgatagaattctgaagataatttggcagcagatatttctgtatcaatatgttgaaccatctgctcttttgaaataatctaatgacacagacaaaacattaaaatgtgtatatttgttatttggttggtaaataattgaaggctcattaatttttatgagattcaaaaatctctggtagactttctgattttagtataatttttcaatatgtttactttatggtaaaatgaattaatgttaagtgacctaatttattttgtatacattatcttcaacggaaacattattccttaataaactgctggaatagactgaccttttt

SEQ ID NO: 248784 - DNA, 670 bp, Homo sapiens
  misc_feature (670)..(670): n is a, c, g, or t
gttgtctttcactccagccccttctgctcaacatgcatcattctttgtttccactctgcagtcctttcatgctgcttacttaggtgttgtaaattttgaatgactctaatgtctacagcatttcctgaattttacatctggacagtattgaagggcagcggggcctcccaaagagcctgttttgcttgactaagttcttttgctgtattgatttagtataagaaattctgggataatgttcaatttcttcatggttcttaaaaatttcaggcatcaacaaaggctgtgtattccaggcaagagatacaatatgaagaattttcttaggattggttcccagaatgtgatgtattttcttctgtgggtgttcaactcatttgctcttacaactgaaaaaaacagcagtaaaagccaaattgaaccagtccagctgttatactattacttttaaagaatgcctcaaattcttagtgtttacttctagtttagttcgtaccggatttctcttcacatgtcaagctatgaaaaaacaagctgacaaatcaaaaggttgacttcccaatgtcttctgattatatttgactatttatctggacacaagattttgtttatagtagtccttggctttcctctttgtatttacactatggtggctctctctttttggttn

SEQ ID NO: 248785 - DNA, 258 bp, Homo sapiens
ctatggtgaatacaagacttagagaaatgaagtaacttgcctgaagtcacacatgggagctaggggctagcatttcaagccagatttgcctggttccaggattcatgctttgtggcaagagccttgttggaagcccgggtccttctgaattcacggtccattgtgctctgtcttcagtcaggccagattttaaacaggaatgaagaattagcaataatgtttccttatgcaagtcaatgaacttcttcactttagttt

SEQ ID NO: 248786 - DNA, 278 bp, Homo sapiens
ttatataattcctaaataatgttcaattaaaatgaaattataaaatccataaaactcaggggttctacactcacaaaggaatagaaataaaacaagggaaatatttaaaagatataagatctatcaaagttaataacattattgtgatattatactataatttgcaaatgtaaccatgaggaaaaactgggcgatatgggccaggctctttctgttttatttcctacaactgcttgtgaatctataattatttcaataaaattttcaattaaatagcc

SEQ ID NO: 248787 - DNA, 396 bp, Homo sapiens
gtaccatcgaacacttagcaagtactctcttaccttactcaactataaacatattttttacattagctattattgtgtatcattcatgttagaatctcagtgttagctgggtgcggtggctcatgcctgtaattccagcactttgggaggctgaggtgggaggatcacttgagtccaggaacttgagaccagcttgggcaacatagtgagatcccatctctaccaaaaagaaaaaaaattagccaggcatggtggcattcctctagtcctacctactcaggaggctgagatgggatgattgttttagcctagcagctcgaggcttgagtgagcccagattgtgccattgtactccatcctggttgacagagcaccctgtctcaaggaaaaaaaaaa

SEQ ID NO: 248788 - DNA, 611 bp, Homo sapiens
gctccataagcgtgtatcctgaggcagtagaatgtgtaaacatgtgaaatagagagaagaagcagttaattggtagtggcaggagaagtagagttaggatgggagaggtgttgaaaccctagaatagtggagcattaaggtggagaaccatcccactgaacacctggaaatattgatttgggagctgctctgacttctgaagaagcgtgtggttttgaagcctgctgaggcattttcctcttaacttctaggtatattcttgcagtattccctgtcatttcaggcaaccttaacacgtatttgtttcttttcttttcagacagattcttgctctgttgcccagagtggagtgcagtggtgcagtcttggtctgcagcttcaacctcttgggcccgggtgatcctgccatctcagcctcctgagtggctgaaccgcacgtgcatgtcaccatgcttacctaattttttttttttttttaagagatgaagtctcgctatgttgcccaggctggtcttgagctcttgggcttaagcggtccttctgccttgggctccttttgttgggattacatgtgtgagccaccttgaccagctgcatttgtttgtcatgtc

SEQ ID NO: 248789 - DNA, 783 bp, Homo sapiens
gagaatcgcttgaacctgggaggcagaggttgcagtgagccaggattatgccactgcactccagcctgggtgacggagcaagactccaagacttcatctcaaaaaaacaaaaaaagacaacaacaaaaaaaccagttactcaacatagtatcatagttgttacattaagtaacatgcagtagcaaagtaagcagtatcacagagtcatatatgacaagtgttttgagtccataacaagtcctcgttcttgtcctcgcagacttgttgatcccaggcaaggcacttttcctttctgggtcttttatcagtacgacttttgattcagcagcagtagtcttgtttagggggcaggggcagaggttaagggggacagggaagtatataaaggacttttattcttatgaatccaaacagagggcagagttgtctgtgctttgttttggtgccatggatgtttaaaaggataccattgtcttctgttcatttaagctacccattttatcttttctctgttacccagaatatcagtcctgtttaacaaatatgtaatgattcaaaattcatttgcaggtttttaaactttgacagtggtctcctctagcagagatttcagatactatgtattcagagacagaaacatcattctgtgcttatctcagtgaaagaaacccaggaaaggaatcccagcccctcctacatcctctccaagctacaggcatgtggctcatccaggaggggagaagggagcagagaagccaccctgggtgtcttctcacccatact

SEQ ID NO: 248790 - DNA, 423 bp, Homo sapiens
tctgattaaaggaggaagagttaggggagtgaatcttctgtctgccagctctgtcccctttctactcttggagttagcaccttgtctgtgtggtacacaagtggaaaagaggatacactcaacactaaaagttcttgaatgtggataccaagtctaaagcagataggtacctgcttgccaagtgtggtaagttctgggatgggagtcagaaaacttaggtctgccactgacctgctgtgtggccttgagcaagattgtcagcatccctagactcagttttctcatctctagaataaagggattgaataataaagtaatatttaaggattcttttcattctaaatattgcaagcagaatttatattttttaaaaaaagacttttattcttacttataagcataatattcttgttttaaataaaa

SEQ ID NO: 248791 - DNA, 498 bp, Homo sapiens
catacctactgctttaaggtactaaatctaatgcaaaaggctgttagtcaactagtttagcttgtcgaacaggtaaatttgattgacaaaatgcagctcaaattttcttctctaactcagaatatttttgtatacttacagaaataattcacttaacatttaaaaaaataaattatgtatgttagttgccaaactctgtgctacttgtgtcctttaaaagaacactaaagaagaaaatatatcataaatttagtcatagcgatctcgttacaaatcccattttaattaagattttatcgggaataagaaaaaatgatacatttacagacaaattgtacaatttaatataagaaagtatatggtagtaaaatatgctttatactgtaaagaatttttatattgcatgggattgatttgacctgtgaattcaattttgggaagtaataaaaacaaactgtatgtaaataaaggaattgatcagagtccaaaagagatcat

SEQ ID NO: 248792 - DNA, 933 bp, Homo sapiens
tattcatccaagtaactttctgtattgcctttaaagccctgtgcagttgagttacaaagctttgattcttgggtctaaaaaagggacattattatgttaattctcaccttaattctcttgaatagttaaaatcctttgcaacttcaaaaataactgctcaagattcctttcaggaaaagcaatttcagtcaccttgtgctcagtagttaaggtttttgtcttttcatgctggtggcctgggttcaattcctggcttagggaatcagtcttttctgattttatgtgtgtttgactttttgccatttattgcttcctttcctctttgtggacagcttctgatttcgtgtcttgaaattttctttttcctgaactacctttggggagattctacatctcataaaaattgcttgccgtctctttgcccatcgcttgccatctctttggagacacttcatgcatccaaggttaccatcctcttagttaagacttactgatttcatgtagaaggttgcctttagtaaaaaaattcaaaagccagaaatattggccctttgtcttggctaaaagctggtaataaaagatttttaaagaatcttaagatctctatacttaaaagttgacttaattaaagctgatatttggcctatatatgcgtgaatattgttttaaagaccccactctccctctaaagatttctttattgatgaaattctgtcttggatctccgtttttgtctgtgtattatgtgtgttacgtgtgtggtgtaaaagagctgtaattaattgtcctaaatataagcacttaaacatattgtcagaaaaaaatagaaactttaatggatttaggtcatgggactctaatttctttaaaaaagacaatgtaaaagattattggtaaaataaaataaatatattcaaaatttagacatttggt

SEQ ID NO: 248793 - DNA, 415 bp, Homo sapiens
ctgtacttgtcttctaggacattagattttgaatctaaaagcctctttaggatctgaccagggaactcctctttagactggtacatcttgagtgatagggcctctgggtcctccctggggttttgctatttgtgggccacgtgtggagtcaggagtttgaacagaagcaaagatgggatacagaagtcaagactaaggctgggtgtggtgtcccatgcttgtaatcccagcactttgggaggccaagacaggaggatccgttgaggccagggattctcgagatcaacctgggcaacatagtaagatcccatctctacagaattttttttttaaaggagaagtcaaagcttaaaaatgcatgttattcttctgagacaaatgactgatgaaataaacactgcttaactctcactgt

SEQ ID NO: 248794 - DNA, 140 bp, Homo sapiens
agggagaaaatgtttaaatttgtaagaattaaacagattctattttatgattcttttatatgtacaggataaaccagttttaaactcttctttggcaacaaaataaatatccaaataaaatcttaaattttgagccccaa

SEQ ID NO: 248795 - DNA, 341 bp, Homo sapiens
  misc_feature (40)..(41): n is a, c, g, or t
  misc_feature (212)..(212): n is a, c, g, or t
cggccgcgtcgacttttttttttctacaatctagatgganngatgactcagaacatgcgcaattatggaacaattcagagcctcgagtagtcttattttttttctacaatctagatggaaagatgactcagaagcatgcgcaattatggaacaattcagagcctcgagtagtcttattttttttctacaatctagatggaaagatgactcanaagcatgcgcaattatggaacaattcagagcctcgagtagtcttattttttttctacaatctagatggaaagatgactcagaagcatgcgcaattatgtcgaccgccgctaatttagtagtagtagtat

SEQ ID NO: 248796 - DNA, 166 bp, Homo sapiens
ttagagtgcagggctttcaggagagaaattgggaacctggaaatgggccacactcttcagtgaggaagaagcaggcagctctaggcacagccctgcattcctagtggcttccccttcatcaagcttgactccctgctttgatgtctgtcagggaatctacttcagc

SEQ ID NO: 248797 - DNA, 559 bp, Homo sapiens
gacatccccttcattaagatataaaactgcattgctcaagagagcatcagaattactgaaagtgttgtggctatctgccataggtcagagatcatggtgggcagatgttgcaatgaagttgagttccctgatttcagtggaaataatgggtgatggtatggtagagccctggtggtgatgcttagccatcaaaaacatgtttatacaaaattatcattatatgctgctggaataaaggctgccatggtctgaatgtttgtgtctcctcaaaatttaaatgttaaaaccctagcccccaaggtaatggtactaggagtagggcctttggaaggtgagtaggtcatgagggaggagtcctcatgaatgggattgtgcccttataaaacaggcctgagagaggacctctggcttcttctgccatgtgaggacacagaaagaaggagctgtttatgaagcctggccctcaccagacactgaatctcctggcaccttgaccttggacttcccagcccctaaaactatgaaaaataaatatctgttttttataagacaccaagtc

SEQ ID NO: 248798 - DNA, 744 bp, Homo sapiens
atcccttgggctgcaggcattcggtacgagccttattcatggttttcctttctgaggtttcagttacccatggtaactgtggtctcaaaatattaagtggaaacttccagaaagaaacacttcataagttttaaattgcatgctgttctgagtagcatgatgaaatttcgtgctgtcccatctgggatgtgaatcatccctttgttcggtgtatccacgctgtgtatgccacctgcttgttaatcattgagtagccatctctgttatcagacccactgtgatggtatcacagtgcttgtgttcatgtaactcctgttttacttaatggcacaaagcagtgatgctggcatattgttttaattgttctattttattattagttattgttaatttctttttgtgcctcatttataaattaaatatcacaagtatgtatgtataggaaaatacagtatatatagggttcggtactatctgcagttataggtatccattggaggtcttggaatatagctgctgaggataaagggggactattgaaattcatattgcaatcatgtgctaccactctcgtcattcctttaccctggatttttgtttaacatttaggccatttgtttgttatatgttcatttgtattttcggtatgttgttttataaaagtgtctttactttttcatatactgccactgccactaaatggtggtctctaagttcaggaaccttgccttctctcttcttgtg

SEQ ID NO: 248799 - DNA, 198 bp, Homo sapiens
tttcataatattttataacccaaatttatattcaataaaaatacactctctatctcattttatgatctttctggagacatttaaagggagtcatgttaacagtaagttatgactttataaaaagtattttaataagtttgtatattgcatttaaattctctggacatatgattattaaaaattatatttgaaaatgga

SEQ ID NO: 248800 - DNA, 799 bp, Homo sapiens
ttaaataaaagtcaaaaacccttagtgtgcacagcctgattcccagaatatacttgtattctacccgacttccccattgctcactggattctcactaggcttccttttacttcactggtcacagcaagcgtctctcttgttctgggtcctctcaactgcttttctcttgcttctgattctcccagctgtctgcagtgtgctgtcatttgcatcctgcaggtctcagttcaaaggttatttccccagaggagctgcctccatttatttttatgaatgaatgattgcttaccccttccaccctagttgagaaagggtcctaattgggcagcaggtacatcactggactaaatggtaggggcttgtgctccatttcttgatgctaataccatctcccactgactctctcacctaggagatcacacatgtgagtgttggcctggtttagcgttcttcaaattgcagctcaagagactcatgagtgtacagtgaagtctatttagtgggcatagtggactttttttttttttaattaaaaaagggtatagaagactatagaaaatattagcgtatgttgcacatagtagtgtttggtaaactttgttaatttacacgtatattctatgtagacacacacacatatgcacatagacacacacacagaaattgtggtcaaaattttggaaagcaagtctcctagatgacatctgaggttcattccacctctgacgttctaagatcaaatgcaggattactgaacaacctaaagcagataggctttttaaatgctgctttacttaaa

SEQ ID NO: 248801 - DNA, 394 bp, Homo sapiens
acccaggggttaaggatacaagtgaaaattctcagcctaggaggtcggaaggacttgccaggaagtggtggtaggtgaaatgcaatgatagataaaataaaggcatatcagcacatggtaccatggtgctcctgagagattagaggctaacccaaagagttactcagtattttgcattttggcaatgtagcttgaaataatttgtgcaataattttcttcagttctgcctccttccatctctgcatagacagaaagggcaggccctctctgccgtttctgctctcccgtcgttgacttgggaactttggcttgccaattataattagccgtttggtctgttcatgtgttgagttcaagatggtatttttagcattttgactgacaggcgtttca

SEQ ID NO: 248802 - DNA, 399 bp, Homo sapiens
agtttttcagattttggaatatttgcaaatttctctaagggaaaaaagatattttggcatgtaatgcataatatttgcataattataatccagtgttctaaaatgattgtacccaccaaaatctataaacaataaggaactgtggttgtttgctgcaaataactatgataaaccacactgtttgtatcacatgtattagcccattgtgacattgtcaattgaccatatgcacatacatgtatacatgagatatagtatcttggggatggaacccagatgtaaacatgaaatttatttatgttcacatgtacttatacacacagcctgaaggtaatattatacaatattttttatttttattattttttttaagtcaataaatttttattcatggaattc

SEQ ID NO: 248803 - DNA, 365 bp, Homo sapiens
cctgtcaaaaaattcctcaattctgtttgtttccaaagattctatgccttttagttctgactaatagcacatattgacttgcaccaaaagaatccccaaagcaagcctttatcagcctcctctgtatgccacgtgggtaatatatggagatggactttgatactattactgagagttcgcagtattttccaataaatgtctttcccccaaccaaaaataaatacataaaaacttcagtgaacaagagcgagtaagagatatggaagacagcctctttaagaaaatagaaaataatacttcccaaatcattttatgatgtcaacattaccctgataccaaaattcagtaaaggcagttcaagaaaa

SEQ ID NO: 248804 - DNA, 1667 bp, Homo sapiens
  misc_feature (443)..(443): n is a, c, g, or t
atgggttctctcagcacagctaacgttgaattttgccttgatgtgttcaaagagctgaacagtaacaacataggagataacatcttcttttcttcgctgagtctgctttatgctctaagcatggtcctccttggtgccaggggagagactgcagagcaattggagaaggtgcttcattttagtcatactgtagactcattaaaaccagggttcaaggactcacctaagtgcagccaagctggaagaattcattccgagtttggtgtcgaattctctcaaatcaaccagccagactctaactgtaccctcagcattgccaacaggctctacgggacaaagacgatggcatttcatcagcaatatttaagctgttctgagaaatggtatcaagccaggttgcaaactgtggattttgaacagtctacagaagaaacgaggaaaangattaatgcttgggttgaaaataaaactaatggaaaagtcgcaaatctctttggaaagagcacaattgacccttcatctgtaatggtcctggtgaataccatatatttcaaaggacaaaggcaaaataaatttcaagtaagagagacagttaaaagtccttttcagctaagtgaaggtaaaaatgtaactgtggaaatgatgtatcaaattggaacatttaaactggcctttgtaaaggagccgcagatgcaagttcttgagctgccctacgttaacaacaaattaagcatgattattctgcttccagtaggcatagctaatctgaaacagatagaaaagcagctgaattcggggacgtttcatgagtggacaagctcttctaacatgatggaaagagaagttgaagtacacctccccagattcaaacttgaaattaagtatgagctaaattccctgttaaaacctctaggggtgacagatctcttcaaccaggtcaaagctgatctttctggaatgtcaccaaccaagggcctatatttatcaaaagccatccacaagtcatacctggatgtcagcgaagagggcacggaggcagcagcagccactggggacagcatcgctgtaaaaagcctaccaatgagagctcagttcaaggcgaaccaccccttcctgttctttataaggcacactcataccaacacgatcctattctgtggcaagcttgcctctccctaatcagatggggttgagcaaggctcagagttgcagatgaggtgcagagacaatcctgtgactttcccacggccaaaaagctgttcacacctcacacacctctgtgcctcagtttgctcatctgcaaaataggtctaggatttcttccaaccatttcatgagttgtgaagctaaggctttgttaatcatggaaaaaggtagacttatgcagaaagcctttctggctttcttatctgtggtgtctcatttgagtgctgtccagtgacatgatcaagtcaatgagtaaaattttaagggattagattttcttgacttgtatgtatctgtgagatcttgaataagtgacctgacatctctgcttaaagaaaaccagctgaagggcttcaactttgcttggatttttaaatattttccttgcatatgtaaatagaatgtggtgagttttagttcaaaattctctgttgagaataataaatgcatgaaatacctta

SEQ ID NO: 248805 - DNA, 2079 bp, Homo sapiens
  misc_feature (443)..(443): n is a, c, g, or t
atgggttctctcagcacagctaacgttgaattttgccttgatgtgttcaaagagctgaacagtaacaacataggagataacatcttcttttcttcgctgagtctgctttatgctctaagcatggtcctccttggtgccaggggagagactgcagagcaattggagaaggtgcttcattttagtcatactgtagactcattaaaaccagggttcaaggactcacctaagtgcagccaagctggaagaattcattccgagtttggtgtcgaattctctcaaatcaaccagccagactctaactgtaccctcagcattgccaacaggctctacgggacaaagacgatggcatttcatcagcaatatttaagctgttctgagaaatggtatcaagccaggttgcaaactgtggattttgaacagtctacagaagaaacgaggaaaangattaatgcttgggttgaaaataaaactaatggaaaagtcgcaaatctctttggaaagagcacaattgacccttcatctgtaatggtcctggtgaataccatatatttcaaaggacaaaggcaaaataaatttcaagtaagagagacagttaaaagtccttttcagctaagtgaaggtaaaaatgtaactgtggaaatgatgtatcaaattggaacatttaaactggcctttgtaaaggagccgcagatgcaagttcttgagctgccctacgttaacaacaaattaagcatgattattctgcttccagtaggcatagctaatctgaaacagatagaaaagcagctgaattcggggacgtttcatgagtggacaagctcttctaacatgatggaaagagaagttgaagtacacctccccagattcaaacttgaaattaagtatgagctaaattccctgttaaaacctctaggggtgacagatctcttcaaccaggtcaaagctgatctttctggaatgtcaccaaccaagggcctatatttatcaaaagccatccacaagtcatacctggatgtcagcgaagagggcacggaggcagcagcagccactggggacagcatcgctgtaaaaagcctaccaatgagagctcagttcaaggcgaaccaccccttcctgttctttataaggcacactcataccaacacgatcctattctgtggcaagcttgcctctccctaatcagatggggttgagcaaggctcagagttgcagatgaggtgcagagacaatcctgtgactttcccacggccaaaaagctgttcacacctcacacacctctgtgcctcagtttgctcatctgcaaaataggtctaggatttcttccaaccatttcatgagttgtgaagctaaggctttgttaatcatggaaaaaggtagacttatgcagaaagcctttctggctttcttatctgtggtgtctcatttgagtgctgtccagtgacatgatcaagtcaatgagtaaaattttaagggattagattttcttgacttgtatgtatctgtgagatcttgaataagtgacctgacatctctgcttaaagaaaaccagctgaagggcttcaactttgcttggatttttaaatattttccttgcatatgtaaatagaatgtggtgagttttagttcaaaattctctgttgagaataataaatgcatgaaataccttaaagctctgtgaagacttgtaacatggcagcaatcaaatggcttataaaaggatactttgaatgtggataaattgaattcagtcaatatttcagtggaatttttggctaattgcttgaattgaattgaattatactactcaattgaataatattttctcctcctccttctccccttccttcttccttctcttcctcctcctcctcttcttcttcttcttccccttctcctcctcttcctcctcctcccccttcttctacttccttctcttcctcctcctcctcttcttcttcttcctcttctcctcctcttcctcctcctccctcttcctcttcttcttcttcttctcctcctccttcttcttctccccttcctcctcctcctcctctgtcctcttcttcttcctcttctttt

SEQ ID NO: 248806 - DNA, 425 bp, Homo sapiens
ggcctgtggcaggggtccgctccctgcgcggagctccggccggcccggcacatttggggctcgcctgccatgccctgggcgcaccgccccgaaaaccctgcccttcagagagatggagcaaagtgatttgcttggtgacttttgagccgttatgcctgtcgatcagggaggagagcgagggaagcctccctcctccgcagcctggacagggggccggggcttcagtgtcccctgcacccgctgacagcctctggggacgtacgcatcctcaacccagcagacaattattcccttgctaacactgggacccagaggcagaagttggtttttttttttttttaaggtgtgtgaaatcgttgcagagatctgtatctgcactgccttgagaaatcctttgcaggcagcggactgaaactgtagactcg

SEQ ID NO: 248807 - DNA, 724 bp, Homo sapiens
tttttttttttttttttgatacagagtcttactctatcactcaggctggagtagagtgtagcgatctctcctcactgcagcccctgccttccccaggctcaagcgatgctcccacctcaacctcccgaatagctgggattgtaggtgcacaccaccacgcctggctaatttttgtttcatgttggccaggctatcctcgaactcctgacctcaagttatctgctggcttcggccttccagaatgctgggattataggcgtgagccggcgcacacagcctgtttttccatttttaatagggtggttagggtaggactccctgggaaagtgagttttgaacaaaggcatggagggaggtgagggagtgaatcaaggggatcagaagaggaagaagtggagaccttcccaggaagagagaatagcccgagtggagattcctccaggtgttcaaaggacaagcaaagagactgacatagctgcggggcactgagtgagggggaaaagaagaagcgatgtcaggaataaatttacagaagggtacagattgagtaaggcttgaaggctattaaaaaataaaattttacgcctggcgtggtggctcatgcctgtaatcctagcactttgggaggctgagaaaggtggatcacttgagctcaagagttggagatcagccttggccaacatggggaaacctcatttctgctaaaaatacaaaaattagctga

SEQ ID NO: 248808 - DNA, 235 bp, Homo sapiens
ggcgcctggaccaggttcccctggggaaattgggcccctccctgagccacccggggcccaccgccccctttccacctgggaccgagcatcctccagagggtcagccctcctgagggaacaccatgcccagccccaggaccctccctcaactctccagcaaggctgcactgtgggcggcccctgcacataccccagcagtccatgctgtgatgtaacatgacatggtgtgacgtgg

SEQ ID NO: 248809 - DNA, 499 bp, Homo sapiens
ctggttgacagttctggaaaggactcgaagacaaattacttccaccatggaggcaacattcaggcagcttggagaggaggccaatgctcaggcatcacatctctcaacccagcagagcccatggctgcctagacaacgagaaggccctagcacaggctctggcacatgctccaggcagcagggttaatgcaccctggagccgggatgccccagcatgaggactgtcttcctgggagctggcatcctggccagcactcaacacatgctgctcagtgacggaacccatccgtcatcagttatcagcataatttattacccactgacacagtaaggtctggaaggacttttgaaataagatgacttttaaaaactatacctgtaaaccctgtttaccctgacgtgattattatgcattgtatgcctgtatcaaaatctcatgtaacccataaatatatatacctaatatgtacccacaaaaataaaaaaataaaatgacaaa

SEQ ID NO: 248810 - DNA, 336 bp, Homo sapiens
gggtctggaggcaggagttatcatctgcatttcctggagaagaaaacagaagctcaaaaaggtctatttacttctccaaatcatggaatccataacccatctactcctcacctctacacaggggagcacaccaattaacagctacaaaaaaaaaaaaaaaaaaaaaaaaaaaagctggggtttacactcagaaaaaaagttaagtgagtttccttgaaagtattcttcaatgggaaccagtttggggtagatgtggattggtaaaggtgacagagagtggggcaaaggaggtgtgacagatcttacccgctcattatattcagcaaaaactgaatc

SEQ ID NO: 248811 - DNA, 368 bp, Homo sapiens
ccctgtctcatgacttcaccactcacgcctcgaccaatcagcaatccccacactttagcccatcacccatgcagactccctaaaaacatgtccacacctgtgatcccagcactttgggaggctgaggtgggtggatcacgaggtcaggagatcaagaccatcctggctaacacagtgaaaccccgtctctactaaaaatacaaaaaaattagctgggcgtggttgtgggtgcctttagtctcagctactcaggaggctgaggcaggagaatggcatgaacccaggaggctgagcttgcagtgagccgagatcacgccactgcactctagcctgagcgacagagcgagattccgtctcaaaaaaaaaaa

SEQ ID NO: 248812 - DNA, 733 bp, Homo sapiens
gaaattcatcccggatcctcacatttctgatgtgattagaaactgcaaagcagggccagttttgcagagtggtgaataggagatctaagaatcagctttgatagcatgtcttaattcagtgaggttttcttcagacttttttcctaacaacagtttaccaattgcatttcttcatattaaagttattattttacagctaccatgtcataaccaacaataaactaaatgacttagtagtgcaggttatgactaatgaactttcgtctattccacaagaagttatggagtgcctgctatatgccagatcctagagatacaaagtctgagcttcaggatcagggagggctgcaatctaataaataattctaatacagtgtaagaaatagaatcatatgtctgctaaatgaacagcaggaacagagagttgtagccacctccatgggcaggaaggagttaggagatcagttcatttggaaggctttgtaaaggaaagggtatgaactgggttgaaagattcaaaggtgagctgtaaacctcctggcgtgctgttggagaaggcgtgctgagcgccgagcgtgtgcgatagcgtccaagttgaaaggcaccttggacgtcctctgattccgtatcccagtcaggatgtccctgccagggaagcagtgtgctagcacattggttttccaagagtgatctgggacatagtttcacattttccttccaaaattagggatgg

SEQ ID NO: 248813 - DNA, 377 bp, Homo sapiens
tcactaccacatattattcttctcctttacttaatattacttgatgatcctcagttatgtgcaaggcattatattctcaggaaattcctttattcttgacctattccttttgctcccttttatgatatgccaagatacattgcctttataacatccatataggggctttgagaatctctatctggaagacggactacattatgtttaccaatgaatgttttggagagaaggaagaaaccatcttatttcaggagtgagtgggctcccctctgtgaataagcactgcttccaatgtgcacatacacagctaatgatccagcaggcaaaaataattttaataatttcattaacagtgggaataaaaaaattgctgaata

SEQ ID NO: 248814 - DNA, 473 bp, Homo sapiens
attcatttcacaaaacaagttgttctctgtgtgtaagcctgttctctttctaatcatactatttcctccttctttcctaccttctggtcattagtatgcaaatgttaaaaattcagagtaagataatgtttcctgctcatggcaaataggaaaaaccaatatttatttaatgttcctttacacacagattttcattttatcttctggtaactctgaacaaggtataattattttcagatacattttatttatgagaaaactgaagctcagataattaaatgacttggctctgttgatatctgagtctagagagtgaaaccatggagatcttttagtagagccacctgtcaggaccaatatatcactgaggcatattgttttcacacttgtctccctgatactcttcccattctcctttggcccttcttcaaagcttcatttgagaccctggattttggcttccaaatcctgat

SEQ ID NO: 248815 - DNA, 119 bp, Homo sapiens
tctaaagccaagtccatccatgagtttgtaccctcaaatacttgtgagttgggtaaacgcctctcttcctgagatcccaagaacatgtgggtcctgggcctgttggaaagtggcattct

SEQ ID NO: 248816 - DNA, 503 bp, Homo sapiens
cagtggcagtgagttgtgctatgggatggtgtcccctttttctactcccttccctgtgtctaggagaatgccaccatttggggctagcttctctccaacactattaagtacctgccaacctccctttttaacaaagatcaggtcttgggccaccatgagtaggcagtcaaaagtcattggctagcatgcaaaaacattttttgatttttaaaatattattactggcaattattgcatcaatcctgatttcctatttataagaaatagaaaatgtatgttttaatacatttatgtaagttcagtttatggagagctctgcgataagttatggcaccaacagcaaccagtcatgacagcagttgccaagaggggacaggcgcagtggctcacaacagtaatcccagcaatttgggaggcccagcacttggggaagcccaggagttcaagtccagcctgggaaacatgacaaaatcctgtctctattaaaaactaaaaaaaagaaa

SEQ ID NO: 248817 - DNA, 567 bp, Homo sapiens
tggatcagggaagcacaccacttatgatactaagatcagaaagaaatttgtcctaagttgtgcataaagattaatgatatacatatataaatcatggtatctgctcaacttagtgtgtttgatatattttagttcctctcctgtcccttttttcccctatggatttctgtggaagattgtagtatatttgaaagttctttgaaaattgtaaatactattgttagtttataattaaaagaaagcggccgggcgtggtggctcacgcctgtaatcccagcactttgggaggccgaggcgggtggatcacgaggtcaggagatcgagaccatcttggctaatatggtgaagccccgtctctactaaaaatacaaaaaattagctgggcgtggtggcgggcgcctgtagtcccagctactcgggatgctgaggcaggagaatggcgtgaacccgggaggcggagcttgcagtgagcccagatagcgccactgcagtccggcctgggcgaaagagcaagactccgtctcaaaaacaaaaacaaaaacaaaaacaaaacaaaacaaaacaaaa

SEQ ID NO: 248818 - DNA, 876 bp, Homo sapiens
ccctgatcagtcagctgctgtcaacattgaggcaagaccctcccccagcaaaaagtttacaactcgctgaaggctcagatatcattagttttttctagcagtgaagtatttttaaattaaggtacgtacattgcttttttagacatgctatcacacactgaataagctacagtagagcataaacataacttttatgtgcaccaggaaaccaaaaaaattcctgtgactcgctttattgcagtggtctaaaaccgagtttgcgttatctctgaggtatgcctgtactctgattccgaggtaaaggaaggttaactggcagaacttcactgatacttttgttaggtaaacacacatctgtccccaggataattaacacaacgacagagaagggaggaagaaaaagagttagtagagagctagaaggggctggcaaaaggggaaagaataatgtgagatcatgaggcagaaacacatccatcccatggaggacctgtgtgtaagggcaggtggcccttagagcagctttctttattttaataaagtatatttctctgcactcatagagacaatacagaaaaacattaagaatgacacacacacgtgtgcgcacacatatgcacccagaatcagagatcactgcttccccctaacacagctgtctgagaacagtgccctggctggattttttggccatggaataattttccaagtccagcctgatcatctctctcccacagtcaatcctaggtggcaagaaaatgctggctactctggaaccagttcagggatgaatgccattgattgcactgctacctccatcacctacagagtgacagcatgtgagaaaaacaaatcacggctgatatgcaaaaaaaa

SEQ ID NO: 248819 - DNA, 1895 bp, Homo sapiens
accgcttgaccaggtggcttgagcaagactccagtttggttactgtgtccggagaaactgtgattatacaccgcttctcgttccccttcctgtgccctcagtgttaattcactttataaaaatataaatatataatatatttttctttttacaaataagccaatggagataatttagtattactaacatagtatttataggcttaagacaaatgtacttgtgggcgatcaaatgtaattactgttacagactttacaaaaccatacgtggttctcaggcaacacaaagtagagagggaattctgtgttttaaaaactgtcaaaaaggaaattgagagtcatcctagacttaacatgcttgcgtcctcaactcctgcttttcgttcccaccccaactccccttttttgtctccttaataaatggctttatttttttaatttttaaaattctatattaatcaagaggagacattaactttactgctgacgcaaaactgtattcagctagatccacaatatgaaaatgtataagctcaacatcaaattatttacatcttctcttttttaacttaattagagttttagctcctgtgcctcattttttacaatgtatgagaatctagatgtttagctaacatcttttctttttggggggaaagggtagaaggagggaataaaggtgccattctttttgggagatacatgattttaaaataatacccaaagtctaatattttggctaaaaagactgttacatagctcattttaactattgtgcttgaacctggaaagaatgtttctttttttgtccctaagaaatgggtataaatgaagtttgacaggaaatttaaagctaccaaagctttgaaaatgttgccaagcattagattgcctataaagaaggtaaaaggtggaaagtcttactaaaaatctagaagcagtagtcgagacaacaaaaaaactcatcctcttcaaagttcatattccctgaattatttacttagaagcattaaacagtctcttttctcctgaggcaagggtgtgtattcgactctgtgattgagatccaaggaatattggcactcattttaggtaacaatattttgttaccagattttgctgaattcaaagcattcttgaaaatgtgcgagatttttctatagtaaatataaatgcgtttatctgtgatatcctgcaattattataataattttggttaaacatttgtggcagtttttccaaggtctttgttttcaagtcttgatgcctgtggtgaattattagttaagatatttcaaaaataaaataaatttagactttagagccacaataaagctgagctaggttcctattctgtataatcagcaacacacagaaactccaaatcttgattgttttgttggacccgtgaattctattgggaaatatttgttcttcaaggcaacctcataattcacattagctagaaaggtaggtggtattttgtacattaatttagtgtataaccaggacaaatttcattctgaattgctttgctaaatcatcacagagctgagctctcccatggtcagggaactccttccaacaccaagtcataagcacataaagacccgttcctctaagctgtgacctttcatctggctaaggagtgggaagtcagccatggactttgtgtcgtggagttaacctcatgttcatgacttttcctccatagagaaatattcatttatacatccagaaacaagaagaaagggcagagaatgtcttgctttatgtttttgtattgatagtgatgagagctgccatttttgagccagcatgcatgccagcactgtgctaagtgacttacatggatcacatatgtaagtcatagttactaatcttaaaaaaaaagaa

SEQ ID NO: 248820 - DNA, 386 bp, Homo sapiens
acactcacctgtgatggtcctctggccctgctttgtgagtcacagcactgagtgagccatcacagagggcaagaggagtactcctgggagccgttcctgcactggaagagctggtaatgacttcactagacacggatgtgactatgaaccacacaaatattcacaactcaacttctcctttatttgagtccaaaaatgtccagagccactcccagaaccagccatataactcacggggcccagtgcaaaatgaaaatatgggtccctgctgggggtagtggctcacgcctctaatctcagcactttgggaggcccaagcaggtagatttcttgagctcaggagttggagaccagcctgggcaacatggtgagactccgtctctatc

SEQ ID NO: 248821 - DNA, 524 bp, Homo sapiens
ggtaaagtgtgccgtgctcagtgggccgtccagtcccctactttctcattgtcttacagccaactgctatcctgtctgtgccctgatttcctcatttgaaaataggagtaatagtagttcctacctcctggggttgtaaggagaattaacagagataacttatgagtagcactcgaatagcattcagaaatgtgagctattactgttattgctgttattattgatattgttattattattaccttgccaggctttgagtttgtgtgaggatttcagaaagctggaagatgatcataacagggattgagaggtgagtgaagcttcccttaatcaatgatggcaccaaaccagaaagcaggagagacggaagcacagctcccagacacagaaaattgcgtccgcctgagcggtatcagccccacaaatcagagttaatttctcttcttctgcagagctcggcacagtggcctggatcacacagtgactcatctaatagccctgtgagtttgcccagcttgcggcat

SEQ ID NO: 248822 - DNA, 865 bp, Homo sapiens
tttgtagaaactgggtctcactttgttccttaggctagtcttgaagtcttgggctcgagcgatcctcccttctcagattacagtaggaagcactgggattacaggggtgagccactgtgcccagccttctcaatttttttacccctatatttgttctaaggatatagacagggtaacaggaaaaactcaatatttcttttggaataaattgccctctaatcacttgataagcatctctatcattattctgtgcctaaaattagagaattatctgctcagtccttattcctgcagaatacaaatgtcacattctaacctgttaagagattgtcttcaaaataaaactgttattaactacattaatgttagacaagtacactttagggcaaaaggcattattagggatagatttcataatgatagagttctatagtagaatatagtaatgcaactgaacaaaatgaagctcattccactgcatggaagaatctcacagatgtgatgctgaacaaaggaagccacgtacaaacacttactatataattttatgtacatcaagttcagaaacaggatagttacctttgggaaggaggtaactgaaagagtatgaggaggggtttctggtatctggttaatgtactttgtaccagttacccaggagtgtttcaaaaattattataattgagcaaggagctagcaaccaattcttttcttaagtcagcagattattctagccaataagtaaggccctcttataaagaacccaagataccatggactgagtttcaacatgaaactcttacatgtgcatatattgcattgtcctgaccacggcatatctataggaaaaatatttcactgacca

SEQ ID NO: 248823 - DNA, 468 bp, Homo sapiens
atctcactgggtttctttaaagtcctgttgctgctaactttatcttatttggagagggtagaatcaactaatctctgtagaccagctatgtatctaagctctgttaaccacaggaagatcatgtatcccttttttataagtgggtttatttgcaggttgaagtcttagtgaaagatagtatcctgtagaatgctgttcaccactagtgatcatctgttaagtacaaacttgaaagaggtctctaccaataaatttttcttaaatttcacaaaacaagtcatctgggttagctgatagtgaggtgcagtgagacttttatcactgaatagacaaatcatttgtgccgaaaatacatctggaatattaaatggctatgtttaaaattgttcataatacctatgcaagttgttacctcaactgttacacacttcttaatacctcattaaaaatttacatggtcaagataac

SEQ ID NO: 248824 - DNA, 571 bp, Homo sapiens
ttagcttttaaaacatttaggtctataatctctcatgaattaatttttatgtatggtgtgaagtagtgtcatgggttggactatgtcccccaaaaaagatatgttgaagtcctaaccctcagtacctcacactgagaccttagttggaaacagcgttgttgcaggtgtaattagttaaggtgaggtcacactggagtagggcaggccccaatccaatattactgttgttcttacaagaaggaggccatgtaaagacagagacatacatggagaatgctgtgtgatgaggaagacagatattgaagtaatgcagctgcaaatcaaagaatgccaaaggttgccaaccactggaagctaggaagaggcaaggaaggactcccctacaggtttcacagagaccatggccctgatgacagttgattttggacttctagactctggaattatgagacagcaaatttctgtggttttgttttgagacggagtctcactctgtcacccagggaaagaaatgaatgtttggggcagggtagcagagatactttacaatataactctttttttttttttt

SEQ ID NO: 248825 - DNA, 580 bp, Homo sapiens
gggcaggccccaatccaatattactgttgttcttacaagaaggaggccatgtaaagacagagacatacatggagaatgctgtgtgatgaggaagacagatattgaagtaatgcagctgcaaatcaaagaatgccaaaggttgccaaccactggaagctaggaagaggcaaggaaggactcccctacaggtttcacagagaccatggccctgatgacagttgattttggacttctagactctggaattatgagacagcaaatttctgtggttttgttttgagacggagtctcactctgtcacccaggctggagtgcagtggtgcaatcttggctcagtgcaacctcccaggttcatgcaattctcctgcctcagcctcctggctagctgggattatatgtgtgcaccactacacctgactaagttttttgtatttttagtagagacaaagtttcaccacgttggccaggctagtcttgcactcctgacctcaggtgatctgcccgactcggcctcccaaaggccgggattacaggcgtcagccaccgcacccagccaaatttctgtggttttaagccacct

SEQ ID NO: 248826 - DNA, 323 bp, Homo sapiens
atcctgttaagtcagagtactgttggagaaggtttttgctttttatatttgggattaaatcttgggattgggtgttgtggctcacgcctatgatcccaggactttgggaggctgaagcaggtggatcacttgaggccaggagttcaagaccagcctggccaacatggcgaaaccctgtctctgctaaaaatacagaaattaccaggcgtggtggtgcatgccggtaatcccagctccttgggaggctgaggcacaagaatcgcttgaaccaggaggcagagggtgcagtgagccaagattgcatcactgcactccagcctggg

SEQ ID NO: 248827 - DNA, 442 bp, Homo sapiens
aatataattacatcatcatctgaagtggtattgtgttagatctcgatgtgaattttgcatccaaaggggaagacaggtggtggtagaatccagcttcctaatacgctttgcaaaggctttgtagtattagtttgtggtttatgaattagagatgctaattttataaaattagcataatgggaaaagaataatagcatgtcagctgttaaactttgaggcaatagtggttgcttgtttgctattcagtgagtgtccttgagtagtttattttatcaatactatacagtattaggaaataactttttccttctagttagtggtatagctagttttttgtctcttaagtaaaattctagaaaagccaattgtatccttaaatgtttttgtattctatttaagaaacagtttctttcttgttgctttcaggacaaaagaaagaaaa

SEQ ID NO: 248828 - DNA, 489 bp, Homo sapiens
ctgttgtcatgatacaggttttaattttgtatttttttatttatacagccatgcatcacttaatgacaaaaatacatctgaggaacttgtcattagtctgttttgttattgtgggaatatcatagacttacacaaacctagatggtgtagtctaccgtacaccttcactgtatggtacagcctgtagctcctaggctacaaagttgtacagcatgccactgtactgaatactgtaggcaactgcaatgcaatgttaagtatttgcatatctaaacatatctaaacatagaaaaggtatagtacaaatacagaattataatcttatgggaccaccactgtataatatatgcagtttgtcattgaccaaagcattgttatgcagcatatgactgtgcttaatattaaaagacttttccaaatcattccagtatttttaagaactgcctaatttacttaagcctagtgcattaatattgtcatgcactactg

SEQ ID NO: 248829 - DNA, 666 bp, Homo sapiens
tggaggtgagaaaacagagcagcgtatggcaaaatagtctaagaacaagtagtaaaagcatcagcatcaaaaactccaggctataaaagactaggctcagaaagtgcagttttccacccacagctggggtgcttccaatagcatccttgagacagactccgctctagtacctccagcgaggagttcactactgcaacaagcagcccattcttggatttttattttttttaacttccattttttcttatacatcaagttctcactcctttatatttgatgacatgcacgttcagaactgctgaatatttccccttttatccatgccttcactgctcaatcacctttatacagtttctttacggcagcagtgaaagaagtgactcagaagacccgtctttgaaaaaacaaactataaaatgtatccactctgaccaaagcaaaaaaagacatattccttcccctctccacacagaaaaattcgggatattgagatctccctaaaggaggtcctaaaaagtcagtatatgttggggtaagaagagaagatgcacgccctaagtagagataaaaagagccagattttaaaactctttgttccctaactccttgtatgtaatgctcttattgaaaatgttaaccgattattttgaatgattatttttttgg

SEQ ID NO: 248830 - DNA, 270 bp, Homo sapiens
gtgctttttggtctcctggtttgagtttcagtcccaagctgaagttgaccactgggtatgtccatcaccatctacccctcagacaaaggtagatgggtggattgtgtggggctcagtagagggggattggggcctggacagagggaattagaaatattgtggctcacacctgtaatcccagcactttgggagaccaaggtgggtggatcatgaggtcaggagttcgagaccagactggccagcttggtaaaaccccgtctctactaaaaa

SEQ ID NO: 248831 - DNA, 533 bp, Homo sapiens
gggcaacaagaatgagactccatctcaaaaaaaaaaaaaaaaaatgaaaatgtgtcgttaatcatcgagatagtctttcagtctgcactcagtaatattaatgccttctcattgaagtcatctattctgttcccataaagatcaggatagtttaggtagtggtgaataaataaggttctcaatggcctattagtttttttaaatgttcaaaagatagtagcatgttgggaaaagagatgaattccacatttcttttggtacagtacaacttactgaaattgctttcttatttcaacaaggatttaccaggttgtgtgtagtggttaaaagcatggactttacagccacattacatgggttcaaatccacttactagttatgttaaccacaggaagttagctaatgtctctctgcctcagttttctgtttgtaaattaggataaaaatctccgtagatgtgaatatgtatagctagatagtagattgtattcaaaatcccaatcataacataataaaaatattaactattatta

SEQ ID NO: 248832 - DNA, 459 bp, Homo sapiens
tgtcatttccagatctgccagagcctgatctcatacacactgatgtggtacaggaaatgccacctgaaaatatggtaccttggcatttgaggaaacagtagaaggaggtcatagaaactagaaagaattcctccttgctctttgtcccccaaaggagccataaaacctgggccgagtttcttctgaaaataagttataagatccttattccagaggggtcctgccctgtgcctggaggaaaagaatgaagacacagagatgccttgaagaatctgaacaaacagcccttgctaagttccccccagtttattgacattagattagaccttttgtcctccaattatacttctgtgttcctgaaaatacacattttcccgttttttcttttgtttgctttttttgatcttcatttctgaagattcccatgtcatgtaaaatatatgttaaacaaatgtgtat

SEQ ID NO: 248833 - DNA, 592 bp, Homo sapiens
tactatacagctagcaatatcgttgttaggtatatgccccagagacttgaatacagttacatgctccatcagatacctgtacccaaatgttcctatcggtattactcatggtagccaaaaggtagaaacaacccaaatatctacaaatagatgaatggataaataaaatgcagtgtatccatatggaatattacttggtctcaaaaggaaggaagtacttatgcaagctacaacatggataaacttcaaaacaatatgccaagtgaaagaatccaaatgcaaaaggtcaaacggtatgcttccatttagaggaaatagtcagaacaaataaatccatagacaccaattaggttggtgtatcccaggggctgggcatggagtggggtggagagaggaggggggcctgcttgatggatacagagttttctttgggggcgatgaaagtgttttggaactagatagagggggtggttgcacaacattgtgaatgtactataataaatgccacagaattgtgtactctaaaatggtttaattgctgtgcatggtggctcacgcctataatcccagcactttgggaagccaggatggg

SEQ ID NO: 248834 - DNA, 544 bp, Homo sapiens
tactatacagctagcaatatcgttgttaggtatatgccccagagacttgaatacagttacatgctccatcagatacctgtacccaaatgttcctatcggtattactcatggtagccaaaaggtagaaacaacccaaatatctacaaatagatgaatggataaataaaatgcagtgtatccatatggaatattacttggtctcaaaaggaaggaagtacttatgcaagctacaacatggataaacttcaaaacaatatgccaagtgaaagaatccaaatgcaaaaggtcaaacggtatgcttccatttagaggaaatagtcagaacaaataaatccatagacaccaattaggttggtgtatcccaggggctgggcatggagtggggtggagagaggaggggggcctgcttgatggatacagagttttctttgggggcgatgaaagtgtatatggcaccaatcactaatcgactacctgcagaccgggagatcccactagttctagagcggccgccaacgcggtggcagctccagcttaaggtacc

SEQ ID NO: 248835 - DNA, 534 bp, Homo sapiens
cactaaattgcacgtttaaaatgtatacataaattatatctcattataaaccacacacacttagaagaggttccatttgccctcttaagaaaaaaatcaataagcttatttaggccacctcctaccttctgctaaattagccttatattcattacattcttcgattaaaacattttaaaactctaaatttgagactttaaaaggttaaaactagtctctccatgggctggattttgaggcacagaatggttctgggcttcctcctatttttgatgctcccgttgagtctatttggaagctcctcttctgctatatcttgatatccctagccctcttctcagtccacactcttactagatgatttcattccacttctacagccacaaataacatcttaatgttgatgattcttaaatatttccagacagatctctctcaggtccacacacaacttttcattagacatctctactgggtgtcttacagacactgaaatcaacatgtctaaaacttgactcatcgtcactcctccca

SEQ ID NO: 248836 - DNA, 326 bp, Homo sapiens
tggaaaggaagacagtaagaagagaggaacaaaggttctgcaaaacaagcagagaacaagttgataatatggcagcatcaagtctttacctattaataattaacttgagtgtaaattgattaaattcttctttgaaaagacgcagagtggctaatggatagaaaaataagacctaactatatgctgcccccaagagactcacttcacccttaagaacatgtgtagactgaaaatgatggatgggaaaaggtattccacgcaaatataaactaaaagaaagcagaaattcctatatttctatctgataaatggaatacaagtaaaaa

SEQ ID NO: 248837 - DNA, 455 bp, Homo sapiens
ggaatatggagctaaaattattctgcctgttaagacggaagttccaatagaagctcaagtgaaaaatgaataaaacataaacagtacagaacagtaatacttatagactatacatacgatgattaatatagaacgtaagtattattactctatacaactggcctatgaattgttttttctaaacaataaaaacttgcagatatgtgaattaaagaatgaagaatcttaaaatgaagaaaaaaccaaacttcctctgaagaggctatataccagactgcgtctccctcaccttttttaatgcagaccttactgccagtggtggcgctagaaaatcgaaggaagcaacagaatgtgtagaaacttgttaactagaaaattcggtgaaaacgaaagcagacattctcctattcagttacaatgtaggcttctggtaatacggtttatttattctgctt

SEQ ID NO: 248838 - DNA, 268 bp, Homo sapiens
cagcaccatcagatcatgccgccgtctgctgttttgctgtccaccgcctgctgtagcatgtgtgcccccttgcagggtggagagcaggacgtgggggctttattatttcagaaaaatgcgttgcttctctttgttactgccttgtatttctattttaatctgtcatccttgccctttaagaaagcgatccagtaatataccctagctgttttccagttagagtaaattgactagatttgatgctcacattaattatgtaagagaaacc

SEQ ID NO: 248839 - DNA, 220 bp, Homo sapiens
gtgggacgttgcccgggagagctgcgtgcctgctctgtgtggtaagggtggcgcttcccgaaggcccccttcccttcgtggagcgtacatggtgcctgcgagtgtgggccatggtgtctgttctccgggagctggtatcccaggctgatttcattcctgctgagtgagggagctcactggcctagtcactgcagtgacatcctgtgagccccaaggtgca

SEQ ID NO: 248840 - DNA, 461 bp, Homo sapiens
acaaatacaaaaattagccgggtgtggtggtatgcatctgtagttccagctactcaggaggctgaggtgggaggatcgcttgaactcaggaggtggaggttgcagtgaacagagaacgcaccggtacctggacaacaaagtgagaccctgtcataaaataaaatagttaaacccaggccaggaggggtggctcatgcctgtaatcccagcactttggaaggccaaggtaggctgatcacgtgacgtcaggaggttgagaccagcctggccaacatggtgaaaccccgtctctactaaaaatacaaaaattaaccaagcgtggtggcaggcacctgtagtcccagctactctggaggctgagacaggagaattactagaacccgggaggcagaggttgcagtgagccaagatcttaccattgcactgcagcctgggcgacagagtgacactctgtcgaaaaa

SEQ ID NO: 248841 - DNA, 519 bp, Homo sapiens
gcaaaaccctattagggattctttccttatccttaggggtaaaggaacttcttttgagcttggtgtctgttaatagccactgggatagtataatctatatggcctttcagctgaatattttaattatgttttaaggaataatgtttcatgagatgatcagagttttccaaaggaaaaataattgggtaagttcgggatatgttacattcagcacatgggtgcattctggagaatagatgatgcacattggcatattaaagcatctctaggcagggctctgtggctcatgcttgtaaccccagcaatttggtagtccaaggtaggcagatcacttgaggtcagcagtttgagaacagcctggccaacatggtgaaatcccacctctgccaaaaatataaacattagctagctgggcatagaggcacacccctgtaatcccacctactctgtaggctgaggcatgagaatcacttgaacctggaggcagaggtttcagtgagcccctccccaccccccgcc

SEQ ID NO: 248842 - DNA, 1474 bp, Homo sapiens
cagcaaaatgccgtgactgggtagcttataaacaaaagtaatttgtcaccattcttgagtctcagaagtccactcaaggcacagactgtgcctggtgagggcccactttcaggttcataagtgatacttggctatatcctcacatggtggaaagaacaggacagcactctggagtctcttttatcagggcactaatcacattcatgagggctctaccttcctaattgaatcatagccccacctcctaatactatcatattggtaattagacttccacatatgaattttgtgggggacacaaacattcggagtatagcacaggttcacaggaaaaacgtaaggaaaagagtactcagaatatagggtgatagatacatataattttaaggtaattcaaaggagggagtgattaacttgtgactgaatcaacaaagactttttgatgagtttgtagctgaggttaagcataaaacagttttttagtggaaaatttgaagcatgtcattgttgggcagaggaattgacatgtaccagaaaatcagaagtatgaaacatcagatgctaacagaaagagacaggtacatcaatatttgtaaagcaaagaaatgaggatgaaaatcagtaggaacaagccatattaagaaagtatattgactattttaaagtaacagactgtgtgttcatttattcttttgttcattcttggagtttcttattcacataaggaaagccactatataatttttaataagatggatccattataatagaaattaaatagcagaaatacatataagagtgaacagtgtgacagtacctagtcttggtaagaatatggagcaccgattgtgaatacatgaattgttcaaaccacctcaaaaatcattttcattatgagaactggaacatatgtatatcctgtgacccagtatttctattctttgtcttctagagaaactttttgtcatatataccataaggcctatacactattattcctagcaacatttattgaaatagcaaaaaattagaactgcccaaacatccatagacagagaatagattaataaattgtagtgttcttatccagactctgccgcctagtaacatttattttaggcaagttgcttaatccctttgaattttagtctcttcatacggagtaggttgataatactatgtacctcaaaggattattgtgaagattgagttaacccatgtaaagtagttgagactgtctgatacacagaaaatgctcaatatattttagctatcattggtacacagaggtcaaaatgactgattattgctacacatgtcaaggtgaatgaatttcactgaaaaaaaattgagcaaaaaaatttcagaatgtcccatgatatcagtcagttcaaaagcatctataactaaatattgttcagggatatttgtgtagtaaaactgtaaagaagataagaaaatgaaaaaaaatatg

SEQ ID NO: 248843 - DNA, 513 bp, Homo sapiens
cagaaaaatagaaaccaaagaaagatctggtttgatgtattcttacaacattgggctgtatggatgagagaactatggcagtggaggaaggaaagaagtagatgtaagagatgtgatagggcaggattttaagggtttttaatccagggtccatgacagggttgggggccaaatcttgcatggacttcatagaatgtaaaccctttaatttgcatacaaagttgtgcatgtgtatgtatataaatcctattgctgatgtggtccatggctttcatggggtctagaaatgcactgtccagtatggtagccactagtcacatgtggctattgagaacctgaaatatggctggcctgaatcaagatgtgctgtgtgaaataatacgtgccagactccaaagacttactaccaaaaatgaatgtaaaatacctcataatttttatattaattacatgctaaaatcttttttatatatactgggttaaataaaatatattattaaaattaaaatcacc

SEQ ID NO: 248844 - DNA, 930 bp, Homo sapiens
gccgggggtaatcggccgagggccagacctgatcacctgtctggaacaagaaaaagagccttggactagaaagagacataggatggtggccgaacccccaggctggagtgcagtgactgcagcttcaaccttcagggctcaagtgctcctttcacctcagcctcctgactagctggaactacagagatgcactaccatgcctggctaattttttgattatttgtagggatggagtcttactgtgttgcctaggctcgtctcaaacttctggccccaagagatcctcacatcttggtctcccaaagtgttgaaattataggcatgagccacagcacccacctggtattcctaaatttaataagacttgttgtgtatcctaacagaatacaccaggtgcaaataagaatattgtgtgttttcttgcttttaactggaaagtagtttacatgtctgttaagcctagtttatctatggtacaacctgaatgttcacgttccccaaacatcatgctgcaacgcagtcctcaatgttggatgcagaacctggtgggaggtgttctagtcatgggggcaaatttctcatgaatagcttggcatcaccctcttggtaatcaaaaactttaccctctgttaatttaaatgagagctggctcattaaaattacctggcttctttatttcacacttgctctgtcccttaccatgtgatatgttcacatagtactcacataagttactctttgtgtttcaccatgattgtaagctttgtgagaccctcaccagaagtcgatgctggcatgcacttcttgtacagtctgccaaactgtgtaccaaataaacttttccttttctctttttttggttttgagacatagtctcactctgtcacctaggctggactgcagtggcacaatcttggctcactgcaacct

SEQ ID NO: 248845 - DNA, 171 bp, Homo sapiens
aacatggctctataaaaaatacaaacattagcccggcctggtggtgtgtgcctgcatttccaactacttaagaggccaaggcaggaggatcatttgagcccaggaggcagaggttgcactgattcaaaatcacggcactccagcctgggcgacattgcgagaccctgtctg

SEQ ID NO: 248846 - DNA, 960 bp, Homo sapiens
gcggccgcactagtaccccggagcccatgggcgcgccgagccgggcgcgggggcgctgaacggcggagcgggagcggccggaggagccatggactgcagcctcgtgcggacgctcgtgcacagatactgtgcaggagaagagaattgggtggacagcaggaccatctacgtgggacacagggagccacctccgggcgcagaggcctacatcccacagagatacccagacaacaggatcgtctcgtccaagtacacattttggaactttatacccaagaatttatttgaacaattcagaagagtagccaacttttatttccttatcatatttctggtgcagttgattattgatacacccacaagtccagtgacaagcggacttccactcttctttgtcattactgtgacggctatcaaacagggttatgaagactggcttcgacataaagcagacaatgccatgaaccagtgtcctgttcatttcattcagcacggcaagctcgttcggaaacaaagtcgaaagctgcgagttggggacattgtcatggttaaggaggacgagacctttccctgcgacttgatcttcctttccagcaaccggggagatgggacgtgccacgtcaccaccgccagcttggatggagaatccagccataaaacgcattacgcggtccaggacaccaaaggcttccacacagaggaggatatcggcggacttcacgccaccatcgagtgtgagcagccccagcccgacctctacaagttcgtgggtcgcatcaacgtttacagtgacctgaatgaccccgtggtgaggcccttaggatcggaaaacctgctgcttagaggagctacactgaagaacactgagaaaatctttggtgtggctatttacacgggaatggaaaccaagatggcattaaattatcaatcaaaatctcagaagcgatctgccgtggaaaa

SEQ ID NO: 248847 - DNA, 471 bp, Homo sapiens
gtaaatatttaattaattattaaccattgcccctaacattaaggatgcatgaagcaaaagttaaaacccgcagcggaacccgagagcgtttcttggcaccttgaggtgctggaggctttctggccgcgcaagttctgccccactgagatttgatcagtgaataagtgcaatcctgaagcagcagcatcagagaatacggcttacggattaaggcctctagttttggattcagaaacagaacattgcatccgtgaaggaatttgtgaagtttagttgtgcaggaaatgtttttcatgtctgcgtttcttgactaggatctcccatttcttgtgggttattgtctgttttaattgaggtaacctttagaagtatacaagtgtgccccactgtcagaaaatgctgtgcaggtgttcctcagtgtccttgggggactggttccaggatgcctgcagatgccaaaatccacggatg

SEQ ID NO: 248848 - DNA, 538 bp, Homo sapiens
cctccttcccctccttttcctgtccttccccctgaggcctcaaagcccctgtgcctgagctgtggacaagaaacacgcctgcctcagaagctgcctggagctgggtgaaggcttccattcagctcgctgtcatgctctcactcagaggagagatcatgcagaaattactgaagtaaaatgctaatgtgttgagttaatgatcacaggtttacgttttataaaagacatcttaataatcaaactattgttgagctaccttgcgttttatcttgaattctctggagttaggtaatttacatacgtgtttcagagtacacactttgtttaagctgtcttagctgtcaacaaacactctaaattatgaattatgagttttatatctaaagctaaacattttgtactgtaaaatccagtgctacttactatgccctagagtaacactacaagagtaaaatctgatctcaatgatggatgtttgtttttcttttatgcagtacacattttggaactttatacccaagaatttatttgaacaatt

SEQ ID NO: 248849 - DNA, 382 bp, Homo sapiens
ccggccgcgttctgttcttatgtacacgccctgagctgtttccactggcagtcagctttgaagttcactgtgtggctctcacaggagcgcagaccctcctggtgctcaccagaagaccttggcccatgagggctgcgtaagacagggtggctcgggcctggggtgctgggccccaggtctccctgcagccctgaacgatgctctcagcagcaggtacaggtctccgttccgacgaacgtgcctcaaggcaacactctgggcaagagcttttgatgcaggttctgaggcagctgcctaacaccgctctcctttccgcagtgtgcaggagaagagaattgggtggacagcaggaccatctacgtgggacacagggagccacctc

SEQ ID NO: 248850 - DNA, 462 bp, Homo sapiens
ttcacattattgtaagaggacaaagaggtctttgtgggataaaactgtgaagaattaatggctgaaaatgtatcaaatttctcaaaagatataaaccagatttttaaagttcagtaaatgtcaagcaggataaaccaaaagaaacccattgcaagacatatcataatcaaactgcggaaaattaagaaaacacaaaacaattttgaaagcagccaaagggaaatgaaagataaaataccaaatgaatgattgtagatttctcatcgggaacccaggagccagaaaaaaatgtcataacattcagtaaataccaaaggaaaaatacattatcaacccagaatggtatgtggagcaaaagtatcttccagacataaaggcaaataaatgcattctcattggaaggtaaataaatacattctcagtcctagcaaaactgctggaaaagaattagcaaaggtttga

SEQ ID NO: 248851 - DNA, 395 bp, Homo sapiens
caagtgacggaatctgcaaaatatccttaggcacaactttactgccagttgagtcaatgacaatataaaagcaaggatatttgcctttgctttgttggtgtaaacaaaataatcaaaaggataaccttgtgttagttcccagtcaatccaatccagagtatatttgccctgtgcacattgggagatttattttcatctcagaaattatgggagagcttggctagaacaatgctacattatacattatatttcttaggttgattttttaaagacggagagaaggttacactaacaacgcacttgtccctggctgtcatttcacatttttaactgcccttttttcctggccctggcccaagtcttacgcagcctggcttcacatggaaggaacctga

SEQ ID NO: 248852 - DNA, 704 bp, Homo sapiens
ctgtaagtccaaaagggctaagaatgatttctaagactgaactaattttaccctactacaagacgattaagtccactagaaagtgattttacatgtaattataaaggtctgaaatggaaacataagtagacaaaaaggaactaaagggagggaaaaagcaattcttattttctagctaaccttcaaataaggcaaggaacaagaaaacagggagaaataagaaaatagtggacaacgtactgagacaaagtatataattcaatgtgtactcagaacactctggcccctgctccccagcttttgataaagacataatatgaaagtttggggagttcatgggggaaggattctatttctgcaagcaagaacaacaggaaattaacacaaggtataagtgataaagaaatgtttttaccttgatgtattctgggattgttaaaaatatttcctcagcctttttttctttatttaacttccattataaacattttcaaacatacaaaatttgagagaacagtataacgaacctaatcatctaactctaacaagtatcatcatttattgtgggttttttcctttaattgccccaatcaaatattgattttccccaataacagtagagatatcaatacagtatagcgttcttttcttatttttatgccagaaaaagaaatcaaaataagatgtgtcccccctcccctcca

SEQ ID NO: 248853 - DNA, 338 bp, Homo sapiens
agcacagagcacttcgtgcggcagcagcacaccgggagtcccactccctttcctgctgcgtttggatctgccgtgacaaggactatcagaaccactcacagtaaggtcgggtcgcgtttctaaatccactgtttatggaccgtcttttcactgagaagaagctcgtcagttcaggggtttctagaacttctccagactcttcaaaaactcatgactttctccaagttggtaatcccagcactttgggaggcccaggcgggcggatcacgaggtcaggagatcgagaccatcctggctaacacagtgaaaccccgtctctaccaaaaaatacaaaaaaa

SEQ ID NO: 248854 - DNA, 538 bp, Homo sapiens
gaccttcagacgggcaaagatttttactgttaaatagactatgttttagagaagttttaggttcacagcaaaattgcacagaaggcatgagattgcccatctgttccctgtccccacacatgcgcagcctcctccattagtagcatccccaaccacagtgggactggttacaatcgatgaacctacattgacacaacattgtcacacgaagtccagtagttcacactaggtagggttcactcttagtgttctatgagtttggacaaatgtgtaattagatgtatccaccgttatagtatcatacggaagagttttactgccctaaaattcctctgagctctgcctgttcatcacctccaccccctaacagcagacattttttctttttagcatagaaactaaataattttttagtttaagaaatttttttaacttaatctaaatttaaaactttgggtcttcaaaagatctgttaagatgaagagacaatctatagtctaggagaaaatatttgaaaaatatatatctgattaaaaaa

SEQ ID NO: 248855 - DNA, 379 bp, Homo sapiens
acttgattttcagactacattagtcgacactgtggtattaccacaaggatagacatggggtcaatcacagacactcacacttataattccagctctttggcagaccaaggtaggaggattgcttgaggtcaagagttcgaggctgcaatgagctatgatggcactgctgcactccagcctgggtaacagagtgagaacctgtctaaagacagaaacaaaaaatgatagacacagattagtggaatatattaatgagtctagaaaaagacctatacatttctctctaattggttttcaataaatgtaccaaggcaatttattgggggtaacagatgtcttttcaataactgttgctggatcaagtggacattcatgtgca

SEQ ID NO: 248856 - DNA, 348 bp, Homo sapiens
tttgaatataaatgaaatgagtggaaatatgactgcaaaaatatatgggttactgttgatgaaaccatttacaaccaaactggtttgttctgggtagctgtaattttttcgaaaggtactatgtacaatttcaggtgtgtgtcagatacctcttcaccctcatttctctcttaacaccttttatcataatttctgaagctcccttttgtagttaagagttaaaagtcccgaggcgagctcttcagaactctaacacctgcttagggctcaactggcagggggagaaattgaaaagcggtgaagagtcttttcagcaaagtacttagcattttaaatagtagatgtttg

SEQ ID NO: 248857 - DNA, 485 bp, Homo sapiens
ctcgattccagagttatcaaataattttcctattgtttcttcttgtgtttttagtttctttttttaatatttaaaaacctgatatacattatttggtagaaggtaagaagtatggattcaacttgagtttctttctagatgactactcatttgtttcattatttattgaaaatgcaatctttctactcatggatttgatatgccatctttattatataccgaattggcatagatattttagggttgtttctggaaattctattctattctggaaattctattctgttgcatgtctgtttttgtgccagtagcatacttttgattattatatcttgataatatctgttagaactaatcctactcctactctctgcccctccccacaacacacacatatgtaccttgtcacacttctttttcattatgacatttggctattgtgccttcttccccacataaacttaagaatcagcttatgtggttaa

SEQ ID NO: 248858 - DNA, 481 bp, Homo sapiens
agtcatctaatgactatcagtttattaggaaattatcaaaagagtttgattcccagccaaactgaatccctgcctctctcccatgtaactcagttccaaatcaaatgctcagtccagtacatctgagccttttgccagcagagaggggggcccgaatgggttgcttactatgaggccacttgggggggttttatggactggaaacgggaaggaatgtgcttagtttgccggctgttttggagaatgcgtgatttaggttggcctgggaccttggcctgggactaattagaaagcttggcccgggaccttagcctaggacctcggccgggaataattaggggcttaagtgatgatttgtagaggctgctttgcttggccctagacctattaaggaactgaagtgaaagcttggctcgggaccttgcccaggaccaattaggggctgaacttgtgatttatagaggctggacttgcagtttaa

SEQ ID NO: 248859 - DNA, 302 bp, Homo sapiens
tcttaggcttttgtcttaggagaactcaggggaacacgtggcctatgctctggcaataaaatcttcttgcattgtcagaagtcacctcactatttgatgtctccgtatactccctctgctttaatctcacttacttcccccaaacctcaatctggcccctgtttaaatgtcacctgttcatgaagctttccttcatctccacaacaaagctggtttctcccttctctgtggctgctgtaccttgtttattcctccatgggcgcactgagggctctcaatacatttggttttatatctgatac

SEQ ID NO: 248860 - DNA, 957 bp, Homo sapiens
ttatacctttcaattggaaaatgaggcagtgcctaagttacagacagccattaccgttattgatttccatttttaaaatcagtgtttttaatattactttaaggagagacaatgatattctaatattcttgtgctgtctctacttaaaccttgttcccaaggaaacagctaatgtctcaatatcagatcctgcataatcatgactacaaaggaagtatgctacaataagacatttgcacttttagcagagtgaaaatgaccagcttcttctgccttcctagcaaacaaaagtctctgattttcatacaaagaccagccctttctactagacatatgctgacaggaacaggttacagtattaacatgatctcatgtacagaatgttactattttcagtggcattctgttccagatgaaaacaaagacacaactgaaatcacctttatttttaggcattagtgactgtctcttttggaagaggctcagttttgaagtcaggcttattaaagcataggtggagataactgctcataaaccattatggatgaacatatttcccaaggccaaaaggcttgaaattaaaatgacttaaataaaaacaatgttacagatttttattagccaaaacacccccacaacaaataagcatggatcttcttaaatgtatcacataatttttttaatactgagtacacttctttcaccttttataaccagccctttttccagatgaagcacttaaaattttggcatggcaaaagaaaaaaatgatagatgaatcatttgcagttaggaaaaaatagacgaagtatggacataatcactggcacaacctcgaatttacacttctgaagaaatgcttttcgttaaggatttacaaacattcaaaccagacagttctaacattattggtattgagcctaaaaatataacatgcatggacattttatcttgccc

SEQ ID NO: 248861 - DNA, 410 bp, Homo sapiens
gaagactcaatattgttaagatgcctgttcttcccaacttaacctatagattcaatccaattcaagtaaaatcccagcaactgattttgtagatatcaacaatctgtttctaaaatttatatggaaaggtaaaaaaacctagagtagccaacacaatattaaagaggaagaatgagttccatcactaacactaccagacttcaaggcttatttataaggctgtaggacagcatggtattcatgaacaaatagacagatagttcgatgaaacagaataaagagctcagaggtagacctacacaaataaagtcaactgatattttaccaaggagcaaaggcaagtaaatgtagaaagaatagctttttaaaaacaaatttatgttgtaaaaagcaagcgcccacaggcaaaa

SEQ ID NO: 248862 - DNA, 626 bp, Homo sapiens
tttaaatttagttaagggcactacatcaactgatttagctcccttgctcctggtgactttgcccatgtttctatatccaattagatgatgatttatgatcttttgatttagatgctttctcatttctgattcattctcattttctgcagcctacacataagtgttaggaaccaaggaagttattggcgataatgtctggttggaatttgtgggagcttccttgagagtcatgaaaagtctgttcttagtctgttttgtgctgctataacaaaatacccacaaccaggtaatttataaaaaacaaatttatttctcacagtctggaggctgggaagtccaagatcaaggtgctgacatctggtgagggctgctccccgcttccaatctggtgccttgaacactgcattctacggaggggaggaatgctgtgtcttaacatggcaaaaggtggaagggcaaaaagagaaataaactccctttatcagccccctttataagggcatctaatcccattcaggagggaggcgcctccagggaatgatcacctcttaaaggccccacttcttaatcctatcatattggcaatacctgaactttggaggggacacattcaaaccatagcagcc

SEQ ID NO: 248863 - DNA, 446 bp, Homo sapiens
cgttcaaaatctttcccgcccaggcgtgacgcgaggaatgaaaacaatcagcggcccccgagggccggggcctgggcccgggagggggcggccggggcacccgggcacagcctcccgcgcagcgcctgcccgagccgggcggaccggcgggctggggcccggaggtgacacaaagaacccagagagacaaacgccacccgctggcgctcgctccaatccccggagcgccccgcccgctgacaagtttacggcgccctccgcgcaccccgctctccccacccgagcaaagtttcctgtggcccggctcggaccccggcatcgggtcggttcccgtctcccgccgcccccgcccccggctcagagacctttccctctctcgcccccgccccttcccctccctcccactctctccggggcgcaccggggtgctggggccccgcggccgc

SEQ ID NO: 248864 - DNA, 140 bp, Homo sapiens
gagatgaccttcaacctccattttttgaacttgtttgaccttttgcctcttttcccaggcatccaaagcctctgggatgtgttctgactgtaaaaactctgatgttgtgaaaaaagcttacgctttgcctccactcaaac

SEQ ID NO: 248865 - DNA, 397 bp, Homo sapiens
tactaatcgcggcgctcgacgggaatactgtattctagcatttccaaaggcaagagggtgttattcattatttgaggtgttctgtattcaaataaatatcagctgaagaaagttaaacagctggtcgggtgtagtggcttatacttgtaatcccagcactttgggaggccgaggcgggcggatcaccagaggttgggagtttgagaccagcctgaccaacatggagaaaccccgtctctactaaaaatacaaaattatctgggcatggtggtgcacggctgactcccagctactcaggaggctgagataggagaatcacttgaacccggcggaggttgcagtgagccgagattgtgccattgcaccccagcctgggcaataaaagcgaaattccatc

SEQ ID NO: 248866 - DNA, 597 bp, Homo sapiens
cccatgttgtgcaggctggtcttgaagttcttaactcaagcaatcccttgcctgcctcggccccctaaagtgctgagattacaggcattagccactgcacccggcccctaacataattcttaatgatgaaagagtaaatgcagtccccttaagatctggaacaaagcaaacatgtctacttgcatcgcttctattcatcattgttttgtaggccccagacagtgcaataagaaaaagaaataaaagagatacagattggaaagtaagtaaaacatatggacaatacaatagtgaagaaacctaaggaatctacaacataactactataactaatcagtaaagataacaaagtcacagaatacatagtcaatataaaaagaatcaactgcatttctatattctagaaagtaacaattagaatttgacattttaaaacataccatttatgatagcatccaaccaaaaccatgaaatacttaaggataaaattaacaaaatgtgcccaataactttacactgaaaactacagaacaatgctgaaataaagaaaacctaaataaaagtaaaggtgtactacattcatggactgggagccat

SEQ ID NO: 248867 - DNA, 382 bp, Homo sapiens
atttttttctttcttatttttagccacttatgctaccagaatgtttgcattttttgatcagtagacatattacaggacaccctaaatcttcttgtgaacagagaaaataaaatgataagcctgccagtgaaagaggtgacattcactagcaaatgtccagagcatatcactgctcacaagccatttttcttcctggttgctttttcccttgtcctgtttttcaagcactttcttaaaactaataatattgtagaccttgtatttctgaagagcagtgggcttatatgggactttggctttccatttttatcttgctgaagtttttgagtttttgcaacacaagtattttttgttatcagaaataagataaaacatttaaaag

SEQ ID NO: 248868 - DNA, 362 bp, Homo sapiens
ttcagctacctgaggaggtccgtattttatagcctttgtttaatatatgggaaaatgggagtcaaggaaaattagagtccttgccttggtaatacatccaggacacaggaaaattggaattggaacacctgcctgtgacaccagtgcatgcttttaacaacgaccttgataacttctcacttttactcccttccttgtttacccagtctgtccacctggaaatgctagttcattaagactcagatcaaaggtcatttcccatcagaatgtttctctgactattccagacacagtctaatgcatcatccttttctgatctgtagagaacattaaaaggttgtttaattttaagcttttatata

SEQ ID NO: 248869 - DNA, 589 bp, Homo sapiens
gttcatataggaaaggaaggatgaatgcttgattctccctctttatttaccaatttttaaaataatgaattggtttcctggcatcctcctaggataatcaattaattttttttcatttttaatatcattatgaacaaggcctagaattttttagtatcattttaacatatttactatatcaatccattgaagttattatccttaattagtattcaaattactctgtttttggcctgtgggaggcctgtcaagtagacttcttgatccatttgacatgagcctagtatttgatagcttacttgctatctgctatgtccaaatattccagattcatttctatattttttgttttagacctggaatcagctatttctccaatagctttacttttagtaggaaaaagtatttggagaacacaatctaggatctagggtgctcactgctaccaggttggtgattgtttctaggcttttatagtggacagagcataccctacagatagagaacttcaactgggaaaattggaaggtcacaaggaccccagaagataattatcaatcccattcattgtttgtcaactaaaaaaaaa

SEQ ID NO: 248870 - DNA, 474 bp, Homo sapiens
tatcactatgaggctagactcaaactcctaagtccaagtaagactcctgccttagccttgatctcaactagctgggactacagatgcatgccaccttgctcagctgaatcttatagtatttatgactgaagatataacttatactataattataacttataatatctataactaatatctatctatccagggaacacttattctctcgaagagaactagtatggacagttgtgatagctagctttttacagtatcaaatatcaaatgtaggccaggcacggtggctcatgcccataattctaacactttgggaggttaaggagggaggactggttgaggccaagagtttgagaccaggctgaggaacatagtgacaaaaaatgtttaaaattagcgaggtgtggtggaacatgcctgtagtcccagctacttgggaggctgaggcaggaggatcacttgagcccaggaggctga

SEQ ID NO: 248871 - DNA, 848 bp, Homo sapiens
tttttttaagaaaagcattggcaccgcagcagcctcccccgcttcttccctactaggacgcccgcctgactcgccccattgcacaattcttaccgtggaacagccgcgtgactcggcgggagcccaaaagtttcccaggtttcctcagcctagaaaagcgtgggtgggtgtcccggcctggctccaggcgccctttaagttgtatttcttcgggtaactgggttgccctttaaaatgtggagattgtcctttagaaagaaagaaaatctcacgagctcgctggcccgccaggtctaggttggcgccgggtgactgcaatgaaacgcgtttcttttcccatgtacattttcagacggtaaaagtgtttcgatttgtttgggggagaagtcaggcgctggttttaaaggaggaaggggaatgatgcttaaaagcagagacacgatttggagctctccaagaatcatagtgtttattaacaatgattgtgcttagtagacactgagaaaatatcgaacgaatgagtatttggaggagggatttaaatgggtgtctataggccaacgctttcattctgctgatgagaaaacctagaggttaagtgatttgcccaaagtcacctagctaattaatgtggaaggcaggaatggaatctgtctcgttttgactccaaattcttgttatgagatgggtgcgttttcccctctctatgaaaaaaaaaaatgccttctgtagtaatctctgtaaagccttactccactccctctgtctacgcatctaaagcaaacatacaaaacaaaaaagaaaacagcaatccccaaatgcaatccatgcactcaaataggctaaat

SEQ ID NO: 248872 - DNA, 361 bp, Homo sapiens
acttttccagaaacatcgggataagaacaccaaaacagacaaagaaaatatgtttcacaccttcctcaacaaacttcaaaatctcatcacactgattaaggagaatcatcactctgtaatcttgtataatgcatttaagctgtccctcctctattctctcataaaaacttgtgtatacaactatgattgccctgcaaatattattgcttcttaattcatgcaaatctatttcttcttcaatgtgtgggctacttaaggataggaactatgtcctaatcatctgtgagtgacaaatcagacaagcaataaatactgcctgtattaggacatgcataaataaactcagatgggtagaacctga

SEQ ID NO: 248873 - DNA, 504 bp, Homo sapiens
cagtacactagaaatgcaaatgaatgtgtagtgacaggaaacaggccagtggttgtttgggtgtagacacctccttggagaaactgcttgtacctaggacaagagatggtggagagctggacaaatccagggttgtaaaacagagatcataagactgatggaatggagtctttgtggcttataaattatgaaattataaataagactaaggccatgccaggcaaaagtcacatacccctacactaaaataataaatgttctaacttaccaattgtcagatgctaactgatgcccccagactccagactccattccacaaagcataactacaggtttgattgaacaagagactgacttcagtaattttctcctgataagacaccactgaccatgggctggttctggccagtttatagaggctgcgcactgagtacctttgtgttcttttttttttgaggcagacctgtactccagcctggggtacagagggagaccctgtctcaa

SEQ ID NO: 248874 - DNA, 434 bp, Homo sapiens
catttgcatatatttggggttaaacaaacactttttaatataatttatgtattttgttcaaactataatttattaagccatattttagatatttaatactctgaatccatgttgtcagttttccaaaagagtccctatttgtaccacgtatccatccttttcctatgattcgtaatgctgttcttgctgtgctcacaccggcaataaatactaatcaagctaaattcaactgcattttatataggttttctttctttctctctctctctctctctctctctctctttctttttttttttttttttttttgagacgatgtctctctctgtcgcccaggcgggagaatcacttgaactcaggagggggaggttacaatgaaccaagatcatgccactgccccctccagcctgggtgacagagggagactccatctc

SEQ ID NO: 248875 - DNA, 447 bp, Homo sapiens
aatcccttagttttcctaaatgtctacagtggacgccctgttggtttggcttgctgggttgtgggtggacacgcaaggaggggatttttatttggccagcagtctcacccactgatctccaccccagaccttccctgattggtgtctcagcatttattttcctgtctcttccaccaaaagccagctgtagctttatctcgtaaaagttacccatcttctctactgtccccattctctctcctcccaccttcaccccagattcaagttttcctccttgtaggcatttcatctgtgtgtgttttctggattttctctctctcttcttatggccatttcaccttattactgattgggtagagggggaaaaggagaatgatgatgatagtttccttctgtctattgaccttttttataataaagtataacatgtttataaagggcatcata

SEQ ID NO: 248876 - DNA, 495 bp, Homo sapiens
tggggacccctcccatccctcttagtgttgtcagggaattgcatccttctcgggaccccttccatcattctcactgtgcctgcacagtgtcagggacccgcatcccctggggacccctcccatttctcttagtgttcttgaactctggtcaaagacttgcatccttcttgggacccctcccttccctctcagagtccccgcacagtgtcagggactggcattcctcttagtgttcttcaactcctgccagggacctgcagccttctcggggcccctccaattcttatcagtgtccccgcacggtgtgagcgaccggtatcctcctagcgaccccttacatacgtctgtgttcccgcagtgtgagggacctgcatccccctggggacccctgccatccttctctgtgtcatcgcgtagtgtcaggggcctgaatccccctcagagcccctccatccctgtcagaggcctcgcatccgctcaggaggccctcaacac

SEQ ID NO: 248877 - DNA, 431 bp, Homo sapiens
accattttccattataaaagaaattcttccaaatcacacaaaacactctgacacttctccaattccccctatcatggggctggcagcagccgctttgcgtcctgaatgtcatgacagtgatggtaacagtaatgatgataacagcaatgatgaagtctcacatttaaaattttcaagtcactcatcacatcccaagtcactcccttcattaccttttatttatactggagtcatcctgtgtgcctcagtcagaccattttgtatgtacaatgaccgacaatgagatttaacatgcagtttgcagatcctcccttctctgggtcacctgaaaataagccacaaacaaaggaatgaaattgttgatgaaaagggaagaggcaagactccatatgaagaatacaactgactcacctgtctgtacatgcctctgt

SEQ ID NO: 248878 - DNA, 503 bp, Homo sapiens
gttgagtccaaagcatgatacacaaacctaaattcgtaactaaaataatcatagtcgaaccacagaacatatcagactcagggaagatcctaacagcaacactaagagattaaaatgtctctccaaagagcaattggacagagaactggtttcacaactggaacaacaaaagtccgaagatagagcatggcttcaaattactgagagaagtgcagtctagaattctgagcccacctcatctgtaaaaggtaggacaagccgggcatggtggctcccgcctgtaatcccagcactctgggaggccgaggcgggcagaggtcaggagtttgagaccagccggaccaacaaggagaaaccccatctctactagaaatgcaaaattggccaggtgtggtggcgggcacctgtgttcccagctacttgggagactgaggcagacagaattgcttgaaccagggagacagaggttgcagtgagccgagatcgcgccactgtactccagc

SEQ ID NO: 248879 - DNA, 391 bp, Homo sapiens
gtatgatggttggttgctatatttctaaatgtcaggtacaggttttggtcagaaaggaggggggtgctgggcatggttgctcgcacctttaatccctgtgctctgggaggccaggcgggaggatcgctcgaagccaggagtttaagactggcctgcgtaacaaaacgagaccccaagaaaagtctctaaaatatatatttttaaaaattagcagccgggcacggtggctcatgcctgtaatcccagcactttgggaggccgaggcgggcggattgtgaggtgaagagattgagaccattctcgccaaccaacatggtgaaaccccatctctattaaaagtacaaaaattagctgggcgtagtggcacatgccgtagtcccagctactcggg

SEQ ID NO: 248880 - DNA, 433 bp, Homo sapiens
ctcagggtcggcttagcaagaaaggaggcgctggggagacctctggggtcccagctgccaaggtactcgccgctccaaggagatgcggacgccggataccagctctgcccaagattgctgggtcccgccgcggcctttaaaggcccaccacgtggctgcgcggccagccctggtccggaggcggtgcccgggtggcgcctgcgcactgcctagcagaggggctggggttccgagaaaaagcgtctggagaggaaggggaggctgcttggggtgggacgccgtgggaggagtcggctccttatgcaaatcacagcggagcgcgcacggtccggaggcggggcttgcgatgcaaagacaggtccgtctggcgaacagcgagggggcgggccgcaaccctctgcctctttccgcgagcgctgacgtcgccgacgtg

SEQ ID NO: 248881 - DNA, 164 bp, Homo sapiens
gattccccccatctgggtgtatgtcagactgttcctcacctggtgctattccatagggaaaaatgcaacactgaagagtcagcccttttcattttggcctcttgtttatcctatagcagtaagttaacagtttgactgttaatttcactttgactcattggcct

SEQ ID NO: 248882 - DNA, 372 bp, Homo sapiens
tctcactctgttgcccaggctggagtgcagtggctattcataggtgcaatcatagtgcactgcaatctccaactcctggtcagccgctacttcttaaaatgtttctctgtctggttcatgtttcaaagtctggttcatgactctgctacacttcagtttcaaaagctggtagcaaaggaaaagaacatgccaagagctgacgttctgctgtgatgagaccacccaagctccccgtatctataccaagggatctgttgcccaggctggagtgcagtggtgcggttttggctcactgcaacctctgcctcccgggttcaagcgattctcctgcttcagcctctcaagtagctgggattatagatatgcactacc

SEQ ID NO: 248883 - DNA, 513 bp, Homo sapiens
tctaaaaataagaaaaaattatattatgttagcataatggtatatgtatataattcatagagaatgaaacgtacatatgtttagaagcaatgctcaatttgtatttattttctttttttacttaggagagtacatgactaaaaatgtctggagataaccagtccatggtttttactggttagtatgtttaattagtcccttaggaagttacaaaaacagtgagtccaccttatagtcagtaattattttatgaatttttaatatgtaaatagttctgtgctaaactttgcaatagaaacaaagaagtgtaaatgatggcccttgtcttcaaggcactcccataatggggaagaataagaagactgttgaattccaagttagttgatgtgggctgggatcatgcatccgtattttcatgccaagttgagatgtgtcgagcttcaccaagtagcgtgggatacttagcgaagggatggagaacaattggtggagtaaaggaataagggactgagt

SEQ ID NO: 248884 - DNA, 478 bp, Homo sapiens
gagtctctagcagagaattgctccttcccttttccagcttctggtggctgccagcatgccttggcttgtgactgcatcactctatcttcaaggccagtatcttcaaatctctatctccatcttcatgtcatcttctcctgtgtatgtggtcaaattccctctgcctccctctcataatgatacatgtgatttaggacccacccagataatctggccatctcaagatccttcacttaatcacgtctgcaagactacatatgaagtagcatttgcagattctggacgttagggatgtggatttaggtatggggccattatttagcctaccacactgggtgtctcctcagcgtttctgaggttccccccacccttaatcagccattgtgtggtttttatctgtgtatttcttgaacatatgtctatttttcaacctgtgctatttctcagggtaaataattaaatataatttgtttaatcc

SEQ ID NO: 248885 - DNA, 440 bp, Homo sapiens
ttgagatggagtctcactctgtcacccagcctggagtgcagtggcgtggtcttggctcactgccagctccgcctcccgggttcacgcaattctcctgtctcagcctcccgagtagctgggactacaggtgcccaccaccacgcccggctaattttttgtattcttagtagagacggggtttcaccgtgttagccaggatggtctcgatctcttgaccttgtgatccgcccgcctcagcctcccaaagtgctgggattacaggcatgagccaccacgcctggcccattttaaccatttttaagtgtacagttcaatggcactaaatacattcatatcattgtacaactgtcaccattattcatctctgtaactgaattttgatgacatacaggaacaccaatggtttttaaatatactttttataagtggccactattctc

SEQ ID NO: 248886 - DNA, 422 bp, Homo sapiens
ttatgcaagtaaattgtagactctcttgaatgagtggggactctcaacttcaagagttagcttggaaatggatccacatttgactccatctctgcctgagagcaacttccagaattgtgtctatagagaattatggagcggactttttccattgaattcaatttgtcagtatgattaataaactgcataaattaaataagtttcttaaggggaattttcaataattgtgaatagacagatttatagaatttactaaaacttgatgtgtgcagagaggtgtcatctcctcccactgctccatatgtgccaactccagttatactgagttgcctacagagcgacacagctatggcacgtcacgtgcacatctgaatgcctttgtgcctctgcaaatgtgttctctcacttaggggcctagaatg

SEQ ID NO: 248887 - DNA, 402 bp, Homo sapiens
cagtatatatgtattctactgcagcttaattgtattcagttaacataattgaagagattaaataagaaatgtagaaataagtaagacgtagatcttaaggatctctctggttaactgtaagtgaaagactatctcaccacaatgcttaatgtaaatggtctgattggttagtgacaacctcatcaattattgcagcatgcaaagggattgatttttaaatttttatttattattcattatttagtatgtacttgcttgtttgctttcttatttagttgcttatttatttgcttattactttcctaccattttaaaagaggaagaagatactatctaagtgattttgccaagttcttacattttgttggtttatattgctttaaaatacatgcttgaaatcac

SEQ ID NO: 248888 - DNA, 339 bp, Homo sapiens
gagacggagtcttactctgtcgccaggctggagcacagtggcacgatctcggctcactgcaacctccacctcccgggttcaagcgatttccctgcttcagcttccagagtagctgggactacaggcgtgcgccactacaccctgctaattttttgtgttttagtagagatggggtttcgccatgttggccaggatggtctcgatctcctgaccttgtgatccgcctgcctgcctctgcctcccaaagtgctgggattacagttgtgagccaccgcacctggcctagattggttctttagtttgtactttgatcctgtggtttattgtttaatcaaggtt

SEQ ID NO: 248889 - DNA, 340 bp, Homo sapiens
cataaaataaatgctcagaaggtgttgctgctattattattagagtcatcttaaatcatgagtttgaatgttttgttaaaatcttagaaagtccttgatatgaccgggtgtggtggctcacacctgtaatcccagaactttgagaggctgaggtgggctgacctcaggtgatccacctaccttggcctcccaaagtgctgggattacatgcatgagccaccgcacctggccaaaataatggttcttaatagtggccctgaagtatcaggaaaagattaaatgttatttaatgctgtctttttaagaatgtggaaaactatgatatgctttaaaaaaaaaa

SEQ ID NO: 248890 - DNA, 332 bp, Homo sapiens
gtttgttttattttgatttggatctcaggtgcagacagttgagttaagtgtagtccccagttcatgtcacctctggagaatgtgaggtctgtgtaagatctctcatttctttattccttttcttttcatatttacagtgaccatatatttaccctaccaacaagagcactttttagaagaaaaggaggcaatttaatgattattatgctgaggctgggcgcagtggctcatgcctattatcccagtactttgggaggccgaggtgggtggatcacctgaggtcaggagttcgagaccagcctgaccaatatggtgaaaccccgtctctacta

SEQ ID NO: 248891 - DNA, 288 bp, Homo sapiens
tcccacagatattctaagtcatcatcttcttcctcctccttaacctcctcttcttcctcctctaattccacctcttcttcctcttcttcctcctcgtcatcatcatctggcaaggccatctcctccccacctccttggtaggtcaccaggcaggaacttcgcttggtcccatctcggtttgctctctggcccccagaggccatgctgtctgtcatactgtccatgtcctgttctgctattatgtcaccacaacctgtcaatgaatcaaagcttttcagggatgtcaca

SEQ ID NO: 248892 - DNA, 498 bp, Homo sapiens
aatcccactaaaggttccagctctaaatatgctcctttgtccttcctccccattggccccaatctctccccttaccctgagaatgttagaattactttcctaggtctagaccataggtcttctgcaaaatttttttctggaaagaaccagttggaaaatatttcaggctttgcaggacatacagtccctgttgcagccacttgactgtgccatcgtggagcacaaaaacagccatagacaatatgtaaatgaatgggcatggctgtgttctaataaaactttatttacaggcttggaaaacatagcaagacctcatctctacataaaatttttaaaaattaactgggcatggtggtacataccagcagtcccagctactcaggaggatgaggccaaagatcgcctgaacccatgagttcgaagttacggtgagctagggtcatgtgactgcactccagcctgggcaacagagtgagaccccatctctttaaaaaaaaa

SEQ ID NO: 248893 - DNA, 2091 bp, Homo sapiens
  misc_feature (2088)..(2089): n is a, c, g, or t
  misc_feature (2091)..(2091): n is a, c, g, or t
tgcctggctctgcgccccgcccgccggcccgccgccccgccgcttctcgggtcgccctcgggctccggcctcgccctcccttcgacactctctcggccacttccgtcctgggaacgtcccccacccgcgggcggcgccctgggcccgcgctctatggtcgcggggggcaggcaggaagctgctctggccccgttctcgatgctcgggagccgccaaagcccggcagcccctccctggcaggaagcgagggtgcggcgcaatccggagaggacgccaggacgacgcccgagttccctttcaggctagaactcttcctttttctagcttggggtagaaggcggagccggagccccggaacccccgccctcggggtgcgaggcggcagcagggccgtcccctacatttgcatagcccctgggacgtggcgctgcacccaagcctcttctcagttggagggaactccaagtcccacagtgccacggggtggggtgcgtcactttcgctgcgttggaggctgaggagaattgagcctgggaggcgggtccggagagggctatggaaagccgccggcggggaatcccggccgtagagggacagtggataggtgcccgaggcctacagctggcctggggctcgtgtctgggcttcggacgttggggcccggtggcccaccctttccgtagttgtcccaaatggagctggaattggatgctggtgaccaagacctgctggccttcctgctagaggaaagtggagatttggggacggcacccgatgaggccgtgagggccccactggactgggcgctgccgctttctgaggtaccgagcgactgggaagtagatgatttgctgtgctccctgctgagtcccccagcgtcgttgaacattctcagctcctccaacccctgccttgtccaccatgaccacacctactccctcccacgggaaactgtctctatggatctagagagtgagagctgtagaaaagaggggacccagatgactccacagcatatggaggagctggcagagcaggagattgctaggctagtactgacagatgaggagaagagtctattggagaaggaggggcttattctgcctgagacacttcctctcactaagacagaggaacaaattctgaaacgtgtgcggaggaagattcgaaataaaagatctgctcaagagagccgcaggaaaaagaaggtgtatgttgggggtttagagagcagggtcttgaaatacacagcccagaatatggagcttcagaacaaagtacagcttctggaggaacagaatttgtcccttctagatcaactgaggaaactccaggccatggtgattgagatatcaaacaaaaccagcagcagcagcacctgcatcttggtcctactagtctccttctgcctcctccttgtacctgctatgtactcctctgacacaagggggagcctgccagctgagcatggagtgttgtcccgccagcttcgtgccctccccagtgaggacccttaccagctggagctgcctgccctgcagtcagaagtgccgaaagacagcacacaccagtggttggacggctcagactgtgtactccaggcccctggcaacacttcctgcctgctgcattacatgcctcaggctcccagtgcagagcctcccctggagtggccattccctgacctcttctcagagcctctctgccgaggtcccatcctccccctgcaggcaaatctcacaaggaagggaggatggcttcctactggtagcccctctgtcattttgcaggacagatactcaggctagatatgaggatatgtggggggtctcagcaggagcctggggggctccccatctgtgtccaaataaaaagcggtgggcaagggctggccgcagctcctgtgccctgtcaggacgactgagggctcaaacacaccacacttaatggctttctgggtcttttatttgtacccatgtgtctgtcacaccatgaatgtacctggggaaatcaactgacctccctgaacatttcacgcagtcagggaacaggtgaggaaagaaataaataagtgattctaatgctgannan

SEQ ID NO: 248894 - DNA, 921 bp, Homo sapiens
  misc_feature (918)..(919): n is a, c, g, or t
  misc_feature (921)..(921): n is a, c, g, or t
tcatgtctggtacgcccggggtatgggatatcgtcgaccaggccgtcgggggtttagagagcagggtcttgaaatacacagcccagaatatggagcttcagaacaaagtacagcttctggaggaacagaatttgtcccttctagatcaactgaggaaactccaggccatggtgattgagatatcaaacaaaaccagcagcagcagcacctgcatcttggtcctactagtctccttctgcctcctccttgtacctgctatgtactcctctgacacaagggggagcctgccagctgagcatggagtgttgtcccgccagcttcgtgccctccccagtgaggacccttaccagctggagctgcctgccctgcagtcagaagtgccgaaagacagcacacaccagtggttggacggctcagactgtgtactccaggcccctggcaacacttcctgcctgctgcattacatgcctcaggctcccagtgcagagcctcccctggagtggccattccctgacctcttctcagagcctctctgccgaggtcccatcctccccctgcaggcaaatctcacaaggaagggaggatggcttcctactggtagcccctctgtcattttgcaggacagatactcaggctagatatgaggatatgtggggggtctcagcaggagcctggggggctccccatctgtgtccaaataaaaagcggtgggcaagggctggccgcagctcctgtgccctgtcaggacgactgagggctcaaacacaccacacttaatggctttctgggtcttttatttgtacccatgtgtctgtcacaccatgaatgtacctggggaaatcaactgacctccctgaacatttcacgcagtcagggaacaggtgaggaaagaaataaataagtgattctaatgctgannan

SEQ ID NO: 248895 - DNA, 1673 bp, Homo sapiens
  misc_feature (1670)..(1671): n is a, c, g, or t
  misc_feature (1673)..(1673): n is a, c, g, or t
tgcctggctctgcgccccgcccgccggcccgccgccccgccgcttctcgggtcgccctcgggctccggcctcgccctcccttcgacactctctcggccacttccgtcctgggaacgtcccccacccgcgggcggcgccctgggcccgcgctctatggtcgcggggggcaggcaggaagctgctctggccccgttctcgatgctcgggagccgccaaagcccggcagcccctccctggcaggaagcgagggtgcggcgcaatccggagaggacgccaggacgacgcccgagttccctttcaggctagaactcttcctttttctagcttggggtagaaggcggagccggagccccggaacccccgccctcggggtgcgaggcggcagcagggccgtcccctacatttgcatagcccctgggacgtggcgctgcacccaagcctcttctcagttggagggaactccaagtcccacagtgccacggggtggggtgcgtcactttcgctgcgttggaggctgaggagaattgagcctgggaggcgggtccggagagggctatggaaagccgccggcggggaatcccggccgtagagggacagtggataggtgcccgaggcctacagctggcctggggctcgtgtctgggcttcggacgttggggcccggtggcccaccctttccgtagttgtcccaaatggagctggaattggatgctggtgaccaagacctgctggccttcctgctagaggaaagtggagatttggggacggcacccgatgaggccgtgagggccccactggactgggcgctgccgctttctgaggtaccgagcgactgggaagtagatgatttgctgtgctccctgctgagtcccccagcgtcgttgaacattctcagctcctccaacccctgccttgtccaccatgaccacacctactccctcccacgggaaactgtctctatggatctagagagtgagagctgtagaaaagaggggacccagatgactccacagcatatggaggagctggcagagcaggagattgctaggctagtactgacagatgaggagaagagtctattggagaaggaggggcttattctgcctgagacacttcctctcactaagacagaggaacaaattctgaaacgtgtgcggaggaagattcgaaataaaagatctgctcaagagagccgcaggaaaaagaaggtgtatgttgggggtttagagagcagggtcttgaaatacacagcccagaatatggagcttcagaacaaagtacagcttctggaggaacagaatttgtcccttctagatcaactgaggaaactccaggccatggtgattgagatatcaaacaaaaccagcagcagcagcacctgcatcttggtcctactagtctccttctgcctcctccttgtacctgctatgtatccccatctgtgtccaaataaaaagcggtgggcaagggctggccgcagctcctgtgccctgtcaggacgactgagggctcaaacacaccacacttaatggctttctgggtcttttatttgtacccatgtgtctgtcacaccatgaatgtacctggggaaatcaactgacctccctgaacatttcacgcagtcagggaacaggtgaggaaagaaataaataagtgattctaatgctgannan

SEQ ID NO: 248896 - DNA, 1603 bp, Homo sapiens
  misc_feature (1600)..(1601): n is a, c, g, or t
  misc_feature (1603)..(1603): n is a, c, g, or t
ggagaagctgaacggcacggaccccgaggatgtgattcagcaactgacctttgcctgcttcgacgaggaagcctcaggtttacatccatgtaggatccagccgtccgggagctgctcactcaccattgggtgaccgctttcacacgatgaggaatgtggagcgcagatgtaccgaggagtgcacccattgagtaacgaaaggcaacttcaactacgtggaggttcacccgcatcctcaaacatggcgccaaggataaagacgactagtgccaccgcacggcacccgatgaggccgtgagggccccactggactgggcgctgccgctttctgaggtaccgagcgactgggaagtagatgatttgctgtgctccctgctgagtcccccagcgtcgttgaacattctcagctcctccaacccctgccttgtccaccatgaccacacctactccctcccacgggaaactgtctctatggatctagagagtgagagctgtagaaaagaggggacccagatgactccacagcatatggaggagctggcagagcaggagattgctaggctagtactgacagatgaggagaagagtctattggagaaggaggggcttattctgcctgagacacttcctctcactaagacagaggaacaaattctgaaacgtgtgcggaggaagattcgaaataaaagatctgctcaagagagccgcaggaaaaagaaggtgtatgttgggggtttagagagcagggtcttgaaatacacagcccagaatatggagcttcagaacaaagtacagcttctggaggaacagaatttgtcccttctagatcaactgaggaaactccaggccatggtgattgagatatcaaacaaaaccagcagcagcagcacctgcatcttggtcctactagtctccttctgcctcctccttgtacctgctatgtactcctctgacacaagggggagcctgccagctgagcatggagtgttgtcccgccagcttcgtgccctccccagtgaggacccttaccagctggagctgcctgccctgcagtcagaagtgccgaaagacagcacacaccagtggttggacggctcagactgtgtactccaggcccctggcaacacttcctgcctgctgcattacatgcctcaggctcccagtgcagagcctcccctggagtggccattccctgacctcttctcagagcctctctgccgaggtcccatcctccccctgcaggcaaatctcacaaggaagggaggatggcttcctactggtagcccctctgtcattttgcaggacagatactcaggctagatatgaggatatgtggggggtctcagcaggagcctggggggctccccatctgtgtccaaataaaaagcggtgggcaagggctggccgcagctcctgtgccctgtcaggacgactgagggctcaaacacaccacacttaatggctttctgggtcttttatttgtacccatgtgtctgtcacaccatgaatgtacctggggaaatcaactgacctccctgaacatttcacgcagtcagggaacaggtgaggaaagaaataaataagtgattctaatgctgannan

SEQ ID NO: 248897 - DNA, 2023 bp, Homo sapiens
  misc_feature (2020)..(2021): n is a, c, g, or t
  misc_feature (2023)..(2023): n is a, c, g, or t
tgcctggctctgcgccccgcccgccggcccgccgccccgccgcttctcgggtcgccctcgggctccggcctcgccctcccttcgacactctctcggccacttccgtcctgggaacgtcccccacccgcgggcggcgccctgggcccgcgctctatggtcgcggggggcaggcaggaagctgctctggccccgttctcgatgctcgggagccgccaaagcccggcagcccctccctggcaggaagcgagggtgcggcgcaatccggagaggacgccaggacgacgcccgagttccctttcaggctagaactcttcctttttctagcttggggtagaaggcggagccggagccccggaacccccgccctcggggtgcgaggcggcagcagggccgtcccctacatttgcatagcccctgggacgtggcgctgcacccaagcctcttctcagttggagggaactccaagtcccacagtgccacggggtggggtgcgtcactttcgctgcgttggaggctgaggagaattgagcctgggaggcgggtccggagagggctatggaaagccgccggcggggaatcccggccgtagagggacagtggataggtgcccgaggcctacagctggcctggggctcgtgtctgggcttcggacgttggggcccggtggcccaccctttccgtagttgtcccaaatggagctggaattggatgctggtgaccaagacctgctggccttcctgctagaggaaagtggagatttggggacggcacccgatgaggccgtgagggccccactggactgggcgctgccgctttctgaggtaccgagcgactgggaagtagatgatttgctgtgctccctgctgagtcccccagcgtcgttgaacattctcagctcctccaacccctgccttgtccaccatgaccacacctactccctcccacgggaaactgtctctatggatctaggagattgctaggctagtactgacagatgaggagaagagtctattggagaaggaggggcttattctgcctgagacacttcctctcactaagacagaggaacaaattctgaaacgtgtgcggaggaagattcgaaataaaagatctgctcaagagagccgcaggaaaaagaaggtgtatgttgggggtttagagagcagggtcttgaaatacacagcccagaatatggagcttcagaacaaagtacagcttctggaggaacagaatttgtcccttctagatcaactgaggaaactccaggccatggtgattgagatatcaaacaaaaccagcagcagcagcacctgcatcttggtcctactagtctccttctgcctcctccttgtacctgctatgtactcctctgacacaagggggagcctgccagctgagcatggagtgttgtcccgccagcttcgtgccctccccagtgaggacccttaccagctggagctgcctgccctgcagtcagaagtgccgaaagacagcacacaccagtggttggacggctcagactgtgtactccaggcccctggcaacacttcctgcctgctgcattacatgcctcaggctcccagtgcagagcctcccctggagtggccattccctgacctcttctcagagcctctctgccgaggtcccatcctccccctgcaggcaaatctcacaaggaagggaggatggcttcctactggtagcccctctgtcattttgcaggacagatactcaggctagatatgaggatatgtggggggtctcagcaggagcctggggggctccccatctgtgtccaaataaaaagcggtgggcaagggctggccgcagctcctgtgccctgtcaggacgactgagggctcaaacacaccacacttaatggctttctgggtcttttatttgtacccatgtgtctgtcacaccatgaatgtacctggggaaatcaactgacctccctgaacatttcacgcagtcagggaacaggtgaggaaagaaataaataagtgattctaatgctgannan

SEQ ID NO: 248898 - DNA, 1610 bp, Homo sapiens
  misc_feature (1607)..(1608): n is a, c, g, or t
  misc_feature (1610)..(1610): n is a, c, g, or t
ttaagctctgaggaaatgttaagtgccttaaaatagctaaacagggtttattctatttggccccagagatactaggtaagtccaacggatagaaattataaggaggcagctgttggttcaggataaggaagtttttatttgcttgtttgaagacaggttcttgctttattgcccaggttggagaatagtggcgagatcatggctcactacagcttcaacctctcaggctcaagtgatcctccttcctcagtctcctgagtagcagggaccacaggcatgtgccaccacacccggctaattttttatttttagtagagacaaggtctcactatgttgctcaggctggtctcaaactcctgggctcaaccggtcctcctgtcttagctccccaaagtgttgggattacaggcatgagccacgtcgcctgaatactgcccgaccagttttttttttaatagtttaaaatggtctggcttgttagggttaacacctggtccgtggaggcattcagaaagaatctgaatgcctgttggtcagggaagctgtagaagggatttctgtattggaaagagattgatctcagttgcgtttcaactcctttttctagagttcctctaatgatatccctttccctgtttcctttcagacagaggaacaaattctgaaacgtgtgcggaggaagattcgaaataaaagatctgctcaagagagccgcaggaaaaagaaggtgtatgttgggggtttagagagcagggtcttgaaatacacagcccagaatatggagcttcagaacaaagtacagcttctggaggaacagaatttgtcccttctagatcaactgaggaaactccaggccatggtgattgagatatcaaacaaaaccagcagcagcagcacctgcatcttggtcctactagtctccttctgcctcctccttgtacctgctatgtactcctctgacacaagggggagcctgccagctgagcatggagtgttgtcccgccagcttcgtgccctccccagtgaggacccttaccagctggagctgcctgccctgcagtcagaagtgccgaaagacagcacacaccagtggttggacggctcagactgtgtactccaggcccctggcaacacttcctgcctgctgcattacatgcctcaggctcccagtgcagagcctcccctggagtggccattccctgacctcttctcagagcctctctgccgaggtcccatcctccccctgcaggcaaatctcacaaggaagggaggatggcttcctactggtagcccctctgtcattttgcaggacagatactcaggctagatatgaggatatgtggggggtctcagcaggagcctggggggctccccatctgtgtccaaataaaaagcggtgggcaagggctggccgcagctcctgtgccctgtcaggacgactgagggctcaaacacaccacacttaatggctttctgggtcttttatttgtacccatgtgtctgtcacaccatgaatgtacctggggaaatcaactgacctccctgaacatttcacgcagtcagggaacaggtgaggaaagaaataaataagtgattctaatgctgannan

SEQ ID NO: 248899 - DNA, 1458 bp, Homo sapiens
  misc_feature (1455)..(1456): n is a, c, g, or t
  misc_feature (1458)..(1458): n is a, c, g, or t
tgcctggctctgcgccccgcccgccggcccgccgccccgccgcttctcgggtcgccctcgggctccggcctcgccctcccttcgacactctctcggccacttccgtcctgggaacgtcccccacccgcgggcggcgccctgggcccgcgctctatggtcgcggggggcaggcaggaagctgctctggccccgttctcgatgctcgggagccgccaaagcccggcagcccctccctggcaggaagcgagggtgcggcgcaatccggagaggacgccaggacgacgcccgagttccctttcaggctagaactcttcctttttctagcttggggtagaaggcggagccggagccccggaacccccgccctcggggtgcgaggcggcagcagggccgtcccctacatttgcatagcccctgggacgtggcgctgcacccaagcctcttctcagttggagggaactccaagtcccacagtgccacggggtggggtgcgtcactttcgctgcgttggaggctgaggagaattgagcctgggaggcgggtccggagagggctatggaaagccgccggcggggaatcccggccgtagagggacagtggataggtgcccgaggcctacagctggcctggggctcgtgtctgggcttcggacgttggggcccggtggcccaccctttccgtagttgtcccaaatggagctggaattggatgctggtgaccaagacctgctggccttcctgctagaggaaagtggagatttggggacggcacccgatgaggccgtgagggccccactggactgggcgctgccgctttctgaggtaccgagcgactgggaagtagatgatttgctgtgctccctgctgagtcccccagcgtcgttgaacattctcagctcctccaacccctgccttgtccaccatgaccacacctactccctcccacgggaaactgtctctatggatctagagagtgagagctgtagaaaagaggggacccagatgactccacagcatatggaggagctggcagagcagtggccattccctgacctcttctcagagcctctctgccgaggtcccatcctccccctgcaggcaaatctcacaaggaagggaggatggcttcctactggtagcccctctgtcattttgcaggacagatactcaggctagatatgaggatatgtggggggtctcagcaggagcctggggggctccccatctgtgtccaaataaaaagcggtgggcaagggctggccgcagctcctgtgccctgtcaggacgactgagggctcaaacacaccacacttaatggctttctgggtcttttatttgtacccatgtgtctgtcacaccatgaatgtacctggggaaatcaactgacctccctgaacatttcacgcagtcagggaacaggtgaggaaagaaataaataagtgattctaatgctgannan

SEQ ID NO: 248900 - DNA, 1306 bp, Homo sapiens
  misc_feature (1303)..(1304): n is a, c, g, or t
  misc_feature (1306)..(1306): n is a, c, g, or t
tttttttttttgctttccatttgattgttagatcttcctccatccccttattttgagcctatgtgtgtctttgcacagagatgggtctcctgaatacagcatattgatggggcttgactctttatccgatttgccagtctgtgtcttttaattggggcctttagcctatttacatttaaggtccatattgttaggtgtagatttgatcctgtccttatgatgttacctggttattttacctgttaattgatgccgtttcttcatagccttgatgttctttaccatcctggcagagtttttttgttttgttttgtttttgctttttgttgttgttgttgttttaatgaggaacttcaggcattttgtccagagaggaagaagtcgtttgcaaaaatagaatgaaaagtaagagagaggatccagtgcagagatggaggaggtggcctgaacaggagtttcactgtgtctcaggatgctaggccaggggatgctcactattggcccctctcttcctctaggtcccttctagatcaactgaggaaactccaggccatggtgattgagatatcaaacaaaaccagcagcagcagcacctgcatcttggtcctactagtctccttctgcctcctccttgtacctgctatgtactcctctgacacaagggggagcctgccagctgagcatggagtgttgtcccgccagcttcgtgccctccccagtgaggacccttaccagctggagctgcctgccctgcagtcagaagtgccgaaagacagcacacaccagtggttggacggctcagactgtgtactccaggcccctggcaacacttcctgcctgctgcattacatgcctcaggctcccagtgcagagcctcccctggagtggccattccctgacctcttctcagagcctctctgccgaggtcccatcctccccctgcaggcaaatctcacaaggaagggaggatggcttcctactggtagcccctctgtcattttgcaggacagatactcaggctagatatgaggatatgtggggggtctcagcaggagcctggggggctccccatctgtgtccaaataaaaagcggtgggcaagggctggccgcagctcctgtgccctgtcaggacgactgagggctcaaacacaccacacttaatggctttctgggtcttttatttgtacccatgtgtctgtcacaccatgaatgtacctggggaaatcaactgacctccctgaacatttcacgcagtcagggaacaggtgaggaaagaaataaataagtgattctaatgctgannan

SEQ ID NO: 248901 - DNA, 2160 bp, Homo sapiens
  misc_feature (974)..(974): n is a, c, g, or t
  misc_feature (2157)..(2158): n is a, c, g, or t
  misc_feature (2160)..(2160): n is a, c, g, or t
tgcctggctctgcgccccgcccgccggcccgccgccccgccgcttctcgggtcgccctcgggctccggcctcgccctcccttcgacactctctcggccacttccgtcctgggaacgtcccccacccgcgggcggcgccctgggcccgcgctctatggtcgcggggggcaggcaggaagctgctctggccccgttctcgatgctcgggagccgccaaagcccggcagcccctccctggcaggaagcgagggtgcggcgcaatccggagaggacgccaggacgacgcccgagttccctttcaggctagaactcttcctttttctagcttggggtagaaggcggagccggagccccggaacccccgccctcggggtgcgaggcggcagcagggccgtcccctacatttgcatagcccctgggacgtggcgctgcacccaagcctcttctcagttggagggaactccaagtcccacagtgccacggggtggggtgcgtcactttcgctgcgttggaggctgaggagaattgagcctgggaggcgggtccggagagggctatggaaagccgccggcggggaatcccggccgtagagggacagtggataggtgcccgaggcctacagctggcctggggctcgtgtctgggcttcggacgttggggcccggtggcccaccctttccgtagttgtcccaaatggagctggaattggatgctggtgaccaagacctgctggccttcctgctagaggaaagtggagatttggggacggcacccgatgaggccgtgagggccccactggactgggcgctgccgctttctgaggtaccgagcgactgggaagtagatgatttgctgtgctccctgctgagtcccccagcgtcgttgaacattctcagctcctccaacccctgccttgtccaccatgaccacacctactccctcccacgggaaactgtctctatggatctaggagtntgaaataagtttgcggggaggacagggttcatgggcctggctattcatactttcccttttgcagagagtgagagctgtagaaaagaggggacccagatgactccacagcatatggaggagctggcagagcaggagattgctaggctagtactgacagatgaggagaagagtctattggagaaggaggggcttattctgcctgagacacttcctctcactaagacagaggaacaaattctgaaacgtgtgcggaggaagattcgaaataaaagatctgctcaagagagccgcaggaaaaagaaggtgtatgttgggggtttagagagcagggtcttgaaatacacagcccagaatatggagcttcagaacaaagtacagcttctggaggaacagaatttgtcccttctagatcaactgaggaaactccaggccatggtgattgagatatcaaacaaaaccagcagcagcagcacctgcatcttggtcctactagtctccttctgcctcctccttgtacctgctatgtactcctctgacacaagggggagcctgccagctgagcatggagtgttgtcccgccagcttcgtgccctccccagtgaggacccttaccagctggagctgcctgccctgcagtcagaagtgccgaaagacagcacacaccagtggttggacggctcagactgtgtactccaggcccctggcaacacttcctgcctgctgcattacatgcctcaggctcccagtgcagagcctcccctggagtggccattccctgacctcttctcagagcctctctgccgaggtcccatcctccccctgcaggcaaatctcacaaggaagggaggatggcttcctactggtagcccctctgtcattttgcaggacagatactcaggctagatatgaggatatgtggggggtctcagcaggagcctggggggctccccatctgtgtccaaataaaaagcggtgggcaagggctggccgcagctcctgtgccctgtcaggacgactgagggctcaaacacaccacacttaatggctttctgggtcttttatttgtacccatgtgtctgtcacaccatgaatgtacctggggaaatcaactgacctccctgaacatttcacgcagtcagggaacaggtgaggaaagaaataaataagtgattctaatgctgannan

SEQ ID NO: 248902 - DNA, 2010 bp, Homo sapiens
  misc_feature (2007)..(2008): n is a, c, g, or t
  misc_feature (2010)..(2010): n is a, c, g, or t
tgcctggctctgcgccccgcccgccggcccgccgccccgccgcttctcgggtcgccctcgggctccggcctcgccctcccttcgacactctctcggccacttccgtcctgggaacgtcccccacccgcgggcggcgccctgggcccgcgctctatggtcgcggggggcaggcaggaagctgctctggccccgttctcgatgctcgggagccgccaaagcccggcagcccctccctggcaggaagcgagggtgcggcgcaatccggagaggacgccaggacgacgcccgagttccctttcaggctagaactcttcctttttctagcttggggtagaaggcggagccggagccccggaacccccgccctcggggtgcgaggcggcagcagggccgtcccctacatttgcatagcccctgggacgtggcgctgcacccaagcctcttctcagttggagggaactccaagtcccacagtgccacggggtggggtgcgtcactttcgctgcgttggaggctgaggagaattgagcctgggaggcgggtccggagagggctatggaaagccgccggcggggaatcccggccgtagagggacagtggataggtgcccgaggcctacagctggcctggggctcgtgtctgggcttcggacgttggggcccggtggcccaccctttccgtagttgtcccaaatggagctggaattggatgctggtgaccaagacctgctggccttcctgctagaggaaagtggagatttggggacggcacccgatgaggccgtgagggccccactggactgggcgctgccgctttctgaggtaccgagcgactgggaagtagatgatttgctgtgctccctgctgagtcccccagcgtcgttgaacattctcagctcctccaacccctgccttgtccaccatgaccacacctactccctcccacgggaaactgtctctatggatctagagagtgagagctgtagaaaagaggggacccagatgactccacagcatatggaggagctggcagagcaggagattgctaggctagtactgacagatgaggagaagagtctattggagaaggaggggcttattctgcctgagacacttcctctcactaagacagaggaacaaattctgaaacgtgtgcggaggaagattcgaaataaaagatctgctcaagagagccgcaggaaaaagaaggtgtatgttgggggtttagagagcagggtcttgaaatacacagcccagaatatggagcttcagaacaaagtacagcttctggaggaacagaatttgtcccttctagatcaactgaggaaactccaggccatggtgattgagatatcaaacaaaaccagcagcagcagcacctgcatcttggtcctactagtctccttctgcctcctccttgtacctgctatgtactcctctgacacaagggggagcctgccagctgagcatggagtgttgtcccgccagcttcgtgccctccccagtgaggacccttaccagctggagctgcctgccctgcagtcagaagtgccgaaagacagcacacaccatgcagagcctcccctggagtggccattccctgacctcttctcagagcctctctgccgaggtcccatcctccccctgcaggcaaatctcacaaggaagggaggatggcttcctactggtagcccctctgtcattttgcaggacagatactcaggctagatatgaggatatgtggggggtctcagcaggagcctggggggctccccatctgtgtccaaataaaaagcggtgggcaagggctggccgcagctcctgtgccctgtcaggacgactgagggctcaaacacaccacacttaatggctttctgggtcttttatttgtacccatgtgtctgtcacaccatgaatgtacctggggaaatcaactgacctccctgaacatttcacgcagtcagggaacaggtgaggaaagaaataaataagtgattctaatgctgannan

SEQ ID NO: 248903 - DNA, 2854 bp, Homo sapiens
  misc_feature (2851)..(2852): n is a, c, g, or t
  misc_feature (2854)..(2854): n is a, c, g, or t
tgcctggctctgcgccccgcccgccggcccgccgccccgccgcttctcgggtcgccctcgggctccggcctcgccctcccttcgacactctctcggccacttccgtcctgggaacgtcccccacccgcgggcggcgccctgggcccgcgctctatggtcgcggggggcaggcaggaagctgctctggccccgttctcgatgctcgggagccgccaaagcccggcagcccctccctggcaggaagcgagggtgcggcgcaatccggagaggacgccaggacgacgcccgagttccctttcaggctagaactcttcctttttctagcttggggtagaaggcggagccggagccccggaacccccgccctcggggtgcgaggcggcagcagggccgtcccctacatttgcatagcccctgggacgtggcgctgcacccaagcctcttctcagttggagggaactccaagtcccacagtgccacggggtggggtgcgtcactttcgctgcgttggaggctgaggagaattgagcctgggaggcgggtccggagagggctatggaaagccgccggcggggaatcccggccgtagagggacagtggataggtgcccgaggcctacagctggcctggggctcgtgtctgggcttcggacgttggggcccggtggcccaccctttccgtagttgtcccaaatggagctggaattggatgctggtgaccaagacctgctggccttcctgctagaggaaagtggagatttggggacggcacccgatgaggccgtgagggccccactggactgggcgctgccgctttctgaggtaccgagcgactgggaagtagatgatttgctgtgctccctgctgagtcccccagcgtcgttgaacattctcagctcctccaacccctgccttgtccaccatgaccacacctactccctcccacgggaaactgtctctatggatctagagagtgagagctgtagaaaagaggggacccagatgactccacagcatatggaggagctggcagagcaggagattgctaggctagtactgacagatgaggagaagagtctattggagaaggaggggcttattctgcctgagacacttcctctcactaagacagaggaacaaattctgaaacgtgtgcggaggaagattcgaaataaaagatctgctcaagagagccgcaggaaaaagaaggtgtatgttgggggtttagagagcaggtatgaaagggagagggactctgttgtaagtattaggtttttgaagggaggatacaggccatatccccgtatctttgttatttcccccagggtcttgaaatacacagcccagaatatggagcttcagaacaaagtacagcttctggaggaacagaatttgtaagtatccctccaaaccattcccttcctatgcccctcatttaatgctttctcactctttcccctgccctacacttgatttctaactgggcagctgccttcactaggtctctgattccaagaagctcccagtagtgaggaatacatttacaagtaactaagaataagttaagtaccaagaaaaagaaagggggtaagaaagacgtcatgggctttcatagtagttaggattctggggttgggttgggaaagcattctaggcagagagaaagcatcctaggcaagaggactagtccagcatagtcatcttgggctggaactcttaacacacatgagctgggacagaaggtagagaacatagaaaatgcctggtgaggattatgtgcatagctgatcagacagtggggaacgactgatgatattcgcaaaggaggttaagtcctggcagagtttttttgttttgttttgtttttgctttttgttgttgttgttgttttaatgaggaacttcaggcattttgtccagagaggaagaagtcgtttgcaaaaatagaatgaaaagtaagagagaggatccagtgcagagatggaggaggtggcctgaacaggagtttcactgtgtctcaggatgctaggccaggggatgctcactattggcccctctcttcctctaggtcccttctagatcaactgaggaaactccaggccatggtgattgagatatcaaacaaaaccagcagcagcagcacctgcatcttggtcctactagtctccttctgcctcctccttgtacctgctatgtactcctctgacacaagggggagcctgccagctgagcatggagtgttgtcccgccagcttcgtgccctccccagtgaggacccttaccagctggagctgcctgccctgcagtcagaagtgccgaaagacagcacacaccagtggttggacggctcagactgtgtactccaggcccctggcaacacttcctgcctgctgcattacatgcctcaggctcccagtgcagagcctcccctggagtggccattccctgacctcttctcagagcctctctgccgaggtcccatcctccccctgcaggcaaatctcacaaggaagggaggatggcttcctactggtagcccctctgtcattttgcaggacagatactcaggctagatatgaggatatgtggggggtctcagcaggagcctggggggctccccatctgtgtccaaataaaaagcggtgggcaagggctggccgcagctcctgtgccctgtcaggacgactgagggctcaaacacaccacacttaatggctttctgggtcttttatttgtacccatgtgtctgtcacaccatgaatgtacctggggaaatcaactgacctccctgaacatttcacgcagtcagggaacaggtgaggaaagaaataaataagtgattctaatgctgannan

SEQ ID NO: 248904 - DNA, 1166 bp, Homo sapiens
  misc_feature (1163)..(1164): n is a, c, g, or t
  misc_feature (1166)..(1166): n is a, c, g, or t
tcggtacccagttcgacggagactctcactctctatggatctagagagtgagagctgtagaaaagaggggacccagatgactccacagcatatggaggagctggcagagcaggagattgctaggctagtactgacagatgaggagaagagtctattggagaaggaggggcttattctgcctgagacacttcctctcactaagacagaggaacaaattctgaaacgtgtgcggaggaagattcgaaataaaagatctgctcaagagagccgcaggaaaaagaaggtgtatgttgggggtttagagagcagggtcttgaaatacacagcccagaatatggagcttcagaacaaagtacagcttctggaggaacagaatttgtcccttctagatcaactgaggaaactccaggccatggtgattgagatatcaaacaaaaccagcagcagcagcacctgcatcttggtcctactagtctccttctgcctcctccttgtacctgctatgtactcctctgacacaagggggagcctgccagctgagcatggagtgttgtcccgccagcttcgtgccctccccagtgaggacccttaccagctggagctgcctgccctgcagtcagaagtgccgaaagacagcacacaccagtggttggacggctcagactgtgtactccaggcccctggcaacacttcctgcctgctgcattacatgcctcaggctcccagtgcagagcctcccctggagtggccattccctgacctcttctcagagcctctctgccgaggtcccatcctccccctgcaggcaaatctcacaaggaagggaggatggcttcctactggtagcccctctgtcattttgcaggacagatactcaggctagatatgaggatatgtggggggtctcagcaggagcctggggggctccccatctgtgtccaaataaaaagcggtgggcaagggctggccgcagctcctgtgccctgtcaggacgactgagggctcaaacacaccacacttaatggctttctgggtcttttatttgtacccatgtgtctgtcacaccatgaatgtacctggggaaatcaactgacctccctgaacatttcacgcagtcagggaacaggtgaggaaagaaataaataagtgattctaatgctgannan

SEQ ID NO: 248905 - DNA, 1700 bp, Homo sapiens
  misc_feature (1697)..(1698): n is a, c, g, or t
  misc_feature (1700)..(1700): n is a, c, g, or t
ttaagctctgaggaaatgttaagtgccttaaaatagctaaacagggtttattctatttggccccagagatactaggtaagtccaacggatagaaattataaggaggcagctgttggttcaggataaggaagtttttatttgcttgtttgaagacaggttcttgctttattgcccaggttggagaatagtggcgagatcatggctcactacagcttcaacctctcaggctcaagtgatcctccttcctcagtctcctgagtagcagggaccacaggcatgtgccaccacacccggctaattttttatttttagtagagacaaggtctcactatgttgctcaggctggtctcaaactcctgggctcaaccggtcctcctgtcttagctccccaaagtgttgggattacaggcatgagccacgtcgcctgaatactgcccgaccagttttttttttaatagtttaaaatggtctggcttgttagggttaacacctggtccgtggaggcattcagaaagaatctgaatgcctgttggtcagggaagctgtagaagggatttctgtattggaaagagattgatctcagttgcgtttcaactcctttttctagagttcctctaatgatatccctttccctgtttcctttcagacagaggaacaaattctgaaacgtgtgcggaggaagattcgaaataaaagatctgctcaagagagccgcaggaaaaagaaggtgtatgttgggggtttagagagcaggtatgaaagggagagggactctgttgtaagtattaggtttttgaagggaggatacaggccatatccccgtatctttgttatttcccccagggtcttgaaatacacagcccagaatatggagcttcagaacaaagtacagcttctggaggaacagaatttgtcccttctagatcaactgaggaaactccaggccatggtgattgagatatcaaacaaaaccagcagcagcagcacctgcatcttggtcctactagtctccttctgcctcctccttgtacctgctatgtactcctctgacacaagggggagcctgccagctgagcatggagtgttgtcccgccagcttcgtgccctccccagtgaggacccttaccagctggagctgcctgccctgcagtcagaagtgccgaaagacagcacacaccagtggttggacggctcagactgtgtactccaggcccctggcaacacttcctgcctgctgcattacatgcctcaggctcccagtgcagagcctcccctggagtggccattccctgacctcttctcagagcctctctgccgaggtcccatcctccccctgcaggcaaatctcacaaggaagggaggatggcttcctactggtagcccctctgtcattttgcaggacagatactcaggctagatatgaggatatgtggggggtctcagcaggagcctggggggctccccatctgtgtccaaataaaaagcggtgggcaagggctggccgcagctcctgtgccctgtcaggacgactgagggctcaaacacaccacacttaatggctttctgggtcttttatttgtacccatgtgtctgtcacaccatgaatgtacctggggaaatcaactgacctccctgaacatttcacgcagtcagggaacaggtgaggaaagaaataaataagtgattctaatgctgannan

SEQ ID NO: 248906 - DNA, 691 bp, Homo sapiens
tgaccaagatggtaaaaccctatctcttagtaaaaatacaaaaattagccaagcgtggtggcgttagcctgtaaccccagctactcaggaggctgaggcaggagaattgcttgaacctgggaggtggaggttgcagtaaactaagattgtgccattgcactccaccctgggagacagagcaaaactctgcctcaaaaaaaaaacaaaaacaaaaaaaacaaaacacacgcccaaaccgaagctagagatagcacagagttaatgagttcacacccctaaacacagccctcaacaaacaataggtgggatatggtgaacaagtgccccagcctccttgtggtgggatgactctaagctgcatgttctcctctggctccctgagttcctccgacagcctgaactccagttgcccgtggaataacctggttgaagctccttttatcggctgctttcccttccctgtctcacttccaagtgtttcctgaaattctgtcccaaataaaccatttgcacttaaatctttgtctcagggtttgcttatgggggaacccaaactaagacgccatgaagctcctggcacacctattgcctgaatcactgaacacaccaggcatatggaaatgcacgtgtcagaccactctgattaacttcaagaggcagctcctatcatccccactagacagagatggga

SEQ ID NO: 248907 - DNA, 1834 bp, Homo sapiens
ctggcgtgggcgaggcggggctcggggctcgcggtcgctgtagccgcgcggggatctggggtttctctgggacagcggcggcggcggtgggcggaccgtggcgcggggacgagcggccggttagcggcgtgtcggagccggtgtcacctgcgggagaggaaggcgagagagggcagcggctagtcagccttcggagagccccacggcggcaggggagacctcgccggggccgtcacctgctgggtgccttggaaagttagggtcaccgggaaggttagggtcacgtgcctttcaggttgcgggcccttcccccacatccatgaccccacacgccacaggcagcacagcttggccgccttcttgttctggttgagccccagcttggtcgacttgaaggactccaggcgcttccgcatggtcctgtggaagatttcccggtcctgtttctcgtcctccgtgggcgtgagctcgtgtcggctgtacagatgcttgtactgcgggatcaggcacggaggtcacagctgtgcccagcgccggacattctcgccctcctgccgcaggagctgagcacggatcccccgtggtcccaggaggggacgaggaagccgccccacggggtccctgcggggtcctccagcccccagcccgcagtgcccacctcctgccgcggcttgtacaggccaggagccaccacagccctgtctgtgactctcagctcccgaggctgggctcttccccagggaagctgcatgaccatggccacatacaggaggagaccctaaaactccattggcctcatgtccagaactgaatcaggttcagctcgtggaagacattcaggatccggtctcgagacttctgggccgaccgtctcatgaggaccctgctgaggaacttcctgtcgaagtgggaccacctgtagggacagaccttgggtgtgagcctcaggtgacaggcgccctagagcccgccggacgcgtggcccggccccttctctcctgaattttgtttgctatagtgaccctgtaggcgcgtttaaaatgagggaagcagcccctgccacacgcccaggccgtccgccgttctcccgcctgtcctgttggatggaggccgttagacgcatatgaaactgcatgccgcctcctccagagggtggctcaggacacggtgggtgtcaggcctggtcaggcaagggggctttggccacatggggggcaccttcaggtgcacaggaggaagggcaggggcggacagacaccctgagcccttagacttgtgggagccaagctgaccagagtgaggttttttttagcctaacggaattagagtattcgctggttatccggatcagaagggacggtggcctggccggacttagaggaaactctggggcacaaggaggtgatgcctgtcacttggacatgggtgcagccgccagagccgccctccagggcacagggtgggcccgggtgagcttgtgtgctcacacctgggcaggccccgcggcagcaatggcagctctcctgtacaggctgagtttcagccacaccaagaagtcaaagctaaccgaggctgtgccttccgagacccccgggatggcccctgggaggccaaggagtcggggactgggtacccggagcagagtcactgtggccacggagaaccgcagctgagctttatgaagccacgtggccacacctcccggtgcctccaccccaagcaaacacagatcgctcagaaaatgggaacccagggcaaattgtatgtgctccttactgggtttattataagtgtcacatgttttttataataaaacataggtgatttcacctta

SEQ ID NO: 248908 - DNA, 2145 bp, Homo sapiens
ctggcgtgggcgaggcggggctcggggctcgcggtcgctgtagccgcgcggggatctggggtttctctgggacagcggcggcggcggtgggcggaccgtggcgcggggacgagcggccggttagcggcgtgtcggagccggtgtcacctgcgggagaggaaggcgagagagggcagcggctagtcagccttcggagagccccacggcggcaggggagacctcgccggggccgtcacctgctgggtgccttggaaagttagggtcaccgggaaggttagggtcacgtgcctttcaggttgcgggcccttcccccacatccatgaccccacacgccacaggcagcacagggctctccatgggcagcttcccattggggatgctgctgtttctctgcggagcaaacgtgaagctgctcacaccccgacacagccacacccagccctgactgcccccgctccaggccccagccccgccaagcctcctggtgacccagccttacccgcttctgggcacgctcccgcttgtacagcttggccgccttcttgttctggttgagccccagcttggtcgacttgaaggactccaggcgcttccgcatggtcctgtggaagatttcccggtcctgtttctcgtcctccgtgggcgtgagctcgtgtcggctgtacagatgcttgtactgcgggatcaggcacggaggtcacagctgtgcccagcgccggacattctcgccctcctgccgcaggagctgagcacggatcccccgtggtcccaggaggggacgaggaagccgccccacggggtccctgcggggtcctccagcccccagcccgcagtgcccacctcctgccgcggcttgtacaggccaggagccaccacagccctgtctgtgactctcagctcccgaggctgggctcttccccagggaagctgcatgaccatggccacatacaggaggtaggagacagaggcctccacggtggacgatcgtggcgtgaagtccacgttgaccacgttgtcggtgctgggggagcggatgaaggccagggacccgcggcgctctccctgtggtcaggaagcagcccggagaccctaaaactccattggcctcatgtccagaactgaatcaggttcagctcgtggaagacattcaggatccggtctcgagacttctgggccgaccgtctcatgaggaccctgctgaggaacttcctgtcgaagtgggaccacctgtagggacagaccttgggtgtgagcctcaggtgacaggcgccctagagcccgccggacgcgtggcccggccccttctctcctgaattttgtttgctatagtgaccctgtaggcgcgtttaaaatgagggaagcagcccctgccacacgcccaggccgtccgccgttctcccgcctgtcctgttggatggaggccgttagacgcatatgaaactgcatgccgcctcctccagagggtggctcaggacacggtgggtgtcaggcctggtcaggcaagggggctttggccacatggggggcaccttcaggtgcacaggaggaagggcaggggcggacagacaccctgagcccttagacttgtgggagccaagctgaccagagtgaggttttttttagcctaacggaattagagtattcgctggttatccggatcagaagggacggtggcctggccggacttagaggaaactctggggcacaaggaggtgatgcctgtcacttggacatgggtgcagccgccagagccgccctccagggcacagggtgggcccgggtgagcttgtgtgctcacacctgggcaggccccgcggcagcaatggcagctctcctgtacaggctgagtttcagccacaccaagaagtcaaagctaaccgaggctgtgccttccgagacccccgggatggcccctgggaggccaaggagtcggggactgggtacccggagcagagtcactgtggccacggagaaccgcagctgagctttatgaagccacgtggccacacctcccggtgcctccaccccaagcaaacacagatcgctcagaaaatgggaacccagggcaaattgtatgtgctccttactgggtttattataagtgtcacatgttttttataataaaacataggtgatttcacctta

SEQ ID NO: 248909 - DNA, 1395 bp, Homo sapiens
attggcctcatgtccagaactgaatcagccaggagccaccacagccctgtctgtgactctcagctcccgaggctgggctcttccccagggaagctgcatgaccatggccacatacaggaggtaggagacagaggcctccacggtggacgatcgtggcgtgaagtccacgttgaccacgttgtcggtgctgggggagcggatgaaggccagggacccgcggcgctctccctgtggtcaggaagcagcccggagaccctaaaactccattggcctcatgtccagaactgaatcagccagtgcccgagcctgctgcagccccgacccggcagagcaagcggctctgctacctcagccacgtagctgatggcatccttcaggttcagctcgtggaagacattcaggatccggtctcgagacttctgggccgaccgtctcatgaggaccctgctgaggaacttcctgtcgaagtgggaccacctgtagggacagaccttgggtgtgagcctcaggtgacaggcgccctagagcccgccggacgcgtggcccggccccttctctcctgaattttgtttgctatagtgaccctgtaggcgcgtttaaaatgagggaagcagcccctgccacacgcccaggccgtccgccgttctcccgcctgtcctgttggatggaggccgttagacgcatatgaaactgcatgccgcctcctccagagggtggctcaggacacggtgggtgtcaggcctggtcaggcaagggggctttggccacatggggggcaccttcaggtgcacaggaggaagggcaggggcggacagacaccctgagcccttagacttgtgggagccaagctgaccagagtgaggttttttttagcctaacggaattagagtattcgctggttatccggatcagaagggacggtggcctggccggacttagaggaaactctggggcacaaggaggtgatgcctgtcacttggacatgggtgcagccgccagagccgccctccagggcacagggtgggcccgggtgagcttgtgtgctcacacctgggcaggccccgcggcagcaatggcagctctcctgtacaggctgagtttcagccacaccaagaagtcaaagctaaccgaggctgtgccttccgagacccccgggatggcccctgggaggccaaggagtcggggactgggtacccggagcagagtcactgtggccacggagaaccgcagctgagctttatgaagccacgtggccacacctcccggtgcctccaccccaagcaaacacagatcgctcagaaaatgggaacccagggcaaattgtatgtgctccttactgggtttattataagtgtcacatgttttttataataaaacataggtgatttcacctta

SEQ ID NO: 248910 - DNA, 240 bp, Homo sapiens
tggagggtccccagaggggaaggtcctgagaggggaggttcccgagccgggagggctggggctgggaggtggtggctcccagtcccagcgttcctgcagggcccccagcgcacctttctccttgatggtgaaattctgcgcagggctctccatgggcagcttcccattggggatgctgctgtttctctgcggagcaaacgtgaagctgctcacaccccgacacagccacacccagccctg

SEQ ID NO: 248911 - DNA, 2679 bp, Homo sapiens
  misc_feature (130)..(130): n is a, c, g, or t
  misc_feature (280)..(280): n is a, c, g, or t
  misc_feature (437)..(437): n is a, c, g, or t
  misc_feature (584)..(584): n is a, c, g, or t
ggggatttgagggtcattggttctgagggccctccgcctgctcttttgcttctaaatccagcatcttctgtatgacctttgtcccgctcctgccaccccacgaagacagacgtgagggtcaggggagccncggtgctaactgccactctgggcgggcacaggcgagggctgtgcagcacccgggcacgtggggtcttcggaggggctgctccccacaccacttcccctgcccctgccgagccctgccgtggggtggggggcgcagggagagaaagcagcngccctgggtgagagccaggagggacactgggcaggcagatgccaccccaggtgtggggacccccgctactgagtggccgggaggagcccacaggctccccacatgcagctgagcccagggttgtggtcgtgggtcgtgggtcaaggatggtggctgntgtggttgggggagaggctcaaggcccgcctgccaaccttgtcacctatgtgggggtgaggggagcccgccagaggccagagcccccactgtcccttcccaccctccagccaggctccaggcctcctagggccagagtatctgagcnttctctcgcttgccgggcctgtggtttgggggtttgtgtggagcctggtccaggagccctccttcctgatctgcactggctggccctcctgacagccccaggcccccgtgccctctgccaggaggtgccttgccacttggcatggcccgtcacgggtggcacatctggggtgaatgcacgtcagtggaggcagaatcattctgtctgaatgaatggagtttccaggcccccactggccctctgtgtgagggtctgcagggtttggcaggacaggtctttctctccggcgagagcacccaccctgaccggctgctggatgagggcaccaaagctcgctagggagggctctgtccttagggaggagctgcggaatccctgcagctgtgcccccaggccctgccttgcacacttcctgcagccagggcgcccctggggaggtcagggcaggccggggaggctgaggcccacctgccatagtgggcaggtgcgggagccagggcggcagtggcctcggggctgggtggggcgcctggcctctggtctctggagtagtcaggggctctgcagatgctgagaggcctgctcatagtggactgggagatgctggagcagcctcagagccatggccggcccacggcgggagacggccctgctgctgcccctctgcctgtgcgtgtgcacctgtgggcacctgcgtgtgctggggcaggcagggctgtattgggaccaggtcccgtaacagcctgcctgcttaccgtctgctcccatccctggggaaagcaagggagctcggggtcctaggacctgacctcagcgctcacccccaccagcaccacagtcaccaggactctgtgactcagtttaccccacgagagcccctgggattcccagggcatcagaaggcccatcagcctcccgtgaactgctggggtgggcctggccttgggacgcgggtgcaggggcctctcctcactgcccccatggcacccacagccagtgcccgagcctgctgcagccccgacccggcagagcaagcggctctgctacctcagccacgtagctgatggcatccttcaggttcagctcgtggaagacattcaggatccggtctcgagacttctgggccgaccgtctcatgaggaccctgctgaggaacttcctgtcgaagtgggaccacctgtagggacagaccttgggtgtgagcctcaggtgacaggcgccctagagcccgccggacgcgtggcccggccccttctctcctgaattttgtttgctatagtgaccctgtaggcgcgtttaaaatgagggaagcagcccctgccacacgcccaggccgtccgccgttctcccgcctgtcctgttggatggaggccgttagacgcatatgaaactgcatgccgcctcctccagagggtggctcaggacacggtgggtgtcaggcctggtcaggcaagggggctttggccacatggggggcaccttcaggtgcacaggaggaagggcaggggcggacagacaccctgagcccttagacttgtgggagccaagctgaccagagtgaggttttttttagcctaacggaattagagtattcgctggttatccggatcagaagggacggtggcctggccggacttagaggaaactctggggcacaaggaggtgatgcctgtcacttggacatgggtgcagccgccagagccgccctccagggcacagggtgggcccgggtgagcttgtgtgctcacacctgggcaggccccgcggcagcaatggcagctctcctgtacaggctgagtttcagccacaccaagaagtcaaagctaaccgaggctgtgccttccgagacccccgggatggcccctgggaggccaaggagtcggggactgggtacccggagcagagtcactgtggccacggagaaccgcagctgagctttatgaagccacgtggccacacctcccggtgcctccaccccaagcaaacacagatcgctcagaaaatgggaacccagggcaaattgtatgtgctccttactgggtttattataagtgtcacatgttttttataataaaacataggtgatttcacctta

SEQ ID NO: 248912 - DNA, 1689 bp, Homo sapiens
ctggcgtgggcgaggcggggctcggggctcgcggtcgctgtagccgcgcggggatctggggtttctctgggacagcggcggcggcggtgggcggaccgtggcgcggggacgagcggccggttagcggcgtgtcggagccggtgtcacctgcgggagaggaaggcgagagagggcagcggctagtcagccttcggagagccccacggcggcaggggagacctcgccggggccgtcacctgctgggtgccttggaaagttagggtcaccgggaaggttagggtcacgtgcctttcaggttgcgggcccttcccccacatccatgaccccacacgccacaggcagcacagcttggccgccttcttgttctggttgagccccagcttggtcgacttgaaggactccaggcgcttccgcatggtcctgtggaagatttcccggtcctgtttctcgtcctccgtgggcgtgagctcgtgtcggctgtacagatgcttgtactgcgggatcaggcacggaggtcacagctgtgcccagcgccggacattctcgccctcctgccgcaggagctgagcacggatcccccgtggtcccaggaggggacgaggaagccgccccacggggtccctgcggggtcctccagcccccagcccgcagtgcccacctcctgccgcggcttgtacaggccaggagccaccacagccctgtctgtgactctcagctcccgaggctgggctcttccccagggaagctgcatgaccatggccacatacaggaggagaccctaaaactccattggcctcatgtccagaactgaatcaggttcagctcgtggaagacattcaggatccggtctcgagacttctgggccgaccgtctcatgaggaccctgctgaggaacttcctgtcgaagtgggaccacctgtagggacagaccttgggtgtgagcctcaggtgacaggcgccctagagcccgccggacgcgtggcccggccccttctctcctgaattttgtttgctatagtgaccctgtaggcgcgtttaaaatgagggaagcagcccctgccacacgcccaggccgtccgccgttctcccgcctgtcctgttggatggaggccgttagacgcatatgaaactgcatgccgcctcctccagagggtggctcaggacacgcctaacggaattagagtattcgctggttatccggatcagaagggacggtggcctggccggacttagaggaaactctggggcacaaggaggtgatgcctgtcacttggacatgggtgcagccgccagagccgccctccagggcacagggtgggcccgggtgagcttgtgtgctcacacctgggcaggccccgcggcagcaatggcagctctcctgtacaggctgagtttcagccacaccaagaagtcaaagctaaccgaggctgtgccttccgagacccccgggatggcccctgggaggccaaggagtcggggactgggtacccggagcagagtcactgtggccacggagaaccgcagctgagctttatgaagccacgtggccacacctcccggtgcctccaccccaagcaaacacagatcgctcagaaaatgggaacccagggcaaattgtatgtgctccttactgggtttattataagtgtcacatgttttttataataaaacataggtgatttcacctta

SEQ ID NO: 248913 - DNA, 453 bp, Homo sapiens
tggagcatgccttggagaaagagaccaaaaaatctccaccaaatgacacctccacttttgtatgggaaattttgaaagcacatttgctgtcgtggtgactgagttgcagtgttcaaggagagagggagagacaatggctgcccatgagcaaagagcctgaatgcttcactggtgtgtctccagggccaaccctgggggtgctgcatatggaactttgggaaaaagacattcttttcgtagttaaagagcacaggatccaaaggacctaggctgagccccttctgggtccagcttgattgtagggccgatttcatcgctttggtctcatttcccacatctggtaaatgtctgtctcacagaaatactgtgacaagtaaataatgtgcatagaaaatactagaatctaaatatatgaagccctatccagatgccctcggcctcaacactttatct

SEQ ID NO: 248914 - DNA, 564 bp, Homo sapiens
gagatggagtctcactctgtcgccaaggctggagtgcagtggtgtgatcccagctcactgcaagctccgcctcccaggttcacaccattctcctgcctcagcctcccaagtagctaggactacaggcgcccgccaccacacccggctaattttagtagagatggggtttcaccatgttagccaggatggtctggatctcctgacctcgtgatctgcccgcctcggcctcccaaagtgctgggattacaggcgtgagccactgcgcccagtcgtgaaagaactagcttctaatcttctatagttaggatacaattaaaaagtatttaaaagtagaaaaaaagtagaagtgctttactatttaaataaatggaagtaaacactgaaagaaacagctattaagagtttaaagaagttgtctctggcgagggggaaatttaaaaaataggagtgaaataccatggagaacttctatttttgtaataaacttaataaatacaaagcgaaggacacagaagaatagtatatattgatacctgttatgaaaactaagctcacctggagaaa

SEQ ID NO: 248915 - DNA, 638 bp, Homo sapiens
ttttcctttctttgattgtttttccttcttttttaaaaaacaaaaacaagaggaaaacagatgggggaagagaattgccagaaggaagatggccccagagggtcagaagagggatggcccagacctgctgtctccctcttagtttggccccacccaccaccaaaaaaagaaagaaagaaaaagaaaagaaagatgacaaggaaaaaaaacctcaatcgtcctcctggtcctaagactcaacatgtattttgaaaacgagtagcagaggtggtacttcagctgagccatcacggaggagcaggaaggctgtaactccagaaagaggaatcaaacttgacagcggtttgtgggtttgtttcctggggaccattgctcagaggaaaaaaaaaaaaaggaagaaaagagagagcgagaagtgggggtgaggtttgatttctcatcgtgaagtagctttccttctttcttttcttgaattgacagcacattgccaggaagcaggcctgtagtgtaaattgttaaattagcacattcctaattttggttaagacaattttttagcactggtagcaaagggggaaatctttaagtcaaccaatttaaccccacttatataagaaatacagcttatagctataatg

SEQ ID NO: 248916 - DNA, 265 bp, Homo sapiens
ctgtttaagaatgcaggtttaggagaccaggctcaactcctcaccctgccagactgcattgtgtgacctgaggcaagctgtttagcttctctgtacctcagtttcttaatctgtgtatgattattcactgaattaaatagattaatatatatatatatatatatatagtataaaattgattagtacctggggcatagagtgcttgtaaaccattgaaaatgtacctattgtttatgtttttaaataaatagatgtataaagagta

SEQ ID NO: 248917 - DNA, 383 bp, Homo sapiens
tcccgctactcaccactcggctttctctattctccagccacactgatctacttaaccatccttgagtagtcaacattagtgtgccttcatgctctgcattccaaattccttttatcattcctcattgtctgcgccctctcaagtcttcccacttaatactgcttcttcaagacagttcaaacatgcctgaacttcccaggctgatttaggccacccatggcacccttaatgtgcttctattaaaactcttactatatatcacagcatactttcttgcataagagtgtgttttattcatcagtttgtccctagcacttaactcagtgcctggcatagagtactcaatagatatttgttaagagaaaaagtaactgtcttcaaca

SEQ ID NO: 248918 - DNA, 648 bp, Homo sapiens
accaccttagtgcaggtaaaccagggaaacatttcattggaataagaacttaggttgtcttcctagcgtgtggttcacttttttcccttttttaaaaattgtggtggccaggcaccgtggcttttctccttttttattatttttataaagatggagtctcaccatgttgcccatggctggtctcaagctcctgggctcaagcgatccccttgcctcggcctcccaaagtgccgagattacaggtgcccaccaccatgcccagctggctttcttttttaatgaattgcttctttgtgtcctttggccatttttccattctgaaataatccctatatttcttattgatatatatataacagctctttatacacacacacgcacatatatatacattaaagttatcaatctcttgctatataagctgtcagctttcttactttttttgactttcacatattatggaatagtcatcattttcttttatacagcagtctggtttccacatcagttcatctctttcagatcactgtatacacttaataatgttgaagtgttgatcagtcccattgattctcattccttggcactccccatgagcctcgcacctttcggctggcttctctccatctcctctcccacaaggggtcc

SEQ ID NO: 248919 - DNA, 416 bp, Homo sapiens
gttccaagccatgccacacccttaggagtaggctggggccacaccagttgtctgcaacccaaggtttacagccaggggcacacaacttggagggaagagcagccctttcttttcttcattgtggttttccataggccctctctgtccttctccgttttgattcattgaccctaagagtagcattactttcatatgcagcattaggtgaatgtcaagcatttccagagacctccctaagaagttgttgttagcattcttctgaagaagctgtagaaatgaagtagcagagactttagactagtgacaaaagcaactacctaacaaaagttaggtattgactgactgaagggctaggccatagcccaaaatattactttcctggggcagtggttctttaacattaaacattcagctca

SEQ ID NO: 248920 - DNA, 407 bp, Homo sapiens
tcatcccaaactgaaaccctgtgcccattaaacaataactcatccccctttcctccagctcctcttaaacatttgtagtttgcctttaatattttaaattattttataattagtatatatggacaacttatagaaatctggtttatgttttggaggaaactgtgattggatatgggttgctgatggtcgcataagaatgttgaacagtattgtaggctgccattgaggtattctaaatacctgatgtgctttagagaagactataacatgtaagtgggttgagagggaaaagaggacatgagttttccaaagacaaattcaggtagagtcttttgaagtagaggaatgttgtagattggaatgcagttcagaagtgatttgtgtttcaggcaacaatctagatttag

SEQ ID NO: 248921 - DNA, 431 bp, Homo sapiens
gtgcaaactatctctaataattttacattgattacatgttgacacagtatttctgatatactgggttaaaaaaatgtacaatcaaaagtaatttcacctgtttctttttgcttttttaatatggctactaaaatattttaaattacatatgtgacttgaattatttctcttttatataacactgctaatgtagggaatctaagatactacctgctccaaaattctataatactagcataaagagataataaattaactttattgaactataagaactcaattttatagtcgggcgtggtggcatgtgtctgtaatcccagctactcaggaggttgaggcatgagaattgcctgaacccgggagacagaggttgcagtgagcagagatcatgccactccactaggcaataaaagtcagactcttgtctcaaa

SEQ ID NO: 248922 - DNA, 352 bp, Homo sapiens
gctcaatgcgcgacgcttccatcaaagattaattcgacattctgggcttgagatactgaataagcaacacctggcctcatccgaaccctgcagatggattttccacccaagatgtttcagatttcaacgagagtcccgttctcctggataacgacgtttctggggaagtgagcacccacagaggtcatcttgtaatggaacccagggcaacccctttgaccatgctccgtacacgactatgaacagtcccaacggcagccggctcccttcagtttccccaccgtttgtcaacccggagcctcttttcctttccaaggagactgagttctacattgatggaagcgtcgctcct

SEQ ID NO: 248923 - DNA, 430 bp, Homo sapiens
gttcatccaatgctatccaggagagatgtcccagtgagacaaatgtgcagtcctctccacaagtaaaaagaagagaagctgccttcgggtggtggagtctttaacccacttctcttctgccgagactgaaaaggatccaaatctcatggcattaaggaacaggaagcagggaaattctgcgcagaagagggcagttccctgggcttggccagcagagaaaggagaagcagctggacaacgaggactatggttggaagttggagagaagcagcttgacttcagagggacagcttgatggcatagcttcagagaggagtctgactggggatagccagacttcaggggaagattaccttcctgctccatcccctctttggctccccttcctgctgagagccacgttcattggcaataaagtcccctgcattta

SEQ ID NO: 248924 - DNA, 488 bp, Homo sapiens
gcgtctccctcgcaagtttcggtcgcgtctcccgagccccagtgggcaggacccgggcaaacttcgtgcctttaaatgactgccttgatgccgcggaactttgtttggaccaggcgaggggaggatggggcgaatgagagatctgcaagtcttggaaatccgtgcgcctttgcaaagtttgcaaaatagtttggcgctcacaaccctaggctggtgcggcatttgtaatgcgtgaaaacggttcctcgcaggtgttttactgctagaaaatgcgggacgcgtaggaatccatgggtgcacgtttctgtaatttgaaaatgttgtctctccccacccccaacccttatccctttctttcccaacatttaatccgcagatagatgctttttagaccgtagacttcagcatgccttctttggactgggaaggcttgttgaattagggccgtacccagtgattggaaatagtgcgagacgaatggaaaaaaa

SEQ ID NO: 248925 - DNA, 483 bp, Homo sapiens
tgcctaaagtgggccttaaaacaagggtccctgtccccacgttctctctaaaagtctgcatgatgtccctcgtcatttctacgggttataagtgagcaagacgtttaccacgtatcacacttctgggggctatttcaacgcccaagctggggctgcagaatggtttctgttctaatcctcccccgcgatttccacctctttacactcaactcacagaaaatagagtctgatgcattctgtgtttcatcaccggtcaaaagtgactttgagggtagggtggaggcctgagaagggcagcttcaggcaatagtaatcctgaaatttatcattgctcaaaataaatgtgctcaccttattaaaaagtacaacggaaagccacctttaagataagtagcaaccaagtcgttaaacagcagtcttcaaggaagaactcctgatctcataaggctggagaaaaaacggggttagcctttgctggtgaaa

SEQ ID NO: 248926 - DNA, 173 bp, Homo sapiens
aatgcatcttcttgcttctaaaggtcccgttggagcaattccagcatatacaggtgtagttctcgtttcccttgtgcactatataatacgaactgcctgggctgtgagtcatcctacgatatcataaattctttctgaagagtaatactctgccaattttaataataatctta

SEQ ID NO: 248927 - DNA, 405 bp, Homo sapiens
ttggtagagaccgggtttcaccatgttggccaggctggtatccaactcctggtctcaagtgatccgcccacctcggcctcccaaagtgctgggattactacaggtgtgagccaccatgcctggccttatgtgtcagtttgactaagtcacaaggtgcccggatatttggttatacactattctggatgtttctctgaggatatttttagataagtttaacattcactgagtaaggcggatggtcctccttgatgtgagcaggcctcagcccatcagctgaaggcctgaacagaatacaaggctgatcttcctccaaaccagccggcatcctcctgagtaactgccttcgggcttgagctaaagcagcatctctgggctccagcccaccggcctttgaaaaggaat

SEQ ID NO: 248928 - DNA, 231 bp, Homo sapiens
taccctgaacagaccaataacaagcaaccagattgaaatggtaatttaaaaattaccaacaaaaaaaagtccaggaccagacagattcacagctgaattccaccagacattcaaagaataattggtaccaatcctattgacactattccaaaagatagagaaagagggaatcctccccaaatcattctgtgaagccaatatcaccctaataccaaaaccaggaaaggacat

SEQ ID NO: 248929 - DNA, 891 bp, Homo sapiens
ggtacgcccgtcccgctccgcaggggcagagggggaggggatgaagctgcccggcgccattttgcttgtgggctgccgcccgccgttgcctctccgcggaggctcgaagatagcaaactggaggcggtgagggggacggaatctctgtctttctgacaacagatgcattcaacaatccaccgaaggtttgaggaagtgtcggtattcggtgggactggttctttccccctttcccccagtggccctcaagtctggatataggtgagcttgggcatgccagtattgggtgcacgaacaaggacagcagggcttgggaacgaactccctcccgtcaccctccgaaagcgatacaccttctccccctcccaaacaaccccagtcccgtctccccgttcctctccccctcctcccccagcccagtctggcctccagcgctgggtgaacccggttggggtgtcactcgacgcccactaggggctgaggaggctccagtgcgcaggctccgggcaccggataaaagcggagctggcgagtctagtgctgtctcgatggaggagcaagaaacggaagaggtcggggggagaagcagccggaaaaatgcagccaccgtcaacgccgcctccctgccaccgtgcttcggggtaaaaagctgccgttgccgtcggtgcagttgccgtcgctgcctcctatacttctcttggcctcggggaaggatttccccaccggtgggacaatgtgcggggaggggagtgggaattcctttatatggcggtgattaaacgagggagggacagacagtgatctcgaagaaaaaagggggagaccaaagaataaaagaagggtttccccactaaaatgacacggcgattccggctcttgttttgggggtct

SEQ ID NO: 248930 - DNA, 949 bp, Homo sapiens
ggtacgcccgtcccgctccgcaggggcagagggggaggggatgaagctgcccggcgccattttgcttgtgggctgccgcccgccgttgcctctccgcggaggctcgaagatagcaaactggaggcggtgagggggacggaatctctgtctttctgacaacagatgcattcaacaatccaccgaaggtttgaggaagtgtcggtattcggtgggactggttctttccccctttcccccagtggccctcaagtctggatataggtgagcttgggcatgccagtattgggtgcacgaacaaggacagcagggcttgggaacgaactccctcccgtcaccctccgaaagcgatacaccttctccccctcccaaacaaccccagtcccgtctccccgttcctctccccctcctcccccagcccagtctggcctccagcgctgggtgaacccggttggggtgtcactcgacgcccactaggggctgaggaggctccagtgcgcaggctccgggcaccggataaaagcggagctggcgagtctagtgctgtctcgatggaggagcaagaaacggaagaggtcggggggagaagcagccggaaaaatgcagccaccgtcaacgccgcctccctgccaccgtgcttcggggtaaaaagctgccgttgccgtcggtgcagttgccgtcgctgcctcctatacttctcttggcctcggggaaggatttccccaccggtgggacaatgtgcggggaggggagtgattttgtacggcacagtctagtccactgtggaagcgtcgaaggagtctgttggctaattcctgggatgactgcctcaaagctgtcttatcaaagttacgagctcttgatacatacgcttactcgatcttgatcttttaccgcgcatgtttcatcctctgagtcgcttctattttatactaccgctctcctgctgtcc

SEQ ID NO: 248931 - DNA, 863 bp, Homo sapiens
ggtacgcccgtcccgctccgcaggggcagagggggaggggatgaagctgcccggcgccattttgcttgtgggctgccgcccgccgttgcctctccgcggaggctcgaagatagcaaactggaggcggtgagggggacggaatctctgtctttctgacaacagatgcattcaacaatccaccgaaggtttgaggaagtgtcggtattcggtgggactggttctttccccctttcccccagtggccctcaagtctggatataggtgagcttgggcatgccagtattgggtgcacgaacaaggacagcagggcttgggaacgaactccctcccgtcaccctccgaaagcgatacaccttctccccctcccaaacaaccccagtcccgtctccccgttcctctccccctcctcccccagcccagtctggcctccagcgctgggtgaacccggttggggtgtcactcgacgcccactaggggctgaggaggctccagtgcgcaggctccgggcaccggataaaagcggagctggcgagtctagtgctgtctcgatggaggagcaagaaacggaagaggtcggggggagaagcagccggaaaaatgcagccaccgtcaacgccgcctccctgccaccgtgcttcggggtaaaaagctgccgttgccgtcggtgcagttgccgtcgctgcctcctatacttctcttggcctcggggaaggatttccccaccggtgggacaatgtgcggggaggggagtgtaagctgtaactgcatcatactgaggtccttacaccactgagctccagcctgcgcaacacagcgagactccatcgccactgaatactataaggttttccaactcacgtgac

SEQ ID NO: 248932 - DNA, 370 bp, Homo sapiens
  misc_feature (43)..(43): n is a, c, g, or t
  misc_feature (63)..(63): n is a, c, g, or t
attacggagcatgtggacagaggctcactcccacatctttatncaatactgctgacctagatnggttcttaaaactacacagcagaagcaggcaaactcccctgaattgaacaacagtcttcatccaacaccccacaccaagggtcctaccctgccaactggtttggagctggtcaaccggcccccgtcgagcactgagcttggccgccccaatcctctggccctggaagctgggaagttgccctgtgaggatcccgagctggatgacgattttgatgcccacaaggccctagaggatgatgaagagcttgctcacctgggtctgggtgtggatgtggccaagggtgatgatgaacttggcaccttagaa

SEQ ID NO: 248933 - DNA, 1048 bp, Homo sapiens
tgcatagcgccagcgactacgagagctgctgattcggcagcagatccagcgcaacaccctgcggcaggagaaggaaacagctgcagcagctgcaggagcagtggggcctccaggcagctggggtgctgagcccagcagccctgcctttgagcagctgagtcgaggccagaccccctttgctgggacacaggacaagagcagccttgtggggttgcccccaagcaagctgagtggccccatcctggggccagggtccttccctagcgatgaccgactctcccggccacctccaccagccacgccttcctctatggatgtgaacagccggcaactggtaggaggctcccaagctttctatcagcgagcaccctatcctgggtccctgcccttacagcagcaacagcaacaactgtggcagcaacaacaggcaacagcagcaacctccatgcgatttgccatgtcagctcgctttccatcaactcctggacctgaacttggccgccaagccctaggttccccgttggcgggaatttccacccgtctgccaggccctggtgagccagtgcctggtccagctggtcctgcccagttcattgagctgcggcacaatgtacagaaaggactgggacctgggggcactccgtttcctggtcagggcccacctcagagaccccgtttttaccctgtaagtgaggacccccaccgactggctcctgaagggcttcggggcctggcggtatcaggtcttcccccacagaaaccctcagccccaccggcccctgaattgaacaacagtcttcatccaacaccccacaccaagggtcctaccctgccaactggtttggagctggtcaaccggcccccgtcgagcactgagcttggccgccccaatcctctggccctggaagctgggaagttgccctgtgaggatcccgagctggatgacgattttgatgcccacaaggccctagaggatgatgaagagcttgctcacctgggtctgggtgtggatgtggccaagggtgatgatgaacttggcaccttagaa

SEQ ID NO: 248934 - DNA, 313 bp, Homo sapiens
gagatcctttctctgaaaaaacagcaacaactacaaaacaaaacaaaacaaaacaaaaaacaaagaaaaaaatctgtgggactttgtattaggccaggatttatttattaggtaggacacaaaaagcatgaatcattagagaaaaaatatgttaagaaaatgaaaaaaaaaacccaagactgaactgggaaggaattgaatccctcaatagaccaacaacgagctctgaaattgagtcagtaataaatagcctaccaaccaacaaaagcccgggaccagagagattgacagctgaattctaccagatgtaaaa

SEQ ID NO: 248935 - DNA, 298 bp, Homo sapiens
ggtccctttgatctcattcctcccaagcactacaggtttttcagcactttgacaacatgactatctttggaaggttacatcaccctccaacttcacccaaatggccttccacggctatagaggtttgcggctgagaggcttttttactaaaaaggagacaggaataaggaggagggtggggtggtaaggctaaggggaggttgaaaaaacaaaccaaggaacaaaaatagactttgctctgaaatcccctggctgctgctggaaatccgtcttgccagcacatctccacagtgaccag

SEQ ID NO: 248936 - DNA, 290 bp, Homo sapiens
tagtaacccccctgcctggtgtcagccacccccgcccctggcctggtttgctattgccgggctgacctcgccccgtctttcagttctccgtgtggagggtgctgatccgtccgtctccatctgcttgtgaagcaataacagaacagcataggctgggtaatctatacagcacggaaatttctgtcctcatgcttcaggaggctgggaagtccaagatcaaggcaccagcaggttcaggtgtctggggagggctgcatcttctggaagggagaaggaaactggagggcaag

SEQ ID NO: 248937 - DNA, 386 bp, Homo sapiens
taatcacacttgacattgtcctgagtggctccagaccccttggcacttctattactaatgggcaacctggaagaaagttttgcagtcatcaccagaggacaaagtcatcctcaagcctatttaaagtgagacagtcagagggtaaatgcaactttataaaactatttatgcacttatttccttaataaaagggatgcgtatgcactgtaagtgattcagaagatgctcccgcaacccacttctaccttcaccttcccacaaccttatatcgtcatccaagcacaaccaccaagaacatgtcactctatttccatctagtcattactttgctatacattgggaggttttatcatttttatctcattaataaaacatgtttaaaaaaa

SEQ ID NO: 248938 - DNA, 299 bp, Homo sapiens
ttttttgtccagagaattaggcattcattcagaaagagtattctcagattttctgcatgctgaggtgtgaagattgtcgtgttcttgtggggaagtagccacctatcatgctgtagaaccaggcctaaggtacataatcattacactcctctcagacagtgccagcacttattggatcgtctaaattgaaatcgtctcctttccaggaaagtctcctgcatgttatatgtactctgattacaatcacaattctagtgtttaggtttctaagtggcataacttcacccggataatttttg

SEQ ID NO: 248939 - DNA, 814 bp, Homo sapiens
cggagtttggttttctgtccttgtgatagtttgctcagaatgatggcttccagcttcatccatgtccctgcaaaggacatgaactcatccttttttatggctgcatagtattccatggagtatatgtgatgcattttcttaatccagtctgtcattgatggacatttgggttggttcccagtttttgcttttgtgaatagtgctgcagtaaacataagggtgacagagtgagactccgtctcaaaaaaaaaaaaaaaaaaaaaaaagtggggggaaggattccacagcaagaaaacgctctaaaataaacaaaagtgcccgagggagtgagaaggtgctggctaccctgtggaaaccagaggatgacaggggtgacatttggcctgagacttcatcggaacatgctggttcacccctgtaatcccagcactttgggaagccgaggcggcgagaagatcgcttgagtgaggccaggaattcgaggctgcagtgagctatgatagcatcattgcactccagcctgagtgacagagcaagactcttgtctctgaaaaaataaaataaataaaatgaaatgaaattaaaataaaattattttcccagtggaggaaaggggcacaaacaggttcagctcaggcaggttcagctgccccccttcccccctcccccacaaggttacacagcctttgtagagctgggcagaaaccaaggggtggaactcccaggagggggcccagggaaggtctcttcctcatctgctgggaattttgggggtcctttgtctgggtctacattggaacctcagtcctaggaa

SEQ ID NO: 248940 - DNA, 482 bp, Homo sapiens
acgaatcatcatgcactgcactccagactgggcacagagctagactccatctccaaaaatataataaaaaattatctaagatgactctgaacctttctggctatccaaatcaagatgtgcaaactgttcttaggtatgtattcttttagtttatgctctcatcaaaccagcatatcttgcagtaattcttcctgcttagcctaataatattttttctacttgccagtgggtaggacttacactaataaccatccacctctctgttatagtagtttaagcatttatcctcactagtaacctttctttattaaaatcagttttcataacctaaaatattctgcaatatgacaaatcttaggggataaaataggctggattggtttgagtttaaacaaattggatttacactcttgagctgcatgtaatagatggtgaaacataaatgggacacatatcagttgtgcagtatacagtgatgagac

SEQ ID NO: 248941 - DNA, 376 bp, Homo sapiens
tggtcaatctagccttttatttggggagatagtgacttcttgtgacatagcacaagaagtatccatgttctgtgcaagaaggagacacattttcagttgaggttccaagcaataataataaaaaacaatcaaaatgtatggaatacttaccatgtgctaaccatagtattctatacactgatacatacacacatatacagtcgcatctatcagggattagtttcagaaccctgagggataccaaaattcatggatgttcaagtcccttatgtaaaatggtgcactatgtgtataaaacctacatattaatgtatcttctatgctttaaaacatctctatattacttatgatacctaatacaatgtaaatgctatga

SEQ ID NO: 248942 - DNA, 868 bp, Homo sapiens
ggaaaagaaaaaaaaacaaatggcaaatgaagaacattcactggaaaaatgttgccacaaaattgtgccaagtagatgccacagttcaaaaagtgtaatgaagctgccacttgtatataactaaagcttaaagggcagataagagagaaggtgggggaagtttggccagaccacagaagaaggtaaaacatgggcaggtagaacaagaggaaataaaaccattgcagaactgaagtctcagttggaggagagtgtatattggtgtaacctcaagggaaggtaaaatttcaatattgacaaattaaaatttcatatgccctttgattcagcagttccacttttaaggatttatcctacaggcatttccttgcaaatgtgtgaaataatatgttcaagtctgttaattgtattgacatttataacagcaaaacttttgaaatgacctatatattcccttatagagactcattaaataaattatggttatctctacaatggagtattatgcaaccataaaacataagataactgcatgtgactctatatgtatctcaaaataaaaagcttaattaaaaaataataaggcagccttataaatactgttaatctctaaaatatgttgatggtgaaacaaattaacatgtaagataatgtgtatagaatgttagcattgtataaaaaaataacagactatgctgaccttcttttatttccttagtctatctctggagggacatataagaaactggtaaagcagttgtctctggacaaggaaactagctggtttcttttgagtgttgtaacattttataccattgtattattacctattcaaaacaataaattaaacaatttatttaacaataaa

SEQ ID NO: 248943 - DNA, 314 bp, Homo sapiens
tttaatttaatttaattgttatagaaacaagttctcactatgttgcccaggctggtcttgcacttttaggctcaaacaatcctcccaccttggctgcctaaagtgctgggactaccagcatgagtcactgcactggcccttaaaattgaagttacctgtttctttttgctgtttttaaaggtggctactagaaaatttaaaaggagtggcttgtatatggcttgtatttcatttctatcggactgcactaggcaatctcaaagtctccagctcctccggtaataaaacaccaacaatccctacaaccctcacca

SEQ ID NO: 248944 - DNA, 392 bp, Homo sapiens
acctgcctagactttcttacagtggtgtcctccctagcttgggctccttgggcagtgaggtgggctggggcaggtgagcctctccaacagccattgaaacacccgcaaccctggggcctggggtggtggctcacgcctgtaattccaacactttgggaggccaaggtgggaggaccacttcaggccaggagttcgagaccagtctgggcaacatagtgagaccccatttccaaaaaaaaaaaattagccaggtgcagtggtgcacacctgtggtcccagctactcaggatgctgaggcaaaaggatggtttttgccggagttcaaggctgcagtgatctatgactgggccactgcactccagcctgagaaacagagtaagaccctatctcaa

SEQ ID NO: 248945 - DNA, 423 bp, Homo sapiens
caaaaggccctgtgtgcagaccgggaggcctgagtgcaaggccgtcaaatgccgtacttgaaaccagttggtcacccagggaggccaaagccccgggaggtgccaggcctgctttgtgccagggtgacattgcccaaaggcaaaccagagtcccccagcgcagggcggaatagggggtgctgaggtggtgcgacgctggccccagcctccaggcatctggtatctccagggcccaggcctgcgtcctgcctcggcctgaaggagcaggaggtggccccgtctgggctcccagccagaatctgcctctccccctggtaacagccacctccctcctctgcctggcctctgtccagccaccatacacggccccacgtggggcggctgcccagccccaccctctgaatcttccagggttatgtgacc

SEQ ID NO: 248946 - DNA, 510 bp, Homo sapiens
aggtataaggtctggaactgagtcctgtttctgctttgatgaacttgggtattgtccagacattggggaagggaaaacctgctgggccctggataccaagattacacacctaattaaaaaggtcagtgaacaaggtggacagacccaattctagatcttttctggggaaagacaccggactgcttgtccattaggtagacagaatgactcttaaaatgtatgttagatgccaggagtggtggttcatgcctgtaatcccagcactctgggaggccgaggcaggtggatcacctaaagtcgggagtttgagaccagcctggccaacatggtaaaaccccgtctctactaaaagtacaaaaattcgctgggcatggtgacacacgtctgtgatctcagctactcgggaggctgaggcaggagaatcacttgcacccgggatgtggaggttgcagtgagcccagatcgtcccactgcacttcaccctgggtgacagagtgagactccacctaa

SEQ ID NO: 248947 - DNA, 447 bp, Homo sapiens
agatggagtctcgctctgtcacccaggctggagtgcagtggcgtagctcgatctcagttcactgcagcctcccaggttcaagtgattcttgtgcctcagcctcccaagtagctaggattacagatgtgtaccatcacagacggctaattttttgtacttttagtagagacagggttttgccatgctggccaggttggtctcgaattcctggcctcaggtgatccacccacctcggcctcccaaagtgttgggattacaggcatgagccttccgtgcctggccaatttacctaattctttttaatcgatgcatagtattccactgtataaacatacatgtagtttactcaaccatttatctattggtgaatgttttggccgttttagttcttagctattatagactatatatatgatacacacacacacacacacacacacacacaca

SEQ ID NO: 248948 - DNA, 192 bp, Homo sapiens
ggggtttctccacgtggtcgagctggtctcgaactcctgacctcaggtgatccgcgagaagtgggcctttttatggatccagcaacaaactcccaacctcccaggaaaggttgcttcctgtcatctatataaaactttgtgtctcaggcctttattgcttttttaattgaaataaattatatatatatggtt

SEQ ID NO: 248949 - DNA, 83 bp, Homo sapiens
ccaatctcagcattacccagagcacaggaacacatggtccaccactgcagtagaacaagaatcttcagtgttgcttcagttta

SEQ ID NO: 248950 - DNA, 141 bp, Homo sapiens
agggagaagatatttttacctgtgaatcatttaaacaatatgctgctgttcctgttcctcagtcttttatgataatggaaaactaacatatatccaataaaaggatttagaaagacctgttacttgattcctcaaacctga

SEQ ID NO: 248951 - DNA, 354 bp, Homo sapiens
tctgcatgggccattcagggctgttgtatgggctgtgcactggccttatagtgcctgcccaggctaactcccatatagtctctgtgatttcatcatgtcccacccttgcaggtggtattgctcagcacctctactcacggcagggctggaaagtgtcctggtgtccattttgcattctctgatcacaggttcaccacctaactctccgtcagaattcccctgcatttgtttgtgggtcaggcctgataagttatctactcccaaggatgtattctgggatgggagcaaactataattagtctacaaaatgttgaccatttaaataaaaaattttctaatgtattagttgtaaaa

SEQ ID NO: 248952 - DNA, 492 bp, Homo sapiens
agaaaatacggcacgaggattaagagtgcacattaaactagcatgagatgcaaattccctgctgctcttaaatgtgccaaagccaatttcttctgtatgtgtatttttgagaaacttatgtcacactgaactgactgaagggatggcattgaaatctagcttgccctgatttatgtgtctatttcacagagactcagagatgtagttcagaaaatgcagggcctggcagggctggagacttcagagttcaaactgaagctttcagttggggaataataataatcagatgccctcacccttgtctaggtaatggccgcaaaatccatccgcatgtattattctgcactaatatggttaggaataacaacctgaaatggaaatgtctgcctcagagcaattacagttaatgcttattcaggttttagttgtttttccattaaaatgcaatgagctagtgaaagaacagcatctctgttcactgtttgatttttg

SEQ ID NO: 248953 - DNA, 247 bp, Homo sapiens
ctcagtgaggtactgtgatattatgagatatgtatttggtcttcctctggtttcctggcatacaacttctaaaatccttggaatctccaaagagataaacgtgtttttataggctagagagttgactgatggccaggcgtggtggctttggccttgcacggcggctcactcctataatcctggcactttgagaggccaaggctgactgatcatttgagcccaggagtttaagaccagccccgtctct

SEQ ID NO: 248954 - DNA, 372 bp, Homo sapiens
cgagatcatgccattgcactccagcctgagccatagagtgagtcttggtctcaaaaaaaaaaaaaaaccttgtgttggaaaccatctccaatgaagcagtgttaggagatagggcctaatggatataaattacagtgtctaagatggatactttactcttttcttttgagaagggagagagtatgttatgcactgagaacttttcagatttcttgcagaggtcataatgttccagacaagctggcagcaatcattcccatcccatcacagatccaggcttatttgtagaatggttacacaaaccaagcaaaaccttctgtaaagtttctaccctttgctctaaagttacataaaaacaatttccaagtttgt

SEQ ID NO: 248955 - DNA, 2046 bp, Homo sapiens
  misc_feature (889)..(889): n is a, c, g, or t
taaaacatcaaaatttgtatttatttttcaaaggaatttgagatacctttcaatatttaaaaatgtaaaacagtacaattgtcatgtattgatgcattactgatgaactcttgatgggagaaaggggtacaatctttctgggaggtcactgggcaataaatataaaaagtttttcaaatgcccacactctgtcccagcaattccacttcttggaatttataccaaggacctaagcaaacatatatgcacagaatgagtaacggcggtagacacagagatgccccataggagtgtcatatgaggacttgcttcacaggaggacttgctacttgctgcccagccttggagagtgtggtcaacagatacccccagctatcagctccttcaaagttggcctcagctgcagagtgcagcctcacgtgaggtccttcccctcccaggacagccctcatctggtcagtgaatgacttaagattataaaagcccagccatttccacccaatgggacaacactgataggcctttacagtagaccctggggtctgctgaggctgcaggactgtaccacagttcacctccctcacccacccctgcttcttccctcttcctttcacagggatccagccctagttaatatcttatacctccaatgccatttctgtcagcttctaaagactcaacctgtgatggcatcaagcatgacatgttaagaatgagaatcccaaagctaccaaaacccccaacaatagagatgatggagtaaattatggttcctccatagtgagatattgtgcagtcattaagaatgtaaaaggaggccagttgcggtggctcacacctgtaatcccagcactttgggaggccaaggcgtgagccactgtgcccagcngccaacagtggctatttccaagtggagattttgtacttctctcttttttccaagtgtttttacaaaagacatgtatattacttttataaatgagaaaatctgtatgatacaaaaataaaactgggtttccatatctacaggttctatatctgcagattcaaccaactatggatctgggtgtagggagtaagggaaacaatgaaaaattacaacaattaaaaataacacaaatgttaaaaaacacagtataactacatagtatttacattgtattaggtaatatgagtaatctaaagatgatttaaagtatatgggaagactgtgtaggttttatgcaaatactatatcattttatatgagggacttgagaatctgtaggttttcgtatgaacaggggtcctagaacaaattcccccaaatcctgagggatgacagtatgtccaaatctgacttctacctcatcccacaaccttcaatcccctcctgcctttcctgatttggtaaatggtaccatgcctaaaatttgagggtcatgcacgactttttggtctctcatgccaaccccattccctgtcttgtcaattttatttctactaccttagttaagtctctcattagcgctcagctagatttcagaaacagtgatgaccttcttgaaatctaactcttaaaccaccaacacactccccactcctgccccaattaacccctctttaaaggactcccagtggcctttaaaaaccatctgacaattgccagcacattaagtggtgtccttcaggatctgctccttcctgcttctctaaccacgacttgacctgtgcttctcccttttccagaaatgtgtttctctcccttcctttgccttgctttctcttacctattcttccaggctcaattcaggcctcttccttctcagaaatcaaaaagcttagcagatcctcctgagcgaggtgaggcatatcttctttatgcaatcatagcccctttcacaaggtattatattgcctcttttcctcactgaaccataagcaatttaagagtgcctggcttggtgcctgacacatatctagtattcaacaactgtttattaactggagtgtgtatatgtaaaacctataacttaatgtacagaattaataaagcattgataacag

SEQ ID NO: 248956 - DNA, 541 bp, Homo sapiens
gaggtggtcacctgatgctggtggttgagcagtgactcagggaagctgagtcattatagcgggtgggcaggaggtagatctgtaaccgtcaacaggaaaattacccagttctcatgcagaatcagaaagggaaaggagaagcaggaaattcagactccatgtgcctgagatcaagaaagacaaaaagccagcctgcagcaagcactttgaagagcgaatctgtgcagagagtaacgcggagtgtcaagaggtgtgcagaaaatccaaagaaggctgaggacaatgtgtgtgtcaagaaaataagaaccagaagtcatagggacagtgaagatatttgacagataaatcgaactgggaaaaatataataaagttagttttgtgataagttctagtgcagtttttgtcataaattacaagtgaattctgtaagtaaggctgtcagtctgcttaagggaagaaaactttggatttctgggtctgaatcggcttcataaactccactgggagcactgctgggctcctggactgagaatagtggac

SEQ ID NO: 248957 - DNA, 324 bp, Homo sapiens
ggtaatggcctgttgacggttacagatctactcctggccacccgctataatgactcagcttccctgagtcactgctcaaccaccagctcccacctccaacattgggaattacagttcaacatgagatttggaggggacagacaccaaaaccatatcacctgtctagttcaaaagtcatgcctgcaactaactcttttcatgggccctcagggtatctctctttggtagggaattcctaaagaggtatccaggtataagattcagtcatagtgggagatgacatttcttgaaaataagggttttagctaagctggaaaacattta

SEQ ID NO: 248958 - DNA, 340 bp, Homo sapiens
gagactccgtctctaaataaataaataaaataaagtaattatgaaatatgactatgacaaggtaaaaaataacaggaatcttttaaacccaatttttttaacaatggggaagtagttgggctgcatatgtgttcatccctgaatgttttctcttgttagaaaaataagaggctgcttttcctatcctcttcacactggctttgcaaagactaactgctccatcatccagtcccaaactggccagcaactttacttcatgaggcacagctgccaacacatgtattgaattctctcatggaaatcaccctgacactgaagtcaggacaaacattgcagcttt

SEQ ID NO: 248959 - DNA, 314 bp, Homo sapiens
ccctctcaagattttgatttagtgaatcttggtgggttctgtgagtctgtatattaaaaaaatccaggtgattgttggtcatcaaactttagtaaccaccaatcttgttaatgaagagatgagatgtacttaacttctaagagttatatgcagtgcatctagtctgaggtgaccaacaccctaggaaaagacctgcacagtccagtacagcaggcacgcaggccacatgaggctgttaagcacttgaaatatggctgggctgaattgagatatgctgtaagagtaaaatacattagatttcaagggtttaatac

SEQ ID NO: 248960 - DNA, 408 bp, Homo sapiens
gaaacactttaccactcatttggtttcatgtgttttcttaatgtgtatttttatgtatagagatggagtcttgctatgttacccaggctggtcttgaactcctgggctcaagtgatcctccctccttggcctcccaaagtgctaagattatagccatgaactaccactcctagcttaatgtgtgtgttttttttaatctttactaccttcatcctgagctgcactgcctacccttccctcataggcatcttcttaataatcatatttcatattttccatgtctatttgcatgcatgtagattcttgaaaatatatagaattgattttgtgtgcttttgttttttacacatttcactctgttgtagaaaaaaatctgcaattaaactgaaacttctgcattatctattg

SEQ ID NO: 248961 - DNA, 442 bp, Homo sapiens
agtatatccattagtgttttccccttgtttgctcgactccagggcacaaggctcctctgttacatcagacacaccccctcccacgtcagtgccttgcacttgctgttccttttgcctgggatgctttccacacagctatctcatgagtcattcccgctcccctccctgtcacagtcagctccttcaggtcttttctcaaacacctctgcttagtgagtccttctctagccacctgattaaacttgcaacctacttcttaactcttttcaccaatgactttttatatatatttaaataatttcttattgtctgtctcccttcacttcagatgtcagctccatgaggagagagttttgtctgttttgttcactattatatcctgcatgcctacaggccctgctttatatacaccatagaatactatgcagccataaaaagaacg

SEQ ID NO: 248962 - DNA, 419 bp, Homo sapiens
tgtattcctttaattcagtcataaatcaactctcaattctatgagatttttcacagaagaacggagcgcctcaaaagtggatcaaggcagaaatggatgtggaaattatcatcctgtacctttgaggtaaagaggcttctacagctctggcatgagctaccacaggtcataaccattaggaaagaaactggaatgttaccatgccaggctttgtgaataaactaaagttttgctggtggtggcacaggaaaaaaatgaagaaaccaagaggacttgaaccaagtgggtatgactccaaagcccatgctttaaatgaacaaattggcctaccctctaaggcaagaaccctttaatagtggtctatgtcagaaaaatatcaaaaagactcaaggctcttaaataaataaggaaatgaatga

SEQ ID NO: 248963 - DNA, 430 bp, Homo sapiens
ctgtttggtttctggaaggatcgcggatgaaacctttgcaaagaggcctacctcttggtccattggggagggacaagcatctggtgactggataaattcccttatggcatagaaatgggtttcacccaggtatgcaaaataccttgtctatactaggagatcattttctcaggctgattgaattcctagtatgaattgtgtgagagctttaataaaaatatctttgcagttcttacgggttttgataagctgacattgcacgtgctcaagaaaatgaaggtgataatttacagcacagtatcttatttcagggtatcaaattgaacttggttatttaaccaagtgctagcattaacatagatgagtaaaaattacatttttagcagctgcgttaagaaggaatttaggacttgagcttactcattttcta

SEQ ID NO: 248964 - DNA, 397 bp, Homo sapiens
ctcgttgctctggaggcaatcaaatattaatattagttcccttcttcctgtaacaccaaaatctgatttgttaggaattattgcgctaacagcaggaatctcattgttatatacttttctgaaagtcttataagtagtccactttccacactacacctacaaaaaatatctactaaaaaacatctactttggacaaataaaaagccactccccccatcacgattttaaagttaaattgctactgatgtttgtccttgagaagtgtgagagaaatgacagctgaaagaaaaatgttaagacaactcaaagataatgtgaatgtgattggaagggtccggataagaattttggaagatggaaattttgaagttgtccttggcagtcattttgtttaaga

SEQ ID NO: 248965 - DNA, 335 bp, Homo sapiens
gaaaaagcctccggtctcccgcacagccggctctgcgtgaattgctctttctccattgcaatttccctgtcttaataaatcggctgtgtctaggcagcaggcaaggtgaacccgttgggtggctacagcaatgccctgggtccaaaatctggctcagacattgctaaactgcaaaaggcaaaggctaaagaacttgccactaaactgggttaaacgtccactgttgagttttctgtacataaattctttttttaattctccttcaaaaaaaatactggtctatcaaagtggctcctgccagtaatcccagcaatttgggaggctgaggcaggaga

SEQ ID NO: 248966 - DNA, 541 bp, Homo sapiens
acacctcttctgtatgataaatcatgttattgcaatttatgtgacactagtatctactgtacagtaaccactccaagtcctcttaagcggaggcttctcaatatactgatttctaatgccccacaagtgccataaagtgattgctgttgaccattgtcttgttttaatgtcccctaaataataataaacttgaatgctaaaaaaaattattgtcattcaggaatatatttcttgtaaaccattgtatgatgaaaaaaataaatttccctcttggcaacttaatttgtagataactgaggttgtttttagataggagtcctacactgaatttggaatctaggtgactgtttaatgtcattaagggaatattgtattggctacaatggctcagtaaagtaactggtttctatgtggttatatcaatctatttctgtaacaccgtacactagttttccccctagagtactccttgtaatgctgagaaagtgtcagaaataatgactgtctacctatatctgcaataaaacgtagagcatggaaa

SEQ ID NO: 248967 - DNA, 305 bp, Homo sapiens
  misc_feature (89)..(89): n is a, c, g, or t
  misc_feature (125)..(125): n is a, c, g, or t
ggtttgttctaagcaaaactggacaccaaaaaaatcaaccagtaatttttataagtgcttctccccctctcccagatgtacttcccggnaataaaggattcaaaagataaagacaaaagacgctncaagttgttaaccaagaaagtcctggcttgctttctatatttctattaaaaagtaaagagagctgggtaagtggctcacacctgtaatcctagcactttgggaggctgaggcaggaagatggcttgaggccaggagttcaagaccagcctggacaacatagtgaaacccccatctctaca

SEQ ID NO: 248968 - DNA, 560 bp, Homo sapiens
tacaaaacaatttacaatgttcttttgttccagaattttttaattatttattcttgttatgttgcaaagtacttcattatcttttgttggtattacttggaattcctaactatagttttctcttttggataaagcattttaaaatctttatttaaagcacatttaaatctgcacccagttactctttagagaaactggtttagactcactcttaagtgaacagactcaattttatttgaaacaaaacttaaaaggtaaaattttggccgggcgcggtggctcacgcctgtaatcccagcactttgggaggccgaggcaggtggatcatgaggtcaggagatcgagaccatcctggctaacaaggtgaaaccccgtctctactaaaaatacaaaaaaaaaaaaattagccgggcgcagtggcgggcgcctgtagtcccagctactcgggaggctgaggcaggagaacggcgtgaacccgggaagcggagcttgcagtgagccgagattgcgccactgcagtccgcagtccggcctgggcgacagagcgagactccgtctca

SEQ ID NO: 248969 - DNA, 353 bp, Homo sapiens
tggagagactcatgcctgacttgcttttccaaatgacaaatgagtcttcactgatcttcaggcataatttggtatttccaagtctttttttttctttctttttgaaaaaataccaattgggaactaggtatttccaaatcttaactggggttatttaccatctctggtgccacccaagctgtgagctccttgtgtgcgcattgtgcccagcagcagacacaaagtctggcatagaagcaggcgacgaggaaatgtgtgctgctttgaattgatcctctcttttagttccaatgatgtttagaaaatctcagtacaggatgaagctgacaataataaaaatgcatttgacattt

SEQ ID NO: 248970 - DNA, 257 bp, Homo sapiens
atagcagaagcagtaaaggaagagaatactaagagatcttttgggtgggcagaagtggtaagaaagatagaggattatgggaaaaaatcatttttattgagaccctaaagataattttaaaccacccactttcctacctatatccttgttcgacatggattttggccggaattgttggtcacagtatatccaaaatagctgagtacttattttgttataaagagtggtattaaattactctatttgtaaaactacaa

SEQ ID NO: 248971 - DNA, 482 bp, Homo sapiens
cagaaaatcaaaagtcagtagaagacgtcaacaggctctaacccacctagacttggcagacgtctgtagaatactccaccaacaactgcaaaggttgttgtgcccattattctcaagtgcacgtggaatgtctgacagaataaacccgatgttgtcataaaataaatctcaataaatttaaaatgattgaaatcatgcaaagtatgttctcttaccacaattgaatgaaattacaaatcaataacagaaagaaatttgggtaattaaaaaatatgttaataaaacactgaactccttagtatccaatagggcaaagaagcattcacaagagaatttagaagatagtttgagataaatggaaatgaaaacacaatatactaaaatacagatgaagctaaacagtgcttacagggaaatgtacagctgtggatacttacactaaataaaaagagatctcaaatcaataacccaaccttccacct

SEQ ID NO: 248972 - DNA, 476 bp, Homo sapiens
cagtgattcagactccaatcctgcttcatctctcaggcttatcgcttatctccagctgccaggagacagacgatgggggcagagaggcattttggctgagccaggcctcaggtagccccaagggatttgagaggcctccagacaagcagactcaggcactctcaccaggtcactctctatttaaaaaacaccaagtctatgagttcccttgagaatatagcatttcctgcgacctatgacagcaaaaatggacatttctatatctgttgattcattccttcttcagagctgctgtttcaagtaacccaggactttgggtgaaagtatttagggcagtcgggactccaaaggaccttgcaaaaggtgaattcttgtcccgccccttcccaacttcatttgactttaaaagtaaccctaatactctcatagtaaaactggcgaaatctaaataaactctggattgtaccaatgtcaaa

SEQ ID NO: 248973 - DNA, 798 bp, Homo sapiens
aaaaagaagaagaagaaaaaccggacagaattgtatacactctcaccacaaagatggatacaaggtacacggaaaccaggcaatatgtctttgttttaggttcaaagtctgtcaaaatgagcctctaacttatatcctaattaatgaggacttattggaaactttcaagaattaggaagcccggcctgaggtgcttcccaaaccattttgggttgtttttacttaaaaatgttagaagagaatttagagattatgaattataacttttcatttcacagaagagaaaattgaaaccaagggagatttaagtatttgtacaaggcatgagcataaaaatatatgcatttatcactaatttttaataccgggccattaggtacagaggcatttatgttaaaaacatactttttaatagttattattttatcccagtttggaaattttgacactttttaggtagatgatgaagacacaaaatccgtttgaatagtgaggaaaacatacctatacttcagccgggcatggtggctcatgcctgtaatcccagcactttgggaggccgaggcaggtggatcacctcaggtcaggagtttgagactagcctgcccaacatggcaaaaccctgtctctactaaaaatacaaaaaattagccgggcgtggtggcaggtgcctgtaatcccagctgctcgggaggctgaggcaggagaatcgcttgaacccaggaggcagatgttgcaagtgagccgagattgcgccactacactccagcctgggcgacaagggcaaaacttcatctc

SEQ ID NO: 248974 - DNA, 465 bp, Homo sapiens
ctgcattgggggaaggagggagtctgtatggcatagccatctgggtcccagagtctcccaagaagctgccctaaatcctgccacatcacagctgccaaaaaactccaaaggcagcacctcccttagtggtggctccagaatttcaactctgggactgcaatctggaaggaggctgtgtgtgcaggggaaggagtggtatcttaaagctgtgtttgcacagcacattgcattagaccttaaaaatgtccaccatccatttcaaacagtgggagcactacttataaaaattataaaggcctttagaacccaccctccccataaattaccaccggcaccataggtgattccacatctgacccatcaaacacctatcagtccttgttcttcaaaatgagggcatatttgagacctagtatggcttccagtaacctcccagaaggcctcataaagctgagttgaaagttg

SEQ ID NO: 248975 - DNA, 553 bp, Homo sapiens
ggaccttttcatcagttataacaagtgcacaactcttgttcaggggaagctgtgcagttgggagggcagagagtatgtgggagctctctgtactttgtgctcagttttgcgtgaatctaaaactgctctgaaaaattaagtctgtgaaaaggaagaaatgaactaccaagtcatgaaaaaaacacagaagaatcttcaatgtatattactaagtgaaaatgcatactactgctatggtttgaatgtgtcccctaaagttcatgtgttagaaacttgatccccaatgtggtggtcttggagatgggacctagtgggaagtgtttgggtcatggggccactaccctcataaatgcattaatgccattctcaaaggagtgggttcattatagagcaagtagttttcttataaaagaagtttgccttcccaccctctctttgcccggcctctgggttgatgaagcaagaaggtcctcaccaaatgccagctcctcgatcttgggcttcccagccttcagtcccacgagccaataaatttctgtgcattataaattac

SEQ ID NO: 248976 - DNA, 521 bp, Homo sapiens
gccttatttaaaaatttgtattatttaatacatttaatgcattattttttattatatttaaatattgatttatttgtactttttgccttattgctatattgtttcaaaaaatttaacattatttgagttacatgatttcaaatacatactgattaacattttaattagaaactttatgtctgatatgaattgccaaaatgtgtagttggtacaacctatgagtcattctgggttatctagaagaaactggtagcctgccccatactccagaagccttccccagtgtctagacctcagaagctgtcaggaatatgcacaggagaaggacacatggcaaatagctatttcgtctcttaaatgtatggtatgtgggaaccactgaaaaatgtaaagtttctacaaggtgctatttttattatttatggctctagagaacagagaaggtgaaaaatgtgagagagaagggaaagccaatagtatgtggccttcaaaacaaaagatcccacagatattgtcccaaa

SEQ ID NO: 248977 - DNA, 650 bp, Homo sapiens
ctaaaagctataaaacttctagaaaaaaatgtaagaaactttgtgcaaccctggggtaggcagagatgtcttaggagaaaaaaagtataaattataaaagaaaaaatgttaaattggactttatgaaaatcaaaacttgtttgctcattagaagaaaccatcaaaaaaggcaaatcaatgacggagaaaatatatttgggaaaaaacttgtatctaagatatataaagaactcttacaactcaaaataaacaacctaactttttgaaaatgggcaaaagacttgaatggacatttcataaaagaagatacatgaataagcaccatgaaaagatgctcaacatcattagtcatcaaggaaacaaaagttaaaactacaatgagataccactttacgtcactgaatggcaaaaataaaaagcagtacctagtattgatgtagctatagagcaactggaactcacacattgctggcaggaatgtaaattggaaaaccatttggcagtttcttgtaaagttaaatataccatatttttaccatattagcaattccacttctacatatttacccaagggaaaggaagacatgtatccatccaagacttgcacatgaatctctatagctgctttattcataatagccccaaatgga

SEQ ID NO: 248978 - DNA, 273 bp, Homo sapiens
gagcatctgtaaccctaggcatgtgtgtccacaacctccacacgtacacaaggacactcctacagaggacaggccgtgcggacagttaggggaggacagtggaggccgcttcagttcacttcggtgctttggattcaagtgtttttctgtttcattttctgggtagctgattattaagctaaacactcctttgatggttgaaaatacattagtcccttttcttgcacgaatctaattcaccaaagcctattaaagtgcttttggaccaatgag

SEQ ID NO: 248979 - DNA, 416 bp, Homo sapiens
ttattaactgtttctacatctctgtatcattgaacttgtttaaagggcattcatcatttatttaaaaaatccaataaattgaacatattaataaatacatcaacaacaatgagaaaagagaatcttttgggcctctgttttcattgcacaatccacaaccaaacaagtgcaaataccattgtaattttttctttttctttcttttctttttttttttttttttgagacagagtctcactctgttgcccaggctggagtgcagtggcctgatctcagctcactgtaatatcctgaattcaagagattcttgtggttcagcctcccgagtatctgggattacaggcacgcgccaccatgcccggctaatttttgtatattttttagagacagggttttgctatactgtccaggctggt

SEQ ID NO: 248980 - DNA, 254 bp, Homo sapiens
ggttcagtgtttgggttgacttttgtttcagctgaactagttgacttattctggctttgtggctgcgccagtgaaatatgtacatattttgcctgtgtacggctatcttttcctgttttccttcagggattatacatcagcacagagtccatggcactgctccagataaaacagcgcggcagaatcatcaccactggcagagctctctggttgactcatgaggattgggaataaatgaccaaatataaacagtg

SEQ ID NO: 248981 - DNA, 419 bp, Homo sapiens
tgtaaaataaacagaagtttctgagagtttgctaattagactcctttgaggtttgattttgtgttttgcaatctcctgttattaaaatagttcctcatcccggctgttattaagttcctcatcccgggctgggtgcggtggctcatgcctgtaatcccagtgctttaggaggccaaggcaggcggatcacctgaggtcaggagttcaagaccagcctggccaacatggcgaaaccccatctctactaaaaatacaaaatattagctgggtgtgttggcatgtgcctgtaatcccaactactggataggctgaggcaggagaattgcttgaacccgggaggcggaggattctgtgagccaaggtcatgtcactacactccagcctgggcaacaagagcaaaactccgtctcaaaaaaaaa

SEQ ID NO: 248982 - DNA, 475 bp, Homo sapiens
tgccaaaaggctaattcttatttttaaaaagtttgaataatctatttttattgaatttacattgctcttcctaattaatgaccttgataaaagataactatggaaaggattcggctcggtgtggcctctcaaacagtgaggggcgtgtggcatgacagcaagactgctgaagtttgctctttcttggggtcctcacaggagtaggcattgaaccaaatgcagattctgttccaattcccatattcttggagctcatttaacatgagttgctggtttctgtttcaaatgaaataaatttttcaaacgttccaagatgcatttttcctatttttaatttacagctatattcaactgtggcaaacacaaaagggtcagaatgagaagaactgtggcctattttttaatatgggaagctctggccctgacagtttataaatggtaagattttagaaatagtgtcaacttaaaaacaaag

SEQ ID NO: 248983 - DNA, 430 bp, Homo sapiens
ccggacgctcattcctcacttgcttgcgggcagaggcctactgagagccaggccgtgggccacgcttccgatccggtggggagagcctcaggcgcgtctgcaggcacctgcctcctccaccaacacaacggcgtacacagactcgccctggtggggttaggcagagcgggaacccaaagccccagcgccccacccccagctcgcggaccccgctccctggggagagggcgaggctgcggcaggtgcgggccggatccttgcggggaaggctcgtcactgcaacaacccggccggagcggcggccctggggacccccgagcgggggcaccagctggtgggggagtgggagcgggggagggggaatggcggcgtctcggacagaggcgggggagggcgggaggagacgcccgctgcggtgcccccaggttta

SEQ ID NO: 248984 - DNA, 339 bp, Homo sapiens
aacctcaccattaggaagaagaaaattttcaggaactgtccaagttaagagactacttaaaatcaaacttatcaatgacaggtatctgatcatgatagataaaagctacagttctaagatatgatcaggacatgttaccgatgtacatatagaggaattattcactgcatacaaattatagggttgtggggattttgttttgtgagagttctcaaatttaccaatttcataaatgaaaacttggtaaggactgcataaaattgcataaagatgcaatttggtggacaacacgtcttcacctcaatttgttaagagaacctgggttgtaataagagccat

SEQ ID NO: 248985 - DNA, 710 bp, Homo sapiens
ggcgggcagatcacctgaggttgggagttcaaagaccagcctgacccacatgaagaaaccccgtatgtactgaaaatacaaaattagctgggtgtgatggcacatgcctgtcatcccagctactcaggaaggctgaggcaggaaaatcgcttgaacccgggaggcggaggttgccataagccaagatcgtgccgttgcgctccagcctgggcaacaagagtgaaactccacctcaaaaaataaaaaagagttaagggcaggctgtcttggacacatctctacccctatcttacatgcagaacgaatggtattaattttgtgatgaataaaaaatattttttctttggatatattttaaacttggatatagttcacatattataaaattgagtatatttgatccaatatgtcaagtaccattaaatggataaaatgataaatttggtagaagaaaaaatatttaggaaagtctcagaaatttaaatgtaataaatgaatatgtattcatatacatactataaaactcattatgtaacatattacataaagcacattttgtgttgaggagtgagttccctgtatttagcttcatggaaaaaatagtttcttgtagataaatattacaggtgactgaactaaaaatattttgacaatgtgaactacttggatagcaatattttgagttgttttatacactagttccttatctt

SEQ ID NO: 248986 - DNA, 257 bp, Homo sapiens
atggctggctccagcctgggcagcacaggctctgcccagtgacctcgtggccccactgtttgtcagttacactgtggaggtgagcgtcacaaacgcagggtggagttttcccgcagctgtgtgacgtgaggtggtattgtaacatttatgctctaatatcaacgtaacataaatattggaatatttgttacaatatgttaacacatcatggatttattgttatttttaaatgaattaataaatacttttagatttgt

SEQ ID NO: 248987 - DNA, 794 bp, Homo sapiens
ttattactcaggtcgagcctcttaggcagagtttaacacatgggagctgcctgcctgctgctgctgctgcttcctgcagatcatggaggggctggcctttgttttctggcatctcgtaccacgaacactcatgaagaccctgcagtcattggagcacccgggtcagcaaagcacacaagctcactcaagaccagatggagaacttatttcctgcagctgacagatagactcagattttgtgagactgaaatgttcactgaagacacttgagaaagaatcctctaaaaatcccggctctgcacattattcatctcctggaatttccatgtgaatcacagctctgcacctggatggagttttcttttgtgtgtgtgtgttttttttaatttggttgaacatttgctgctaatgggacttgcccagctgagtgctggctctgaggaagcccacgtttcttttgttaacttaaatgaagaaaggagtggagggaggggatctaaaacccccccgtttagatcccaaaccttagctcaatcagtattgccagagaggggtaagactggttggaagctgactgcagactttgtttccccttagtatgtgctgtgttgtaaatttttctcctccctcctcctacaaggttttgagttggctgctggttagcaaactcctttttacccatataagttatttaatataataatgaagctcaacactgtggtaggaaaatagccactagaaagaaaataaaaagcagagtttgtcattggactgcttaacatgctagaaggact

SEQ ID NO: 248988 - DNA, 224 bp, Homo sapiens
cattcatgttgagacaatcagtagtgatttagggtcagagtttagtgatcatgaccacagactgttttaaggatttactaacatttcaaagtcaatgtttggaaattcttaatgagtaatccactgatatatttgcatgaaacagtagtttatactatgtgtatagaacttggttttgttgcatatgtgggtttttaataggctgcaaaaagcttacttgattt

SEQ ID NO: 248989 - DNA, 437 bp, Homo sapiens
caggactctgtctctaaaaactagtaagattttgtgtgacccatgggacattgagatttccagtattctgctttgatctgtgcaaagagaaactttactggttgtaccactgtttagaaaagtagcattcttttaaggtcacatgatacttgatagacttcctagaaagtctttctgtatcaaaaagtatatatattaaatatataatatatttaatatatattatttataatttattattatattttatataatataattttatataattataataaaatatatattatattttattattataaataataaataataaaataatatatattgtaagtctttctatatcgaatgttcatggcttttaagtggtgagaatgcttgatctgcagcctacctattgactcttccattgaccccctctggtgatcgttttt

SEQ ID NO: 248990 - DNA, 272 bp, Homo sapiens
gggaggcggaggttgctgtgggctgagatcatgccactgcactctagcgtgggcaatagcaagactccatctcaaaaaaaacaaggatgatacatctatagccacaggatgaatattatacattagttaccaagaaaaaaaaacgggggtgggtggatgggtgtggtggctcacacctgtaatcccaacagtgtgggaggctgaggaaggaggactgtttgagaccaggagttcaagactagcctgaacaacataacaacacctgtctctac

SEQ ID NO: 248991 - DNA, 316 bp, Homo sapiens
agatggggtgtcactctgtcatccatgctggagtgcagtggctccatctcagctcactgaaacctctgacccccgggttcaagcgattcttctgcctcagcctccggagtagctgggattacaggtgtgagccaccgcccccggcctgtgtatgtattttgtttcaattgtgtgtgtgtgtggtggtcggggggaagtaaagaaagtcttggccaattcaagcaaaagaagaactccataaaaaactgaggctttgggttctaaagaaatttacatggggagagagtacatatggtgagccactgttgagattggg

SEQ ID NO: 248992 - DNA, 276 bp, Homo sapiens
ggctaagacatgacatgccacagccattcccctatcaagtgcaacagggaagtggggcatgaatctttgctataagagggaatgcctccctctgagttgctcccttcctagtcttagaatattcatccttccgacatgaatagataattctcaaaagaagatatacaaatggccaacaaacatataaaaaaatgctcaacatcactaatgatcagggaaatgcaaatcaaaaccacaatgtaataccaccttactcctgcaagaatggccataatc

SEQ ID NO: 248993 - DNA, 266 bp, Homo sapiens
cccctcataccgccccgcggcctcgccgcctcctcccgctttcctcctccagctcccacccggacctctagaacggccgcgcagagcggggagggggcaggggtccacaccagaggcccagactctggtccttgagtcaagatgcccaacccactcgcctaccaattacgtcccttcgtccagctccaagccgggcggtaatggggtccaggaaggctaaaggggacacgcccagccaccgagggaggggtctcacccttggagac

SEQ ID NO: 248994 - DNA, 838 bp, Homo sapiens
ttgggtggaaactgaaactctgctagtgactagatgtgtaattcagggaacattccttcactctttcagcttcagtttccttatctttaaaaggaaatgatcataatagcacttatgctgctgtgagatttaaatgagataatgtgtccacagtactcagtacagtgccggacacacagtaagcactcaaacaatggtaatgattattataatgtattttaaaatatgacactatattcaaacataccatcataatatgtcaaatgggaatgtggacagaatatatgagacaacctgttcacaactgtttaatgaggaggttttccaacattaggaatgatttgatccttcagtaaaaaatggatgtctgaaggttcctaggcataaaagaaagttcagaaggatatgtaggaaatactgttgtctctctggggattgggattacagggtttttttcctcttttctttttgttaagtttgtgtttcctaaagtttctgcaataaacatacgatgcttgtataataaaaattataggttttccttaattgcatagtcagggcttgcctccctgcgcctcctaccccaactccccaacatacagtagttctgagggatttcaccccctgctccgggagagagcgggcttagcctggattctgggagaagctcttgcttggtcccagacccaagtaaaacagcagttcctgttgtgtttggggcggcccctgccctgttctctgccctatacagaaaataggacgtgttattcctttgtttctctgacaagcttgccaacttattcctgttccgggaaaaccgggggctgtcagcactgaa

SEQ ID NO: 248995 - DNA, 428 bp, Homo sapiens
aggctgggccttaccactagcccaggccaggctcactcactagtgaagtgtcagcctcacgcacgtagctcttcatagttcaccgatggaaacaagcttgtagactggagtaacatgaatatgcatatatcatgatatgcctgtgtgtttagcctgaagaatcccacttttctctgaagctcatccagtttctcttcacaaaggagcttttttttttgttgtgttttgtttttaaatttaaaaagagtctcactttagtgagtgccactcttagtgtagtggcacggtctcagctcactgcagcctcccgcctcctgggttgaagtgattcttgtgcctcagcctcctgagtagctgggatcacaggtgtgcaccagcaggcccagctaatttttgtatttttaatggagacagggtttttgtcgtgt

SEQ ID NO: 248996 - DNA, 431 bp, Homo sapiens
gggtgtgtcccactcttgcaaatcagtagctgattcatgtgttacaaaagatgtgtcattaaccatttgtttactctgaaacttcatatagtatattagggcattctaagacctgctggtttacacgtatgactctttcagagtcctcctgctgcaccccagtcctttgtgtgacatttcatactatttttctcagcaggtagcacttacaccaagttttatttcacagggtaaacctcatttggacagtgtggacagatgacctttagatgaaaaagctcccattgatgtggttctccagtctctttggctcctctaatctcttgtacatagatggccaaagaactctccattaggactaagcaaagggcagagcttaagacttaagtaggtggcttctttgattttcttgtgactaaaaatacattaaa

SEQ ID NO: 248997 - DNA, 419 bp, Homo sapiens
cctcactcccaccaccctttctccacatgtagatgtggtcaaaaaccttaccatgggactggtaaggccaccacggccaccattagaaacctgatcccgagttgctgattaaaaccaggaggggtttttaatcagctgaggccatatgctatttaaccaaagatgaaagcacgagtgataagcatcgtctcagaaaggatgtcattaaaggaagagcagaacagcaagaggcagcttttatcattagagaagccccttgcaaagctctcgtgaggggcttcggggaacatctgggctcggtctattatgcagtacttacaacgtcattgtgtttgacaacggctcctgagcccacgccacactaaacttctaaatatacaattaatgtctattaattatagttttcaaatcagcaaaat

SEQ ID NO: 248998 - DNA, 492 bp, Homo sapiens
gatttcaagagaagaaattaacagtgagcgttaatggcttctttaacttatttgtgattctcagcatttaaaaaatgttagtcctatttttcttcctttgaagtcactattaggatgatataatttctgaatgctgcaacaaaaaatgttaaaaatggccctgacatccaagactctattgctctaagtttatgggtgggtatgcaagctaagtgttatgataatacatagtcatatacatagaggtttaatacacctatgggaaattccggcatatttgaagtagagaaaaacaaacaggcttgaaatgtccttcagttcagaatctcatactttacaagggacatttatgggcagattggtgaatatgtagaaggaggatgtttgatctggaaagaagacaaaattggattaggaataagaatatgtagaggagttaggttaagtaggactgttagtttcaaattctgcagggaagatgatttgtagaat

SEQ ID NO: 248999 - DNA, 408 bp, Homo sapiens
cttaggtgatagaggacatatagcagtgagtgtagacaattcctcccaaaaacatgagaataaagaaggtggtagtggtgttactttagaagaacaactcaggcttcagagagggtaagtttcattacagacaaggtaatctaagagtaaaagggataaaagaattctgtggggtagccagactcagaaaggtggaataacacttttacaagaagataaaacccaggaaatgtttatggcaagcttgtatgttgccactaaacctaccagaaaaagaaatcccattagaaccgcccccatcacaataactacctaagtaaatcattgttgagtaacaatgagcaccccttaaacatgtcagaaaccagaaagtttttgtttctaatgagatttcatttacacttttaa

SEQ ID NO: 249000 - DNA, 658 bp, Homo sapiens
cagctgtggtttgtcatagatggctcttgttattctgaggcatattcattcaatacccagtttattgagagtttttaacatgaaaccttgctaaattttatcataaaaaatttcctttctcattcccagaagaaatttttcatatcaaatctttttgaaacttttatatacagaatttgcttgatatttctgatataagctataactagggatatatgtatacatgcacacatatcagtatttacacactcaagctctcttttaagtggccacctttgtgagccatgcatctcccaaataatttttaaatgtcatttttggcactggatgtaaaaaccacattttaagtattttcacaatggttttatcctttcagggtggaaaacatttctttaatgaaccaaaactatttgggacaagtaggaatttagactataaagtaataaaatgtattttcttatgagacgtatattgattcttagaacagttccaaaagtggattagaacatatttgttggaacatgatggcattatttatgtaggcacataggctcatgacatgcctgctttgtggaattaaatgcaacttataatttttatttaaaatttattattcttttttttttttttgatgtggagtctcactctgtcacccagg

SEQ ID NO: 249001 - DNA, 603 bp, Homo sapiens
gcatgaataaatctccaaggcatgatgctgggtgaaagaaaccagaataaaaaaaaagtacatgttgtatgattccatttatatgaagttctaaaccaggacaatggtttcctttcaaggttgggatagggcaaaggcaacattgattagaaaagcatgcaaaagaatttttcagagtgatacaatattctacattttaataaaaacttgtgtgacacaggtgcgtacatttgtcagaattcatgaaatggtacatgtaagatttatgcatttgactgtataaaaggttttacctaaaaaagaggaaacacatacacattttaagcctctgtttccttatcagtgagtcaaataaaaagtgtcatctttgtaaagcataatgcctttatatagcattgttccaaaagtgacaataatccttcaaaacctggacattttttcaaaacaaaggatcggtatacctaatatataaaaagctcactgagagaaaccactaaacttcaaatagggaaatgagaaaaataaataaatttaaaattctaagaagaaatgtacatagccagaaaccatgaaatcatgttcgaactcattattaaaaaataa

SEQ ID NO: 249002 - DNA, 727 bp, Homo sapiens
caatggcagggagtttggtggtggttcctgtcccctgccccgcacagttccccagcttctcagtgggctgggctccttcaggcagaactctcctggcttcccttcccacaattgctaggcagccccaaccccattcttgtcagaatctgtcttctcctttaactccctgacatacttcccttctggctcccaccctttccctcctcacctttccacgtgattttaaaaggccaataaattctttcctgttccatcctggttatcttgggaggcagcttcagcagacagtgagaactttctcactgcccaggtggcttcctcctggctgacgcttgtggttttacaatgaaagagcttctctttctgtctctaccttctgttatgctcccaaatatccccatttttactctgactttacgatgagccaaaacccaggaagaggagtattttcagacccctgaaaggtagactgtatccagaagtggggacagaaaatcccggatcccaccactcatgtaaatatacccaaccatgtagtgggccttttacatactttgactcatttatttattgtgccaactcctggagggagaagatatctctttctccccattttatagctgaggaaacagggcagagaggttgtgtgacttgcctattgtaacgcagctcagaagggcagaagcagaactcagaggtgtcttcaacaaaacctgtgtgtctattt

SEQ ID NO: 249003 - DNA, 153 bp, Homo sapiens
gagtaggactaatgtagaagagtggaaaccccttcggccaccagggctattcataattcataagtgcttcaaaccagccagctgaatacatttggacaggctcttgctccttcgtgcaattcctgatttcattactctcttctgccaggaaat

SEQ ID NO: 249004 - DNA, 467 bp, Homo sapiens
tgtgacagccagtcccaaggccaggctatgagagactatgctaattagtgaagtccctggtagggccaggtcactcggccaccaggtaaaaagtaccaggttatttctgccttggcagaaggagaaggtgcatgaatattactcattaatacgcctcaaggaaccactaggttagacaacaaaataccttctgcatccactcccctattacttcctcactccccaaacatcctttcagtctgctcctccagcttgagaaaccaggagggtcttcctaccgagtggtgcctcccgagcctctggggtacagcttgtgaccctcctcaatcaaatgaatcccagggttccaggccaggtgagtatagatggacttggagcttttcttatgaaatgtcttgagctgagtttctttttcctgctacgccgaactctgtatatgtttgtttttgttctaattttggcttcag

SEQ ID NO: 249005 - DNA, 447 bp, Homo sapiens
gctgaccaatattccttatgagcatagaagcaaaaatcttgaatagaatattagcgaataaaatccagcaatatatagaattaataatatagaatcatgatcaaatggggttacggctggttcagtgtttggaaatcaatcaatgtaatctacattaaagaagattaaagaccaaagaggaaaaaccacctgatcataccaactgatgcagaaaaagcatttgacaatatacaatatccattcatgatacaagctcttggcaagctagtagaagggaagttcctcaaccacatagaggccaactatgaaaaacctacagttaacctcatacttaatggtgaaagactgaatattttccctataagatgaaaacaaggttaggatatctgctgtcactactcttatttaacataggactggcaatcctggccagtgcaataaatcaaa

SEQ ID NO: 249006 - DNA, 615 bp, Homo sapiens
ctttgtctcaaaataaataataaaatatgtaagtaataattttagagtcattgggaaatatttcaactcaagagaaaaaatataaatatcaaatcaaaaacataatgaaaaattcctaaatgtgaatttaattattttgtcttaaaataacaataatacctatttcttagtttttttctgttgaaaaatcctaaacacaatgaccaacctagtaacaatgagcattggtgtaataacactggcgtctcaataccatattccattaaaagtaaccagagttccttggatagatggttgattccaggcatgaaatatgtaaggtaagcctgctcattttttcatagcagaaaccaaagcagcttccaaaaatactaggattcagtcaaaaagactcaggagccaacttgaagaaatcccttatgaccaaaacagaaaaaaattaaatattcattgaaagaatcactgcagtgagttgaaacatgttaaatatattgccattttaatgatcatatagacaaaaccaaacaagaacctactaatggtcacatttcagagatgtttcaaacccagtgaagtattctgaaaacacatcaaagaggaaataatcattctatt

SEQ ID NO: 249007 - DNA, 93 bp, Homo sapiens
agaatgtcaacgacagagtacctgtgagcttggttagctgttcctatttatgggtcaagctcagcttccctgattgctatcagaattcccctc

SEQ ID NO: 249008 - DNA, 277 bp, Homo sapiens
ttctgctaatgcgatttcatacatttttgttgcacggtgggctgagcagcattcctggtctgttgcctcggatgggaattgttcaatgccatgtcacacatagctgtgccccgagtcatcatgctgagcggtgaaccgatcccatggccgtcgtgacagtttctggagaaagcaggcgcatgctgattcattctcagcctcctcttcccatccctgtctccagcctagcatcctttttacgtttattcatgagcttatcactcggggcaaaaaaaaa

SEQ ID NO: 249009 - DNA, 284 bp, Homo sapiens
ggaagcttcctgaaaatgcagatgcagaatggattatactgcatacatatctacattagggttgatctgggaaattataaaaagtttatttctgagctcattaaacatttcctgcaaatttaaaattgagttggttgtataggaaaacaaaacttataatgaatacatggactcttttcctgatcctccttttaatgaggtaattaaatgaagaacagacaatgtgtacatggccatgtgcctttcatatagtgtaatttaatacagatacatggccacatatg

SEQ ID NO: 249010 - DNA, 513 bp, Homo sapiens
atgacaggcatgagccatcgcgccaggccaagactgtctcaaaaaaaaaaaaaaaaaaatctaggcttccttattaatatctgaacaaataattacatatttgcttctttccaaatttggcagcaactaaacttaaaaatttttttaagtacatttgcttttgcagttagcctggcctccagagctcttggactgcagcacccataatgatggccaaagccgcccccacggcgactcctcctgctgaagcaaagtcaggcagaacaataagatgagcatggtggtgcaggcctgtaatctcagctcctcaggcgggaggatcacttgatccccggaagtttgaagctggactgcgctgaccgcacctgtgaataccactgcccgtcaatcagcctaggggaaacattctcgagtgcgagcatgacggcttaggttgatgtttttcaaattttcccaatgatgagtattgtaagggaccaaaataaaaaaatgccaatgcctaaaaccctctca

SEQ ID NO: 249011 - DNA, 352 bp, Homo sapiens
atgacaggcatgagccatcgcgccaggccaagactgtctcaaaaaaaaaaaaaaaaaaatctaggcttccttattaatatctgaacaaataattacatatttgcttctttccaaatttggcagcaactaaacttaaaaatttttttaagtacatttgcttttgcagttagcctggcctccagagctcttggactgcagcacccataatgatggccaaagccgcccccacggcgactcctcctgctgaagcaaagtcaggcagaacaataaggtatgtgttgaatatgaggatgtcttacataaaacatgttaccttgtggaatgcttgaaaataaacgagttcatctctgta

SEQ ID NO: 249012 - DNA, 416 bp, Homo sapiens
tgcttccgtctggctgtgtctccggtttctgttgctgcgcccctcatgtcctgtacccatcacccacgcaggagcccacaaaaccttgccgactgtcttcagtccaaccgtggctctctactccatctgcactgctgtctctgtgcgttcatcatctcacagccatcctttcatatgagcatggtggtgcaggcctgtaatctcagctcctcaggcgggaggatcacttgatccccggaagtttgaagctggactgcgctgaccgcacctgtgaataccactgcccgtcaatcagcctaggggaaacattctcgagtgcgagcatgacggcttaggttgatgtttttcaaattttcccaatgatgagtattgtaagggaccaaaataaaaaaatgccaatgcctaaaaccctctca

SEQ ID NO: 249013 - DNA, 484 bp, Homo sapiens
cgtcaaaatcaattatttaagggctatacatttatatttgctgtcaagaagcctgacgtcaccagagtcaaccttcaggtgcgtgttaggggctggggtgggtgtggggaggcagaatagtggcgtggttgagggcacaggttctgtaggccaactccaggcctggaatcagggccagaacctctcagtgtatccgtttccctgatatgaaaagtggaggggctaaccatccttacctcctaacgattcagttagagaaagcccggagaccattagacactggacttggcccactgtcaagcctgaatcttcaccattatcatcacagctctccatagcctagttgttctgttaaagcacacggctgcctagttcgggacaaagtcagcccctccccactaaaggctgaagtgcaccaccagtgtccaagggtgtcattttcctttggcagtttggaggctacaagaaggagaagctttgctca

SEQ ID NO: 249014 - DNA, 413 bp, Homo sapiens
tatatattttcatattttaatgaaaaataccactttaaataatttatagtagcaaacatcaaatattcacaaatcttagagaaagatactatttctcacaaaatattgagtggctaaaagagcaaatatgttcctgaaataactgaaattaagaatgtcttcatgaaagctaatttctggcgttgaatacttatttgggaatgttatttattaacagccttcagatatgaagaaattaagagacttaagcagtttactctaactaatagaagaataaagcattatttttagaagctttttgagcatacttcttactgtgcttaactttttttttgtatactaacaatgccaagcttttgatgacttgcagtttgatatttaaatatgtgaacttaatgccttttactataatt

SEQ ID NO: 249015 - DNA, 169 bp, Homo sapiens
aaaattattgggccattcataagtagcattttcaaaatatttgtaaattggctgggtgcggtggctcgcatctgtaatcccagcacgtcgggaggcagaggcaggctgatcacttgaggccaggagttcgcgaccagcctggccaatacagagaaaccccatctctacc

SEQ ID NO: 249016 - DNA, 272 bp, Homo sapiens
tgccattgcactccagcctgggtgatgagaacgaaactccgtctccaaaaaaaaaaaaacggtgggggggaggcggtattttagatttacagttggattaaatccttgaaagaactcaaaagaaggaattaatctgttaatgccttttctttaccttcataaaacatcagggaatatttcatgaatattccttatatcctactttctagctctgagcattactttgctggtagaaactagtctacatgtatataactataaatgactatcac

SEQ ID NO: 249017 - DNA, 1200 bp, Homo sapiens
gctagagttcagtggcagggcagtcatagctcattgtaacatagagctcctgggttcaagccatcctccaccgtcatcgtctccagtagctaggaaaggcatgtgccaccaagcctggctaatttttaaaagaatttttgtagaggtggggtcttgctgtgttgcccaggctggcctgaagcagttttcctgccttgacctcccaaagtattgggattacaggcataagccaccacaccaggctataagagtgcatttttaaaaaagataaaaatgtctaagccctgtttgagttgtaaggtgtcatcagatatgatgctgggtatatcagcttattcctttcttctgaaggttgtttttatgctatcttaatgaaccatcaaaggttctgaaatcaaacattttgaaaatacttgacttacggccattttatatcaagtgtatatgcttttattgtttgtgtgcttaaaactggttattttcatgaatgtactttctatggatcgctaaaggtcagaaccagctaagaatgaaaatgagtaccatttatacttactgtcagctgaacacttgcattatttttacctttatggtgtatcttacagaaattagtttttaggtcgtggtttcatacatagcagagcagctccctccctgccatctattcaaagtcagccctggacacagggtttgtccaccccctcgcgcatgcctggcgtctccgttgccatccgtctctcttacttcctccctctcaaactccctcccaacacccctgggggcctccttccctggtccacgcttgcccaccctctccgggatcccagagcaagtggcgggtatctcgtcgaaaagcgcccgtctccatccgatgcctttccaagctggcggtgctcaggggcatggtgccatgctgggggtggccgaggttgcaggggtgcccatgcttggtgtcccacctctctagttctagtctcctcccccaaccctactaggggcttgtccctggtctgggacaggcttggaaagtgtggcgcgagtatggctgaggcgtggttgtttgagggtgtgaccctgcagtccctgtcccagggataggggtggccgtgtggcccaggggtggccgaaagtggcactggggtccagccctctcccactctgtggtggagtggggcagtcactgcccttgagcccttttaa

SEQ ID NO: 249018 - DNA, 871 bp, Homo sapiens
acctgagcgccccgccaggctgtaattccgcgggcccacgtgacctccggggccgcgccttccggacgcaactccactggggcggaagttggttttgtgcggctctcaagaactaagtttgtgctgtgctgcgggatccccagggagcttccttatatcttcggcaggaccccttctttttttcttgaagattgattttgctagaagttatcctgtgatgggactccctaggggaatggaggcaccacgtggttaaggagtttgtgcgttgccgcccacatagtgtgggcagctgaggcgccgcccggatcagagccgcagggcgtctactctgtcactttcccaacctgacttttccggattgctatttcagacggcggttgcagcagccgacctgtctcaactccaccactgtagtcagagaatcaaaagcggtctgagttgcgaggtcattggggaggcccccacccccacattaccagtgaggaaactgagacttaaaaaagtgacctgacctggacacgggattgcctgacatcagagctggattcttaagttcctgttagtgttaaggcgctgctcagacttttagtaaaggtgagcgccatctactgccaagtctcacaaaatattcgcaaaatttgatacggttatcacatggtaaaaattagactttaaaagttgtatttaatgctgtgttttcagctgttgtacacttatgtaattttaattatgcaaagttatcctaataatataggaatattaattgctttcgtgaggtctgtcttgatgtgccacgatgacttttttgatgtgccaaaaaagatgactacatagtgcttttacctttttgctcaaatagaaagatttt

SEQ ID NO: 249019 - DNA, 557 bp, Homo sapiens
aagggagagtcaggtttcagtaataacaagaaagcaaagggtgaaagaagggatttgctgatgactgtgaattctatactgcgtggtggaaatttctttataattattcccaccctatcagcttgtgtcctttaaaggtacttacccatggaaaaattgttcttttaaaagttaagtttagttagttggctcccacttatttcaattttaaattttattttaaaacatgttttttgtactttggcaggaaaattaaatgtatcagaaaataataatttttaaattcttgaattataactaagttgaagtgataaatgcaaaaattattttcagaaattcctgttagtagttttctgagtaatgtactgagttgtaggtcctgtttatttctcttttcttccagtaaaaaatttcaaggaactcaattattgaaaatgttttaagagttttactgtaatcccagtactttgggaggccaaggtgggaggatttcttgaaccctggaatatgagagcagcctgggcaacatggcaagatgctgtctcaaaaaaaaaaaa

SEQ ID NO: 249020 - DNA, 476 bp, Homo sapiens
tataagcccatttttgtaggcaagaattaagtattgatgtgaagattgtttatgtttcagtgatacggtctccttcaccccaattatatggcctttttgagagagattagaaaaattgtggcttagttcaacaaagattgagttaactcgtgtgccaggttactagaattatggatccagcatctaccttcaagactcttacagtctagtgcaattaaagagaaagaaacagattatttaatacaatttaagagctaaattagagataatcacagggtttacacaggtttgaggctatagaggtggttacttatacatgatacttgggctgagttttaaacaatgaagataatagttaattgaaagaatgaggtaaaaagagcagaagcatgtatagagcacagtgtgagccaccgcgcctggccaggagagttaagtttttatgcactggctgtgattagaaggggtgtagaata

SEQ ID NO: 249021 - DNA, 167 bp, Homo sapiens
aggtatctgattgatggattactaataaggggaggaatcctaagtgaaaagattagtattacccctaaatgctatcccccccaccaaaaatagaaagaatggatgtaagtgggatctaaattctcctactctaaaagtatagttcttggaagcaagtttttaaagaa

SEQ ID NO: 249022 - DNA, 792 bp, Homo sapiens
acatgtggcaactgtccatgcatcatgttgtttaggtgagcttgctgtttctgtccctactgctgttggcccaactaggaaatatgaactaggtaaataattttcaaaaatccagacattaacttatttgcctctgtaggagtcttttttccagagctgatgataacaagacagtttcctctgcagcttctttcacctggcatctatttcacagaggagggaggtaagttttattttcaatggcactaaagattgttttcctggattgttttcacaaactgcacatgaacagtttcaaaagtatttcctgaattaggtgatgtctgcaggcagccatgaatcatgctgaaaacagtatcgttcaaaactttgccaggaagtctctggcagaagtgtgttagcgagtcttagcaaacacagctgcttcctttctgttccaatcaatcagcccagcctaattaccacagtacaagggtgaggagggaaggaaattgtaattcacagtgatgttatcagccagcaccatgcctgggagatcaccagtgcaggagaggtataaaatgctccaggggcaaggttctgagaagatgccctgccactgtatgaggccacaacctgctgtgtataacctcatctaagcacagagaagcaccagactgagcgtgggaaatgataaagcaaactgtggacttgaatgaaagacatacaggtattctttgtatttttatagttagcttctgagtctgaaattatttcccaaataaaaagttaaaaacaaatctctactgaaca

SEQ ID NO: 249023 - DNA, 381 bp, Homo sapiens
tccttcacatagcctgcacattctgtatgttttttagaacatgtaaacatcttgaccaagttttatagtttccttcacatagaccgcacattaattctaggtattttttagaacatgtaaacatcttgatcaggcttgtctaacctgtggcccatgggctgcctgttgcccaggatgactttgaatgcagcccaacacaaatttgtaaattttcttaaaacattgtgagctttttttgtgttatttttactttttttagctcatcacctatcgttagtgttaatgtactttatatgtggccaaagacatttcttccttccattgtggcccacggaagacaaaagattggacacccctgatcaagattggacacccctgatc

SEQ ID NO: 249024 - DNA, 482 bp, Homo sapiens
acaggtgtacacagctagttttttaaatttttattctgtagagatgaagtctccctatgttgcccaggctggtctcgaactcctgtccttgaacaatcctcccactcacacctcccaaagtgctgggattacaggtgtgagccactgtgccccaccccaaatacactttacgaccatatcatcaatacagagaatgagggattcagatgcaataaatatgaaaaccttgtctttcagcattcaattccaaagagcacaaactaactactctgaccaaaaatgggtgactaactcttctaactctatttttaccagctcctacaaaataagaaattgttgatagtcacaaaagtttacaatctgtttaaaaatatctagtgtatgatcacttatttaatgattttataaatcccagtcacaaaaatgaactgatccctttacttcacaagccaaaaatgccaaaccatttcatcattaaaaaa

SEQ ID NO: 249025 - DNA, 305 bp, Homo sapiens
tctgccaggaagagtctcatcttagaaccagtatagggtctgaagacatttctgcaatttatgtttatgccattctttcacttttatttaaaaaggagatttaacctgaccattctctttgaagccgatgtcccaagtatatatgtttgatgagggtacagaagacataaggaataaaactgcattgccacagagggaatacacggctccagatacaaggctttatgctaattttagcaaaatgtatgtatctttttacatacataaagttatggcactatataaagagatccttaaatgtgaca

SEQ ID NO: 249026 - DNA, 462 bp, Homo sapiens
actgattcaattttggaactcattgttggtgggttctgtatttctgtttttttcctcattcaatcttgggaggttgtacatttccagaaatttatatatttcctctaggttttctagtttgtatgcatagaagtgctcatagtagtctccgatgatattttgtatttctgtggtatcagttgtaacgtctccttttccatttctgattacacgtatttgaatcttatattttgttcttggttaatctagctagtggtctttcagctttatttatcttttcaaagaatcaatcttttatttgtcaatagacacaggaagagcatttgataaaattcaaaatctcttcataataaaaactttcagcacagtaggcatagaaaaactcaacataataaatgccatatatgacttacccacagctaacaacataccgaatagggaagagttgaaagcctttccaca

SEQ ID NO: 249027 - DNA, 730 bp, Homo sapiens
gttgcagtctatctcataagggaaccaagaactcaggggaaactgtgcagtccattgaaaaactggccctcattagatgtttgttaaatttactacagtaaagtttacatcacattattggagctgtttgccatggggaaatatctgatgctttaaatatttaactccagttgtttagtttccccattatacttaactttctttagtaacaattgcttatttccttctgtcaatttctcttctgattttaggctattagtgagatttgttaggattatttgactcattgttggggagtgagatagagttaaaaattgcatggcttactcagtttttctttgagttttgagatatgagtgagggtgaaaaatcagtttccattcagattttggaatattaataaaaattcttagaataagtttacttacttctcaggaataggatttgcttaataaaagttgcatagcaacttttgtctttatcttttggctagatgcttaccatattatgttgtaaccctttgcttgcttgttgatggtgaatatttttcttgcttaaaaaattagtttgcagaacattctgtgatacagctttcttcattataatctaaaaagtccttttttcactattgtgcctctatttctaattagacaaaatcccttcatagagtatatcttatatatctctagtctttgctttgtgctctttacaaagtttgtactctaggctg

SEQ ID NO: 249028 - DNA, 652 bp, Homo sapiens
aacaaatgagttgttacattgccatctgccaatgagaactggcttaccaattcatggctatggaaacacagactgagtgcataaccataaaggtcctaagttcctccactgataaatggggatgctaaaaagctaccttgttgggggttgcatgttattattactttaatcataatggaactaaaagatcagagagctcactctgcctaatttaatttcatagagcactaaggccccagtatcatttttaagtattataatttttagcgtttaatacttagtgtttaaatattataattttaagtagaatactcttacctaatatagaaactctcatgtgacatatacttttagaaaattcataacttggcttcaaataagattcactgacaattttatgatgaattttaattatttttatttttttagagatggggtttcaccgtgttagccaggatggtctcaatctcctgaccttgtgatctgcccacctcggcctcccaaagtgctgggattacaggcatgagccaccgcacctggccaaatctggggcttttatgggctcagaatgggggagtgtgtggtgattggtttgtgagtatgcaaaaaaggctaaaacaaaggcaccactcaaagatggaaacaacaatgt

SEQ ID NO: 249029 - DNA, 400 bp, Homo sapiens
agggatcgcctgctcccacagtggattccattgttagctgagtgtcctgccatcactcgaatgtatgaagagagcgctctcctgcgagaccgcatgactgtcaactcccttatccgaattctgcagaccattcaggacttcaccatagtcctagaaggatcactcatcaaaggagtggatgtgtaacccaactggctagaaactctcagtccaaaccttgctccttccccaactaggggaccgatttggacttgtctgacagtagtgagtcactgcaggggcagccaaacatatgccccatttggaacaatcctcactctacagacaaggcaaaatgttgtattgtagttcatttgaacctggaatttagtataaaatagagtattttcatgtgttaaat

SEQ ID NO: 249030 - DNA, 195 bp, Homo sapiens
ccatcaagtacaccaccacctcctcctccagcaggaagagctataagcactaaagtgcgtctgctagctctcggtcccacagtcctcaggcccctctctggctgcagagccctctcctcaggttgcctttcggtaggtaacagaggacaccatggtggctccgcttagccaggggcaggattgcctcctccccat

SEQ ID NO: 249031 - DNA, 160 bp, Homo sapiens
cattttctctgggtaaatatgtagatcagtgggcttcctgccttatctgagtaaagagaatccatagtgaaaagaaacacaagcttgagcttttaaaaggcccatgtgactctggccgagacaactatccacccttgagcccagggtttctcatcaggaa

SEQ ID NO: 249032 - DNA, 597 bp, Homo sapiens
cggcgcccacaggcatcatctcaggtctccttagcacactctgctcagtcccaaatctccttgaaagtgtcttttggcgaggactgcctgataaaatacaggccgcccagttacacttgaatttcagataagcggcaaataatttctgttagtataaaatatttgggacatatttacactaaaagaaatgattgtttatctgaaattcaggtgtaactgcgtagcctgtagttttacttcctaagtctggaaacccagaggcttcaccaccaccacctccatacctcccgccaccccgacctacacaattagccctaaaagagatcactgctgacccctcccccgctcccagccattcagggctcccagacaccaggctgagggccgaggccagcctgtgacaagttctcacctgtccaaggcaaaaggagataaaagaagacaacgcaaagaggttgttttgtaaagctgaaggtgttcaaaggactggtcttcattcttttttttctttcctttgtgtgtgtgtgtgtgtgtgtgtgagagagagagagagagagagagagagagtgtcctcaaaaaataaaacaatgctatcta

SEQ ID NO: 249033 - DNA, 354 bp, Homo sapiens
ttctgtctctcgctagttgtgacctgagatgacaaaccctaatcactgctctctgttatctcaacagtcaactgagtttggatacataaactaatatgaaatactttaggacatgcagaaaaaattttgaaaacagagaaagagaagcaacccaaggaaaaccaaacaagaaagcaaaataaaaaactgtcttgtgaaaaggccaaggccattattaagaagcacatgccagccgtcacccaggcctccttgcaagtttactgccttttattctacataaaatatgtaatggtttataactatttatggaaataatgcatgctaattttaacttatccatacaataaagtttga

SEQ ID NO: 249034 - DNA, 613 bp, Homo sapiens
caaagttttatgtttagtatttttgggagcaaggaaagactaataaactctaaacgaaatatatacagtatacaaacactgctgtcacttttacaccatagagggaggggcaaagcgtagaggaataggttagtttctggccttgccagtgtcctaaacttttctaaaagattcaggttctaaaaggttgagaaagcatttttagtaaatatcatagaagtgattttctttttctttttctttttttttttcctcaaaattgttcctctcaggagaaaatcagtaggggaagaacttacttggatttttcatatgctataacagattattttgttgtcttctttcttgatagtttatgattgatggctgaaagattaacactcatgagaagtcttgtaactcagctctgttttacttatgaggcagttgaagcatagagcagatacttagatgaggacacacttttacccttggctgtaccctacttgtttactaataagcatcaggtattattctaaacagtacctgaattttaaatagattacgaactacaactttctgatataactttattgcatttctgataccttttattttcttaaaatgtcttctt

SEQ ID NO: 249035 - DNA, 299 bp, Homo sapiens
ttcctatgccaactataaatttaaattggtagctaaggaaggaaatttttggtaacactctttccccactactatcttcactgaaataattcatgagttaaaatatgttgttatagacaactaagaattatattactttttgagatggtgatttaggttaagacattaggaagcaaacagatctatttatttaatagccttacataattttaaatttcttgtagccaacaaagttgttaaaattatgacatctaagtatataattagacaggctacataatctctgtgactcagtctcc

SEQ ID NO: 249036 - DNA, 499 bp, Homo sapiens
actgcagagagaacatggtcctgctaacaccttgatttcaacttatataccccagaactgtgggggatatagatttctcttgttgttaaccacccagtttgcggcactttgttacagtagtgtgaaaaaagtaatataacatgcaattgaaataattatggatgctacataaagcaagagatttggataaagaaatggcagtggcaaggagggcaaatggatttctgctgtatttagaatgccacggtaaaaactttgtatttattaggtatggagaatgagagggaagtgaaggctgatccccagtttctggcttggacaactgtgaagatagtgccttttgctgagatggagaatattagaagaggagaaatttgagggaagggaaatgccaattttaattcagccttctcttatgtttgaaatacatgtgagaaaagtaaaacaacacaccagtagtgctgtaatgaaaataaaggccatagactcaaaatgtaat

SEQ ID NO: 249037 - DNA, 419 bp, Homo sapiens
  misc_feature (48)..(48): n is a, c, g, or t
  misc_feature (178)..(178): n is a, c, g, or t
  misc_feature (180)..(181): n is a, c, g, or t
ttttgagtcggagtttcgctcttgttgcccaggttggagtgcaatggncgcgatctcggcttactgcaacctccgcctccagggttcaagtgattctcctgcctcagcctcctgagtagctgaggcaggagaatcgcttgaacacaggaggcaaaggttgcagtgagctgagatcacngnnccactgcattccagcctgggtgacagagggagactccatctcaaaataaaataaaataaaataaaaaataaataaaccaagtaggtaaaagcaaaaaaacaaacaaaaaagttacattgtattgttttctggcccccattatttctgttgacaagtcagatgtcagtctaattgttcctttgaagattatgtgtcttttttcctctggttactttcaacagttttatttttactatga

SEQ ID NO: 249038 - DNA, 407 bp, Homo sapiens
tagaaaagcttttctgagatcctcaatttccacaaatattctttactaaaatgaatctgcctgagaatgtcccttggcctcttttcccacctccccttttccaatcatgcttcatccacttgttaaaagaatggaatacttttcaaccatctggaatcttacttggggtagtttaatgccctagaggcttttacacatcccttttacacatctagagcattaaactaatcatatttcaaaatgttggtgctaggattaaagagagtaaatggctattaatgactggattataaattcgtttgcaggttaggtgatttccaattctgtgctgttaacaaaattgaaggaagacctaataaaattgtcagcttaaacttaataaaattaaattttgatgataaattatc

SEQ ID NO: 249039 - DNA, 776 bp, Homo sapiens
aaggcatagagtttaaatgccttgaccaaacgtcactagctggtaaatgaagtcaggtgtcaaaccaggcctgtctccaaagcctatatgccatcaccatttacatttttgaagacattttaactttagtatgtattttaaaagaaacattttctggatagccaaaatattatcataattcacaaaaattaatcataatttttaaatataccctgtccatatttcacaaaccaccttccaaatatcatttacatctggtctatacaaaccaggatcctgtccaagccacactacttacctctccaatgtagaagagtctctttttttttctcaatgacactgatctgttctgtaaagtgtttcaccttctgaatttgtctaattgtttcgttgtggcaactgtttattcttctatatgtttccaataaactgaaagttacatctaaagtcttgataggtttggccggcagtggtggctcactcctgtaatcccagcactttgggaggcccaggcgggcggatcacgaggtcaggagatcgagaccatcccggctaacacggtgaaaccccgtctctactaaaaattcactggccgttgtttacaacgtcgagactgggaccctgcgttaccaacttaatcggtctgagcacatcccctttcgcaggtgccgaattgcaaagaggccggccggtcgccctaccacagttgccacctgaatgcaattggaaatggagcgtaattttggtaaattccgttaaattttgtcctcattttc

SEQ ID NO: 249040 - DNA, 246 bp, Homo sapiens
aatattagaaaatttctattgattttcttgggtagggtggtgacatgtggctggctataagggaagatgtctttatttttaggagattcacattgaagtcattataggggtcaagtgacatgatatctacagctaacttttatttcacttatttattattattattattttagagactccatctcaaataaataaattaattaacatttcagcaaaatacacacatgcacacagacaaagaaaata

SEQ ID NO: 249041 - DNA, 504 bp, Homo sapiens
gattttttgctgtctctttttcatcaccctatttttcatcagactgctgagctacatgttttttcatgtaagattcataaatccagatctcctcgtcaatgtactgcccaaggtactgggcaggagcaccttgtggaagctcagatgcttcttctttccatctctcacacttgagacagaggacatgttaccccactgattccctaagaaatatccttgagcaatagaagggaagtgggatccgagcctgtagaagggaggcatgaaacttgtggaggaaagagatttgcttcagttttttcctcaccgtttgcctgcttgactaccttctgtcaccacgtcatctttccaggattaaccttgaccagtaaaaagctctgtaatagatttatgtggctctgtggatcggctgaatagtacttgatagtaaacaaatttgaccatttggggaattatatagatgctaagaaaagttaattgataaattattctagtgaatctcaa

SEQ ID NO: 249042 - DNA, 707 bp, Homo sapiens
gtttaaccagacatctgcacatctcatggtcaagctgacacataaaattaaccatcattatcaaaaacagaaaaaaacagacattatgggctttctgttgagagaacacgtcactatctatattttgaaaaaaacaaaaaactctgaatctgaacaagtctctagattcaattactaattttcatgaaatgcagagaaacttattaacctataccatgagggatcaatcagtaaaactgagacttaagtcacctaaacatcaaataacctaagatcatccaaaataaattgcaagtgtaaggatggggagttagagggggatactttaaagagattgtgaaacatataaaacagggagaaccaatctgtattatttagagattcaccctaaatgataaaactatagagaaatacaaaagagtgattactataaaaattaaagataatggttactttgagaggggaggaagaaggctgtgatggggtatatgaagggcttttgagctagttagcgatgttctatttcttgactttggcggtagctatagggctgtttgccttaaaataatccaataatctactcaactgtagctttgtttcatgtgcttttctgtatatgtgttttattttataataaagaagtgttaagtcactattaagaaagtgatttgaggctgggtgcgatggcttaagcctataatcccagc

SEQ ID NO: 249043 - DNA, 410 bp, Homo sapiens
agttaacttgcctatctggaaaaaaaccaagtatcttctttggaagcgtacattacagaggtctcaggaccatctagtacatgtttgtgaactttggtcaaatttccccctccttttcaaatttctggagtgcaaaacactctactttaaatgttatgcacaaagtaggttcaggcaaatcaatagttaattccaaagctgtgaaggttaatgattaacagctggattcagggaaggttctggaaagctctaaggcatcggtggagactgtagtgagctgtaaagaagacagctattctgctgctgctgctaactgtttaaacccagattgttgccagatctaccagttgtccaatacacatgaaaatctagatttttttcctgccaatctcccaatttttaaaagctag

SEQ ID NO: 249044 - DNA, 501 bp, Homo sapiens
tactactcagtctttaaaaagaaggaaattgtcattttcaacaacatggatagagaacattatgctaactaaaataagccaggcacagaaacacaaataaagcatgctctcgtgtggaatctagaacaattccaatctagaacaatcgacagagtgtggttacagaggcagaagtgagggcataatggggagatggtggtcaaagggtataaaatcttaagacaggaggaatatggtttggggctttttcttttttagatctcttgcacagcatgatgaatatagttaataaaacagcattgtacatttcaaaattgccaagtgttaatttcaagtgttctcaccacaaaaattttgagtatttgaggtgatgaatatgctaactagcttgatttaatccacttcatattgttaaagcataacatcactttgtacaccataagtatatacaattataaattgccaatttacaattttaaaaaataaggaaaagaaagaaaa

SEQ ID NO: 249045 - DNA, 571 bp, Homo sapiens
ccaaggaggacatgtgcagcctagctctccaggtgagagcttggagttcagagacttcctgtggatttggaggggagccagagggaagggctcaagttctacccagcttcaagcgttttctccttaccctgagcagcagagatgagctcttatgctttctgggccgtcccatcactggctgtcctttgtatccaagtgggaggctgcctctgagagttggatgtgcctgttaggaagcccacatagaactcattccagggtcccaagatgagttgcacaacttgtcgagattcgaatctcgacaagtggtgcatctcatcaactaccaggacgatgccgagctggccactcgcgccctgcccgagctcaccaaactgctcaacgacgaggacccggtggtggtgaccaaggcggccatgatggtgaaccagctgtcgaagaaggaggcgtcgcggcgggccctgatgggctcgccccagctggtggccgctgtcgtgcgtaccatgcagaataccagggacctggaacacagcccgttgcaccaccagcatcctgcacaacgggtaccgag

SEQ ID NO: 249046 - DNA, 456 bp, Homo sapiens
agcacatgtgcctaaaataacagaaaaatacagtgcctgcatgttgggagcaagccccccaaagtctggccccaaaactggccataaataaaatctctgcagcaatgtaacatgtccataatggccataaagcccaagctggaaggttgtgggtttacaggaatgacggtaaggaacacctggcccgctcagggcggaaaactggttaaaggcatttttaagccataaacaattagcctgagcgatctgtgccttaagggcgtgttcctgctgcaattaattcagcccatcccttcgtttcccttaagggatactttcagttaatttaatatccatagaaacaatgctaatgactggtttgctgttaataaatatgtgggtaaatctctgttcggggctctcagctctgaaggctgtgagacccctgatatcccactttacacctctgtatttctg

SEQ ID NO: 249047 - DNA, 381 bp, Homo sapiens
taagaaggaaaagagaagaaagatcggtcaacagagcactataaattcaagccagaagagaccctaccctctctcttcattctttgttggtttcgtttggccagctgtcagatggattttcccctgctggctgtgagatgctttaggagctgagtactgagaacttactcttaaatgtaataggaaaaacctgtatgcaaaagtgcagggattcttcctccttttatttgattcatagacccttcctatatctgtgctggggtatcagaagattattatttaattccttgtgctggaaagaggaagataatgtcccaagattgagatggggaggtaattaagaagcattcaagtatattgaaaccctacccaatcagcaaa

SEQ ID NO: 249048 - DNA, 409 bp, Homo sapiens
attaagtgcaaaagatttccttgcaagatacatagactcttgcatccgatttacttgcaggttgtttttgttctaatattgtcattccctgtacacatcctttactgatgactgggaattggagaggaggcccttaaatgtcaggagagtaagtcagccttagcttaaaaatcaagcagaaaagtctcatgttcattggcacacttgtaactacattccagtctcccagtctgcattatttctagaagctctgcatatctaactgcctaccacatgacaaaagtcattgtcattgatcctgcttcaccaaataaaaagtaaaaatattgagggccacctctcaccagttcacccagggagactggtaagcaaggagtgcccggtccctagtgagatttatgttgaacat

SEQ ID NO: 249049 - DNA, 721 bp, Homo sapiens
tcttaggagtgatcatggttctagttatataggagaatatccttatttaggaaatgcattctattatagtgcttaaggttgaagcatcatgatgtttgcaacgtattttcaagtgttcactaaaaaagcagatgcagcccttctgactaaatgggaaaaactgctgaacgtaggcactgtatagacaggtatgccatcaactaccaattccgcatttttatcggtttaggtttttttaacgaaggttggaaaaaagctgggaacagcagacaccaagccagaacagtctgtgtgggttcgtgttgctttgttatcagctgctcttcaccatggaggcttacgtggtcacagccctggtgctgtgttcagccaggcctggcacccactgagcacacaaacagtcactcaccactgaattgtgacgtaggattaagaagctaccactctggtcatctaacccctccatcagcaccgacggactgaatcgggggttctcaaactgaggcaataaccaggaaatgatgatgattaacatctgggatttggagtgaagtgactatcggttatgtaagtaatcttttcaaaaagcaagaagccatcttttctatcacaattcaaccggttaagatacagtttaactctgcgattccatgaagcctgtaagtctttattctggtttgtctcaccagataacagctcccactaatgacaaccagtttaa

SEQ ID NO: 249050 - DNA, 510 bp, Homo sapiens
gatctaggctctgctaagagtcagctgtgggactagctattccgaaaagtgattgtactcttagtggaggaacagtgtggaggaggagggagaaaatagttctcttggcctcggcttgcaaggctccacctggggcattgcttctatttgaggagccttcctacaagagggacatagacaaactacatggaggaaggacaaaccacggggatggtggtaacgccacatttagatcctgcgaggaatggctgaaggaaccgggagtatttaatgtgaagttcaaggaggtgggagggggttagaaagactgccttgaaatatttgacaggcggccgggcgcagtggcttatgcctataatcccagtactctgggaggctgaggcaggcagaccacaaggtcaggagatcgagaccatcctggccaacatggtgaaacgctgtctctactaaaaatactgagacaggagaatcacttgaacccaggaggcagaggttgcagagagccgagat

SEQ ID NO: 249051 - DNA, 810 bp, Homo sapiens
gatcatgttgcagtgactctagccaagggtatggcctgtgtcgtgtctgttacaggccgaggtgggaagaaaaggttgtccctgtatctggaggggccagttcatgccttgaggaggagagaggcactctgggtcctgccattgtcctcagggatggccatgcttgccattgtcccacgtgtctgttcgggggggtccttctcctggggatacaacgtctgccgcgttgatttttgggtgtctaagtgtaccgggctagtatcacattgagagtcacccactgtgggtggattcacccattcccgtcatggtgcctggggctccagcagcctcgtcacaacacagcctggtagttggagggtctgagcctttgttacaaccgccctgacttagccgcaggactatgcacctggtggggactggggtgggcggccactctctcacaggcccaccccaaggctctagatgggcacgtgcattgttcaaatgccgtcataccttgggggtgcgagggggcagcgtgaggcagacgagagaggcggaggtctcacagtgaaccacaggatctggtatcctgcagccggggtgcaggcctgactgtggagcccccattctgggcgcctcacactccctatgactgtgatgcttgccccccgccccccgatgccacaggagtgcacagcaggcctggagtctccttcggagggggtgaggaggccggcggggggcgggggggtgctgtctgtgggccctggcacttccacgctgcctgggtggagggtccctgggtgaggtctgccttggctgaaa

SEQ ID NO: 249052 - DNA, 954 bp, Homo sapiens
  misc_feature (372)..(372): n is a, c, g, or t
ggcacgaggcaccaaatggcggatgacgccggtgcagcgggggggcccgggggccctggtggccctgggatggggaaccgcggtggcttccgcggaggtttcggcagtggcatccggggccggggtcgcggccgtggacggggccggggccgaggccgcggagctcgcggaggcaaggccgaggataaggagtggatgcccgtcaccaagttgggccgcttggtcaaggacatgaagatcaagtccctggaggagatctatctcttctccctgcccattaaggaatcagagatcattgatttcttcctgggggcctctctcaaggatgaggttttgaagattatgccagtgcagaagcagacccgtgccggncagcgcaccaggttcaaggcatttgttgctatcggggactacaatggccacgtcggtctgggtgttaagtgctccaaggaggtggccaccgccatccgtggggccatcatcctggccaagctctccatcgtccccgtgcgcagaggctactgggggaacaagatcggcaagccccacactgtcccttgcaaggtgacaggccgctgcggctctgtgctggtacgcctcatccctgcacccaggggcactggcatcgtctccgcacctgtgcctaagaagctgctcatgatggctggtatcgatgactgctacacctcagcccggggctgcactgccaccctgggcaacttcgccaaggccacctttgatgccatttctaagacctacagctacctgacccccgacctctggaaggagactgtattcaccaagtctccctatcaggagttcactgaccacctcgtcaagacccacaccagagtctccgtgcagcggactcaggctccagctgtggctacaacatagggtttttatacaagaaaaataaagtgaattaagcgtgaaaaaaaaaaaaaaagaaaa

SEQ ID NO: 249053 - DNA, 1375 bp, Homo sapiens
  misc_feature (372)..(372): n is a, c, g, or t
ggcacgaggcaccaaatggcggatgacgccggtgcagcgggggggcccgggggccctggtggccctgggatggggaaccgcggtggcttccgcggaggtttcggcagtggcatccggggccggggtcgcggccgtggacggggccggggccgaggccgcggagctcgcggaggcaaggccgaggataaggagtggatgcccgtcaccaagttgggccgcttggtcaaggacatgaagatcaagtccctggaggagatctatctcttctccctgcccattaaggaatcagagatcattgatttcttcctgggggcctctctcaaggatgaggttttgaagattatgccagtgcagaagcagacccgtgccggncagcgcaccaggttcaaggcatttgttgctatcggggactacaatggccacgtcggtctgggtgttaagtgctccaaggaggtggccaccgccatccgtggggccatcatcctggccaagctctccatcgtccccgtgcgcagaggctactgggggaacaagatcggcaagccccacactgtcccttgcaaggtgacaggccgctgcggctctgtgctggtacgcctcatccctgcacccaggggcactggcatcgtctccgcacctgtgcctaagaagctgctcatgatggctggtatcgatgactgctacacctcagcccggggctgcactgccaccctgggcaacttcgccaaggccacctttgatgccatttctaagacctacagctacctgacccccgacctctggaaggagactgtattcaccaagtctccctatcaggagttcactgaccacctcgtcaagacccacaccagagtctccgtgcagcggactcaggctccagctgtggctacaacatagggtttttatacaagaaaaataaagtgaattaagcgtgaaaaaaaaaaaaaaagaaaaaaaaaaccggggggctttttggggggggggagaaaaaggggttggaaggggcgggggtagggttttcccttagacccaggtcttgttgttggtccagacggggggtaaaatttcggggggcccccataatggggcggcgggaataaattcccggaaaagccggggtaccctcggtagagtacgcgccgcagacgacgggagtaggagggagcagcgaacggacgacgggcccagggccgcacgcacgcgcgcacaccgcggtcagaccacggacaactatcgcatctcagacgagaccacagcacaagagccctacgattaagcgccgacacaccacgcacctacttcacgagtaagcacgagagacagcagacagcgaggaccagaacagaaagagaccgcacccacggtagcagcagtg

SEQ ID NO: 249054 - DNA, 282 bp, Homo sapiens
ctgcaatgcctggagcagtccctcttaactagcaattgtcctgccacaaaatgttggtagtgatgttattgataaacagataaagcaatacctttgatgccatttctacagctacctgacccccgacctctggaaggagactgtattcaccaagtctccctatcaggagttcactgaccacctcgtcaagacccacaccagagtctccgtgcagcggactcaggctccagctgtggctacaacatagggtttttatacaagaaaaataaagtgaattaagcg

SEQ ID NO: 249055 - DNA, 468 bp, Homo sapiens
agccccacaatatacaaatcgtgacctctaatagtcattgaaatacatgcatttgttttggtctttatttttaatctttaaccagaagtttaaaaatgatactataaacatgaaatctaggcagaaataaagaaagatgttctttgaaaccaataagaacaaagatacaacataccagaatctttgggacacattcaaagcagtgtgtagagggaaatttatagtactaaatgcccacaagagaaagcaggaaagatccaaaattgacaccctaacatcacaatgaaaagaactagaagagcaagagcaaacacattcaaaagctagcagaaggcaagaaataactaaaatcagagcagaactgaaggaaatagagacacaaaaaacccttcaaaaaatcaatgaatccaggagctggttttttgaaaggatcaacaaaattgatagactgctagcaagactaataaa

SEQ ID NO: 249056 - DNA, 2264 bp, Homo sapiens
gggaaaaacgagtaagtacaggttccttctgccaatccccgccggccacagctaactttcccgcccggcccctttctgtcataattgaggtgtccacaaccagccaatcaggaacgcgagagtatcccgcgtttgctttcgctcgccgaggcgcgtatcagtcggaattttggggagccaaccgcgccgtctgtccctggcaagccagcggcggtttaaaggaggtggcgggaagcctgtgtgtgcttcaaatcgtcaccctcatggtcgctccggtttttcacgactgaaaacaacatagcaaaataagccaagatgtctgtggatccaatgacctacgaggcccagttctttggcttcacgccacaaacgtgcatgcttcggatctacattgcatttcaagactacctatttgaagtgatgcaggccgttgaacaggttattctgaagaagctggatggcatcccagactgtgacattagcccagtgcagattcgcaaatgcacagagaagtttctttgcttcatgaaaggacattttgataacctttttagcaaaatggagcaactgtttttgcagctgattttacgtattccctcaaacatcttgcttcctgaagataaatgtaaggagacaccttatagtgaggaagattttcagcatctccagaaagaaattgaacagttacaggagaagtacaagactgaattatgtactaagcaggcccttcttgcagaattagaagagcaaaaaattgttcaggccaaactcaaacagacgttgactttctttgatgagcttcataatgttggcagagatcatgggactagtgattttagggagagtttagtatccctggttcagaactccagaaaactacagaacattagagacaatgtggaaaaggaatcgaaacgactgaaaatatcttaattgctcagtagtcaaaaggaggagcctgtcaaaaagtagaatcataaggactgttcaaaccataaggactgttcaaatcataccagtgactgttcaaaccaaccatactttttattagatttgctttgtcaactctttcttgtattctgtgttttcctcttttttggtccactttgctgaggtatgaagtgtactactttgaactaggctgaagcatctgagtcttctaataagtgggaagggatccaacaaagaagccatgaccagttaaagatatttgcagagttacaccttggtcataagtcctttgtgaccttgattattttggcttactctttggatgagaccagacaagaaaaggattaaacgggtggctcctttaatattattattattgtttttgagacaaggtccctttctgtcacccaggttagagtagatttcagtggcacaatcttggctcactgcaacctctgtgtcctgggctcaagtgatcctcctgcctcagcctcccaagtagctaggaccacaggtgcgtgtcaccatgcttggctaatttttttgcagaaacgaggcctcactatattgtccaggctgagtggctcttttattaaccagtcattacactgcggaacagccaacatagagtacttgctctcgtcctgtgaattttctttcatgagggagtcaatatgtagtggaaagaagcatgtagcaaaaaagacaaccttgatctttaataaaaaagaagttggtttatttccaaaataaatcccctgacaaaaaacctggtgatgttaagcaattgactgtcttagagtccagcagaagaccttagacaaaaaaagcagaacccactggagtagaaaaggaagcatgtagcatatactcagtagtgaaatttaattttactgactgttaggtatctatgccaatttgttttcatacttcagttggttttggaatctgccttatacctaatatttatttattcacactcataagcatcaaatatttaatgccctcagtgggaaatttgtgtttaaactcaatggaatctaatatttctttatgtcgttagtccctgtaaaatgttaggtcacccaaggaaaggggagaaatagcaatggttgttcctaaggtattgcttgccctccatgtcttcctaaagagcagaacttggagtttctcctttatgtagagaagaagtaacttagggtgtatttgcaatgaaatattcatagatattgaaagcttgtgtttacatgaaatatgtttattatcaagaagtcctttttccaattctgtacattaaatatatgtgttttaaa

SEQ ID NO: 249057 - DNA, 1284 bp, Homo sapiens
gggaaaaacgagtaagtacaggttccttctgccaatccccgccggccacagctaactttcccgcccggcccctttctgtcataattgaggtgtccacaaccagccaatcaggaacgcgagagtatcccgcgtttgctttcgctcgccgaggcgcgtatcagtcggaattttggggagccaaccgcgccgtctgtccctggcaagccagcggcggtttaaaggaggtggcgggaagcctgtgtgtgcttcaaatcgtcaccctcatggtcgctccggtttttcacgactgaaaacaacatagcaaaataagccaagatgtctgtggatccaatgacctacgaggcccagttctttggcttcacgccacaaacgtgcatgcttcggatctacattgcatttcaagactacctatttgaagtgatgcaggccgttgaacaggttattctgaagaagctggatggcatcccagactgtgacattagcccagtgcagattcgcaaatgcacagagaagtttctttgcttcatgaaaggacattttgataacctttttagcaaaatggagcaactgtttttgcagctgattttacgtattccctcaaacatcttgcttcctgaagataaatgtaaggagacaccttatagtgaggaagattttcagcatctccagaaagaaattgaacagttacaggagaagtacaagactgaattatgtactaagcaggcccttcttgcagaattagaagagcaaaaaattgttcaggccaaactcaaacagacgttgactttctttgatgagcttcataatgttggcagagatcatgggactagtgattttagggagagtttagtatccctggttcagaactccagaaaactacagaacattagagacaatgtggaaaaggaatcgaaacgactgaaaatatcttaattgctcagtagtcaaaaggaggagcctgtcaaaaagtagaatcataaggactgttcaaaccataaggactgttcaaatcataccagtgactgttcaaaccaaccatactttttattagatttgctttgtcaactctttcttgtattctgtgttttcctcttttttggtccactttgctgaggtatgaagtgtactactttgaactaggctgaagcatctgagtcttctaataagtgggaagggatccaacaaagaagccatgaccagttaaagatatttgcagagttacaccttggtccatcctccttatacattaagattacggacctactctcccgggaatccttagaa

SEQ ID NO: 249058 - DNA, 2502 bp, Homo sapiens
ctcgccgagatgacctgggcacctctgcgttgaatcggcaaatactgatcaagccgcatttattctgctctcaggaactctaagtctagcagagaagatgaggcggtagaagttcatcaatggcttggctggaggacaagcaaattgaggacattggcaacggagtgatcaaaatgatagatcatgaggcctaaaatgaataaggaaagaagagaagtggcagaggctgagaacagaaagagagggtggaggggctgtaaatcttgaagattagggtataatatgagtatatgggtaagaattggaagaattgtgtaggaggcagtagtcaaaaagtagaagcagtttggaagagtagttacaaatatcaagagccaggtggctaaaaggtggagctataggtcattgaagctcaagaaactgagtctctagggcattggttaagtcatctgtctagacttcaaagttgtctaggatgataattcagaagactgatctgtgccaaagtcacaggtttttcacgactgaaaacaacatagcaaaataagccaagatgtctgtggatccaatgacctacgaggcccagttctttggcttcacgccacaaacgtgcatgcttcggatctacattgcatttcaagactacctatttgaagtgatgcaggccgttgaacaggttattctgaagaagctggatggcatcccagactgtgacattagcccagtgcagattcgcaaatgcacagagaagtttctttgcttcatgaaaggacattttgataacctttttagcaaaatggagcaactgtttttgcagctgattttacgtattccctcaaacatcttgcttcctgaagataaatgtaaggagacaccttatagtgaggaagattttcagcatctccagaaagaaattgaacagttacaggagaagtacaagactgaattatgtactaagcaggcccttcttgcagaattagaagagcaaaaaattgttcaggccaaactcaaacagacgttgactttctttgatgagcttcataatgttggcagagatcatgggactagtgattttagggagagtttagtatccctggttcagaactccagaaaactacagaacattagagacaatgtggaaaaggaatcgaaacgactgaaaatatcttaattgctcagtagtcaaaaggaggagcctgtcaaaaagtagaatcataaggactgttcaaaccataaggactgttcaaatcataccagtgactgttcaaaccaaccatactttttattagatttgctttgtcaactctttcttgtattctgtgttttcctcttttttggtccactttgctgaggtatgaagtgtactactttgaactaggctgaagcatctgagtcttctaataagtgggaagggatccaacaaagaagccatgaccagttaaagatatttgcagagttacaccttggtcataagtcctttgtgaccttgattattttggcttactctttggatgagaccagacaagaaaaggattaaacgggtggctcctttaatattattattattgtttttgagacaaggtccctttctgtcacccaggttagagtagatttcagtggcacaatcttggctcactgcaacctctgtgtcctgggctcaagtgatcctcctgcctcagcctcccaagtagctaggaccacaggtgcgtgtcaccatgcttggctaatttttttgcagaaacgaggcctcactatattgtccaggctgagtggctcttttattaaccagtcattacactgcggaacagccaacatagagtacttgctctcgtcctgtgaattttctttcatgagggagtcaatatgtagtggaaagaagcatgtagcaaaaaagacaaccttgatctttaataaaaaagaagttggtttatttccaaaataaatcccctgacaaaaaacctggtgatgttaagcaattgactgtcttagagtccagcagaagaccttagacaaaaaaagcagaacccactggagtagaaaaggaagcatgtagcatatactcagtagtgaaatttaattttactgactgttaggtatctatgccaatttgttttcatacttcagttggttttggaatctgccttatacctaatatttatttattcacactcataagcatcaaatatttaatgccctcagtgggaaatttgtgtttaaactcaatggaatctaatatttctttatgtcgttagtccctgtaaaatgttaggtcacccaaggaaaggggagaaatagcaatggttgttcctaaggtattgcttgccctccatgtcttcctaaagagcagaacttggagtttctcctttatgtagagaagaagtaacttagggtgtatttgcaatgaaatattcatagatattgaaagcttgtgtttacatgaaatatgtttattatcaagaagtcctttttccaattctgtacattaaatatatgtgttttaaa

SEQ ID NO: 249059 - DNA, 2658 bp, Homo sapiens
gggaaaaacgagtaagtacaggttccttctgccaatccccgccggccacagctaactttcccgcccggcccctttctgtcataattgaggtgtccacaaccagccaatcaggaacgcgagagtatcccgcgtttgctttcgctcgccgaggcgcgtatcagtcggaattttggggagccaaccgcgccgtctgtccctggcaagccagcggcggtttaaaggaggtggcgggaagcctgtgtgtgcttcaaatcgtcaccctcatggtcgctccgatggcttggctggaggacaagcaaattgaggacattggcaacggagtgatcaaaatgatagatcatgaggcctaaaatgaataaggaaagaagagaagtggcagaggctgagaacagaaagagagggtggaggggctgtaaatcttgaagattagggtataatatgagtatatgggtaagaattggaagaattgtgtaggaggcagtagtcaaaaagtagaagcagtttggaagagtagttacaaatatcaagagccaggtggctaaaaggtggagctataggtcattgaagctcaagaaactgagtctctagggcattggttaagtcatctgtctagacttcaaagttgtctaggatgataattcagaagactgatctgtgccaaagtcacaggtttttcacgactgaaaacaacatagcaaaataagccaagatgtctgtggatccaatgacctacgaggcccagttctttggcttcacgccacaaacgtgcatgcttcggatctacattgcatttcaagactacctatttgaagtgatgcaggccgttgaacaggttattctgaagaagctggatggcatcccagactgtgacattagcccagtgcagattcgcaaatgcacagagaagtttctttgcttcatgaaaggacattttgataacctttttagcaaaatggagcaactgtttttgcagctgattttacgtattccctcaaacatcttgcttcctgaagataaatgtaaggagacaccttatagtgaggaagattttcagcatctccagaaagaaattgaacagttacaggagaagtacaagactgaattatgtactaagcaggcccttcttgcagaattagaagagcaaaaaattgttcaggccaaactcaaacagacgttgactttctttgatgagcttcataatgttggcagagatcatgggactagtgattttagggagagtttagtatccctggttcagaactccagaaaactacagaacattagagacaatgtggaaaaggaatcgaaacgactgaaaatatcttaattgctcagtagtcaaaaggaggagcctgtcaaaaagtagaatcataaggactgttcaaaccataaggactgttcaaatcataccagtgactgttcaaaccaaccatactttttattagatttgctttgtcaactctttcttgtattctgtgttttcctcttttttggtccactttgctgaggtatgaagtgtactactttgaactaggctgaagcatctgagtcttctaataagtgggaagggatccaacaaagaagccatgaccagttaaagatatttgcagagttacaccttggtcataagtcctttgtgaccttgattattttggcttactctttggatgagaccagacaagaaaaggattaaacgggtggctcctttaatattattattattgtttttgagacaaggtccctttctgtcacccaggttagagtagatttcagtggcacaatcttggctcactgcaacctctgtgtcctgggctcaagtgatcctcctgcctcagcctcccaagtagctaggaccacaggtgcgtgtcaccatgcttggctaatttttttgcagaaacgaggcctcactatattgtccaggctgagtggctcttttattaaccagtcattacactgcggaacagccaacatagagtacttgctctcgtcctgtgaattttctttcatgagggagtcaatatgtagtggaaagaagcatgtagcaaaaaagacaaccttgatctttaataaaaaagaagttggtttatttccaaaataaatcccctgacaaaaaacctggtgatgttaagcaattgactgtcttagagtccagcagaagaccttagacaaaaaaagcagaacccactggagtagaaaaggaagcatgtagcatatactcagtagtgaaatttaattttactgactgttaggtatctatgccaatttgttttcatacttcagttggttttggaatctgccttatacctaatatttatttattcacactcataagcatcaaatatttaatgccctcagtgggaaatttgtgtttaaactcaatggaatctaatatttctttatgtcgttagtccctgtaaaatgttaggtcacccaaggaaaggggagaaatagcaatggttgttcctaaggtattgcttgccctccatgtcttcctaaagagcagaacttggagtttctcctttatgtagagaagaagtaacttagggtgtatttgcaatgaaatattcatagatattgaaagcttgtgtttacatgaaatatgtttattatcaagaagtcctttttccaattctgtacattaaatatatgtgttttaaa

SEQ ID NO: 249060 - DNA, 364 bp, Homo sapiens
tggtgaccttatcaggtgctgtttcagtggaatcttgaattcaggagccactcaagaatgaatgagaactgatggagtaaacacagcatgcgtagataagtcaagaaccttggctgttaaaaaggagtaagaaatatggaatgatccaatagagagggaaagaaggtgatgcaggggcagaggccacatggacaagcgcagacagcacgtggcaaaggcctctatgccattacccatggaagaaaactgaagaggtttaagcagagaactatttgattggactgtttcattaggtaaattattctgtcattgtgggagatgaatttggggtctttaatgagtgtctgaaagcacaaaactcagt

SEQ ID NO: 249061 - DNA, 589 bp, Homo sapiens
gctagaagtcatctgagaacatgataaaatttcacattattctcttatttttttaatttagtttcaaattaaaaccaaatttgtgttcatccttagtttagatgtgtaattaaagcaataactataggcttcaaacaacagttgcaagaaaaccccaaaaataaaaggacacatgtgtacacttgtgcttggagatggtaagcactcagccagtgacttacattttatcatgttgacatggcagaggtcagtagttacacaatgttataacacattaaagataagcctatctttactctgaatttcatcatcacaaagttgtaagtctgactaaaagagccaaggtaacattgaaagatatttttcagcatttccaaagatcattaagtcataaccttgattctagaatatgcttgttattggcaatgacatcttttagaatatttgctttagaaagctatttttgtttactaagattttgaaacacatttgctataggaggtgcagttgcctactaacctgagagataattaatttttgataaccttactgatctagttacactcacagtaaacatttttttggtaaa

SEQ ID NO: 249062 - DNA, 455 bp, Homo sapiens
ctttttttttcaagacagagtcttgctctgtcgcccaggctggagtgcggtggcatgatctcggctcactgcaacctctgcctcccacgttcaagcgattctcctgcctcagcctcccaagtagctgggattacaggcacgtgccgccatgctcagctaatttttctatttttagtagagacggggtttcaccatgttggccagggtggtctcgaactcgacctcgtgatcttcccgcctctgcctcccaaagtgctgggattacaggcgtgagccaccgtgcctggctcgaactttaatattttctattctatttcatttaaaaattgtagcccactattgatttcatgactaaccaatggatcatcactggaaacatcagtgtactgtgtagtgttttgccatagtgaatgctcaataaaggtgttaaatgatgtctttcatttagaaaagcg

SEQ ID NO: 249063 - DNA, 189 bp, Homo sapiens
caggctgtaggctgagcttcacacacatgggataacacgtgtgtatgattacatgataagtgggattttcctgctctatgtgcagagcgtaatacaatctagcagttcattgtgctatggggcttttgtcattttgcagtgtgcgtcgagcggccgcgaatttagtagtagtagtatagtagtagtagg

SEQ ID NO: 249064 - DNA, 491 bp, Homo sapiens
atgaacccggtacctcagatggaaatgcagaaatcacccgtcttctgcgttgctcacgctgggagctgtagaccggagctgttcctatacggccatcttggctcttcccccaatcatgataaaaataattaatgagattttatacattcaatctttgttccaagcctttgaaatatggtatgtgtgctgggattacaggcatgagtcaccacacctggcctacatgattaattttttaaaattgtggtaaaatatagccaacgagatttgtcatttaaccatctttacgtgcacaattccgcattcacaatgtcatgtagccatctccctgtctactttcagaattttttcatcatccgaaacagaagctctgtacccattaaacaatgtctccctgtttcttcctctctccagcccctacaaaacttgtgttccactggaaagcttaatttgtattacttaagaaatctccagcagctttagagcctcca

SEQ ID NO: 249065 - DNA, 459 bp, Homo sapiens
taacacgtgtaaatcagattttgcaatcccgttctgtagacaaccaaactgagattgatgcatttccagtctttcacttctgtaaagaacacagcagggaaccaccttgtacatacatcttttaggcatttgtccaattatttccttaggataaatttctagaaacgggtttggtgttttagagcttttgatatatatggttccagaacaatctggatgcctgaaatcatggcagataaacaggtgctgagtttcgtggccatgctgaaagtgcagacgtagaagtgaaatgcacagtgaacagtcatgcctggatgggcacacatgccgaatttttgtttggatttctttataccggtggttgtctccaccggtggcagtaagactctgctggatgaggacctaagactgatggggtgtttgtctataatgacaagtgcttgactgtagcagcaaatg

SEQ ID NO: 249066 - DNA, 435 bp, Homo sapiens
gataaacaggaaactagtggaaaagattacctatagaaagtaggtggcaacagagtgaaaggtttgggataggagtgagactctgtatctttttgttcagtattgacttttgaaccaattaaatgttttaagtagtcaagaaattaaaatctaatcaacaaagatgaaaatcagcagacttaaaaatttaaaacaaacaaaaatgaactcaccgtatattaaaataataaactaaagaacaaatagattagattaacttttaaacataatgctatgactagacatcctctgtggaacattctttaagacaactggcctgaacttttcaaaaatatcactgtcatgaaagacaaaatgatggggggattgccctagattaaaagagactaatgagaccaaatgtaatgagtgatccttgattggctcccagattga

SEQ ID NO: 249067 - DNA, 296 bp, Homo sapiens
catttatgtctataatctcattctgagtcaatttttcattctagtgtgagttatgtgtccaaatttattcttttgcacacggatatctagttgtcttagcgccattcattgaaaagaatacttttgtcctaatgaagaatcttggcacatttgttgaaaatcaattggctatacatgtgagggtttatttttggattctcaatcctatcccattgatctataaatctttctttgtacgccactacacccaatcatctttgctgtaaattttgatgttgagaagtgttattccttca

SEQ ID NO: 249068 - DNA, 1005 bp, Homo sapiens
ctcaatagagacaatcaacaaagtcaaaagctgattatttgaaaagattaataaaatcaataaacctctaaccaggctaactaagcaaaaagagaaagaacataaattgctaatatcagaaatgaaagagtggacatcactacagatcccatggacattaggaggataataaaggaatgctctgaacaactgtatgctcacatatttgataacctagatgaaatggagcaagtccttgaaagacacaatctgccaaaactcacacaagaagaaatagaccatctgaataggcctatatctattttaaaatttgaatcaataattaataacttttccaaacagaaagcactaggcccagatgtatttgctggtgaattctaccaaacatataaggaagacattataccaattatctataatctcttttggaggatagaagcagaaggaatacttcctgactcattttgtgaggccagcattactctaataccaaaaccagacaaagacattgcaagaaaagaaaatcgcagatcaatatctttcatgaacatagatgcaaaaatcctcaacagaatactagcaaatccaatccaataaagtgttaaaaaattatacaccatgaccaagtggaatttatcccagatatgccaggctggttcagcatttaaaaatcaattaatgcaattcatcacaacaactgactaaaaaagaaaaatcatttcaatatatgcagaaaaggcatttgacaaaatcccacaccaatttatgatttaaaaaaaaactcccagtaaactagaaataaagggcaacatcctcaaccgtataaagaatatctacaaaaaagctatagctaacatcacgcttaatgaagagaaactagaagttttcccgtaagatcagggacaaggcaaggatgttctttctcatcactctgtttcagcatcatactggaagttctagttaatgcaataaggcaagacaaggaaataaaagatatatagattg

SEQ ID NO: 249069 - DNA, 1235 bp, Homo sapiens
ccttacttacagaggaacaaagataagaattatatctgacttcttctcagaaaccatgcaagcaagaaaagagaggaatgaaacatttaaagtgttgagagaaaaaaacccaaccaacctagaattctgtaccccacaaaaattaacgttcagaagcgaaggagaaaggaagattttcttgggcaaacaaaaatgtggaaagtttgttgccagtaggccttgcaagaaatgttaaaagaagttctttagagataaagaaagtaatataggtcagaaagttgggtctacataaagaaaggaagaacactgaagaaggaatgagtgaaggtaaaattaaaacttttatttttcttattcttgattgatctagtggataacagtttattcaaaataataatatcaatagtaatgtacttgatcacatatacttaggtatattacacacacacacacacacagacgcttatatataagtgagatgaatgacagcaatggtacaagggatgaaaaagaggaaaaattagtatcattttgtaattataaggtactcatactacctgtgaagtggcattgtgatatttgaaagtggacttggattcattgtaaatgttaattgcaaactctaaggcaaccactaaaataagttaaaaaagaaatatagctgatatgctaagacaggagagaaaatgtaatcagataaaatgctcaattaaaaccaaaaagaaatgctggaagtggatgaaaaagtggaagataacaatagcaacaaagaacaaaggcaccaaacaaaaatcctcaacagaatactagcaaatccaatccaataaagtgttaaaaaattatacaccatgaccaagtggaatttatcccagatatgccaggctggttcagcatttaaaaatcaattaatgcaattcatcacaacaactgactaaaaaagaaaaatcatttcaatatatgcagaaaaggcatttgacaaaatcccacaccaatttatgatttaaaaaaaaactcccagtaaactagaaataaagggcaacatcctcaaccgtataaagaatatctacaaaaaagctatagctaacatcacgcttaatgaagagaaactagaagttttcccgtaagatcagggacaaggcaaggatgttctttctcatcactctgtttcagcatcatactggaagttctagttaatgcaataaggcaagacaaggaaataaaagatatatagattg

SEQ ID NO: 249070 - DNA, 166 bp, Homo sapiens
tgcaacaattctggaacaaaactttaccctgtttccaaatttaagctaaattcgttgtattatgcaaatgtagggacgtaacttgtaaaactccaagtatagggccaaaggcaaactttgcagtaaaactggctttgaattaaaaaaaggaagaaggaaggaagga

SEQ ID NO: 249071 - DNA, 151 bp, Homo sapiens
ggaggctcacaggtgtggcattgcacctccagagattaaccaccatccaaggacttgcagcattttctggcttcactgatgaatggtttgtagggaaacctggcaagagaaattagtttggaaacttggagtcaggaaataaatggtggat

SEQ ID NO: 249072 - DNA, 411 bp, Homo sapiens
tagctataggaagtgatcatatttttaagaactccaaggttcttaaaaaccaaacaagtttttccccttttcatgtgagggctggttctctattagagttggtcagaaaggctgggcgcggtggtggctcacgcctgtaatcccagcactttgggaggctgaggtgggtggatcacgacgtcaggagataaagaccatcctggctaacacagtgaaaccccgtctctactaaaaataaaaaaaaattagctgggtgtggtggcacgcacctgtagtcccagctactcgggaggcactgaggcagaattgcttgaacctgggaggcggaggttgcagtgagccgagatcacgccactgcactcctgcctgggtgacagagtgaaactctgtctcaaaaaaaaaaaaaatgtc

SEQ ID NO: 249073 - DNA, 328 bp, Homo sapiens
ctctggagagagtgggctgattcagggaatggggtgagctccattttggatatgttgggttagagaacttggagggcatctaagtggatatgcctagtagcagctgcccatggggaaggcaggggagcccacaggctgcagagatccagaagggcacagctagatggaaattgagatcaaggagtaactactttcacctgaaaagagaccaggggtcaggccctcagcataaagacactggggaaaaaaaggaagagtgggactcaggccgcctgcatcagaatttcctgggggatttgtgaaaaacaaagttctcctgttgaactga

SEQ ID NO: 249074 - DNA, 442 bp, Homo sapiens
gcaaagtttagggagtgtggtccaggaaactgttaaatgcttccgatcaagagagtgatatgataaaaatggcataactgggagatgaatctagtactgaactcccacatcgattagagtgagttggattggaggcaagaacttgggtgctattttatgtatttatttctaaaatctataattctatataattaggtagacctgtatgtacttttagcacttttcatgttttctaagtttgaattgttgactaaaaaagtgaagatttgatgtgcagctagatttgtcaaatagccttccaaagtggttttggcaataatataataatgtaaatagttgagaatgcagttgtaatcaattttcatttagctgatacgcataggaaatcctggtgtggaaaatgtacaacagtgtatcactttttgtatttggctttgaagcc

SEQ ID NO: 249075 - DNA, 477 bp, Homo sapiens
gattttgagtggtttcttttaattttcatgccttgatagcgtttgctgtcaaaagttaaagcaaggatctggactcattctcatacttgaatatattttctgacctttcaaactatagttccagaacttcagacattgatgcaaatacaaaggaaatttccatgtttcaaattcatttcactgcacaattgaaattttgctttaatttagattggaagttattaatctgcaatataataacatgtttataagtaaataagtattaggagaataatctactggaattctataaatgtctttcaagcaatgaatatgctcaacacatactcgtggattaatattttcaaagatgaaatatttaaaatttcattacagatcatcatcatcagataaagatttatggtcagttttgaaaatagggaacattccaaaccccaattaaacaaagtgtaatctccctgcaaaacagttgtatta

SEQ ID NO: 249076 - DNA, 341 bp, Homo sapiens
attttaatctcactgcttattattgatctgttcagggtatctaattctttctgagttaagataggagacttgtatctttccaggaatttatccatctcctctaggttttctagtttatgcatgtaaaaatattcatagtagccttcaatgatcttttgtatttctgtggtgtcagttgtaatatctcccgtttcatttataattgagcttatttgaattttctctcttcttttcttggtgaatcatgctaatggttcatcaattttatttatcttttcaaagaaccagctttttatttcatttatcttttgtattttctttttgttgcaatttcatttagt

SEQ ID NO: 249077 - DNA, 328 bp, Homo sapiens
ttggggcaaaacaattttaaatggaggcacctgcatgacatcagtgctcttcacccagtcacacctcaaggctctgttccctgcattccagtgcaatgctccttagctgccctaggttttactccagcaggcccaggtgaagcatatgttgtgatggtgacccttctataggacacaggtaagaaaccatggcagcatccatgtggtgccatttctgctggcttgcagtatgcacaagtctttggggcatggctgtctccaccaagatagaatctgaaggatggagccatccagatcctgtgtatgagacccagacacagaattgtta

SEQ ID NO: 249078 - DNA, 486 bp, Homo sapiens
tttgtgccatgcaccccctttagcagtctggtgaagcctatggaccccttttcaagttttttaagtgtataaaataaaatgtttgattacaaaggaaattgatttgattgaaatacagtttatcaaaatattaaaaacaaatgctatagagtaatatgttctttattaatacactgaatattaagacctagcagagcagttagtctgattctaattttgcagtggtcatgaacataaaaggtattttgagatctgcaacaactataatgtgatacatgaaaatatctgtgatttgtgttagtgacagtcacaggcactgctgatactgctatattttgtttcctatgttcaaaacggaataacatatttgaacatacttcctttgttcaaataccaaatgtcaatttggaggttgatgaaaataatatgtggttttcttctcattcaagttcactgaattttctgaattcaagttcactgaatttt

SEQ ID NO: 249079 - DNA, 413 bp, Homo sapiens
tatgctttattctgtccctttatctcgtatcagctttttgtatgccattccttagataacatttcttaaataataaatggttatatattgtttattataaaagaatttaatcactcagcattgaatacttaagcttaagcttttactgtgtgtcatgcagtggtctaggtgttcaggatatggtaatggagcaacacagaccctcagccctcatggatattacatctttatgggataagaagacagcaaacaaatatatatacagtatactattgggttttagtaagtaacttgatgagaataaagcaggataaagggatagagaatgactggccattctaccttaactaattctctcagggaaagtctctctgaaaaggtggcaattaagctgaaactgaagatttctagga

SEQ ID NO: 249080 - DNA, 405 bp, Homo sapiens
ttttctttttttgtaatgggcacagaggatatttatttaagatggtggttttcaaacttttaaaaaagtagcagaccgcttgttttgtaaatgaaccttactataggaagcagataaatgtggcactcctcggggagcagcaggggtgaggggcctgggctctaccctctcactttccaccttgtcctttaaaggagactctgacatccctgaggaacacaattggtttagagggaaagggaaaagaggttaacatttagacatgtaaatgaacgaataaaataaatgaatagggaaaaaaggaaaccctttccttaatgtggaagtagaagtggagctggaaaatcaccgctttgtaaccatcacagtaaaaattgcaagaatcacgatgaatacttaatccag

SEQ ID NO: 249081 - DNA, 823 bp, Homo sapiens
tggggctggatccgaaaagcgcggacggggtcggggtgtgtgtgtgtgtgtcccctccggctctggggatgcccctttcattctagagctcgggctgagcaatggggtttgcagcgccctctccttccctccagcatgggagaggcccagccaggccagcgtgaccttcctggccccggccccggctgaagggagacctgctgggtcggccttgcaagtccaacctcattattcttttcccattcacctccctgcgtccctggagttacctcaatttgggggccctgagatggggtaaacctacccccccaaaaaatccctcgaggtgtaactcaggaaggcctagcgaatcccgactcggatggtgtcgcgagacccttttgcaggcggcgaggagtgggtaggtagggtgagttgaggaagtgcccctcacccgccaccccaagcccacctgtggccttggggctccccgtctcggtggggggggctgttgggacccctcatctcacgggtcatttccaccactaaacgccctttttgggcgccggaccccgcagtcttgtcccgcggctcctcccgaggccggcgccccgcgcccgctccccccagagccggcgcggctggaatgttctctcctcctcgcggggccgcttcctgtccgccatgttggaagccgattcctgtcaccgactccggcccactgaggagcggagggggaagggtgtcgagggccacacggggcggcggagccgggtgacccgggatcaccaccggccgcagcctcgccccctgcactgcgggggcgccggcgccccccgcaccg

SEQ ID NO: 249082 - DNA, 440 bp, Homo sapiens
ttctccaatcgggaatagaaccagctttggcgcttgaaacgaactccatctccaaaaaaaaaagaaattaacttttaaaattggaatagaaaaaccttatttaaaacattttagagtatgttagagtagatagagtagatacctgaactgaatctctggccacctgtggagttttgtctaggaagtaggtgatggcctatcaggaatactctgggtagctgctgtaagaatctagagttggagagagaaaactaaatccatactcactgatcagtagaaagaacattggactggggtcaaaagacctggggtctgaggccaaatctaccactattatgtctctcctgatcttagattccatactcgcaaaatgagagaactgaagttaaccagattttcaagtatgtctgcatcagaaatacctaggacttaaaaaaaaa

SEQ ID NO: 249083 - DNA, 510 bp, Homo sapiens
tgcacttttggtgcaggcactaaggaaaaaagtatggaagttcctaaaaaaaattaaaaaagagaactaccatatgattcatcaatcctgcttctgggtacgtattcaaaataattaaaattgggatcttgaatagatatctgcactgccatgttcacctcggcattattcacaagagccaagaggtggaaatacctaaatattcatcaacaaatgagtggataaagaaaacgtggcatatacaattgactcttaaacactacaagtttgaactgcataggtctatttatgcatagtttttttttcaaccaaacatggatcaaaaatgcagtctccatgggatacaaaacccacacatatgtaggactgacttttcatatatgcagcttccacagagctgactgcaggacttgagaatatgcagatttgggtatacacagggagcactgaaccaatcgcctgtgtatactgagggacaactgtacaaacaatggaatattaatcaacctt

SEQ ID NO: 249084 - DNA, 419 bp, Homo sapiens
catgtcccaggagggccgtctctgcctccagtcccaattaggcagccccaatataagggatccagagggctctggctcagaccaaaggcatctgaagggtccatgtgggatcctggctatccaccctctcccttgcacctcattttttcctgagctccaaggttacacaagtggcaggctgcccaggccaaattccacgtctgtcccaatcctcgatccactaacacacaaaaccaggtcagaagcggttatgcagcccttgggtacaaacagacaaagtccaggcctcctgaccccagggaataaagcctgcagctttgctttgctacactttaaagtacaggctgctttcaagttaaccaggcagtccttcgtcttctccagcaaggctgaatccacagttctctgctagggtaagg

SEQ ID NO: 249085 - DNA, 332 bp, Homo sapiens
ggagcccagcaagccccaggaacctcctagccagtcttccaccctcctgcggtttaggagggaccccgggggccttggctgctccctgagcctttctcagttctagaaaaactgaggtttccagggtgctgggaagaaggggggcagcccacctgccacagcacatgctggtcaggccctgcctcccagctggccctggggacaccaggtgaccatggaggtgtacctccctgctggggagggagcactgccaggagaaacctctagaaagagacggtgcctggattgtcttttagaaattgaaatcatgttttcaatacatgcccttgtga

SEQ ID NO: 249086 - DNA, 352 bp, Homo sapiens
tacagtgagccgagattgtgccactgcactccagcctgggtgacagtgagactctgtctgtctcaaaatatatatttatacaatatttatataataaacgtatatttattatatatgttatataaattatatattatataaattatacaaaattatatttattatatatgttatgagatgatagcattgtatcaatgataaaagtctgaattggaccattgttctgtgcttctgtaacacaatattcttgctcttaggagatataggttgaagcatttaggagtaaagggacataaatcatgcaacatgcattcaaatggttcaggaataaaaatactcatgaagggctggg

SEQ ID NO: 249087 - DNA, 289 bp, Homo sapiens
atgaagccagaaggtctgcctcttttaggaaatcaattcaattagtaagtagctgaagttagaattgaacaaaccttgtatgtttgtaacagcttgaatgaccaaatacagtagttgctcttttactaaaagccaccatatggtccagctgtgcatgggtggtgtttcagggaatgcaagcttcttatctgtgggtgtcctcataaatgaaatttgtaagtaggcctccaaagttaataagagaatgatccagtgcctgacatttttattgtaaatacaatttaatatc

SEQ ID NO: 249088 - DNA, 475 bp, Homo sapiens
gatggatgatgggcctaaaacaagagagttgcagaaaattggacaggatgaaatgaactgtttgtatatatctaaattgagtatccattatttaatttaaatgtcacctactctggtgcactagccacattttagatgctcatgagccatgaggctcatggccgccataatgaacagcacaactctagtgataagccataatggtgataaactacactttatcattttatgcctccttcccatcctgtccattatttgggtaccctttaaaaattaaacacatgtgttgtctaattactgaaataaatgaaaatgctacggaaaaaatctgggcacctatcttcctggaaacttcaggcttaattccatttagagaatggaccgtctgtgacttctgaaagaagaacttacaatattattaatggtttcccctattgttaagacaacagaccaataaacttattttttaatgtta

SEQ ID NO: 249089 - DNA, 278 bp, Homo sapiens
ttcgagactgttgaaaagaactcccacgagtgaacaaaagacgcctggccgaggacactccagagtgctgtcacgagggttccctgcagttttcagaaacttggagcatgtggccacagcggcttgcacgtgattcatacggcacatcttgtcaccatgtaaatgtttatcagcagagacaaagaccagaagagcaaccttggaaagagctaaatattccgatgttccagcattttcccctctggtttgtattgtgaatttttaaaatctcgattgac

SEQ ID NO: 249090 - DNA, 387 bp, Homo sapiens
aattctttatctgtgatgtcatatatttaatttctagcacttctattttactttgtcttgtagtgttcctctcgctggtgaaattccctatctgtttgcgtttgttgccccttttacattagatgcattaacatatttattatagttattttaaaatctctgtctaatggttccaactattggggtcatcaagtctatttctgttgattgctttgtctctagattgttttatcttttgctttttaaaaaattataatttttgatcgaatgccagacattgtgtgttaacagtacagactgaggtaaataatattcacatctccaaattattatgcctattatgtctgacttctagtgtgcaaggtgaagtcgatctagttaggagct

SEQ ID NO: 249091 - DNA, 1042 bp, Homo sapiens
tgcacaggatgcagggggcagagccgcagaggcaggacgcctgcgggagggcactgtcactcttccctctccccttcaccgcccaagcgcgcacctctcaccacctgcccagaggtcggcgcatctgtgctgcgctaggcaggagcacactgttccccagacaccagcccattgaactttcaggtccgagagggaggctgggtcatatagggctacacagccagtaaccacagaacccagattcaaacctgggtctatctccagtgatactgtggcttgaaagcgagagctagccgaggtcacgctgtttctttcttacagggagggagagtagtttaaaaaaaaaaatcacaaggccagctgtcaccgattaccttcgtgaccttatacaactcactcaacctctctgtgcctcagtgtcctcttctgtaacatagtggtatgtactcctcacaaagcagttgtgagagtgaaacagaaattccacattgtagcccccttgggctccctttccccttccccacttaatttttccccgcgggacttctgccatcagcgaggctttatgttttgtcggcctccgctttccagcggggcaggaatttttgcgttttgttcattgtggtattcctagaaattcgaacagtgtctgtcacacagcaggagcttacaggctatctgttgaaggaatatgaagtgtttggcatagtaccagtcacatgttaagacctcagaaaacagcaagtgcagaataaacaccagttggataaacggaatgattttcggctctgaggctataccagcactagacagcaggtggcggtctaaccctttccctctccagggtcctctgccccagttgcggtcagcccttcccctggcctggctgaaatcattcaggggctggtgatgacacactatgccacacctgaaaaggagactcaccctcctgggagcccagtccacagcccagcctttaaagaaacaggccccacatccagatacctctggtaaactttatcttcccccaaacagcccctac

SEQ ID NO: 249092 - DNA, 311 bp, Homo sapiens
tgcacaggatgcagggggcagagccgcagaggcaggacgcctgcgggagggcactgtcactcttccctctccccttcaccgcccaagcgcgcacctctcaccacctgcccagaggtcggcgcatctgtgctgcgctaggcaggagcacactgttccccagacaccagcccattgaactttcaggtccgagagggaggctgggtcatatagggctacacagccagtaaccacagaacccagattcaaacctgggcccgcaatgatgcccacgatggggatggtggctgggaagccgcttccatcatgcaggt

SEQ ID NO: 249093 - DNA, 1906 bp, Homo sapiens
cctgattccggaaatgctaaatatttatagttaggggctcctgggcccagcatcccatctccactcccaggctctgggggctggggagtggttaccaagcctcctctctccttctgtcccactgccctctccccgtctctagctcagaggccccactggaccctcggctcttccttggacttcttgtgtgttctgtgagcttcgctggattcagggtcttgggcatcagaggtccgccgcgatggggaagccctggctgcgtgcgctacagctgctgctcctgctgggcgcgtcgtgggcgcgggcgggcgccccgcgctgcacctacaccttcgtgctgcccccgcagaagttcacgggcgctgtgtgctggagcggccccgcatccacgcgggcgacgcccgaggccgccaacgccagcgagctggcggcgctgcgcatgcgcgtcggccgccacgaggagctgttacgcgagctgcagaggctggcggcggccgacggcgccgtggccggcaaggtgcgcgcgctgcgcaaggagagccgcggcctgagcgcgcgcctgggccagttgcgcgcgcagctgcagcacgaggcggggcccggggcgggcccgggggcggatctgggggcggagcctgccgcggcgctggcgctgctcggggagcgcgtgctcaacgcgtccgccgaggctcagcgcgcagccgcccggttccaccagctggacgtcaagttccgcgagctggcgcagctcgtcacccagcagagcagtctcatcgcccgcctggagcgcctgtgcccgggaggcgcgggcgggcagcagcaggtcctgccgccacccccactggtgcctgtggttccggtccgtcttgtgggtagcaccagtgacaccagtaggatgctggacccagccccagagccccagagagaccagacccagagacagcaggagcccatggcttctcccatgcctgcaggtcaccctgcggtccccaccaagcctgtgggcccgtggcaggattgtgcagaggcccgccaggcaggccatgaacagagtggagtgtatgaactgcgagtgggccgtcacgtagtgtcagtatggtgtgagcagcaactggagggtggaggctggactgtgatccagcggaggcaagatggttcagtcaacttcttcactacctggcagcactataaggcgggctttgggcggccagacggagaatactggctgggccttgaacccgtgtatcagctgaccagccgtggggaccatgagctgctggttctcctggaggactgggggggccgtggagcacgtgcccactatgatggcttctccctggaacccgagagcgaccactaccgcctgcggcttggccagtaccatggtgatgctggagactctctttcctggcacaatgacaagcccttcagcaccgtggatagggaccgagactcctattctggtaactgtgccctgtaccagcggggaggctggtggtaccatgcctgtgcccactccaacctcaacggtgtgtggcaccacggcggccactaccgaagccgctaccaggatggtgtctactgggctgagtttcgtggtggggcatattctctcaggaaggccgccatgctcattcggcccctgaagctgtgactctgtgttcctctgtcccctaggccctagaggacattggtcagcaggagcccaagttgttctggccacaccttctttgtggctcagtgccaatgtgtcccacagaacttcccactgtggatctgtgaccctgggcgctgaaaatgggacccaggaatcccccccgtcaatatcttggcctcagatggctccccaaggtcattcatatctcggtttgagctcatatcttataataacacaaagtagccacaa

SEQ ID NO: 249094 - DNA, 474 bp, Homo sapiens
gtactggctgcaggaggccatgagtagcattgtaacctcattaacgaggccttgaacaataaagatgtttttataatccagttggctgccttacagcaggttcaagagtcatgtgggatggaattagcatcacgggtcatgtagctcaagggtaagtttcagtccacagcttgaacttcaacccctgggtacagctcctattaatgcacccacaaatgaacataaatagagctgactctggctatgatggtatccagataacttgttttccacttcacagcttttcccttttggccccttccttccattcacaataactgggacatgaggattccggctcaatgcccagtgtcctcctctgtagcaagtctcctcctcaaaaatggaaagaatcttacatcagccatctatgtttactaaaaatgcttttcaggtctctactcaagcagaaaacattttcaggttaaaaaaaat

SEQ ID NO: 249095 - DNA, 1019 bp, Homo sapiens
agaaagactctttttttttttccatgatggagtgttgctctgtcttccaggctggagagcagtggcgtgatctcagctcatggcaacctccacctcctgggttcaagcaattctcctgcctcagcctcctaagtagctgggattacaggcatgcaccaccacgtctgactaatttttgtatttttagtagagacagggtttcatcatgttggccaggctggtcccaaactcctggcctcatgatctgcctgcttcagcctcccacggtgctggtattagaatcatgagccaccgtgcccagcaaaagatgattttaaacatttatttaggtgggtaggcaacattctaagataataccctggattaccagtctgttgcacacgtgctgtgtcatactttcctcttgagtgtaaaaaaaatgtgtgactgtggtgggaaatcacttatgaaattaggttactcatccgtagactttgtgtttatcaaaatggagattatcctgattgtgctaaacttaatcagaggtgcttttaagagaaagagacacatcacagaaaaacacccctgctggcctgaaagtaagtgacttctaggtagaacatgttgtaagctgcttatggtggccacatggcgggaaaaatgtttgtatcttgccatcatttctgcctcctccatgttgcttccagtaaggaacataagaggattctatggcagagggaaaaaaaagggaatctcattcattcaagaaataatcacctctcatctgggatagcttaagagaaacaggagaccacaacaggtccacattaatgggaggaaaaaggtaacctgggtaaaagtgctcactggcattatggaacagtatttagtaagctgtagtgaatgatcagcctctgggataccaatagtctaccaacaaggctgaactcattctaattcaatcagcatgtctgcaccattctggtgacacaggtttacactatttattacagaaatgccatgaagaccagtgggtaatg

SEQ ID NO: 249096 - DNA, 466 bp, Homo sapiens
taggtctagcagatgagaactgagattgtgagattcctctgacaggatatattagggagtttaataccctcatgcagcacgatttaaagaattaagcttttttaatcttcaacagaaagtacagttaagcagtaagtagtcattgataaaagggtttttcttctagagtttctataatgaaaggagataatttttcaaaagaaagagaaaaaactgcttatagtggagtaaaaatttaaaaaaagtcaatattttgacactcacagattcttgaaacataggttcttagataccaaatatgctagttgagagtgtatgtatgtatatgcctcctcctttatcatcgttctcacttgttaagagctatagggctatttttaatgctatctttatgaaatcgatatggcttctcaaaatctgtggagtagcagcacattttgagagatgggaagcttttatagctact

SEQ ID NO: 249097 - DNA, 1412 bp, Homo sapiens
ggaatctggagctccatcttagacatgctgaagtatctgtgccacttccaaagggacatggggtataggcagtggatatgtaagtctcggattctgaggcattctaggtttaaaatataaacttgggaatcttttagatggccttgaaagctccaacagtggatgagatccccagagtgagtgtagagagagaagtgatctgagagatccagtagcgagggaacctgaggttaccggagatgaggaggcagttgtgtgagtgagatctttgtgagggtgaggagggccaggaaccaggatacaggaagagggtggccttcagtagacacatgcactgtgacaggaagggaggcagagaatatgagaggagcctcaggtagggggatatatttggggatgggaatattcaagaatcagatatttactaagagcctgacactgctgggagggctctgatgtttactaagtgcctatccatgccatctgctatgtgaaatgctgcacacatgttatctagttgaatcctgagaacaatctcattagggaagtactatccatgttttacagataaggaaaccaaggctgagaggaaaagtgccttgctcaatcagtaaacaccagggcctgaattcaccccgcacctgcactccagatgttggaggataagaatgttgtcgaggagataaggactacatatgtggcaagttagaaaaccatgtaatatgagtgctttcccgaggcaacctaggagtggcacagacactgaattgtctgagttctcagaaaggaaagagcaccatgggtgacagggacccgctgcaggggcctcgagcacagggactgcaaccttcctcccgctgcattgtattccccctgctgcacctcatctgcacctagccccttctaatcaggggtccctgtttctcaccttcccaccttccaccgcagggcgaatgcagactccccactgtaggggacagcaccatgcggaatgttcttagtcatttccttcatcaattttgcattctactccatatgtctggagtagttgtacttcttttttgacacagagtctcactctgtcactcaggctgaaatgcagtgggatgatcttggctcactgcaacctctgcctccagggttcaagcagttctcgtgcctcagtctcccaagtagctgggattggaggtacccaccaccattcccggctaatttttgtatttttggtagagacggggttttaccatgttggccaggctgctcttgaactcctgaccttaagtgattcactcgcctcagactcccaggatgctgggattacaggcgtgagacactgtgcccggcctggagtagctgtattaacataaaagtaggtgaaattatttataattaaataaaatgaagtctccagg

SEQ ID NO: 249098 - DNA, 735 bp, Homo sapiens
ggaatctggagctccatcttagacatgctgaagtatctgtgccacttccaaagggacatggggtataggcagtggatatgtaagtctcggattctgaggcattctaggtttaaaatataaacttgggaatcttttagatggccttgaaagctccaacagtggatgagatccccagagtgagtgtagagagagaagtgatctgagagatccagtagcgagggaacctgaggttaccggagatgaggaggcagttgtgtgagtgagatctttgtgagggtgaggagggccaggaaccaggatacaggaagagggtggccttcagtagacacatgcactgtgacaggaagggaggcagagaatatgagaggagcctcaggtagggggatatatttggggatgggaatattcaagaatcagatatttactaagagcctgacactgctgggagggctctgatgtttactaagtgcctatccatgccatctgctatgtgaaatgctgcacacatgttatctagttgaatcctgagaacaatctcattagggaagtactatccatgttttacagataaggaaaccaaggctgagaggaaaagtgccttgctcaatcagtaaacaccagggcacgtggatccacaatggcacgtggatcacaatggcacgtggatcacaatggcacgtggatcacaatggcacgtggatcacaatggcacgtggatcacaatggcacgtggat

SEQ ID NO: 249099 - DNA, 513 bp, Homo sapiens
ataacaagtacagatgacttaaatagtcttggaaacaaattcacctgattcttcaaggtgttctgtaaggatacatttaaaatggttagcagaagtggcattatgaagacatattgagagcatggaagctggggccaaactatctgcatttgaatcccagttctgacatttattagctttgtgacttgggcaagtaattatcacatctgtgcttttatttcctcatccataaaatgggcactctgcagggtcattgtgaggaatgatatatgcatagcacttagaagagtagatgcatagtgaacataaagcaagctagttcctgttattcaaagtaataacctgtcacccacaatatttataataccatggacattgatcagtgtgttttacaaagggacttaagagtattgcttaatccagtggttgcagtcgttggttaagaaagcttctactgtagctcttgttttcttggcctgtaaagacaccatttttttttttaaaacatagaaa

SEQ ID NO: 249100 - DNA, 423 bp, Homo sapiens
agcagtcaacggatgccaatgcttagatgacacagagttagaattatctgacaaagagttcagagcagctataataaaaataatccaaaagtaagggtgaatttgcttcacatgaatagaaagaatagaaggtcttaacaaggaaatagaaaatataaagagaacaaaatggaaattttagaatgtagaaatgtaatcataaccaaaataaaacacatgggatggactcactagcaaaactgagtgacagaggaaagagtcaatgaacttaaagataaataaataaccatgacctaatctaaaaaacagagaaaaaacccatagtgaatacagatttagagacctatcacacagcaccaaaaagtctgacatttaagtcatcagagacccagaaaggaaggagacaaagtgcattgctggaaa

SEQ ID NO: 249101 - DNA, 283 bp, Homo sapiens
ttacaggtacacaccaccacgcccagctaatttttgtatttttggtagagacgaggttttgccatgttggccagggccaggctggtcttaaactcctgatcttaggtgatccgcctgcctcgacctcccaaagtgctgggattacaggtgtgagccaccatgcccagcctaggaatgtccaaattctgataatgttttataagattaaaaatataggccaggccaggaggtcaggcgttggagaccagcctggccaacatggcaaaaccccatctctactaaa

SEQ ID NO: 249102 - DNA, 305 bp, Homo sapiens
gatggttacattaaaacctagacttcaccacagtgcgatatattcatgtaacaaaactgcacttgtacctcttaacatttattttaagaaagtttcccaacgaatgtttagcttcaccaggcactttgtttttatttcttttctttttttttttttttttgagatggactcttgctctgttgcccaggatgagtgcagtggcgtgatcttggctcactgcaacctctgcctcccaggttcaagcgattctcctgcctcagcctcccgagtagctgagattacaggaacgcgccaccacatccggc

SEQ ID NO: 249103 - DNA, 478 bp, Homo sapiens
gaagagttgggaaaatttgaaaatctactgggttttagatattaaataatttctgttaattttggtagttatgataatagtattgtggtttggtagatattgaagtatttagggctgaaatgtcttgatgtctgtaactgactttaaaatacttcagcaaaaacaaaagataaagcaaatacagcaaaaaaaattaatactttgtgaagctatgatgaatattagggttgttcagtctttctctgtgttagaacattttataaataaaaagactaaaaatagagaaaagtgtaagagattgaatatactggaagtataagattacttaaaaggtgagagtttaaatcactggtggaggggctgggcatggtggctcatgcctgtaattttagcactttgggaggccaaagtgggaggaccagttgaggccaggaggtcaagaccagcctgggcaacatagcaagacactatttctcaa

SEQ ID NO: 249104 - DNA, 456 bp, Homo sapiens
ggtgatccacgggagacggctagcctggaccaagcagttggcaatggataagagcctactcctcaaggataagatgctgaagcagccacgtgctggtgttgtaccttggacagttccatatgatgagctcagctttcacccattctgcaggagctgtggttctgcagctccctgaccagggacagcttcatcctgcacaggaccatgcatgcagggtgtgctcaatcatcagtggtgactgccgaactccttccatcattctcacatgctccacagcaaccacaaacacttgtttaacctggaaagaggaaaaggccaccccggaatagtcatgcttccctctcactgaagtgaaccagatggggccacatgcaatcagatggactcctaaacagaacaaaatgtcactctccttgtatcatggttgtctcatgggttgacatacccaacactaaa

SEQ ID NO: 249105 - DNA, 363 bp, Homo sapiens
ctcccgagtagctgggattacaggcatgtgccaccacgccccgctaatatttgtattttcagtagagacagggtttcatcatgttggccaggctagtctcgaactcctgacccaaagtgctgggattacaggcatgagctactctgcctggccccatacatcaactcttgagaggggccttggaactacatcagctttatgatattctggggggaagaaaattcaggtagacttaaaaagctactgccaacccaattctagtatttggccactgactgagaaagggaactcctatatacctgacccagttccacattgcctcctgccagcctccaggtccagggaaagtaattggatgacatc

SEQ ID NO: 249106 - DNA, 425 bp, Homo sapiens
aaaaatctaaggactagagaccacgggtgcaaggggttatggccagtggaacaagaaaagatcatacgtggtaataaatataggtaacagtccattctggatgaggtcaactgggcaggaattctttatgctccatctaggcaggaaatacatggaggcctttgaagtcccactggcatgtgtgcaaggagccactgttaatttacacaggaaaaaggaatggagggagtaacagcatcagtttgaggtcctgtgatatatccattgggggtgaattgtcccacagttattaaattatttaaaaatcagtactgtattctaagttacactgcctgatttcagtgcttactttccggctatagtaattaagacagtgtagtattggcgtaagtataaacagatagattgatggaacagaatagacc

SEQ ID NO: 249107 - DNA, 756 bp, Homo sapiens
ctttccgtcacactgggaggcttgagaattggcccatggaagacaggtgcagcactttctaggaaggagagtgtggaacttgggctcttggccaacaggtcagtaaactgtagtttcattggggctcacactctacttagcacatgtgctgagggtttgcatctgcccaggtgagaaatggcaccgaggaaggcccacctctgggggcacgttgagggaggcatgtaagcaggtgtgatattgccaccctttcccacggaccctacccgttcccactgtgcagtcattatgtcagggaggaccgtgcccttgaccctaggggtcctggggccctgtccaattctggtggctgcgaggcagacaggaggaggttgtagtttcctgatgaggaaggaatgacgtgactaagagcagtgagcctgtgagggtcactgtggtattgcctgagctccaggaggcctgtgaagaaggtgcagtgtgttcttcccaccttccgtcccgttattcatgttgtaaatattgtgctcccttgtaggaagagccatgggtccaaggccacaagcccctctgggccctaaaattggtacctgaatactcattcccacttttttctgaatgggtgctgaggagggaggaaaatggtgcctttcctctctgcgcaaaggagcagacacctcacagctgagacaggtttcagttcctgctatggcaggatattttgccaggtatagaaaaataagacaatactgattaagc

SEQ ID NO: 249108 - DNA, 282 bp, Homo sapiens
aattattcatcctatttttactctgctactgctcaactttgaactttctttatcctgtatttttttaatcaatgctaattataaaacagccattttttactctccttggactcttttgtcttcctcctgcctaattgttgagaaacattctataattgtagatccctgctattagtctgttacattattcttttttgaggaatcatttatcattagctttatggcacaccactctgttaacaactgctagtcacaattaattctatgctacttaaaaaaaaa

SEQ ID NO: 249109 - DNA, 373 bp, Homo sapiens
ctatgcactaggcaaggtacaaaatgttttatattgataatcaaatgtaattcttttgagatcagcattattactcccacttttcaaatgagtgaacctgatcaaagagattaagtaacttgtctggaaatttaagtaacttgctcagggagaggcaagagcatgatttaaagtcaaccagactgcaacatccatggctgaacccccacctgagactacaggagcttaccagaggatggggggagtgaaatgggaaggcttatggcagtggctctcaataagtaaccctgggaccagcagcatctatatccagatggtcttactcggtagacagtgcacttaaccattacacagtactgctacattgtgtctt

SEQ ID NO: 249110 - DNA, 840 bp, Homo sapiens
acatgtggcatttaaatttaacttaattaaaatgaataaaatttaaaatgcaattccctggtcacatagccacatttcaggtgcccaacagccacatggacagcacataatagtccattttcatgatcgcacatggctctattggacagtactggtttgcagtgcattggagcaaatgagtgtagacttgtaccacatgtgtcaagaagcaagaagatgttttcaaaggggaaaaggatataatatacttctatgagtgtctctgaaatctgtgtgtgggatctatgtgtgaagcctgactctcactcaagtactcctctaaatctattacctaaaccttaaccctttctgttctcagctaaggcgcaggctgtttcaaacccctatggcatctttgtgcaaataagaccaaggcgcctctcttcccagaggaagcaatgccatgtcagtgcacactggatctgagcagtgccaccaaacagggcccacctaacaacgctgtacaaatctggcctaagggccaggatttgaaatttagaaggcaggaagagtttcttcattgctctgtgttctgcatctcaatacttcttttagcaatgagtgcagacagaatgacagggcttgagtttgtgagttggcaggaaggccaaaggataaaggaaataccaagaacaacaatttttttaaaaacactaataatactacaagtcaaaaacatggtctttgctgggcacagtggctcacgcctgtaatgtcaacactttggaagactgaggcaggaggatagcttgaggccaggaattttagaccaacctgggcaacatggcaagacttcatctc

SEQ ID NO: 249111 - DNA, 224 bp, Homo sapiens
ttttctctaaaactcactgctatactaatgcaagtaacttaaaatgtttaaagatcaagcagcaaccaagcactcatgaatttgccatcgtcactgtcattcctcagaaagatgtttctttgttgaaaactattggggaaatagcactaaaatgtccaagaaatacacatatgaaaacctattatgtttgccgggcgcagtggctcacgcctgtaatcccagca

SEQ ID NO: 249112 - DNA, 471 bp, Homo sapiens
tacatttatactccatgtaagtaaaaaaatacggaagaaaaaatgattatatagttccataattatttaaataaaaataattccatgattaagaggggaagaaaaggttacaaagcagtatgaatagtgtgatgtcatttttgtataaaatatatgaagaaatagacatagaagaaagtaatgaagtatcccaaaatattatattaatgatcattctctctggatttgttgcatgatatatttattatctttgtttcccttttatgcattctgatataaaattttttgtagcaagcatgaacttttatcattggaataaacattgatgctatattaaaattagagtgtggtggagcatggtggctcatgtctataattccagcgctttgaaaggcctaggcaggaggaccacatgaggccaggagtttgagaccagtttgggcaacatagcaagaactccactctaccaaa

SEQ ID NO: 249113 - DNA, 1131 bp, Homo sapiens
ggcgtggtggcgggctcctgtaatcccaactactcgggaggctgagacaggagaatcgcttgaacccgggagttggaggcgtagattgcattgagccgagatagtgccactgcactccaacctgggcgaccgagtgagattccgcctgaggaaaaaaaaaaagaatattttgtatcacttgtgagaggctaacattagattgtccagatgaaagtgctacagttatacattggtatgtaatgaattttaatttggtctgtcattgtcctttttgtggtgcagaggagtcattctgcctagagattggagctaaaatacattgcagaaatttgttttagactagtctcttatgtagattgtgtgggtttatgtagaacattttgtgttcagaatgcttttattaaccttcttcatggtactcttgagaggctgtccttatctcttactgatgattagactgagacaagtggaaagtaaaggttagacaagatgtaaagtgtgtggtttgagctgtgatgagcacactagggagttccagataccagtttgatgcttattcaaccatttaggttatcggtctgcgagtttgttttctgcagtgtgtgcataactagtgttttgtcctcttagaggatactctggggacattcttgagttttctttgtttattcctttccgtttaaggaccagaagtaatattcttgaattttcatttgttcagatctttgctctgtaattaagattgcgtgagagtttgttgtttgggccagttaggctgttgaatttcttgggaatgtggtttcaggcattttttggtccctttgattatatcattgtatgtggaactttttttgagagagagagttttgctctgtcacctaggctggaatgcaatggcgcggatcttggctcaccgcagcctccgcctcctggattcaagcagttctcctgccctagcctcccaagtaactggaattccagtcctggccaggaactttttttaaaaaagaggagcacgatcataaaattaagtcagattctttcctaatcctatctctgatttgtttttaattgctttacctgtttatctcccctcacccttttgttgttgttgtttgagatggagtcttg

SEQ ID NO: 249114 - DNA, 321 bp, Homo sapiens
aaaccccagtaagagaaatggtgtttatttcatcacctagaaaaacactgtccgaggaactttagttttaaggaaaatgttctgtatttatgcttcctaatgcagaaaccactagccacatacgtactcgaagtgtggctactgcaattgagaacctgacttcttaattaaattgaaatataaatagccacatggagctcgtggctaccgtgttgggcagcagagacgagagctgtaggattacggggagaggcaaaatatagattgacctataactgacatcagatagtaagacagcattgatatcaaaacagagactgt

SEQ ID NO: 249115 - DNA, 488 bp, Homo sapiens
tcctcgggaggctgaggcaggagaatcgctggaacccgggaggtggaggttgcagtgaactatcgtgctactgcactccagcctgggtgacgagcgaaacttcacctcaaaaaaagaaataaaacaaaaaaacacttgggtgtgccagacgcattgtaggctgcttggagggtgaggacctgactggtcctgctggtgcctttttactgctttcggtgcagaatccagatggctactacttggttctgacctaggccaggggaactccactgctcaagagactgatagcttgtcttcaccagaaaccttgttaaaacacttggctgactcaacaggctccaggtgagccaaagtatcttgcatctcaccccgagaggaggcaagtagcctccagcttcacttttctttctggtcagcagcaatggctgttggaagtcttccttacccattcgttcttctgagctggccaagtttatgaggcaaaaaaa

SEQ ID NO: 249116 - DNA, 1021 bp, Homo sapiens
gggagaccacagccccagctgacatcttgattgtagcctaatgggaccttgagcagagaacccaacaaagccacacttgggctcctgatccacagaaactgggagatcataaatgtgtgttgttttaagttgctaatttgtagtgatgttcttatgcagcatagataactcatacacagagaaccaaggccacgcgagaaccctgtgggggcccctgctgctcagccactcctcacatgctgggacagctgtctctctggcctctagcaccaaggtccccactatcccaggccttgactcttggatcagagagggacaaaagccccatggagccaagcagactcctccccctgggctgcactcacctagcttgtctggcacacacaagttggagtagagaaggcaggaagccctgggaagggagagggtgatggccttgcttaactgggatgagtgtccaccaaatttcccttcccacttcccctgctcatgagcccccaggggacctgtgtcagttcactttctagaggcttctatgtgccctaacttggatgacacccacgggcctccccaactcagcacagggaacatatgcccatggtggcatggggaaagaacccagcctctcccctgcccaggctcctgcaccccatagctgtcacccctctggaacctctcagggcagcacgagtggtagcctcggagtggccttcaccctccaggcactgcggtcctccagattggctcacagcccagctcttgctcccatatccacagccatgagagcagccacctccccagggggccataagcgcttctcaccaggagcccacctaggccaggagggagctgggggcaagttccaactgcccccttgaacactgcatacccatgaatctggcaggggcatctgggaagagatttgaccactgaaagactgtagggaaacccttgaacctcaatccgctacgccacgtggatttgcttcctgtgggctgcccaagagcgcctctgtggtgaa

SEQ ID NO: 249117 - DNA, 453 bp, Homo sapiens
atgaacttatattttattaagccacagttccttgtaggtgttctgtcactcacagctgagcctaatattaggtgatacaggtataaacacatacaaggttacatataattttttggagggaggtggtccatggaccccaaattaagaatatcactttagaaatatatataaaaggataaccacttaatgtttgtactttgtaattaacaaatttttcttcacatccattatctttcttaatcttcacaatcatcacagaaataaatatcatttttaatcccatctgtttattaagaaacaaacaaaaaaatcctgaggctcaaggcatgttatcttgccaaaagttaataatgcagtaaaaattataaccaatgtgaatgattctaaatcccatggtcttatcactattccaatgactgtagtacatgtacaggtatcctccagttttgtaaa

SEQ ID NO: 249118 - DNA, 300 bp, Homo sapiens
gtcctttcccccactgcttatgtaagaggcaaaggaaagatctaaatggaaaaatgaagcaacataagcatggagaatcaggtatttctacaaatagtttcctttaccaactaatcaacaggtgggaaactgaggctgtttcccctccccccaccttcataaaaccaccatactgaaaaattaatagttctttggctatgctggggtttgattaaaaaggccaccctccacccttcatccacagcacagcattggttcctaggtccacaaagacagcacggaaagaacgccagagttagc

SEQ ID NO: 249119 - DNA, 1122 bp, Homo sapiens
agatgggatttcatcgtattggccaggctagtcccaactcctgacatcaagtgatccacctgccttggcctcccaaagtgctgggattacaggcgtgagcaccgtgtccagccttgcttcagagctttatgagtaaggtccccatggcctcagaagtcctctaggagttctgagcctccgagcctgtggctctgcctagaggtggggaactgcacagctctgccagctctacatccagatatgtgtagtcaggataaataaaaacgcaaccactgtggtaaagtcttgggaaggttttgtgcattggaaggagcatctcatgtatggaaagattggtaaccacaggttggatgcattcctcagtagaagcatgcacctctctgacggtttaaagaggaaggcagattagagagaggtatttgaccttcagaaacagccagttaaagcagaagcccagctggtgataataatagtagtggttgaagaaacagaggtacacacaggtgaggaagacagtgattggtgagtcacgatgcaaacccaggcagccggattccagacctccacatagccaagtattgcaccagatgaaatagctctagtggtggtgccagttctttctgatggaaataaaatgcgagccaaatacgtaatttaatttttttagtagctatgttaaaaaaaaaacaagatgaagttaattttaatgatatattttatttggcctagtatattcaaaacatcatttcaatatgtaatggatataaacaaaatgttaatgagctattttattcttttcatgccaagtctttgaattccagtgtcaattttacatctctagcacatcttgatttggactaaccacatttcatttgctcagtagcacacgtgaccagtggctattggacaagacagctctgagtttactgtgaccctcaaagaagagccgcagacttcacccttgtaacagataagctgctggctccctttgtgcaaaaaaatgatgccaaggataataccaccttaaagcccaggctcttggacctgacccaggcctggtcacttaacgtcatccatagcccgggaggtctatgttcttggtttttccacatcctgtttcag

SEQ ID NO: 249120 - DNA, 659 bp, Homo sapiens
tgggcattaacccaaaaagaaagttggtctaggctgcctcccgacttcagcaaatagtgtgtttgttacatgcaaaacaaacaggtatttacgttctgccgataccttatttttaaagtataggattagaacctggagggggtgtgtaggtttcatttagttttctagattaagaattgaggaaaccatcatcactctacattaaattacttgcagttgcaaaaattgcatttaattgtgagtcattaaaaggtacccagaaatacttttattaaaataaacttgtcgacctgttgcgggtaataggatttgcacatgcctgcatttctgccttccttatgtcagctggatttcttttcaactcttttttaaaatagaaattcaggtggacattctggagaccataaacattttacggaagactggtgcctaaatgtgccttcccatgtccagctaataaaccatggcaggaagtcaacagaacaagccatgtttctgaacaccctttcataggtgccacctgagttactcagtgaggggagaaagaactggagtgtcatttcagcaaccacagaaagctacaggtgaattttaaagcccaggtttgtgttctgattcagaacatatttaagctaagaatatttccttattcatgttta

SEQ ID NO: 249121 - DNA, 440 bp, Homo sapiens
gcaggacgttacgccggcctcaggtatggggaccggggatgggggacagtgtggccaaagtgacccttgtcctataccctcctccttctccaagcccagtctcaggggccgggaggagaggtgccccggggtgggcaggggccagactgcagatggcgatggggagccgggggcagattaggaatgaggggcttgggagctcccacggcagattctaactcagcaggtcagaaaagaaatgcccatgctggagcccttgtggaagtggagggccgtgaggtgaggaggggagcagcccccactgctgagcaaacctgggtcccggaccaggcggatccagggccaccctcccttcctcagccccctgcccccttggcccaccctgtggtccttgcccccttctggatggccgcctgcctcactgactggtcccctcccac

SEQ ID NO: 249122 - DNA, 451 bp, Homo sapiens
ggcacctaatgtctctactacagattagaaattactttcacagaaggccatttctgaaacccaaactagcttatgtgttaccctacattgaaattattcagacgctgtcttccccagtaatctgcaagtttcacaaaggtagatgccatgttcttaatggtttcccagcacatagcacataacagaagctcaataaatatttgttgaatgaataaatgagtaaacagaatatttttacagttaaatacctttaattcttttattttttttaaatttcaagtccttagaggaggaagaattgaaaaaatatgaaatatcaaatatacatttagctaaatttttaaagtttagtaggctatatgcataaatcaaatgaatagcaatatttggaactgtaactatttttggaatcttgtatgaataaattacaagtttaaaacatcaagagtaa

SEQ ID NO: 249123 - DNA, 229 bp, Homo sapiens
tcttcttcttaaacctagaaatcttcctataatgcttgatcctttttaaaggaagaatttggaatatggagcagatgtatattttcttcgtgacactcagaaacatgtattgtaaatgtgtctgttttttagataccatattgttcagttggctcctctccacttgaatccttttcttttaattagttttccagcctggctgtcccctcagctgcaaaacaatgcagta

SEQ ID NO: 249124 - DNA, 465 bp, Homo sapiens
gggatacagtatttgtttcacagcgttgttgtgaagataaacgggataccccagataaacagcttgtgtcccccccatcttaacaaccctcctttaggctggcgggccacctgctcaaaagccttccccaggggggttaaaaccgtcttttagtagttctggtacgggtgggctgggggagatcctctaaagccagtgcgaccttgaccccagccaatgtccaggctcttgacacatccagagaatgagttcaaggacaactcagaaaatagtgacaatatgcagatttattgcaaagggaaaagtacacacccaggaaaagggattgtggagagggtcactcacaacggggcttggggctgctacctttatgggtttctttaaccaaggggtgaaatattcatgaaaattcctggaaaagtgtggagatttttcgggactgtggtgccacccatttttacttca

SEQ ID NO: 249125 - DNA, 368 bp, Homo sapiens
agtttatctaattaaatcctcgtagcaaatttaaaataggttaggtagattatgcttaaccaattctgtattagaggaaaggcaagcatggggtagcctaagtttgctgggagtacccagcaaagccagtggtaacgtttaccatggatttcagatcctccaatatttggtgacttccactttccacttcttctataatcctcatgttaatattcattcccctcttcatgatttaacactatatacaattcccaggaggaaaatgtggtagaaatctatttttccttgctttgccacactacaactacaaaaggtgcaattatattcatcctaatttatccatgtaagtataagcattctagaggagg

SEQ ID NO: 249126 - DNA, 437 bp, Homo sapiens
ataaatgagtaagatatatcaggttatggtggtctttctgatgtgtcaatttgaacagactatagcctttaattatccaatccaacacaaatctagatgttgctgtgaaggtattttatagatgtaatttaagtccatgatcacttgattttaagagagattatcctggagaatctgagtgagtctgattcagtcagcttgaaaggccttaaaagcaggactgaggctcctcttagaggagaaattcatgtgtaagacaacagattcagcccatgcccaggagttccagcctgcccttatggttggcctgacctatggattttggacttatttatgcagctgccacaattgcctaagccaatctcttgcagcaaacttcatgtcatcctttattggttctggttctctggtttaaccccaactgactcagtgctatg

SEQ ID NO: 249127 - DNA, 483 bp, Homo sapiens
ggagacataaccagcgcaacgtggtattctagactggatcctagaaaaggacgtcaccagaaaaactggtgaaatccagataaagttaacagtaagatgtcaatgttggtttcttaaactaatgtatctcagtaatataagatgggaatattaagggaaaactggttgaaggatataggggaactctgtactatctttgcaacgtttcagtaaaatctaaaattattccaaaacaaaaagtttatttaaaaaaaaaaaaaactccagacacacttgtttacaaaggttatctagcagccatggataaactttcttggagtaaacactaccaccgataaatccaatcaccaagctgagttcccataaatatttcaaatgtcaaatgaaaagtcctagattaagtcacagaattataaagacattgatgacagctgatgagtcatcaattcaactagattactacagatagcttaaaaccgtcga

SEQ ID NO: 249128 - DNA, 475 bp, Homo sapiens
ctgacataacctagttgacaagtatagcttaagcaagtaagacctcattgctgatggagaagaccccttttcctttgcttgtctgttttgcaaaattcatttttccttcatgagagtaaaaacaatttaggggttattgcagatgtccaaatgcagccagcaattttaaagtcattgatgataccgtcagttatcacactcctacaccagcaatgaaaatactgtatacatagtattacatatatccactcttctaaaggcaagtctgagtttttaaagaatcatgttgtttaaaaaaaaaaaagttgcaaatgtatccattaattataattatatgcacttaaaaacatagaaaaagaatatttgaaaaagattgcaactattctgttaagatactggttttacgtatgattttctccattgtattctgttgcattatatttacaattaaataaaaattataaaggaactggtg

SEQ ID NO: 249129 - DNA, 329 bp, Homo sapiens
ctctgttgccccagctggagtgcaggggtgggatcatagctcactgtaacctgaactctcgggctcaagcaatcttcccaccccaggctctccagcaactaggactaaggcaggccaccacatccagctctttctctagacagggtctcactacattgcccaggctaatctactgtttatgttatcggtaaggcttctggtcaaaagtaggctattagtagctatgttttgggggagtgaaaactttcttttggattttcaactgtgcagggggattggcaatcctactcctcatgttgtttaagggtcaactctatataaaaaactta

SEQ ID NO: 249130 - DNA, 405 bp, Homo sapiens
aacataggaaaggtacaggaaaaacacagtattaatcttatgggaccaccattatatatgcagtctgtagttgactgaaatgtcagtatgtggtgtaggactgtgcttgctacatttattataacatctattaatatgtaatttattacattatgttattataacagtattgactgttataaaaaatgtttagagctaatagcaagttccttggattgagatgttaatattttttatattatttttactgttgtatttaactttttcttttttgagacagagtctcattctgtcatccagcctaggtgacagagcaagaccctgtctcaaaaacaaaaacaacacacacacacacacacacaaaaattatcttaaaggtactcaaagaacaacaacaaaaaaaaa

SEQ ID NO: 249131 - DNA, 314 bp, Homo sapiens
tctccctgcagtcatcctgcccatggctgttgatggccctgatggggcttggagcccccagaatgtgcagaagttggacaaaggtggtcttcaaatgcaatggttgtcttatcaccgaaagcccacggcatccagaggaggccctttactacgaagtttacagagagcacaggtctctgtacgtcccaagtttcccctgctgccaaatgcaggggaggagagaattctggaagcccaccctgtcccatggctcccctggcacatggagccactgaatgtcttgtgaacattaaacaaatgcttccaagtgaaca

SEQ ID NO: 249132 - DNA, 426 bp, Homo sapiens
gcaatgagagactggagaggaatattccattttatctctagatggttatagatagaaagggatgagggagtcacagctggtgatggcagtgtcctttccatagaccttttaggccctagttaccttttttttttttttttaacttgagagataatacacatggtatgggaggtaggcaatgcagaactagaaaaagttaatgacattaatatttaatagtaggctcttctactgataaaaatttgctagatgccaaacataattttttataacaaacctctgcttttgcatggtacagatgatttgtgtaacttttgatctaaatagtttaaaatcactagttcttgtggaaaaatgtgataccagttcctctgctaatcaaggtaaatgagccgtagtcagatagatggaaagacagaccaaaaa

SEQ ID NO: 249133 - DNA, 258 bp, Homo sapiens
tttggaaaaatgatattaaattgctctttgacagtggtatttataaaacttatgcaatggtagatagaaagaacagcagtgttgagaaaagttcctaagtttccactgttttaggtacaaagataacgtcttttcctcaatgatgcatttcctgttttttaaatcttttaaaaagttctttcttgttttgtgccattggacagtaatttaagaggtgaagtcaaaaagaaaaagtacaaataaaaaattgtgactttg

SEQ ID NO: 249134 - DNA, 352 bp, Homo sapiens
ttattccctaggcttgtttcagtttcacatcaacccagaggatatgagacttcataatggtcctgatggcacccagccatccactgagagctcattctcaggcatgctggcaaagtgactcagtgattttcaaacctggggagctggataaaaatgcctgtttccttccagagagtcgaatgcaaggctgtgtgtggtgcctgggatctgtagactgaagcaagcctagggaataacaaacaaacaaaacttccaatgaggtatacaacatatttccttatcttcttccactaaacatttattatgttttcagagctaagcctgggaatatagagctgactaagacatggct

SEQ ID NO: 249135 - DNA, 418 bp, Homo sapiens
cccttaaattgaattatttgactaattgataactcttgaatatttgtcaggtaattgctaagtgcaagggagtatgggaaaatattacattctactttgtggtatatttgcattgacataaatagtacactgatttacataacatggaatgatgcagcattgtagatcccaagattatgggaagcctagtttgggaagcagagacagatatattttcatgttcctaatattgtgtgtgtgtgtgtgtgtgtgtgtgtgtgtgcacgcgcattttcctgtacctgtatctatatctgtgtgtatatttgacaaaaagcaacttgatcatagattttggtaaccatatgtacaactgcatattttaacagattgttttccttttatttaattaaaaaagaaaaaattaatttgcttatat

SEQ ID NO: 249136 - DNA, 386 bp, Homo sapiens
ggatagttaaaaaggcttaccgtggctagtttttataaggaaataatttaagacattctagaattctgcaaattaaattatatatgtatgcatgtatatactttttgagacagagtctctctctgtcacacagactggagtgcagtggtacgatcatggcttactacagccttgacttcccaggctcaagcaatcctcacatctcagcctcttaagtatctgggactataggtgcatgccaccgtgccgatgaaactgtgtatttaaatggaacatggtaggcagttaagtacttgaggaaattgaaatttgtcaacaagggatcttagttatctgtattacgtattaaaagggctctagggaagcggttgagaggttaaaaaaaa

SEQ ID NO: 249137 - DNA, 388 bp, Homo sapiens
tactcccaaaaagaattatggtattaaaaaataaatgtgctttctttttccaacatgaagataatttttttctgatcacgaagataatgtatatttatttagaaaattaaagcaatattagtaattctaaggaagaaagtaaaaattactttcctccccaaccacccagaggaaacctccatttgcttttggtgataatttttgcagctgtctctctccatgcctgtaactataatattcatgttgtttttaatctgctttttcccctcagcagtatattatggagctcattctatgtcaatgaaaacttacatatatgtaatattcgattatttgtgtaaaatattgtaccagttttttattaaagaacatttaggtcatttcctat

SEQ ID NO: 249138 - DNA, 243 bp, Homo sapiens
tggtacataataggtataaaagaatgtatgaaccaacctgaaggtttaattgattttcttggttttagtttattctcagtgacaatagctttattcttttctaattatataattcatgttcattgtaaaaactttcaaacaacccagaaaaaataactctgataactttgttttctggatgtgctcagtgtaaaaaacttcattaatacagaaaaataaaggaagaattaagtcactgaaact

SEQ ID NO: 249139 - DNA, 390 bp, Homo sapiens
tgagacggagtcttgctctgtcgcctaggctggagtgcaatggcacggtctcagctcactgcaacgtctgcctcctgggttcaagcagttctcctgcctcagcctctggagtagctgggattacaggcacccgccaccatgcctggctaatttttgtattttttagtagagatggggtttcaccatgttggccaggctggtctcaaactgctgacctcgtgatccaccctcctcggcctcccaaagtgctgggattacagggatgagccactgcgcccggccgagtctttaaagaaaagaaaggaaaagagaaaatgaaagacagaaacaatgatccttggggtggagtgtgtgtcccctccctgcagccctgttggcactggctctcta

SEQ ID NO: 249140 - DNA, 543 bp, Homo sapiens
ggctgaccctgaggatcccgggaggcaatagagatatttgttaactctagactttgaaattcacatttgcgtgatcaaattgtaagtatcactaatacaaatgaactgtataattttcaaaccaataaagtgctcttaaaaagcgctgtgttctagtgcagttgacaaagtatttcacagcaccagagccaacgtttttctacctgttttataaaagatcctccccatcctccaagcagacttagaggttttctcctgtctgctcttgggtatcttggccaaatctttagagcaagtgtaatggccaatttcttgggtcaatttcctatgcctcctcatcattgtgtcccagtgcctggcatataccaggcactctcatgtttgaagaaggaatggatatgacttgctcaagttcacacagctctcaagtggcagataaaaaacagggacccagattttacctcttccaggtttgttccatcctttgacacaatctgaaaaaaaaaattgcattttaaaaaaaagttgtatttcaagaacaca

SEQ ID NO: 249141 - DNA, 536 bp, Homo sapiens
cacaatacccaaggtcccctattcttgggatcccaatagattacacctcttaatccctgtgcaccagggtgggctgtaagactagtttccatcagagtggatgtgcctcacctgagagcagtggtgccttttccacgtgtgctctttgccttacactggccaaatggagaagatttcaaaaactcagaagaggatagagccataagaaggaatgagcctggattcctaaatgactgcatggaatagaactttgcagtagctctgtaagggaatgtgaccagaatgaaagataaactttgctgtgttaagtcactggaatttgggacttgttaagcagttagtccgctctaacacaaccaccaaaggtattacagagacaggatgtgtattgatgtacctgtgagctaaggaaaggtcagataggcaaggagcatggaaattacaagtttcatgattcccaggtgtaagcgttttatgttgctcattaatcatgtggcaaatatgtttaaataaacataggcaattcctgttcaaca

SEQ ID NO: 249142 - DNA, 290 bp, Homo sapiens
acagaccccaggcagatgcagaagtgggatcccagccaaggagggtcctcgagccccaggtgccaggcaggccctcaccctccgtcctggaggcacccagcagccactacagctgttagcagaggaggaccgggctccctagctagctgtgttttgccagctgttcctgctgatggtgggtcagaggggggctgaaggcaaggaaacctggtcacagatccagagcctcagcgagtacagcaaccccatctaccctggttgcccatagcctccagcagtggggctctgta

SEQ ID NO: 249143 - DNA, 472 bp, Homo sapiens
aaaatattgtttggttgaatatcccaagttagattttgtttgtatggagaattttttgttggcgtttgtttgtccacctccagtacaaaaagaaatctaacaaactttcaaggaagtttgtcccggttctcaaaatgggatgctattcaaactgaattaattctattatacattagtatggttatattttccagatttaaaaaatgaatttaaatttattaattatgttcttaactgataatgattaaaataaccctccttgtgatagttatttgtattagaatttccatacttgatcatgtaactaaagctgtgatcaaataattaatgttatttttacaaactgtttatttgttttagtaaagaggactcatgaaagaattttaagtaaatccaaatttctaggatgtatatgtttatcacatatatgtgtgtgtgtgtgtgtgtgtgtgtctgcatgcatgttggtgtg

SEQ ID NO: 249144 - DNA, 594 bp, Homo sapiens
agagatttaaaagaagcaagtaccattttccaagtataaaactcgtaatattaaaagtgacatagcagtatattcacatgactacttaggtctaatgcagaaacaagacagtacagtttttgcagaggccgatgtgacatctgcatgcgacatgatactattaagtgtctctacccacctctgctacagagtagctgctatatgcacacatacacgaaactcattcctgctacagggcctttgcccatgctgttccagccttctggaatacttgtccttgtcctcattgtctctccccactttgcctgactagctcctacaggaagccttccctaatcccctccgaccctacccccacgacccaaccaggggcgattgagctaaccccaatcccaggacttctcccaccatgtcctaattgctgggagagagcgcctgcttgtggaaggggggtctgtggggtaagcagccctgacacctgttcctctgatccctggagcccagcacaggctgggcccatagtccaagtgaatgtttatggagtaaacgaatgaacaaatgaatgaatggaattgtgtgtgtgtgtgtgtgtgt

SEQ ID NO: 249145 - DNA, 998 bp, Homo sapiens
ctagggtctttcccctcaaacggctgcctcttgaaagtgcacaccacgatcagggtcaacatattcaacagttgaatgtatattatatgcctggcatggttctgaaaatcacaggtaaaaaaaattacatacagtcggccgggcgcggtggctcacgcctgtaatcccagcactttgggaggcagaggcgggcagatcacttgaggtcaggagtttgagaccagcctggtcaacgtggtgaaaccccatctctagtatgaaaaatacaaaaattggcagggcatagtggtgggggcctgcaactgcttcagaagagaaacaaaatcaacttagttttgccatccttacttctccatgagaacaaattttgcacatgtcttttctgtttagtggatattaaaagaaaacaaaccgtgggaggcctggagattttgcagttgatatttagatatcagttttgttgccctcactttgtacattagacagaatcctgaaaatttgtgtaaattgccattttggtaggcaaaactgtactttaagcacataaaagagttttataagtgtctatacttactatgtgaacacattacaactcatgctttacattggtgagacatggaaagtgcttctttgaaggactattcaagtatcacccactaagcagctaaagctaatattatgtttcctgcaagtattactcatacttgtttcatcaacaccacccacatttaaaaataaggctttattttgacacttaaaaattgaaagctactaagaatacatgaatgccctgggaaattaatctaattagattttagaatgtgggtgtgaagtcttctggaattagtgtttataaaggaatatttgtttcctgttttacttgtacactcatactagcttgagcctagtaatgtgtttagttaaaaaaacttttttttttaatgatgaggccaaatatgtgtattatattagagagtaatttgggggtatgtaagttt

SEQ ID NO: 249146 - DNA, 224 bp, Homo sapiens
gtaagacttctgttctcctaagtgaactccctatttataacccaatttatgaagaaggaggaaagagagaacttccagctggtgatacactctttctttcatgggactttgggagaatgatgcgtctggaaaagacattattgcagacatgcaaaagtgacacttattaatagaatgatgtcacatgagaaaaagtttttaaaaatccattttgtaaaaagaaa

SEQ ID NO: 249147 - DNA, 267 bp, Homo sapiens
attcctttattttggttagtagcagtgtcatttaccaaactgctccagccaaaaaccctggtgtcagcctaaactccacactcttctttcacctccattgtctaatagtcaccaaagtctgtcccctcctaccctagcatatctcacccttccattctcttgtttccatcccattgtcactgccctatttcaggctctcatcacttctcacctggactagagcaactgctttcttgtttccattaaaaatttttatttataattgat

SEQ ID NO: 249148 - DNA, 424 bp, Homo sapiens
agtacatgagatgatttctgtggtccctgatacacagctttcattttgagagacacaattatttgagtatctagtaattcaagcctgggattcaaagatatcatttaagatgaaactgaagactttttaagaaaaccattaaatgggccgggtgcagtggctcacacctgtattcccagcactttgggaggccgaggcaggaagattgcttgagcttaagagtttgagactagcctgggccacatggcaaaaccaaaaatacaaaaattagctggcgtggtcgtgcgcgcctgtggtcccagctattcgggaggctgtagtgggagaattgctggagactgagaagtcgaggctgcagtgagctgtggtcacgccactgcactccagtatgggtgacagagcgagaccctgtctcaaaaaaaaa

SEQ ID NO: 249149 - DNA, 890 bp, Homo sapiens
  misc_feature (48)..(48): n is a, c, g, or t
ggtaccgattgtgaataggtaggtcaggagcactctcaacttttcaanaaagcttacggaaaattataaatggcaaggccaggcgcggtggtgtgcctgtaatctcagctactcaggagactgaggcaggacaatcacttgaacccgggaagcggaggttacaagtgagccaagatggcgccactgcactccagcctggacaacaagagcaaaactccatctcaaaaaagaaagaaagaaaacaaaacaaaacacagaaatacatcaattaaaaaagtgagctattcaccagatatgttccactggtcataaaacaaaagaatacaggaggcatgacaagccatcatcatggctgttaaaataactcacagcaaaattataatgatttaagtcaataacatctaataattccagctatagtgtgcaatttaatttattatgtgccaggcacaatagtttattaaaggtattacctacctatttcacaatcggattgtgaaatacgtaggtataaatttaatatgtgaagaacgtgtacacggaaaactgcaaaatattgatgaaagaaattttaataagacctaaataatggagagagatgccatcttcatggattggaaaacaacataattaaaatgttaattcttcccaaactgacctatttcacacgattgtgaaataggtaggtggagcttgcattgagccgagatagcaccactgcaatccagcctgggcgacagagcaagactctgtctcaaaaaaaaaaaaaaaaaaaaaaaaaaaaaaaccaaggacacaaaattttttccccgggtaaaaaaaaaatgtggaccctccaaagcccatttaaaaagggcccccgggtttttcccggggttcaaaaatttttt

SEQ ID NO: 249150 - DNA, 859 bp, Homo sapiens
  misc_feature (48)..(48): n is a, c, g, or t
ggtaccgattgtgaataggtaggtcaggagcactctcaacttttcaanaaagcttacggaaaattataaatggcaaggccaggcgcggtggtgtgcctgtaatctcagctactcaggagactgaggcaggacaatcacttgaacccgggaagcggaggttacaagtgagccaagatggcgccactgcactccagcctggacaacaagagcaaaactccatctcaaaaaagaaagaaagaaaacaaaacaaaacacagaaatacatcaattaaaaaagtgagctattcaccagatatgttccactggtcataaaacaaaagaatacaggaggcatgacaagccatcatcatggctgttaaaataactcacagcaaaattataatgatttaagtcaataacatctaataattccagctatagtgtgcaatttaatttattatgtgccaggcacaatagtttattaaaggtattacctacctatttcacaatcggattgtgaaatacgtaggtataaatttaatatgtgaagaacgtgtacacggaaaactgcaaaatattgatgaaagaaattttaataagacctaaataatggagagagatgccatcttcatggattggaaaacaacataattaaaatgttaattcttcccaaactgacctatagattccactcaatgccaatcaaactccaaatattttttggataaacatcaaagtgattctaaattttatatggaataccaaggaaactagagtggccaaattttgaaaaattttaaaacagaacacctgatttcaaaacataactatgaagttacagtactggcaaaaagatatacagatcaaaagaatggaatgg

SEQ ID NO: 249151 - DNA, 649 bp, Homo sapiens
taaacaatagggcagaggaagcaatcagatatgcatttgtctcaggtgagcctcagagggatgactttgggttctgtctattctttgtcgggcacccatgaaaataagctgtcaatttacattgccagggtgaaattcaatagaactgttttagggtaaagatgttgaagcccacaaggaattcatcttttagcgatcttatttaggaacaaaatgagaggcaggcttgcgcagttcccagcttgacttttccctttggcttagtgattttggggtctcaagatttattttcctttcacacctgcgagagagactttctgatgctccttctctgccctgcgctcccatctcatctgccaactttgcgctttggctgccctgctgtccgtccccgacctgcagccctactagcttcctaaaaggcaagtttcacaaatcactcactgctcggtaccttctgtgatttcctgaggctccgggataaatccaaatttcttcacatgacaggtgggtccccatgagccagccgctgctttcctttccagacccagctcccgccacctcctgccttgtgtcaggctctgcagcacgagacgctactcaggagctggcccaccagggcctggcccagggttcacagtgactttgc

SEQ ID NO: 249152 - DNA, 635 bp, Homo sapiens
taagcaatgtcatattacagaattcaatatgccagtatcttatttttttaaattaagtaatttagtaacttgtaattatgagtcattttaaacactagatggaaagatgatgccaccgacaaagtcttaagagtagagccagaccaactgtattgtaccaagcactataggttagctttaacactggacacatgcacacacaaaatgaagttcagtaagagtcaatagcttctgcggggaaacaagcacagaaatcataagcacctcaagaggaagaaaccacagctttaaccaacatggaatatctactaacaatcgcaggaaacaggagcagctacacccagacacaagattcatctaacttggttaggtccttgacatgtgtgtgtctgtgagaagtggaagagaagggggtaagggcataaactgagtcaagaatttaataaacaccaggtacagtggctcatgtctataatcccagcaccttgggaggttgaggcgtgtggatcacttgagctcaggagtttgagacatggcaaaatcctgtctctacaaaaaataccaaagtagccaggtgttggtggtgcagtcctgtagtcctagctccttggtggggctgagatgggaggattgct

SEQ ID NO: 249153 - DNA, 1197 bp, Homo sapiens
ctggactcttttaaggactggccccgggaatcagctgtgggagttgcagcactggccaaagcaggtcttttctacacaggtataaaggacatcgtccagtgcttttcctgtggagggtgtttagagaaatggcaggaaggtgatgacccattagacgatcacaccagatgttttcccaagtgagtggaatgaatgttaaccatctgcaactttggatgcacttcaacagtttttttctttttcctcatttcctgccttattttatctttagattgagtctttatccactcctcggattcaggctatgaaggatgagtcttcatgtctttcatccctttgctccatgacccccttcctgtactagccttcccctctttatagttatggcatagttttggctagattcatatattcacattacatgtttacattatcatgactatacaaatgctatgtggagctgaagcttgtggtaaatttttatttatttttcccttcctgtatatccttttatttttttaggaagtaataactgtcctgttggtatgttagcttatttttttttcctgaggtaaaattcaggtagtaaccattttatttatttatttattattttttgtgacaggttctctctcttgcccaggttggagtgcagtggtgcaatcatggctcactgcagccttgacctctctggctcaagcaatcttcctcgctcagcctcccaagtagctgggactacaggcacatgtcttcacacccagctaattttttttttttttttttaagagacagggtctctctatgttgcccaggctgctctcagacttctaggctcaagcagtcttcccatcctggcttcccaaagtgctgggattataggcgtgagccaccatgcacagcaattaaaccattttagagtacacaattctgtggcatttattatagtacattcacaatgttgtgcaaccaccccctctatctagttccaaaacactttcatcgcccccaaaggaaactctgtatccatcaagcaggcccccctcctctctccaccccactccatgcccagcccctgggatacaccaacctaattggtgtctatggatttatttgttctgactatttcctctaaatggaagcataccgtttgaccttttgcatttggattctttcacttggcatattgttttgaagttt

SEQ ID NO: 249154 - DNA, 984 bp, Homo sapiens
gtttccaaagttttttttttccaactctcatacttaaattgactggattcctttgccttcctgtaaacacttcagagtctctttaccgactctaatctgtctttggcagagtagctgtagagatggcttaaaaagaattacacccacttttaacctgcttgtgagattaaaataatttgcaaggataatcagtaagtcatttcatcagctacagctgcaatcttcaattcaaaatttttcatctaaaaatctgcagttatttttaaggtttaataaccctaagcagcaagagattgatgatcttgaaaaaaggaaacatccatgctctcctgtaactgagaagtgctggttaaattctttaatcaagtttattggaaattttctcttaataaactgtcaattttctcctgaagagaacctctcacgttgtttgtattttcacttagaagtactcagcatacaaagcatttcttaattcaacatgacttccaggtctagcatttgactaaagatgcaagaggtcagtccaattgttaatactggattgtgtatcaacaaaatctactgaatttcgttgatatactgtgactaagtgccactccatcttcaacgtatactgttatgaacaaaatacagaggtctgaagcacacacaatatacctgccatgtgtattgatttgcctgtgactagtgaccaatgaacatctgccttaagaaaagctttatccaatccaggcttccaatacattcttcagaagatcctgatttaggttttagcacctaagttaaaggcttggcaaatatgcaagaaatatactacaaagcttagaacacaaaatcaaattaaaaccaaattatctgtagttgttaatgaaaagttctttttattaaaaaaaaaaaagtggaagtttaactagaaattctgaattttgatcaggtttagtggctcatgcctgtaatcccagcactttgggaggctgaaac

SEQ ID NO: 249155 - DNA, 812 bp, Homo sapiens
gtttccaaagttttttttttccaactctcatacttaaattgactggattcctttgccttcctgtaaacacttcagagtctctttaccgactctaatctgtctttggcagagtagctgtagagatggcttaaaaagaattacacccacttttaacctgcttgtgagattaaaataatttgcaaggataatcagtaagtcatttcatcagctacagctgcaatcttcaattcaaaatttttcatctaaaaatctgcagttatttttaaggtttaataaccctaagcagcaagagattgatgatcttgaaaaaaggaaacatccatgctctcctgtaactgagaagtgctggttaaattctttaatcaagtttattggaaattttctcttaataaactgtcaattttctcccaaaaaaaaaaaaaaaaacataaaacaaaaaacacttgtggtgggcgcggcgccttggccccctgagagaacgtttttaagaacccattggtttgggcgggccggggcccacagtagggctaccggccaccgtggcgcaaggttggacccaagggaaacccgggggacagaagacaatagcggcgcaggaggtcttctctaccccgctatttagaaagagacccccggggggggcaaacaagcgcgacatgtcttcctcgtgagaacaaactttcacagcaagtgggacgtctctccgagaggggggcaactagacgaggggagtgctatcaaacgagacgggaggatatcccccagggagaaggccgaccacattgtccaaaaattagcccccgccgacgtgg

SEQ ID NO: 249156 - DNA, 846 bp, Homo sapiens
gtgttcagcatttggggacgctctcagctctcggcgcacggcccagcttccttcaaaatgtctactgttcacgaaatcctgtgcaagctcagcttggagggtgatcactctacacccccaagtgcatatgggtctgtcaaagcctatactaactttgatgctgagcgggatgctttgaacattgaaacagccatcaaggaccaaaggtgtggatgaggtcaccattgtcaacattttgaccaaccgcagcaatgcacagagacaggatatggccttcgcctaccagagaaggaccaaaaaggaacttgcatcagcactgaagtcagccttatctggccacctggagacggtgattttgggcctattgaagacacctgctcagtatgacgcttctgagctaaaagcttccatgaaggggctgggaaccgacgaggactctctcattgagatcatctgctccagaaccaaccaggagctgcaggaaattaacagagtctacaaggaaatgtacaagactgatctggagaaggacattatttcggacacatctggtgacttccgcaagctgatggttgccctggcaaagggtagaagagcagaggatggctctgtcattgattatgaactgattgaccaagatgctcgggatctctatgacgctggagtgaagaggaaaggaactgatgttcccaagtggatcagcatcatgaccgagcggagcgtgccccacctccagaaagtatttgataggtacaagagttacagcccttatgacatgttggaaagcattttccaggtctcctttaacctctttcgtgatgctttccaacatgtctataagggctg

SEQ ID NO: 249157 - DNA, 983 bp, Homo sapiens
cggtgaccccctatcctacctccaatccatcctcggatttcgctgccttgcataagcccataatggttaaaggtgtggatgaagcaaccatcattgaccttctaactaagcgaaaccatgcacagcgtcaacagatctaagcagcatatctccaggaaacaggaaagcccctggatgaaaccctgaagaaagcccttaccggtcaccttgaggaggttgttttagctctgctaaaaactcccgcgccatttgatgctgatgaacttcgtgcttccatgaaggggctgggaaccgacgaggactctctcattgagatcatctgctccagaaccaaccaggagctgcaggaaattaacagagtctacaaggaaatgtacaagactgatctggagaaggacattatttcggacacatctggtgacttccgcaagctgatggttgccctggcaaagggtagaagagcagaggatggctctgtcattgattatgaactgattgaccaagatgctcgggatctctatgacgctggagtgaagaggaaaggaactgatgttcccaagtggatcagcatcatgaccgagcggagcgtgccccacctccagaaagtatttgataggtacaagagttacagcccttatgacatgttggaaagcatcaggaaagaggttaaaggagacctggaaaatgctttcctgaacctggttcagtgcattcagaacaagcccctgtattttgctgatcagctgtacgactccatgaagggcaaggggacgcgagataaggtcctgatcagaatcatggtctcccgcagtgaagtggacatgttgaaaattaggtctgaattcaagagaaagtacggcaagtccctgtactattatatccagcaagacactaagggcgactaccaacagtccccgtggccatccctgtgagggtggacgttagcattacccccaacctcatttttagttgcctaagcattg

SEQ ID NO: 249158 - DNA, 1117 bp, Homo sapiens
gtgttcagcatttggggacgctctcagctctcggcgcacggcccagcttccttcaaaatgtctactgttcacgaaatcctgtgcaagctcagcttggagggtgatcactctacacccccaagtgcatatgggtctgtcaaagcctatactaactttgatgctgagcgggatgctttgaacattgaaacagccatcaaggaccaaaggtgtggatgaggtcaccattgtcaacattttgaccaaccgcagcaatgcacagagacaggatatggccttcgcctaccagagaaggaccaaaaaggaacttgcatcagcactgaagtcagccttatctggccacctggagacggtgattttgggcctattgaagacacctgctcagtatgacgcttctgagctaaaagcttccatgaaggggctgggaaccgacgaggactctctcattgagatcatctgctccagaaccaaccaggagctgcaggaaattaacagagtctacaaggaaatgtacaagactgatctggagaaggacattatttcggacacatctggtgacttccgcaagctgatggttgccctggcaaagggtagaagagcagaggatggctctgtcattgattatgaactgattgaccaagatgctcgggatctctatgacgctggagtgaagaggaaaggaactgatgttcccaagtggatcagcatcatgaccgagcggagcgtgccccacctccagaaagtatttgataggtacaagagttacagcccttatgacatgttggaaagcatcaggaaagaggttaaaggagacctggaaaatgctttcctgaacctggttcagtgcattcagaacaagcccctgtattttgctgatcagctgtacgactccatgaagggcaaggggacgcgagataaggtcctgatcagaatcatggtctcccgcagtgaagtggacatgttgaaaattaggtctgaattcaagagaaagtacggcaagtccctgtactattatatccagcaagacactaagggcgactaccaacagtccccgtggccatccctgtgagggtggacgttagcattacccccaacctcatttttagttgcctaagcattg

SEQ ID NO: 249159 - DNA, 375 bp, Homo sapiens
gccagtactttatatgggagtctgccccctgaggagaaactcccaagaaagctgccagatacacaagtgatttcaggtggggtccaataccccacccctgacagatctcggtctggggcacaggaagaatgaagggcataaggagtagcaacttcctccttgtggcttcaacagtccccagagcagtgagagggcacagggtcagagcttggtgcaaaaggaatgatcctggaaaagtgagtgtggagttgggccagtgctgcttctgcaccctgtgtgccgatcagacgctttctccctgtcccacttaggtgggaaacggctctcaccacccccatagcaggaagcacaacacgcctcccacccagtaacaca

SEQ ID NO: 249160 - DNA, 312 bp, Homo sapiens
ggcacacatgtgtggtcccagctacctggggggctgaagggggaagatggcttgagcctgagaggtcaaggcctcagtgagcctagattgtgcctctgcactccagcctgagtgacagagcaagaccctgtctgtttaacaacaacaacaacaaaaaaacccacttcatatattgtatgaaaacttcatattttttgataggtggatatttgaaagtcagacttctttaaatgccacaaaaacagcactgggttaagagtcattgtttttcatttgaatccttgtcttgcacttttgtgcagtgtggtgagt

SEQ ID NO: 249161 - DNA, 465 bp, Homo sapiens
agttttcctgtacatttgttattccgaatgtcctgtgtaaccgacaggatgcctttgacttttttatgttgtacatttgttacagtcatagccttctgttaaataagaacagggctgcttacggatcgagccagcagttttcccagagaaagctgatagtaggcatatgctgaaaataataaagcaatttcattcatattggaagaaagagtagcaaaggtgctcagtagtgtacagtatttctctttggtttcccgtggttctgcacgaggaaaatggctgcatgtgataaaacgaatagagtattccttcagaaactagccatgaaaggaagcagacaggggaatgatttaagttaaagtcatgttcggcagtcgaagcagagatacaagagctatcctacagccccagagccatgctccaggaggatgctgacaccaaaataaagtgagttgtgaaaagaaa

SEQ ID NO: 249162 - DNA, 679 bp, Homo sapiens
gttataaatgcttggaatgaaaatgccttaaggaaattagtcaataatgtcacatatgttactttttctaattggatctgccatgattgctataaaactttgtccttccactatgactcatgagtaacttcaataacaaactgcttgggaattcccaatgccacagtagaactagtatatgcaaacattatttattatcagggtgcacataaagggaaactaggacaaaaacctaccctgtttcaatttgatcttgttctcttaagcatggaaaaagaatacttgttgctataactcaacaactaaaactcttgtttctcaggagaaaatgcaaaaagaaaaccagtttatttgtcatttttggttttgcaaatgctaatcaaagttggtctttatgcaatgcaatttttcccactcttaaaactgactgataacagcaaatcagactgaacctaaaaatgactccttcaaaagtactaaaagcctgtgtgcttatgtttatatatttgtctgtgaatggggaccaaatccttttatatgctggggaagaaaattccttgactcttggtcattagcaagtcagtgtacttgggtgctcatgtcactaaaatacctcatttatccctccaataacaccttcttctggccagaaggattatatttatcctgtttcaaaagg

SEQ ID NO: 249163 - DNA, 675 bp, Homo sapiens
ggaggcaaggggtgtagccctcctggtgcctggaagggctgtctgggcccccatggcgggtgctcctcactcactcaagcaccaatcatgagcctccactgagaagcttccacagcagccccagggtcagcaccaggcaccaagtgcatgccagccctggtcagtgagccttgattgaaggcctacggctcgcccaccccaaggagttcgatctgatctctgggacaaacgattcctacacagagtggagtaggggtctccacacagcatagccagccacagacatggagcctctgcagagctgggcacagcggagggaggctgagatacagctaaaggaaacagccaaggcgcctgaggagccccaagcttagcggctccattcacagacaaggaatccacgcccccacatctccttaggtggcaggagacaggcacctggccttcctcgggcgttacaacttggaaaacaagaccaggcgcagtggctcacacctgtaattccagcactttgggaggctgaggtgggcagatcacctaaagtcgggagttcgagaccagtctggacaacatggtgaaaccgcatgtcttctaaaaatacaaaaattagctgggtgtggtggcgggcacctctaatcccagctacttgggaggctgaggcaggagaactgcttg

SEQ ID NO: 249164 - DNA, 828 bp, Homo sapiens
ggaggcaaggggtgtagccctcctggtgcctggaagggctgtctgggcccccatggcgggtgctcctcactcactcaagcaccaatcatgagcctccactgagaagcttccacagcagccccagggtcagcaccaggcaccaagtgcatgccagccctggtcagtgagccttgattgaaggcctacggctcgcccaccccaaggagttcgatctgatctctgggacaaacgattcctacacagagtggagtaggggtctccacacagcatagccagccacagacatggagcctctgcagagctgggcacagcggagggaggctgagatacagctaaaggaaacagccaaggcgcctgaggagccccaagcttagcggctccattcacagacaaggaatccacgcccccacatctccttaggtggcaggagacaggcacctggccttcctcggtgagatcagtaaggagagaggagccccggccttaggaacccaggggcctggggaggtgggggccgagcccataggaagaggggtgtcatggacatctgaccatcccaggaggggcgggtacgtgctgacctctttgtttcttcatcgtgaagggcgttacaacttggaaaacaagaccaggcgcagtggctcacacctgtaattccagcactttgggaggctgaggtgggcagatcacctaaagtcgggagttcgagaccagtctggacaacatggtgaaaccgcatgtcttctaaaaatacaaaaattagctgggtgtggtggcgggcacctctaatcccagctacttgggaggctgaggcaggagaactgcttg

SEQ ID NO: 249165 - DNA, 167 bp, Homo sapiens
ttaaaaaaaaaacaaaaaaaaaacctgaattgtaaggactggagacatagacttggtagcttttcttaatttttcaccatttgtagaaatttacgcttagaaatggacttaaaaattcaggtcactgtttgtgaccagaataacgctatgcatttttggaagtaaaa

SEQ ID NO: 249166 - DNA, 356 bp, Homo sapiens
caaaaatacaaattcacaaatagcctccagacttctttttagggttagtttcaactactttcttgccacattattttttaaatcacaaatgttcatatgttatcaattgattaattttagatttatcaaaattgtgcttaccttctgataatattgcttatacaagttcaaaattgcctaaagattgggcaggattggatagcaagagagtgaaagagaatcatgaatgcaaataatacttaagattgcagaatcaccctttaattagagttaactggcaccattgtgggaatgtccgttacctacctatttatattcccttaagtagtcattgcagtctgactctggcaatgaaa

SEQ ID NO: 249167 - DNA, 755 bp, Homo sapiens
taggtctccctactctacccctagaatggaagcattaccacttctttccaccaccagctgagaaggtgatgtcattaggcagaaattggcaccgaccgtgtctgaggtgccagcgttgccacaagaccctgactgctgggagtcatgctgagcatgatggagtcccctactgccacgtcccctgctacggctacctgtttggccccaaaggtgggcagccccatcccagacactgggatggcatgtacatgcctgaagtatggcatgtacatggtctgtgggtatgtgtggacaacttcccctgtggttaagcataccctggcccccccaccaagttccctctaggcctgaaccctgcaccacagacccagggcctttggtgatagggctctctctctcaggtgtgaacattggcgatgtgggctgctacatctatgacccagtgaagataaaattcaaatgagacgctcacaaaaaaggtcaccctaacttacggctgtggacggtcatagtactcaatgcagagctctcgattgtagtgaaccgtcagtttcgcactggaatcgccatttcacgcatagtttgtgactctccatagacagagcaccgagagcctgatccagcctccggagtgtagcgataggtcttgcgggacaggataatcacatttcaccacaggtaatcaggctatgagccattagggcctattttaaggtgacacctactataacaacgtatggtacacacacaaagca

SEQ ID NO: 249168 - DNA, 927 bp, Homo sapiens
ccacaagccatgctatggggctctctttggacccaggggggtgaacattggtggtgtaggctcctacttgtacaatccccccactcccagccctggctgcaccactcctctcagccccagcagcttcagccctcccaggccaaggactggcctcccccaaggcaagaaaactgagaaggtgatgtcattaggcagaaattggcaccgaccgtgtctgaggtgccagcgttgccacaagaccctgactgctgggagtcatgctgagcatgatggagtcccctactgccacgtcccctgctacggctacctgtttggccccaaaggtgggcagccccatcccagacactgggatggcatgtacatgcctgaagtatggcatgtacatggtctgtgggtatgtgtggacaacttcccctgtggttaagcataccctggcccccccaccaagttccctctaggcctgaaccctgcaccacagacccagggcctttggtgatagggctctctctctcaggtgtgaacattggcgatgtgggctgctacatctatgacccagtgaagataaaattcaaatgagacgctcacaaaaaaggtcaccctaactcaggcctcccatcatgcccctcatggtccaatggaagctacaaaaatctccagtcccatgggggttggggaaggtgggatcttgggggcctgggcctaggctccatggtaggccagagagtctagactttctctgccaattttttccctttcccatttctatctggttagggaacagcccgttttgaagggtatcctcctcctggccatcacaacccctttccccagcacattctggagcttcaaggtactcataaaacttgtgtttattgaatttcagcctctgtggcttcttcaataaaatgttggctcccaaaaaaaaaa

SEQ ID NO: 249169 - DNA, 736 bp, Homo sapiens
ccacaagccatgctatggggctctctttggacccaggggggtgaacattggtggtgtaggctcctacttgtacaatccccccactcccagccctggctgcaccactcctctcagccccagcagcttcagccctcccaggccaaggactggcctcccccaaggcaagaaaactgagaaggtgatgtcattaggcagaaattggcaccgaccgtgtctgaggtgccagcgttgccacaagaccctgactgctgggagtcatgctgagcatgatggagtcccctactgccacgtcccctgctacggctacctgtttggccccaaaggtgtgaacattggcgatgtgggctgctacatctatgacccagtgaagataaaattcaaatgagacgctcacaaaaaaggtcaccctaactcaggcctcccatcatgcccctcatggtccaatggaagctacaaaaatctccagtcccatgggggttggggaaggtgggatcttgggggcctgggcctaggctccatggtaggccagagagtctagactttctctgccaattttttccctttcccatttctatctggttagggaacagcccgttttgaagggtatcctcctcctggccatcacaacccctttccccagcacattctggagcttcaaggtactcataaaacttgtgtttattgaatttcagcctctgtggcttcttcaataaaatgttggctcccaaaaaaaaaa

SEQ ID NO: 249170 - DNA, 606 bp, Homo sapiens
ccacaagccatgctatggggctctctttggacccaggggggtgaacattggtggtgtaggctcctacttgtacaatccccccactcccagccctggctgcaccactcctctcagccccagcagcttcagccctcccaggccaaggactggcctcccccaaggcaagaaaactgagaaggtgatgtcattaggcagaaattggcaccgaccgtgtctgaggtgccagcgttgccacaagaccctgactgctgggagtcatgctgagcatgatggagtcccctactgccacgtcccctgctacggctacctgtttggccccaaaggtgggcagccccatcccagacactgggatggcatgtacatgcctgaagtatggcatgtacatggtctgtgggtatgtgtggacaacttcccctgtggttaagcataccctggcccccccaccaagttccctctaggcctgaaccctgcaccacagacccagggcctttggtgatagggctctctctctcaggtgtgaacattggcgatgtgggctgctacatctatgaccaggagataatcagagacgtacaagtcacctattcggctggcacggtcatatac

SEQ ID NO: 249171 - DNA, 881 bp, Homo sapiens
  misc_feature (787)..(789): n is a, c, g, or t
ccacaagccatgctatggggctctctttggacccaggggggtgaacattggtggtgtaggctcctacttgtacaatccccccactcccagccctggctgcaccactcctctcagccccagcagcttcagccctcccaggccaaggactggcctcccccaaggcaagaaaactgagaaggtgatgtcattaggcagaaattggcaccgaccgtgtctgaggtgccagcgttgccacaagaccctgactgctgggagtcatgctgagcatgatggagtcccctactgccacgtcccctgctacggctacctgtttggccccaaaggtgggcagccccatcccagacactgggatggcatgtacatgcctgaagtatggcatgtacatggtctgtgggtatgtgtggacaacttcccctgtggttaagcataccctggcccccccaccaagttccctctaggcctgaaccctgcaccacagacccagggcctttggtgatagggctctctctctcaggtgtgaacattggcgatgtgggctgctacatctatgacccagtgaagataaaattcaaatgagacgctcacaaaaaaggtcaccctaactcaggcctcccatcatgcccctcatggtccaatggaagctacaaaaatctccagtcccatgggggttggggaaggtgggatcttgggggcctgggcctaggctccatggtaggccagagagtctagactttctctgccaattttttccctttcccatttctatctggttagggaacaccactcnnntataaactatcccactatagacaactcaacctcaaacagacaacccagaccgagtcacccaacactgacaacaaatgcaatgcaaaccaaca

SEQ ID NO: 249172 - DNA, 430 bp, Homo sapiens
ccacaagccatgctatggggctctctttggacccaggggggtgaacattggtggtgtaggctcctacttgtacaatccccccactcccagccctggctgcaccactcctctcagccccagcagcttcagccctcccaggccaaggactggcctcccccaaggcaagaaaactgagaaggtgatgtcattaggcagaaattggcaccgaccgtgtctgaggtgccagcgttgccacaagaccctgactgctgggagtcatgctgagcatgatggagtcccctactgccacgtcccctgctacggctacctgtttggccccaaagccctctaggtcctgcctgtttcttgcctgcctcacccagtggcatcacgatgatggtaaaaccagccagggctgagccagtaagggtgcgggtgatggcaaacatta

SEQ ID NO: 249173 - DNA, 678 bp, Homo sapiens
ccacaagccatgctatggggctctctttggacccaggggggtgaacattggtggtgtaggctcctacttgtacaatccccccactcccagccctggctgcaccactcctctcagccccagcagcttcagccctcccaggccaaggactggcctcccccaaggcaagaaaactgagaaggtgatgtcattaggcagaaattggcaccgaccgtgtctgaggtgccagcgttgccacaagaccctgactgctgggagtcatgctgaggtgtgaacattggcgatgtgggctgctacatctatgacccagtgaagataaaattcaaatgagacgctcacaaaaaaggtcaccctaactcaggcctcccatcatgcccctcatggtccaatggaagctacaaaaatctccagtcccatgggggttggggaaggtgggatcttgggggcctgggcctaggctccatggtaggccagagagtctagactttctctgccaattttttccctttcccatttctatctggttagggaacagcccgttttgaagggtatcctcctcctggccatcacaacccctttccccagcacattctggagcttcaaggtactcataaaacttgtgtttattgaatttcagcctctgtggcttcttcaataaaatgttggctcccaaaaaaaaaa

SEQ ID NO: 249174 - DNA, 667 bp, Homo sapiens
aggctggagatgggaagagaaccaggctgagacagctctctttctctctgtgtctcagcatgatggagtcccctactgccacgtcccctgctacggctacctgtttggccccaaaggtgggcagccccatcccagacactgggatggcatgtacatgcctgaagtatggcatgtacatggtctgtgggtatgtgtggacaacttcccctgtggttaagcataccctggcccccccaccaagttccctctaggcctgaaccctgcaccacagacccagggcctttggtgatagggctctctctctcaggtgtgaacattggcgatgtgggctgctacatctatgacccagtgaagataaaattcaaatgagacgctcacaaaaaaggtcaccctaactcaggcctcccatcatgcccctcatggtccaatggaagctacaaaaatctccagtcccatgggggttggggaaggtgggatcttgggggcctgggcctaggctccatggtaggccagagagtctagactttctctgccaattttttccctttcccatttctatctggttagggaacagcccgttttgaagggtatcctcctcctggccatcacaacccctttccccagcacattctggagcttcaaggtactcataaaacttgtgtttatt

SEQ ID NO: 249175 - DNA, 258 bp, Homo sapiens
ataaaggagagattaagccttggagcaggaactgcttagaattacttaccggagagaaatttattgcccttgcttttcttcagactcccagctctgcctaggagccatttccattcgttgaacttgctgttccttaaatttcttctctcagatatcctaatgttctctccctcacctcacttggcctaaaaggcctgttttcggtgaggacttccctagcctactatgtatttaaattgcaacctcctccaactcata

SEQ ID NO: 249176 - DNA, 512 bp, Homo sapiens
ccttttcttcttttccaaattgttttgtagagataggttctcaatgtgttgcccaggctggtctcaaactcctggcctcaagtgatcctcctgccttgggcctccctaagtgctgggattacagacatgagccactgtgcctggacgaacctcttttaatctgtaacagcctcctgcctcggttaagtccagtccagttgttttgcagaatgtcccacattctgatttgtctgtttcctcacaattaaattcagcttaaacattttctgggccagatgaggactcatgcctataatcccagcactctgggatgctgaggtaggaggattgcttgagtccaagaattcaaggctggacacagtgagaccctgtctctacaaaaaattttaaacacgaggctgggcacggtggctcacacccgtaatcccagcaatttgggaggctgaggcaggaggattgctcgagtccagaagtttgagactagtctgggcaacaaagtgagaccctgtctc

SEQ ID NO: 249177 - DNA, 305 bp, Homo sapiens
ggatggaaaaagtaaaataaatataaacctttgccatcagatgtggtaggtgcttattaggctgtagctacacaggacttccacatcactgagtagaaatccatccatagaaatgaaagggaaggaatgcagtagggatagaaaatttgtcctcaaatacttctataggtctcccatatgattttttttcaatatagtagtatttctgacagagaatgaactgtttttcattactaaaggcattacctagttaagtttctatctggagataatgtacctgtttacctgtgaaagaaaaaaaaata

SEQ ID NO: 249178 - DNA, 459 bp, Homo sapiens
taccttttcttaaatagagttggggtcttactatgttacctaggctagtctcaaactctcaaactcctggactccagcaatcctcctaccttggcctgaggccaggagtttgaggccagcctggccaatatagcgagaccccagctctattagaaagaagaagaagaagaagaaaatctgcctgataaagagctaaagaagcagcctcaagctgctagagccacaagcgcccctggaactgtgcacttaaatagcattgtctttagcactagcataactgggcaaaaggagcaccatctctgtaacctataacttgaatggtgcttgcccccttggagttgttcaaggagtctagactggccaaagcaggcaaccggcctggcttcaataactatgcttggaactttgggccttgaggctaagaggtgtgttgtactatttcagcatgttttatgaatt

SEQ ID NO: 249179 - DNA, 441 bp, Homo sapiens
ctgtaaagtggtgaaaattacaaatctttccttagaagtgatggtaagtatttcaacaatgaactgtaagtaaaaaatcttaggaatatctcaaagttggtcagcaactacatttttcttattccctagataggatcatccattcacttattcttagggaaatttaaccactagcagccagatattcacctagaaaagttcggaaaatagaaaatgcaactgagttctttctattatatgtcgtattccatcaaagtatcagtgaacgcaccatcgtggattaatcacattagtaaatttaatatcttacatgtccagctagtgctataattctagaaattcaattcttctttgatattaccaagaaaggagaaatttgtcattcttgttctatgaagaactgactcacatgtgacttaattgttgaagtcaactgtgcat

SEQ ID NO: 249180 - DNA, 595 bp, Homo sapiens
tattttaatgtgtctgaatacttgttcaaaggctgagtcaggaagatgaagttcagctctgagaagaggctgcacagggcttcttaaccacctaagaatcatgataagatgacttccttgttagtttaccttctttggcgaaatgtcttcttagaggtcctttcaattgctaatgcacacccagagatacagccagagacttttcctgaactgtgaatccataacactgaaaaccctcctgtcaatctgcacaaagatgagctttcagaaacaaatgtttgacaacatcactttgaatcttatttctgaaactaccgaaagtttttggggatttattcattcaacatttgacaaatatttactgagcctctactacatgccaggcaatgttctaggccagtgcttctcaaatattaatgtgcatatgaaccaccaagggatcttgttaaaatgcagatcctgattcaacagagatgggcagagggctgagattctgaatttctaacagcctcccaagcgatgtccatgggccacatgttgagtagtgagggtctgggcactggggataaactggtgaacaagatagatagttcct

SEQ ID NO: 249181 - DNA, 742 bp, Homo sapiens
cgcgggtccgccctaggcgctgggctccagggatcggctccgactgctgcagttcgggccttattttagggtgaagcccgggcagccgacccggctgcgccgtagtgggaggccacggcgattacccaggtgaaggtcttccaggtgagacgggttcccccagcccagccctggaaggtggaaaaagaaaagttgacatggaatgtttaggaagcaccattggtccaggtccaggatcggggcagccagcatgtcctctaatctggcttcactgttgaaatccagtcgagcaagcagggcccaaaccactgcgagaccagctcggtcgggcccaaaccaccgcccactgcgggaccagctcggtcgggcccaaaccaccgcccactgcgggaccagctcggtcgggcccaaaccactgcccactgcgggaccagctcggtcgtggagaccctaacccagcggcgctagaggaattaaagaaacacacacagaaatataggtacctcgcaagggttttttgcatgtctgatacctacggctccaacaggacccactgactgatgatggctccacctggacctgccaactactcctgcagccccacccagaagcggttcagcacacggggaggatcctgtctcacaccctacggattgggccccccgcccccaaaaaccatcaagaggaaagcacccatgccaagtaccccaccttccccaaaatactttggaaacctattccc

SEQ ID NO: 249182 - DNA, 949 bp, Homo sapiens
cgcgggtccgccctaggcgctgggctccagggatcggctccgactgctgcagttcgggccttattttagggtgaagcccgggcagccgacccggctgcgccgtagtgggaggccacggcgattacccaggtgaaggtcttccagcccagccctggaaggtggaaaaagaaaagttgacatggaatgtttaggaagcaccattggtccaggtccaggatcggggcagccagcatgtcctctaatctggcttcactgttgaaatccagtcgagcaagcagggcccaaaccactgcgagaccagctcggtcgggcccaaaccaccgcccactgcgggaccagctcggtcgggcccaaaccaccgcccactgcgggaccagctcggtcgggcccaaaccactgcccactgcgggaccagctcggtcgtggagaccctaacccagcggcgctagaggaattaaagaaacacacacagaaatatagggtgtggagtgggaaatcaggggtctcacagccttcgaagctgaaagcctcgaacagagatttacccacatatttattgacagcaagccagtgataagcattgtttctatagattatagattaaaagcacttcttacgggaaataaagggatgggtctggctagttatctgcagcaggagcacgtccttaaggcacagatcgctcatgctattgtttgtggttcaggaactcctttaagcggttttccgccctgggtgggccaggtgttccttgccctcattccagtgtgggagtcatggccatcatgagcatgtcacagtgcagcagagattttgtttatggccagttttgcggccagttgatggccagatttgggggcctgttcccaacagcccacagccagacctagactccattcagattggttttgatcagcatgtagaaaatgggggagttgagtgtggtata

SEQ ID NO: 249183 - DNA, 361 bp, Homo sapiens
ccaggagttcaagaccagcctgggcaacatagtgtctctacgaaataaattttaaattagccaggtgtggttgctataaatcccagctacttggaaggctgaggcaggaggcttatttgaggccaggagttcatgattagcctgggcaacatagcaagactctgtctctaccaaaagaaaaaaaatctaaaaacattgtacatcagcagttatttagatttaactataaagatttttgttttctttgttcattatggtttcttgcatcccagatgttattttttcctgtatttttgttttgctgtaatacttatttctttcagaaatgtaatacaggtggtaaactttgaaccttagtatg

SEQ ID NO: 249184 - DNA, 406 bp, Homo sapiens
tttgtagatgtctatctgtggcgtaattgtaatctgaaactttgtgtttagtggcaagaaaagccgtcccacagcattaagagattctttaaaaaattaagacctctgccaggttcggtggctcatgcctgtaatcccagcactttgggaggccgaggtggacggattacttgagctcaggagtttcagaccagcctgtgcaacatggcgaaacccgtctctactaaaaatacaaaaattggctgggtatggtggcatgtacctgtaggcacagctacttgggaggctgaggcaggagaatcacttgagcccaggagggcaaggctgcagtgagctgcagtcacaccactgcactccagcctgggcaacacagtgagactctgtcacaaaaaaagaaaaagaaaaa

SEQ ID NO: 249185 - DNA, 447 bp, Homo sapiens
ttagattctgtctaaacacattaactttgggattcttatgatatattcaggtgagcaaaggaggaaggtgagaggagaaaaacagcttccagagtcaccagcagatgagctgttccaactcattcacgaaaagaaaacgacacttttaaaaatggaagatggtggctgggtgcggtggtagctcacgcctgtaatcccagcactgtggaagtctgaggcaggcagatcgcttgaggccaggagttcgagatcagctaacatgatgaaacgtcatctctactaaaaatacaaaaattatccaggtgtagtagtgcaagtctgtaatcccagctactcaggaggccgaggcaggagaatcgtttgaatctgggaggcggaggcttcagcgagccaaggtcatgcccctgcactccagcctgggcagcagagcgagagactctgtctcaa

SEQ ID NO: 249186 - DNA, 139 bp, Homo sapiens
tttttgtattaagttggaaatgaggcaacagttttattcttccatgccaataatcacagcaccatttgttgaatatggtgccctttccccattttgtttttgtttgctttgtcaaagatcagttggctgtaagtatttg

SEQ ID NO: 249187 - DNA, 405 bp, Homo sapiens
tccctgaccctactggagctaagggtcaaatatgtaccagctgggcacacttgggacagctccagggcttccccagccttggtgttctgggtgtttgcagataagcagcagaaaagtgggcctggcgcagtggctcgtgcctataatcccagcactttgggaggccagggcgagtggctcacttgaggtcaggagttcaagaccagcctggccaacatggtgaaaccttgtctctactaaaaatacaaaaaactagccagcatgatggcaggcgcctgtactcccagcaactcaggaggctgaggcaggagaatcgcttgaacctgggaggtagaggttgcagtgagccgagattgcaccaccgcactccagcctgggcaacagagcaaaactctgtctcaaaaa

SEQ ID NO: 249188 - DNA, 468 bp, Homo sapiens
atggttgcatatttttgcactgagatttctatgtgtagaaaataaagattctacagttaaatcataagtattaataagtttaggtgaatgctgaatccaaaatcaagatgcaaaaccagttgtatttctatgtatcactagcaaatagaaaataaaatataggcagggagttttacacctgtaatcccagcactttgggaggctgaggcaggaggatcgtttgagccaaggagtttcagaccagcttgcacaacatagtccagcctgtctctacaaaaagttaaaacaaattagccaggtgtggtggtgcatgcttgtagtcccagctacttgggaggctgaggtggtgggaggatcacttgagcacaggaggctgcagtgagctatgattgtgctactactgcactgcagcctgggtgacagagggggaccctgttttgggtttttttaatttaaaaatatgtttac

SEQ ID NO: 249189 - DNA, 594 bp, Homo sapiens
aattagagaccacccgtttctatttatggtggagccggcgatcggcgtgcggttggaagtggtgtccctgaggcacctgctcgcccttttcctgcgcctccgcaacgtcggctgcgaatgagtctcctaaaggacgcccgggaggatcggaaacagccgagtcccggcgcgggcagtgtcctgcgctcctccccggggtctggccggggtgggcccgaggcccccgggcccccggttaccgccgcgggcgcgtctgcgtcctgacccggagggacccgcgggccgggccgtaccagtgatgcaagatggtcctttctgagcagagctcccctcgctcagtgctcctttgtttcacgtagaagatcttcttgaggggactgtgtggccagtgcagcccaggcctccccaccctgcaccgttcaacagaagagcagctgacgcagggggccctcaacatgctcacccaaaagtcagcgagattctgcaccggcccactagccttccaattgtaaactaaaaataaaatcttggccaggcacggtggctcatgcctgtaatccccgcactttgggaggcagaggcaggtggatcacc

SEQ ID NO: 249190 - DNA, 549 bp, Homo sapiens
  misc_feature (1)..(1): n is a, c, g, or t
  misc_feature (152)..(152): n is a, c, g, or t
  misc_feature (215)..(215): n is a, c, g, or t
  misc_feature (229)..(229): n is a, c, g, or t
  misc_feature (284)..(284): n is a, c, g, or t
  misc_feature (302)..(302): n is a, c, g, or t
  misc_feature (407)..(407): n is a, c, g, or t
ngatttttagtaagcacatccgattttccaatatggtcataaacagcaatttaaattcatgtttcattttcacttgtatttacctccgcgttttttgagattttcagttttcattttacttctgcttctaaattcaggccctttaaaatcanctttgtcttcattcagcactggctctggctgtacaatcactgtacctagaatgatttcatttnaaaaccattacacntattaaatgtgcaagtgaagtacaagacttcagttcagataaagccaacattgcnggtacatagtttgtttcnttcaagctttagatattggtgtaaggacctcacaaaagtaaataaaacagggaaatagtaaaagggccaggtgtcaacagtttatttgttgaaatatagttcatnaaaacaggaaagggaggtattatggagtgattacaaaacaaatgtgtgaatcaaacagaaagcctcaacccagttctgaatttttatagtgcctatcacaaaagctgttatgaatatgaacatctatgctaagttccataaa

SEQ ID NO: 249191 - DNA, 445 bp, Homo sapiens
caaataaatattaaagatgtgaaaataatctgaaagaggactcctcagtgtgtttaggttttggctctgttcaaatttttctttgttgttaatcttttatctggtttagtaaaatctagtttgtttctaaaatgttacgctttttttttttgagacagagtctccctctattgcccaggctggagtgcagtggtacaatctcggctcattgcaatctctgtctcctgggttcaactgattctcctgcctcagcctggccaatatggcgagaccctgtttctactaaaaaagaaaaaaaaaatagccaggcatggtggcactcacctataatcccagccactagagtggctgaggctggagaatagcttgaactcaggaagcagaggttgcagtgagctgagatcacgccactgcacaacagcctggatgacagagcaagactgtc

SEQ ID NO: 249192 - DNA, 490 bp, Homo sapiens
acagcccggaagggccccggctggatggaactgtccatcttcaccaccaccatcagccgggatttgtaggtgagaggatcttctgccatctcttcctggatgctcacaaaagctcggctccaggaagacagcacacgacccctgcccgatggaatcttactctgttgcccaggttggagtgcagtgagtgcaatggctcactgcaatctctgcctcccaggttcaagtgattctcctgcctcagcctcctgagtagctgggattacaggcatgcaccatgatgcccggctaatttttgtatttttagtagagacagggtttcgccatgttggccaggctggtctcgaactcctgacctcaggtgatctgcccaccttggtctcaccaaagtactgtgctgggattccaggcatgagccaccacggtcggccagaaacacctttaaaaagacaatactacatcatgatcaggtgggtttaagagtctggaa

SEQ ID NO: 249193 - DNA, 675 bp, Homo sapiens
acagcccggaagggccccggctggatggaactgtccatcttcaccaccaccatcagccgggatttgtaggtgagaggatcttctgccatctcttcctggatgctcacaaaagctcggctccaggaagacagcacacgacccctgcccggtaggtaccctgttccgttgcaccgtaagatcccgtcgctggtggaagcacggaggccagcaggaccggagcccccagcctcatccacgctctcgcacacgtcaaagctggctgctcggagcaggaagtctcgcccatggtggtggtggtgatggtggtggtgttgatcagagtggccctggtggtcctctgggtgggtgccccctggctccgaggggccccccagctccccctcactcaggtccatgaggaacaggtcatagaacttggaggaggaggtggagaggtagatcttgtgggcaaagatgcgcacccgctcctgcagcaccaggatgacgtccgcgcagagcgggtcctccaggaggtgggcggggcactcctcgctgctggagggagggtcgggcaccacgatgatcgggggcggtggcttggggggtaggaagggtgcctgcagcagaggccgctgcacattgcggaggtgggacttccagaactgcaggtggcggcgggagatgagtgcagctcgg

SEQ ID NO: 249194 - DNA, 685 bp, Homo sapiens
ggtataataaaaatacacacacacacaaaatttaatttttacaaaaagcgaatgaaatatattttgtgttgagaagtttgtgaaatccttacaatttttttgagactcccagaatggtggtcggacagtatagcatgatggtggacagtatgggttttggggccagacttctgcaaaacctcagttagtaccttacaaacccttccttcctttcttggtttgccatgcttcaaacataaaattgtatctagacttttggctacaggggattaaaagatgtttattaggaggtcacaaatacaaattttctcttccatgtctgactattttctttttgttctaagagttttgataaagttgcttggaatactcagattgcatgattacacacagttggagtcctacaaaaaatttcatgaaggaattgaggattattaatcatgtgatccatattgaagtcaaagaagatctatatgacgaatagcctgtaaatgtatcttctggtgtgtgtgtgtgaagtgtggtggtatgatagaaaaatcctcagtaattatgtctctatttataaactcttcagactgaaggtactggaggactttgttatttaaattaaatttatgtgtagcttttttttttttggaaatgcaatactcatcccctaaattacatgttctgtaagtttttt

SEQ ID NO: 249195 - DNA, 260 bp, Homo sapiens
tgtctagtgtaggtgcaaaacatttctgaccagatgaacaataaccccaaatattattgttttattgccctgtaggaaatgaaccattttgtatctagctttgcaatcttattccggtattctcttttccttccctcctttctctctcgttttctatctacctgaatatctttctcatatcctcctttaaaccagctttgtcatcctactattcccttcatcaatgagttaaataaatttttggcatgtgtttactaaac

SEQ ID NO: 249196 - DNA, 401 bp, Homo sapiens
accagatgtttaactttacttcacaaagtaataacctagttaactgacttcccatattgtaattaattgcataatgaaaatatacttaaagtacactgacggctgggcgcggtggctcacgcctgtaatcccagcactttaggaggccgaggcaggcggatcacctgaggttagcagttggagaccagcctggccaacatggtaaaacccagtctctactaaaacaaacaaacaaaaaatacaaaaattagctgggcgtggtggcaggtgcctgtaatcccagctactcaggaggctgaggcaagagaatcgcttgaaccccagaggcggaggttgcagtgagccaagatcgtgccattgcactccagtctggagaacaagagcaagacttcctttcaaaa

SEQ ID NO: 249197 - DNA, 989 bp, Homo sapiens
caacctgtttttaaggccttcagtctgagactttattttgtggagatacaaactactttttagtcatttccgaagcagacgggacagcagaggctgacaaaccacagggaccattttaaatcctgggccttttcttctgggaagttaggcaagaaccttcccaaatgtttgcccgtcaggctctctgccagggagtgactcattccacggctccccacaggcatattttatttgggggtgggggacgcagcgagggcttggccttgatgggggaaggagagggggcatttccagcaaacccagaaggtgttttctttttttcattttcaggagaaaaaagaaaaagaatgtgggtcttttttgcttccttccaggttttgtttgctaaaagaagacgtccaaagttcattcggtaagctcaaactcgctgagtccaaactcgctgagtccggggcaggcgcttccagacggctctgcgtccctttcaatgaaattcttcttccattaacgacagggtttttaaacgtgcctccaagacctgcctgcacgtactgtacaccaaactaaggcgacattttcccccaaaaaaggcaagctgaatttggaaaagtcagaccaactagggagctctggaatttctaaagtttgccttaaagcaattaagactttcagctgcaaagattttcaacagttagagagcacgcacacacacaaaagcctgtcagtcaaaactgcaaggacagacctcggaagctggtgtcccaagcccgctgtgatcaatttgttactgtcctgggattcacacttggagcctaggagaggtataaataaatcaaaagatccgtctacttagcagggcaggcagagaggcccccacatacacaggcaagtctagggtcagccccccaggcctggctggagagagacaagaacaaagacaggagagcctggaggatatttaggaaaacacacgtcctcgggtgcccggc

SEQ ID NO: 249198 - DNA, 691 bp, Homo sapiens
gcctgtcttaacctacttggctttgcagcatgcaacaggagcaaagcacgacaaaggcagccagatgtggtttaaggttttgtttgctaaaagaagacgtccaaagttcattcggtaagctcaaactcgctgagtccaaactcgctgagtccggggcaggcgcttccagacggctctgcgtccctttcaatgaaattcttcttccattaacgacagggtttttaaacgtgcctccaagacctgcctgcacgtactgtacaccaaactaaggcgacattttcccccaaaaaaggcaagctgaatttggaaaagtcagaccaactagggagctctggaatttctaaagtttgccttaaagcaattaagactttcagctgcaaagattttcaacagttagagagcacgcacacacacaaaagcctgtcagtcaaaactgcaaggacagacctcggaagctggtgtcccaagcccgctgtgatcaatttgttactgtcctgggattcacacttggagcctaggagaggtataaataaatcaaaagatccgtctacttagcagggcaggcagagaggcccccacatacacaggcaagtctagggtcagccccccaggcctggctggagagagacaagaacaaagacaggagagcctggaggatatttaggaaaacacacgtcctcgggtgcccggc

SEQ ID NO: 249199 - DNA, 811 bp, Homo sapiens
ctttgatgtgttttcagtgattaaaatgtcatttcccttccttcccacttccttagtcctccctccctccctccctccctttttcccccatccccgccacgtccttcctttctttttttttttttaacttttattttaggttcaagggtacatatgctccttccttccttccttctttccttccttccttcctttctctctctctttttctttctttctgttcattcttgaagacctacctcaaatgtcacctcctctttgaagccttccttgaccctttcaggtagaattagctgcccaacccccaccccacaattaatgctaaagaagcagggaatcgatccccatgatctttgaatctccagactcttacatggcatctgaaagggaacatgattgttgatttcaattaaattgaatctcaaccttctcactaaagaattctgaagagttttaaaaagtataatttcgtccctcaacctatcctatctctacactaccactatgaagactacggatgtaaatgctgtgttttagacctgaaagtcaaacaaaggtaggaaagcaatgaaccacttctcagacttttctgccaatggatacaatctggaatctccgtattctcccaaagaggagcacatctacaccaaaacttggattttgctttatttctatttctactttgctctgagcatcccttctgctgcacatctcagctctagtcaacttgatctgaggttgagaagcaggcaccgttggttctcagacccacggggtaataagttgcatgtaatgtgggctcagcagggtg

SEQ ID NO: 249200 - DNA, 576 bp, Homo sapiens
ttttttttttaaatacaccgctggccaggcatagtggctgttgcctataaccccagcaccttgggaggccaaggcgggaggatcacttgagcccgggaatttgtaataagcctgggcaacatacactctgtctctacaaaaaaataaattagctgggcatggtggcatgtgcctgtgttcctagccactcagaggcaaaggtaggaggattgcttcagcctgctacagtgagatcatacccactgtactccagcccagatgacagggagagactgtattaaaaaagaatcttgcccctctgatgagctgaaggatgaatctaatgaccacctttctagggccttcataaatttgaagaatacagctaacataaaatggacatcaacagacctggcgtgatggctcacacctgtaatcctagcactttgggaggcagaggcaggtgccatctattcttgccatagctatccacaaattagtatttgcaggcaaatgacagtaagttttaatttttttttttttttttgagatggagtctcactctgtcacccaggctggagtgagactctgtcgcaa

SEQ ID NO: 249201 - DNA, 633 bp, Homo sapiens
ttttttttttaaatacaccgctggccaggcatagtggctgttgcctataaccccagcaccttgggaggccaaggcgggaggatcacttgagcccgggaatttgtaataagcctgggcaacatacactctgtctctacaaaaaaataaattagctgggcatggtggcatgtgcctgtgttcctagccactcagaggcaaaggtaggaggattgcttcagcctgctacagtgagatcatacccactgtactccagcccagatgacagggagagactgtattaaaaaagaatcttgcccctctgatgagctgaaggatgaatctaatgaccacctttctagggccttcataaatttgaagaatacagctaacataaaatggacatcaacagacctggcgtgatggctcacacctgtaatcctagcactttgggaggcagaggcaggtggatcacttgaggtcaggactcaagaccagccttgtaatccacctgcccagccacatgccatctattcttgccatagctatccacaaattagtatttgcaggcaaatgacagtaagttttaatttttttttttttttttgagatggagtctcactctgtcacccaggctggagtgagactctgtcgcaa

SEQ ID NO: 249202 - DNA, 783 bp, Homo sapiens
gaattaagtggaaatctacaaagtagccagtctactggttctgtagtggtcaacctattaaaaatggtttttaatttctaaagtactttatgccaaatataacatgtttatggtatatgcctgactgtagaattataactcaggggaataacgacttatttaaatgtaacagatctattcatagtctgtaaagaacaattcatcctctgatcttgtttttcagattaagcagtgtgtttattaaaaattattatcatcgcaatactaaaaagatctttagattgctgctaatctgattctgcattttaactgccttaaattctacattcacttgcaagtgggggccacagtcaggttggcaacaagttttgcagacaaaaggaaatcctggttgtaaatcccatgatatattgtactcaattttgtatatgatactgtctaatgtgctgtgctgccttattaaagaactcgatgtccatttggtttacattagagggaaacttaactgcagcttaacatattgttcattttcaacactgtcacgttacattcgtggggggcagattttaatttctttatcagtaatcaactggaagtttctttttgttaaattaaagcaagaaaggttttaaaataaagggcatgggggtaggacgccaccttttggtgataaaacaaatagaaatcccttctgaaaacagatgttcctgacataattttatttttaattacaccaaggcaaaggtgcttgtccccatttcgttatattttaagtaacaggag

SEQ ID NO: 249203 - DNA, 471 bp, Homo sapiens
cttgttttagagaagggggttcacctgggacacccctgagctttgtcccaagcctcaacaagccactcacttcccacttgggagtagtttctctgcacgcaccaggcagtgggaccagggaagaaatcgcgtccgctaagtggtgtcgtctgcctgcaagacctgcacagctcccaggcctatggctttgggcaccaggacggtgccggctgaaagggaagtgtcagctgttcttctgtctttaaaaggcagcaaagaaaaaagcgcagggttgggtttcgtaacgtcagaggaggccaaggacacagcatggaatctgacgggaaacgcatgtgggcgaggaggtgatgggcttcaaggcgcggctctctggtcgcaagccgcctgttctcagaatacagctggctgtgttgtaatcgcacgctgatctcacaataaataacgtgtgcatggaacgtgccttcaaaaaaa

SEQ ID NO: 249204 - DNA, 467 bp, Homo sapiens
acgtgaccctctgtcctctgctatgctcaaaaatcataacagctgtcatttcctgagcacctgcccggaagcagatccttgcctgatctcattttattcccacagccacccaggatgcagatattatgatccggttttacacacaagaaaatttgtctttaggctcaaagataagaagtgactttccagccaggcacagcggctcacgcctgtaatcccagcactttgagaagccgaggtggtggatcacctgaggtcgagagttcaagatcagcctggccaacatggcgaaaccctgtctctattacaaataccaaaattagccaagcatggcggcgcacaactgtaatcccatctactcgggagactgaggcaagagaatcacttgaacccaaaagatgaagattgaagtgagctaagattgtgccactgagctccagcctgggcaacagagcaagactccatct

SEQ ID NO: 249205 - DNA, 410 bp, Homo sapiens
aaaataaaaaataaaattcacgatactccccaaaagctgatgataacatgtaagaagcgacttgattttaccttctaactctccctcccttttagcacaatgctgcaaaatgactggctcataaaccactaagctgccttggcagccacttgttattgttaccagtaggtaatatgctgttttcttctgcttggcacataagcagtaggcatgaaataattgcttaatggataagtaagttgttaaattataaaactctgatggattgcttagtcctttaacaatttacacccccctcccacttatccaattcttttgtgacagattttgcactagcaaagtgcactgtttcagacaatcaaggaaataaaacatttcttgatgaaatcctacctcgcctcaacaggaaa

SEQ ID NO: 249206 - DNA, 371 bp, Homo sapiens
aagaaaacaagactggtgatggttggtgtcagcatgctcagtgaggaggctgagagcccagcatctagagtcatggatagacacctgggttctgaccactgttcctaccaagtcttactggttgtttggccttgggcaagttgtttaacctctctaggctcactttctttatctgttaaatagagacaataaaaggtcacacctaatattttgcatgcacaatcacacataaatgtgaagtgctttgtaagctgttaaccatcatctaacatactaacataaaaaggaggggaagaaggaaaatatgcatgactcacaagctccagtgaccactgctagcaatacaccctggggttgaaacagtccctcat

SEQ ID NO: 249207 - DNA, 466 bp, Homo sapiens
cacatatgcagctgttagcactatccgtctccagaactttttcatcatctcatttttgaaacaaggatgatattctcaagggattgttgtgatgattaaatgaaatatgagatgaaagtgctagcacagagagggcactctgtaactttactccaaggtttgaagtcttcccgtggtgagctatctaagcctgctgcttgggctagctgagagttcttttataaatacccaaggtggagacaggagagcagtacgtttctgcacttggtggtgtcagggttgaagtctggttgcctgttgcttcgtgagggtggttattagtttcacctggacttccgcagtgcagcctgctgtgcgtttttccctacccccaaattacagctttgagtctttcatgtgtctctgttcaacagctactctgtgtctgtgggctctgaaataaaggctacattttcagtttcctgtg

SEQ ID NO: 249208 - DNA, 397 bp, Homo sapiens
gggagtggggcacacaagtaactgaggacaagtatcacaagcaacgtaagataaagtgcaaaagccctactgtgggttgttcttagagtgtttgatcagtaaagaggtctgtgtggccacaataaacagagggaaaggggtggaagagaagatgggaccctgcagatcttgaaggctaggtagggatggtgaattttattctgagtgggtggaaaatcactgaaagcctgtgaatcattcgtatattaaaaggatcactttagtggatgttgaaaatgtgttttagagttaagggtggaagcaaggaaaccagttagaagaactctgcaatggtccaagcagaggtatccacagcggtaaagagagggtgaagaatgggcaggttctagagatgctt

SEQ ID NO: 249209 - DNA, 272 bp, Homo sapiens
cctgactaataatatagtagccgacttatgcagggcaagaatttaaactatacacaatgcttttaattgatactggtcataaaattctgaaacaatcaacctacttaagatgtagccatttaactattatcaaatataaatgcttctatatgacagtaccagtcttcaaaccacaatatttctacttttaccaatacaaataaaattaatcacctgacactcaaatgtttttaagtaccttataaaataatttgcaatattttttaaatgga

SEQ ID NO: 249210 - DNA, 611 bp, Homo sapiens
tggcgcatgtctgtagtcccagctactcaggaggatgaggtggcaggatcgcttgagcctaggaggttgaggctgcagtgagccaagattgtaccactacacctcttggtaacagagcaagactccgtcttgaaaacaacaataacaatggaatactattcggccatacaaataatgaaatcctgccattcgtggcaacacggttggtactggaggacattatgttaagcaaaataagccaggaacagaaatttaaacactgcatgttcttactcatatgtggaagctaaaaaaactgaactcatggagatagagaaacaataacgattatcagatactggaaaggacagtgggaagagaagtataaagaagggatggttagtgggtataaaaatacagttagaagaactaagatctaatatttggtagcaagatagagcaagtatagttaacaataatttattgtatacttcaaaataacaagactggaattggaatgttcctaacaaaaagaaatgataaacgtttgaggtgatgagtatcctaagcacacattatatgcttgtatcaaaatttcacatctccataaatatttacaactattatgtatc

SEQ ID NO: 249211 - DNA, 691 bp, Homo sapiens
gagatggagtctagctctgtcgcccaggctggaatgcagtggcgcaatctcggctcactgcaagctccacctccccggttcacgccattctcctgcctcagactactcaggaggatgaggtggcaggatcgcttgagcctaggaggttgaggctgcagtgagccaagattgtaccactacacctcttggtaacagagcaagactccgtcttgaaaacaacaataacaatggaatactattcggccatacaaataatgaaatcctgccattcgtggcaacacggttggtactggaggacattatgttaagcaaaataagccaggaacagaaatttaaacactgcatgttcttactcatatgtggaagctaaaaaaactgaactcatggagatagagaaacaataacgattatcagatactggaaaggacagtgggaagagaagtataaagaagggatggttagtgggtataaaaatacagttagaagaactaagatctaatatttggtagcaagatagagcaagtatagttaacaataatttattgtatacttcaaaataacaagactggaattggaatgttcctaacaaaaagaaatgataaacgtttgaggtgatgagtatcctaagcacacattatatgcttgtatcaaaatttcacatctccataaatatttacaactattatgtatc

SEQ ID NO: 249212 - DNA, 305 bp, Homo sapiens
acattgccccaattaatgtttgaattcactgaacacaaggtaggctagcaaagtagagagtaatatctttgcctcaccttggccacaaggatttattttgtcagtaaccaagtttagtgtactgctatttagctttttcactacagatgtgaaaatgtttctttttggggtttgtttgaaattttctttcccttttcaatttagcagtgctgaacctatcctcaaataaatttacatttttcccattaaatcaactttgtttctgttccatggttgaagcaaatactttataaagaaaaaaatca

SEQ ID NO: 249213 - DNA, 413 bp, Homo sapiens
tttaaatatggtagctcacttatttctcccttctctcctaccccaaaacacctcacctagttctccctgaggcagtggtgaggagcaaaaaaatagaaatgttccttctgctggtttttattctttcttttattgaataaatattttccctaacacatggttggtcctgcccagaaaagcaatgttatatcaggccaagcttcagcctgcagggggtttatccttaataagtggagatgacccatgcatacaaattataagtgcagaagatggaaagtggtaaaacctcataaaaaaaacacaaggagccacagaaaaggaagagtttgcatccagctgagcggtgtgggaagggcactgtggaaggcatgcattggatctgagccctgaaggaccggcaggattggagctag

SEQ ID NO: 249214 - DNA, 480 bp, Homo sapiens
gcaggctcgtgccgattttgcagcctttgggtggaaagccggattggactgcagcagcctagtactcaaggagagggcacggcagggagaggagacagcagcggaaaggcctgagctgggacagtcgaagagctgtgagcggcttgctatggctgaaacgtagtttgagtgtgaccacaaaacatggcagactgtgaccacattgcaaggatctcggaggcttggtaaaagggttctcttccccggagatgtggcacagtgtccgatccccgtgcctttcctcatacagtgccctcccccctttctccgcatgtctacgttctgactctagtgccactttttccacagtctccctggtccccctcccacccaccatcaagatgggatctctccctcctgggagcacctactgcactttgctttcattcattcattttttaaaattaattaattaattggtttatttattttgagatggag

SEQ ID NO: 249215 - DNA, 466 bp, Homo sapiens
agtggtggagataggcctgctcaattaaccggccccagatatcatttctctggctacctcttttctcgcctggcctggccctctataccgttttttgtttgtttgttttgttttgttttttttctgcaaaacgttttctgctgcaactttctctttatttatgcctttatctttcttaaacaagaggtccctggaaataactaactaaggaggggagaggaaccccctcacccccaatttcatgaatgagtgctacattcatgctggccgggtaccaagagcatctttagatctttagacctgagtcttctcatctgtgaaaaagaggttaaagcagatgaaccctaaaggcccatttccagtcttaaattcaacactttcaagacaaaacttttcttctgtattcctgagtgtgtatatatatgttatgtaatatatattataatgtatatatataaacttggct

SEQ ID NO: 249216 - DNA, 410 bp, Homo sapiens
gggtgagagcctgccaggacacaggaagccccacattataccaacaattccaacatatttaacttacattgttaggaagatcagtgtgcagaagggtgaagtcagtcattcacaaggccttcagacctagggagcacagcacacctgccacaggattagaaaatagacattattagaaaataattacatttattgtaattacaaaatattgcatttctatttgatcatgatatataaatataaaaactaaaatataaattttctttatcattcctcccccccgttccccagaggtagccagtgttaatagattatgtgccctttagaactatattctatgcacactcttctgtacctcctcctccatcccaagtacactatacatttttacgcggtcaagtcagctagtc

SEQ ID NO: 249217 - DNA, 570 bp, Homo sapiens
cctggagtattactttttctttattggaaagaacacatatgatcatttcttttgagaagcaaagaaatatggacgtcaagtgtccctttaaattatcttttagataaatatatggctgtgggcaatattgatgaggctttccttaagacagagcaccaacatggagctatgaaacacgagaaagcattcaagaccagccaataaagcatttcctacctccttcccaagtactagagagctcaattttattttatactgcaagttaatggtgggcaggaaacaaacatatttaaagcacacccctatgaaaagaaaggtttacaatgaattatcaccacatgtaaaaagagttctgtataacaaagctatttccatgtccccagggggtgacccagaaaaaaagagtgctttgacctggttataacaaactctctctctcggtaacctatcctggtctttaacaaattattactctcaaaggttttccttctagcaaacctaaatcctcacttttagagatgttcaagttcatttcctttttttgaggagccattttactgaagctgagtc

SEQ ID NO: 249218 - DNA, 120 bp, Homo sapiens
cccacaggccagcaagagaagctacggggagggctcacatagagggagagacaggggtgtccttccccacttcccagggttgagacaagcataagcaaatatttaaatactgtatttttt

SEQ ID NO: 249219 - DNA, 493 bp, Homo sapiens
tggcaaccggtttagcagtcacgtggccactgtctacctcggcaagctcagctccctgtaacagcacttaggaaagaggcgctgtcagggcaggtcttcgggagtgggatttaacagcctgcaaaatccatctgcaaaggtggggggaaaaaaagcaacagcctgggaagcctcagcctaggaaaatataaaatgcctggcaacggcagcacgacgtactaattccagtccgcagcctttgagagtcaattgctggatctgatggtcccaaacgttcctgaacttcagaaacacttagagcagcttatttaatatggaaagtgtcactttatgtatccgaatctagaaaggtaggcctggacatcggtatttttagcaagttaccaggtgaatcaggtacagacataaaattttacaacctctgggccccactcaaggctatcctatttgacacaattacctcactttccaaagaagcatgcgggctataaaa

SEQ ID NO: 249220 - DNA, 1687 bp, Homo sapiens
gcctcagcctccaagtagctgggactacaggcgtgtgccaccaccgctggctaatttttgtatttttagtagagacgaggtttcattatgttggccaggctgctcttgaactcctaacctcgtgatctgcccaccttggcctcccaaagtgcttggattacaggcatgagccaccgcgcccagccgccgaattctttttcttcctataggctgcacatgttgtttgtgtccttattggtatagttgacttttatcacttgtttaagatggagtctgcaaagtttctttactgttaagttgtccttccccctgaaattgctttgtgtggagatactttgaaactatgtgattgaatcatttcctgttccactttcagctgctagttttagcatccactgatggttttgcctgagttaattatcaatattatggacatagtatttatgtccccccaaattcatgttgaaaccttagccccccattatgatagtattaggaggttaggccttttaggaggtgagatttggtcataaaggtggattcctcatgaatgggattggtgccttattaagaagagacataagagcttgctctccaccatgtgaggatacaatgagaagacaaccatcgtcagaccaagaagaaagtcctcactggacaccagatctgctggtaccttgatcttggatttcccagctccagaactatgagaaatataaatagtttgttgtttaagcctatgataatttgttacggcagtccaaccctactaagacaaatataatgggttttaatgggtggttagcccattctttctatatttattatgctggcattctattgtaaggaagaacattctcctcacctctttactcccttaaaacagacaaaattttgtttatatatgtatggactaatagatgcctattttattcagtgagttgtaattcattgctgtcactattttgatgcttaaatttggccagtgagagtcccttcaagttagcttctgtggttggttggttggttggttttgtttttcaaatatttgcttgtgacaatatatgtaacataataaagtatgccatttacacaatttttatgtacacaattcatgagcattaattctattgacagtgttgaatagaattaatttaattctggtgagtacagaaacccacatttgaattgttttcaacttttggcattgtgaataatgctacagtgaacattggcctacgaatacctcttttgagtccgtgttttcagttttttgggtacatatgtaagagtggaattactgaatcatatggtaatctatgcttatctttttgaggaaccatcaagccattttccctagtggcagcaccattttactttcctgttagcaatgtataaagttcccagttgctccacgttcttgccaatgcttgttatattccatgtgtttgtgtctgtatgtgtgtaaccatcctcaagagtgtaaagtcatatctcattgtggttttgatttgcattttcctaatgatgactagtggtgatgaacatcatttcttgtgcttattgttcatttgtatatctttggagtaatgtctgttttgagttttttgattttttttaactgggttttttgtctttctgttgttgaattttaggagtatgatattaaactgtatgtgatacatga

SEQ ID NO: 249221 - DNA, 289 bp, Homo sapiens
tttttctcatctttacctagagaattgatcagatcaaatatctagtttcaattctaatttataactcaacttaccataattcattaaaaggctgttttgatggatccagaatttaaaattagggttatagaaatcagtcagtttaacttgggcctcagcaaccatggcattcaaaccaaatttaagcagaactcctggagcatctatacagaaccttatgagtctatatactatatattgtctgaagactattcttctgatatttattctgaactaaaatttggatacg

SEQ ID NO: 249222 - DNA, 407 bp, Homo sapiens
actcagttcattgctgcttcattttgaaaaagaaacaacatcttaaaaatactacccacaagaagtataaatggctttgatggctacagttccctgccattctactgggaccataagccccactcttaagagtgggcttcttttgcctcccatttaattgtatgcagactcctacggtgaaagaaatcagaatctgtgctaactttttggcatgaaaaacgtaggcgacgaggaagcatataaatgcattctttgctgattctacccccattttgtacaaacatgtttgccccttcccaattttcttgtgtactaaagctccaccttcaggacacaagttcacatttgaaaagtgtgggaaatacgaacaactgaaataaatatttaggcatgcgggttctgtaaaa

SEQ ID NO: 249223 - DNA, 355 bp, Homo sapiens
gcacatgaatgagccacacagttgtacttttcttttttgagaaagagtctcactctgttgcccaggctggagtacagtggtgtgatcttggctcactgcaacctctgcctccagggttcaagcaattctcatgcctgtaatcccagcactctgggaggctgaggtgggcggatcacttgagctcaggaattcaaggtcagcctgggcaacatggctaaactctgtctctattaagaaaaaaaatgttaacattatgatttaaaagtgcattaaccttaatctagataataaaagctttttggggcaacctccagaactgtgaaaaataaatttgttatttaaaaagaaaaaaaaa

SEQ ID NO: 249224 - DNA, 776 bp, Homo sapiens
tggtggtgggcatctgtagtcccagcttcttgggaggctgagatgggagaatcacttgaactcagaagatggaagttgcagtgagccaagattgctctattgcactccagcgtaggcaacagaatgagactctgtctcaaaaaaaattgctttccaataaaaaatttactttttatatttaataatttatcagcattagtatggtgtactaatatactgctactaattataataacttagttcagaagaaattttttacatttagagctttatggtcatgggaagtaaacactttatttttatattttgtcatagagaagtatgataaggtgataataaaaacttttttattagtttgttctcacattgctatgaagaaatacctgagactgggaaatttataaagaaaagaggtttaaaagactcacagttccacttggctggggaggcctcaggaaacttggaatcatggcagaaggcatgtcttcacagggcggcaggagagagaatgagtgccagcaggggaaatgccagacgcttataaaaccatcagctcttgtgagagttcactcactatcacgagaatagcatgggggaaccacccccatgattaagttacctcccactggctccctcccacgacgacgtggggattatggggattacaattcaagatgagatttgagttggggacacagccaaaccatatcaactttcaaattcaaaacatattagggataaattttgtaggtgaagtagaattgaaatgcaaacac

SEQ ID NO: 249225 - DNA, 401 bp, Homo sapiens
agacaggaaaaaggggatctcctggctcctttccagtttctctgagataattccaaattgacatttctattatatggttggatgtggccaaacgttaatacagaaagttaacaaagcagcccagcatggtggctcacatctgtaatcccagcactttgggaggccgaggcaggtgcatcacctgaggtcaggagttcaagaccagcctggctaacatggtgaaatcccgtttctactggggatacaaaaaattagcctggtgtggtggtgcaggcctgtaatcccagctacccaggaggctgaggcaggagaatcgtttgagctggggaggcgaggttgtagtgagccgaaatcgtgccactgcactccagcctgggcaacaagagcaaaactgtctcaaa

SEQ ID NO: 249226 - DNA, 379 bp, Homo sapiens
tctgggattacagcaaaagtggtgctaagaggaaagttcatagcattaaacacctacatcaaaaagtctgaaagagcacaaataggcaatctaaggtcaccttaaggaactatagaaacaagaacaaactaaacccaaacacagtggaagaaaagaaataacaaaaatcagagcacaactacatgaaattgaaacaaaaaaaatacaaaagataaatgaaacaaaaagctggttctttgaaaagataaacaaaattgatagaccgttaatgacattaaccaagaagagagaagatccaaataagttcaattagaaaagaaatggaagatattacagcctataccacagaaatacaaaagatcattcaaggctgctatga

SEQ ID NO: 249227 - DNA, 412 bp, Homo sapiens
atagatacacaaacataatggaactttcagagggaaattacaaactaaactttggcattgataagtcctggagccaagtgtcagagagggacagttcgctgtgggctggaaaaggcatcctacggctggacacttgagttgaccgtttaagaatatgttagattaggatcaagagcaggaaatggaacattccagatggagaggaagttaaagaagtgtaaagtgtggcctgtgtctatcgcatttggagcctgtcctgactggagaagaaggtatggcctaagtgtttgggactcagctagataaggaagctggcaccaggttttggaagcctttgaagcaccaagcaggagagcggagaccagggacagccacatgttgatgatggcttggactagtgtggcggtaatag

SEQ ID NO: 249228 - DNA, 575 bp, Homo sapiens
aaatataccatctccaacaagcactagtttattctgcactgcattcctggaaggaaggttatcagtttatgagacatcttcaccataaagtgaaagaaggaggttggatcaaatgccccttagcgccctctcctgctctgccactccgcagatctccacgtttacacatccagtgttcctgtgggatgacctttgctgtcagtcagtttcctgtctacaggtcaggaaggaaagaagttgtcatgactccttaggtgaatcatggcttcaggctcctgctggatctggcaggacctgcctggatcactccccatgtctttggacgagcgttcagtcaccgagtgagtagggtgcctataaaactgaatcttgtggggcagagggcgacagggggcatgtgggaaacttctgtactttctggtcagttttactgtgaacctaaaactgctctttatgataaagtgcatatatttaaaaaattaaatactaaacagtacgacagttcctcaaaaaaaattaaacaggattaccaagtgatccagcaattccacttctgggtatataccaaaaaaagt

SEQ ID NO: 249229 - DNA, 350 bp, Homo sapiens
gcaaataactccacagactcttttcataaacttaagggtgttcttgctgatcactccgcaaagctaagcaaaactctatccctaggaaggagcagggctgccagacttccaaaggaactttgtccctgtcggtgtagccgactctgtcctttctatggcgttcagcagtgtctctgatgagaataggcattaagcatctattttgggtcaggccctgtgctaatcacacttttacattcactgtcctatttaaatgaaacttagtgtataagtcttttgcctccttggttaaatttatccctaggtattttattatttttgatactattataaatagaattattttctta

SEQ ID NO: 249230 - DNA, 478 bp, Homo sapiens
aggcatgcatggttggggttaatatagtagccccctgtttccacaatttcactttccatggtttcagttacccacagtcacccatggtctgaaaatactaagtggaaatccagaaataaacagttcataagttttaagttgcaactcttctgagtagtgtgatgaaatgtcaccatgtcccgctccatcctgccccggatctgaaccgtccctgtgtccaacagatccacactgcagacgtggctctcccattagtcacttggtagccatctcagttcccaggtcaactgttggtggtactgcagtgcttgtgttccattccctcttatttgacttaatttttctattttattattagttattgttaatctcttactgtgcctaatttgtaaattaaacttgatcataagtatgtatgtataggaaaaaacaaggtatatttgtgtatacatatatataaaaatcatatatgtgtatt

SEQ ID NO: 249231 - DNA, 346 bp, Homo sapiens
acatgtcacagaaaattcgtcttttattgttttcttaggtgaagaatctgtatttgttgatatatactgtacattcagcatttgtatttggtttgtttcatagctaatgaaatgtttatacatgaaaaaatgagtacagtattgaaatagtccatgtgctggcattcatactttttataaataccattgcaggcaatgaagttgtgccagaaaaatctgattttgagtacaaaaggaatacttagccagggcctcgagctcaatatatttattgaaaatgtcctaaattgccataaaacattataacattaaattactcatttcaataaattatgaattaaacaaa

SEQ ID NO: 249232 - DNA, 376 bp, Homo sapiens
ccctggctttcgctgcctgaacactggaattgctaaagtcagaagccgctgaggcgccaatctaaagctaggtacatttctaaatgttgaactgactgagaatgattaggtgctccaacacttgatttaatttccaaagaaagttttattccccatctccaccccttttaaacatggattatttgctggaggaggagaaattggccatgggtgtgcagtgaaacctcttgagttgcaaagccccaaattccaataagccaagatgagatgtttatatataaatgtcattatacgggagggggaattttgattctacaccttcccctcctcccatcttgcagggaatattcatttccttttgttttgatgatacact

SEQ ID NO: 249233 - DNA, 489 bp, Homo sapiens
aagtttctcaagaatatcgttttgatcaaaaatttagcccggcatggtggtgcacacctgtgttcccagctactcaggaggctgaggtaggaggattgcttgagcccaggaggttgagactgcagtgagccaagatcacaccagtgcactccaacctgggcaacagagcaagaccctgtctcaaaaaaatcattttggtggctcataaattatgattgtaaaactaaaccccctttttctgctatttaaaaaatacttatattgacattagcttaaaaaactagtgaaatccaaatgaaatttgaagtttagctagtagcaatctctcaatgttggtgccctagttttgacaaatgtaccgtggtcatgtaagatgttatcacttggggaaactgtactggagtatatgagaattagctgtattatctctgcacctcttctgccaatctaaaattattccaaaataaaagttttattaaaaatagtcat

SEQ ID NO: 249234 - DNA, 654 bp, Homo sapiens
atcagtgtgggtccataactcagaacacacaccctccactggcccgaggtcagttcctctgtcttttaggtctcaccagattcttgtgacccaggaaggtcaaagctaatatggaaattatgaaaaaataattcagctctttagaaccaactgtgtaataggctaaatttaggcttggtagtcattgtgatcattggtgtgattcgttttttggtttgcatttttttgttttttaggagacaaggtcttgccttgtcggagtacagtggtgccatcaccactcactgcagcctcgacctcctgggctcaagtgatcttcccgaacttatcacagggttctatcctggttttgctcatttcctgcctcagcctcctgagtagctgggacaacaggtgtgtaccaccacacccagctaattttttaatttttatttgatagagatggggtgccactacattgcccaggctggtttcaaacttctgccttcaaatgatcctcccacctcagcctcccaaagtgtgtgtgaacaggtgtgaaccaccatgcccagccttgatgtgtgtatttttaagatcttttaaaacttacatagtaaagttggcatgattttgttgaaatatgtcaaatttgagtgtgtttgtaatcaatattta

SEQ ID NO: 249235 - DNA, 106 bp, Homo sapiens
tattttcccccctgcttaaatctatgtttaacttttctctaattttgataaaattaagatgacttcatttttataaaagaaataagtgatgttagtgatggttttg

SEQ ID NO: 249236 - DNA, 2826 bp, Homo sapiens
  misc_feature (1817)..(1817): n is a, c, g, or t
atgatttacatttcaagatttcagttacattttttaaggaattcaacaattctgcatcatgaagtattctttcacacaaatgttccatagtcattagtttttacagaacccttttcttatattctgcatttcatctggaatactataagcacaagttcagtttggcattctgttctccactagtgattgagtttgaagcccaaggtcaggatattgattgatgacatttccctttaaagtatttgtatccatttgcaatttggggacagagtgattcccagtatggtgcaggaaataactaaactggaagtcagcctgactcagttttgtagttaattttctttgtgaccttgggcatgtcacttaaccttccaataactgagggagttggcccagaactagcacagtcttctaatgcagacattccacgattctctagggaggattcacttccatagaggtttaaaagtggatacatttttaggttaaatggctttgttcatttagtttttttctccttaacccattttggagcaataagactgtcatggagtaaaaccaaattacctggaactctcaaaaggctgcagttcttatcctattttttttatttttaagggaagggaaaaaaatggcaacaaacaaatttatatccatgagtcaggacaaatccatcccagttttctaacatacacagtgtacataaacatattcaatgaagcactgcagattcttaaccgaaaatggaatatttggtttgacttaccatcctaaatgtgggaagaactgtactttgatatatactttttgagtatttttagcaaaaattgatataagcagttgtcttggttggcaaggacttgtgtataggaacctggctcccagctcagtgacgagtgtattctgtaactttgaataagtcactgaacctttctagatgtcagtgtcctcagctgttagatttgatactgttctgattactaacagatctgtgattagacatttccatgcatttatttcaggcctcttcctgttctcttccttgagagattaacaaatatacccaccccttccctcacacagtctcaggcaattattgatttgtgagggaaaaggggtattttaaaacactttaaatgatacattcaagaaaattatctcgtattggttatcaattgatatataacaacattaccacaaacttagtgccttaaaataatacacatttattatcccacagtttctgtgagtcaggaggagtctgggcacttcttagttgggtcctttgcaaggctgcaatcaagatgttgtcctgggctggggtctcacttacacgcttgactatggaagcataagctactgagcccactgtgattgttggtggaacttatttccttgcagctggaggactagagggacttaatgtttttgctggctaggggctgccctttgctccttgaggccacccacatatccttgtaatgtgtgcttccctaacatggctgctggccccctcagaagcagcaagggagagaacaaggcagtgctgcagtcttttggaatgtaatcacataatcatgtatacataatcatgtatgtccatcatctttgctctactctggttaaaagcaagtcacaggtccctcccacgctcaaggtgagatgatcacacaagggcattgacaaccaggaggcaagggtcatgggggccgtctgaagcatctgtcagccacaccatatttcaggttttttttttttctgtatcttcctttggatctgtgaataagtatctcacttcatactaaagcctcaataancactgattgacagaaagtctttgtgctcatttaaaacttctcagctccacagagtatttgtaccatgcccttgttttatggagtccccagatactgatgagggcagggtttgagtttgagggctgttcattcttctgcccgccaaccccccaccccgcccccagcacagaactgccagtgttaggtgctcattaagtgtttgtcaaaggattataactgttgttccaattgcagcagtaagtaaatttgaagaagctccctgatattgagtgaattgtattctccaccccccaaattcgtatgttgaagctctaacctccaatgtgatggtagtcccagctaccagagaggctgaggtgagaagattgcttgaagccctggagatgaggctgcagtgagccttgattgtgccactgcactcaacctgggcaacagagtgagaccctgtctgtaaataaatatgtgtgtacagacatacataaggttcacaattcaatttaaaaaagagaaagtgaccatctacaagccaggaagagagcccccaccagaaccctatcatgctggcaccctgatcttggatttccagcctccagaactgtgagaaaatcaggttcgcctgtttaagtcacccagtctttggtatttcgttatggtggcctgagctaagacaggccctgtgttctctgtgtagcaagaggcaggaagctaagcacaaaggttgccagatagcagggactggctggctgttagtgagccagggccagtggcatttaattgcagtcattcccattctttgctgagctttggtcataactatttgtagaggacccctagacttttttttttttcttccaggacaaaagtgatccaaaacatactgtcttcagtttttgagcattggactaccaaacaggaacatttaaggaaaacaaaatgttgctgttgtaaagccttgatggtgggaagttatgtagtgaattctcaatttcttcttcctgcatcttgtctt

SEQ ID NO: 249237 - DNA, 245 bp, Homo sapiens
gctggatgcagaagagagagatacaagaccacatgatgaaggggccatcctcactgacttcaccacctggaaggaagctatggaggagaattgcccaaacaaatacaactgcatcaaattttgcctctgtaagaaatagatctttgttatgctacaataggtccctgagatttggattttatttgttatagtagctagcattatttttacttaataaatggttcttaataaatggtttacttaat

SEQ ID NO: 249238 - DNA, 1195 bp, Homo sapiens
  misc_feature (88)..(88): n is a, c, g, or t
tccccgattgcgacacttcaagtgaatgtagaaaatcttaccactgtttacattcctttaccctctcccctttatgttataattttcntataaatcataagacttggcctcccaaagtgctgggattacaggcatgagccactgcactcagccttgtgtgcgttttagagtcttaactagtagtttccccaataatgtaatgtgattttatctttgaaacatactgtaaggaaacttttgattttaagtaaaaaagcttaaaaatgattaatatctaaaaatgcttgtatacatatatatgtcctcagaaaaagcaagaacagcttgtggaataagcacgtctttaaggaattatcgatgtcagagtctatccatttaaagctgaagaccattacaggaaagtcatgttaaaatattcattggatatggtaaaggaggtactggtggctgggctggagcttgccgtatagaaaagtaattacttcagatctcataatgttaaattattggcttatttaaaaatttccgtggcagagaggcaaattaggtttcctctgtgacataacctatttaaccaatttttcaaaaaattgtactctatgagctttcttgttataaagctaaaaaatttaatttgtctaggcatgttgtaatggtcccagaaaatattactttgtcactggtgtcagagaaacctctgtcatcagcagatgtcctaagagtataattatagttctttacttaatccaaaatttgttctgctctgatatctataaatgatatgattattcaaaataccttgaaatgattccacaattagattaggtctgttgaagataacttattcttaaatatgagtaagattaaataaaagtagtttgagagttgttactccctgcctcaactccatggtattccaaaatgtttttgtgggcactttaatacttgtagtttgattttgtttgttagttttagaaatgaacatttcttagattttcatgggtattttttggctgtatttaaatgtaaatgatataaaagtaagggaaattgtgcaaattatttcttgtgtagtaatcagtggaagtgatcaaacagcttgaagcagtttatgatgagaaaatttaaaattgcaaatgacctgaaaatttagccagtctattcttatttctttaaatttcagaaatacttaaga

SEQ ID NO: 249239 - DNA, 683 bp, Homo sapiens
tccaggttatcaaacagaactagttattcagttggtttgggtgggtggagaaccaccacaacaaataaccagcctggcagtcaattcttcctatggactggtggtttttggcaattgcaatggcattgctatggttgactacctccagaaagcagtgctgctcaacctgggcactattgaattatatggctctaatgatccttatcggagagaaccccgatctcctcgtaaatctcgacagccttcaggagccggtctgtgtgatattagtgaagggactgttgttccagaggatcgctgcaaatctccaacctctggttcttcatcaccacacaattcagatgatgaacaaaaaatgaataattttatagaaaagggtatagtatcttgattttaaagtattttcttttatgtttaatttatttagtttactttgactagattttgacattttatatcaaaatattgttttcagtgaagaccaaaagcagaaagttttccaagatggtagccaatgatataggtaggaaatagaaatttctattttgtttctaatccttgctatatgcagtgctaacccaacaccagaattatccagtgcattgcatttttgtgtaaatttgttgttcctatgctaaaaaaataatctcttgggctgtgtctcttctaaactcattggggca

SEQ ID NO: 249240 - DNA, 557 bp, Homo sapiens
tccaggttatcaaacagaactagttattcagttggtttgggtgggtggagaaccaccacaacaaataaccagcctggcagtcaattcttcctatggactggtggtttttggcaattgcaatggcattgctatggttgactacctccagaaagcagtgctgctcaacctgggcactattgaattatatggctctaatgatccttatcggagagaaccccgatctcctcgtaaatctcgacagccttcaggagccggtctgtgtgatattagtgaagggactgttgttccagaggatcgctgcaaatctccaacctctgactgttcgccatggatttccctatcaaccctcagccctggcctttgatcctgtacagaagatcctggcagtgggaactcagactggtgctttaaggctctttggtcgtccaggagtagaatgttattgccagcatgacagtggagctgcagtaatccagctccagttcctgattaatgagggagcgcttgtgagtgccttggctgatgacaccttacacttatggaactcgtcagaggtg

SEQ ID NO: 249241 - DNA, 1019 bp, Homo sapiens
attgttaattttctgaggaagattttccatagttttctgatcaaccacactggcagaaatagataactagttctaatttccaaaaggtaagtaatagatagttaccacctgagtttctgcttctgcaaccttttttcactaggaattaaatgtatgtcacagcattattttttggacagacacttggtcattgtgtcaccccttggtgatgagtaaattttattgaaaatatacttgctgtttgattgacacagttctataaacttttcacaagaaaagacagtcttttggtgccatagactatatttctcattttgactctgactgttttatcaatgtgtgtctctggtcctaagcctgagtgattataaatgaattagcgtaaacccatgcctctaaaggaaaagcatctcccagcaggcacctggctagctgaaggccagcagtaccaatcctcctgcctgaagaatagcagtgtagggtcatatcagaaaacatggcccttttcctatgttggatatgtttttctaagatcagtttccacctaacaagtaattttttaattgaaaagcttttatttctaggtctgtctcatgtctttaataaatacgggaatgagtctcatttagttcttaagctaaagagtactacaaaaaccctgaaacatctctgagatggtacatttactttccattgttactcttgtataagacagcaacaggtgagtttgctctcatagtggaaattaaaacagaagcagccagccagcatatatttccttccaagattgtgtacaagagaaagcctaacccatggtggctgataatgccatttaatatatagtcacctaaatctttatgtgtcagctccattgcagaggactcagtgggctactccacacccaagcctgagggatgaggagatcattagaggagatgcgtgggactctcccacggactaaggaaagtgaactgttttggtttactgaccgcatatataaatggattcagaaaaaaaaa

SEQ ID NO: 249242 - DNA, 631 bp, Homo sapiens
gttggcatggggtgcctatgttagagcaatgcaacagacaagtgggaatgagcccacaaatcagagaggcagataaaatatggacacagataaccatgaggccagggcaatggtcagggctccaacatttccaaggagggccctggcagtagggatctgggcggcttcctaaatcaggaggtggcacctgaataggccttgaaggggattaacaacccagcaagaaaccgaagagctccttgaaagcaagccctgtgccttcctcatctcactattcccagcacttagccagggtgtgacaaacgctgggtgaataattctctacgtgtttgggaaattgtaactttttatacttggctttcctgaatgtgaccctgtaggcacatagctattttcccaagggcctgtgcaaagtatcattagccccattttacaggcacagagactgatggccagagaggaacagtgatttgccgaaagttacgtaggaagtcagtggcagggctgggctagaagccagggcatctgcagggcaaggtgctctctccctccagcagccccagccccagccccagccccagccccagcacagtgcagtacagatgggggtggctgtgagtaacagcggccg

SEQ ID NO: 249243 - DNA, 391 bp, Homo sapiens
cacaaaaaataataataaataacaaagtctgtgtgagaaatgagttgaagtatagataacacaaaattggcatgttattagttgttgttgagcctgggtaacaggcctattgtactgtttcttttattttgtgtatgttttaaattttctgtaataaaacatgtataataatacaaagttgatctacactgttagctcttaagatcttagtgactttgggggagcaaaagagagaaagtggttaccaggacatctgtgaagctggttctatttctaggttacacacgtgtgttcactttgtaataattcattgaactttacatgatttctttgtatacgtctttctgcatgaatgttatacatatataaaaatttaaatattacctatttg

SEQ ID NO: 249244 - DNA, 272 bp, Homo sapiens
ctccctgaccatagctctgaagttgctgagcagcttctattacatgattatcatgttttactttcttcattgaactgataatatgtatctgaaattactttgctcacttatttacaagtttgttatcttcctagaatgtaagcttcacgaaaggtgggatcttgtgtatctgttcatagtaataaacaaacatgtaaatgagcaaaatgctatatagatataaatgctctgaagaaaataaaaagtttcaaataaggactcagtaaatattt

SEQ ID NO: 249245 - DNA, 459 bp, Homo sapiens
cagtgaaaggattaggagaaaaaagcagagcaatttatataataccagtttaaaattaaggcagccgagaaactctgaaaaaattttaagaagctggaggggtttggccgtgtaggcatgagcaacttccatgtcctgaaagagacaggggaccccgataagagatgggttgggaggccgggcgcggcgcctcacacctgtaatcccagcacttcgggaggccgaggagggcagatcacttgaggtcagcagttcaaaaccagcctggccaacatggcgaaaccctatctccaccaaaaatacaaaaattagccaggtgtgatggtgtgtgcctgtagtcccagctattcgggaggctgaagcaggagaatcacttgaacccgggaggcggaggttgcagtgagctgaaatcgagtcacctgcactccagcccgggtgacagagcgagactctgtctca

SEQ ID NO: 249246 - DNA, 584 bp, Homo sapiens
ttctcccacaattctggaggctagatgtctgaaattaaggtgttggaagggtcacgttccctctggaggttctagagggaaagctgtatcttgactcttcaagctcctggtggctaccagcatctctgggcttgtggatgcatcactttaatatctaccttcacagtcactttgcttctttctcctttctctgtctatccctcctctgtgtctctcttataagggcgcttgtcatgagatttaggacccacctagataatccgcgattatgtaatctcaagatccttaatttaattatatctgcaaaaacttttttccatgattatctaatctcaagatccttaatttaattgtatctgcaaaaacctttttcccaaagaagttaacattcacaggttctggggattagcatgtggacaaatccttttggtcaccatttaatctactataacatcttaacttattacagtctacctttaagtaatattacttccattttactcttctgtgtcctattgttgtcatgtgtctcatttctatagaataaatttcacaatatattatttttgcttaaaaatgtcaat

SEQ ID NO: 249247 - DNA, 265 bp, Homo sapiens
ttttgtccaatggaatggaatttgaaattcctattatggttattttaaaggagggactgctaaatcatatagagatgtatgaccattgtgccttcctttcttgcctttttttttcccacttctactggagctaaggtgcatgaaagtgagttgcacttggaagggcacagtaggagcagatcattggatgtatccaaagagccaccatctgtcagctttcctgttgctttaagaaaacttgttttccagccctatcaagagagag

SEQ ID NO: 249248 - DNA, 390 bp, Homo sapiens
ctcctaatgactctacagttcctggcttcctcttgccactgactttcccctccaccgctgcctgggacaaccttacagctacagtgactttgagtcttgccaagacaagcccaatagttactttcagactcaagtgcttgccaagcctgaaatagtaattgcctgaagggttccaaaaagctgggctttatctgcagcagagactttagtaaatcaaaacacaggtcttatctccctattctctcccctctgttgtgtggtctcctaaatgaaaaatgttacctaattgcctaaaacagctggcttgatgtttaattacttcagcttgctaacctgatattctggaccaataaactatacacagggagtggataatgctctttacagatc

SEQ ID NO: 249249 - DNA, 252 bp, Homo sapiens
gagatagactgaaagttgggaggtataaaaataagataaggatgtgaattaaagcacaatgtctaaaataaagtaaacaataaaaggcaacattatcagcattatcaccatcatcatcattattgtgactactatggtaacagccttggtaatgaaaagaaagaggaaattataagactatgggaagaaataatatatagcacttgatcactagtaacaaaaacaggaagttcaggaagagatggtcatttt

SEQ ID NO: 249250 - DNA, 851 bp, Homo sapiens
gtatttatttgttcatttataaaaaataagacatggtctctgatctcaaggaatttaaaatctggttaaaaagacaagatatatatgcatgaaaaattaaacactcttgatgatacaagaaaatgtgtatcgagtatcaaatgaatagtatggactgtgagtgctgtgagaatttaggagagaggatcatagtgggccaggacaggggaagaaagctttgttgcccatgtgggacctaaattgagtctcaagcgtgagtgggattaaaatagtcagatatgatgaaaggtattccttatagatttcaggtcatggggtagaaagtgtgagcaaagatggagacaactcagcttttttttggagttggggtaaaagctgaagaattcatgctcattttgactgagaacaatttatgttaggaaagaggcgttgcagtgaaaaggtaggttgggccaaaattctttggtctttaaatgccagtcttctatctttagactttatctcttccattacagtctttaagtcaacgaaaatatttgaacaatgtgtgagatgatgacaagattaatcttgaagcagaatttaaggggaattggaaagggagagatttggggagtaaaacagaagtaagaagttattttgggggctgcctgcaataattctggcttatgtttgttcagactagtctaaaataaggggtggagcaaaggcaagcagattggggtatgtgaggcgatgtgaaacctccacaactgataggatatgagtaggcaagagtgagagtgaaatgaaaggtaactaggaagattaggctgggagactggaggagtgattatcctactgaaaaaaaa

SEQ ID NO: 249251 - DNA, 592 bp, Homo sapiens
ctcgactgactggctcatctccccttgctgtaactgtgccattcaaccccaagacaagcctgggggatggcgtgctctctcctttgtggagaaaggtatggaaattcaggattgatcccagctgcatagttcattaatgtcaaaagctgaacgcaaaagctaaaggcctgatcagtgatttgcacagaatgctgggcagcatccctagaactccaaaacgtcctgtctggcctggtgtgaatagccctaagtgtcccagtgtggactcaaatcattcttcctgcagcttgccccagttaaagaacatccaaactgttccctttgcaaaaatgacatggcagggtgcatttctacagatgcaaccctgatcctctgtgtgagctttcatcacatccctcgccctgctgggaggaggtaaggatcagagataggggccaagcaggtagccaacaaatgtgtgccagggccaagcaggggccaagacttcttggggtctggtgccagagaatgctaaatgggtgtggcttaaaattaatgatggagaaatgagatcttctaggccattctaggaagtccagctagcaaaaaaaaa

SEQ ID NO: 249252 - DNA, 459 bp, Homo sapiens
ttcacattcactcaccactcactcactgactcactcagagcaacttctagtcctgcaagctccactcatgatatgtttctacacaggtgtaccatttatcttttgtgctgtttttactgtaccttttccatgtttagatatgtttaggtacacaaatacttacaactgtttaccgttgcctacagtatccagtacagtaacatgctgtataggtttgtagcctaggagcaataggctacaccatatagccttggtgtgcagcaggctctaccatctaggtttctgtaagtacactctatgatcacacaataacaaaatcacctaacgacacatttctcagaacacatcgcatcattaggtgacaactgtaaaaagcaattgtcagtggttatatgtgtatgtgtaattatgtgagtatatttatcaataaactatataaaataagtacttacacaagca

SEQ ID NO: 249253 - DNA, 430 bp, Homo sapiens
caggcattcatggctgtgcttcagaagtggctcagtagaaataataataccaatacattgcatctcttttgtattttttttctccagtgggcttggagaactttatccagataatctcatttttctcacacatcactgtgttagagaagaaggcccctgaatttacccaagctggttctctgctatgaccgtatatttgaaactagcaactggaaattatagtgaatagagcaagaaccccaagaatggatctttctgtacctgttttagattcaggtaactgagaaaagtatgttaattgctttttggggacatctgttcctagcacagtgctcagtgaaatcccttgggtttatgagtacctgacttggagaagaattataagaaacaaaatttgggggagaatttaaaatgtcattatttactttac

SEQ ID NO: 249254 - DNA, 312 bp, Homo sapiens
actcctggggctggaatctgcccccaggcttgggtcaccaggcacagcagaaggaagggcctgatcaggccttctgcagaattcaccccatctgctctacagccccaaatgcccctaaacagggccaaggccggcccttcctcagccattgacgctcaggatgcagagtggggctgcgggttgaggcagggctaccagctgtgtggcctcaggaaaagtactgacctctctgagtttcagtttcctgaaaggcaaagtgtgggtaatagcacccagggattaaacgagatagtccacgtacaacacttagca

SEQ ID NO: 249255 - DNA, 721 bp, Homo sapiens
aaactcctgacctcaggtgatccacctgcctctgcctcccaaagtgctgggataacaggcatgaaccgccatgcctggctaattttatcacctttctagacataaggggaggagaaccgggaaaaaccaggtccaacccccacttctactccctgacccgctgcttcctctagaaaccagtccccacctgaggttgcccttcatcagaccttgctgggactctggtccctctggtgcctacctgccctgaccccacctgggccttggtacaactggccctgaatgcctgccccatgaagctatatagcccaggctccccattggaattccctgttctgggaattgacagagagaagaaaacccctgctctcgtctgtctctgctcatccttctcagtggacagggcatcccagggagcaggaggcctgcagcttgcctgggagtttcaaactggcaaaccaagggccacatttatattcatatgtgttggttcggcccacatcatttgttttaaatgcaagtcaaattttaaaatctggagattttacataaaaatatatttttccagcttttcatagaaatcagggccaggcgcagtggcttatgcctgtaatcctagcaccttaggaagccaaggtaggaggatcacctgaggccaggatttcgaggctaggaggttgagactaacctgggccacatagcgagacccccttttctacca

SEQ ID NO: 249256 - DNA, 491 bp, Homo sapiens
ttttgggctttcaattttattctattgatctatatgtttatccttatgtcaataccatactgttttgtttattgtagctttgaaataagttttgaaatcagtgtgagatcttcaatttagttctttttcaagattcttttggctactctagttcctttgaattcccatatacattctagaatcaccatgtcagtttctacaaaatagccatttggaattttgataggtattgcattgaatgtatagatcaatttgatgagtgttgctattttaacaataacaactcttccaatccatgaacatgggatgtctttccctttattttggtcttttaaaatttctttcaacaacgttttgtagttgtacaaagtgttacattacagcatcatagtattcactgtgaaagtcttataatttttcattaaatttgttcccaagtatcttattctttttggatgttataaataaaattgctttcttaatttcaatca

SEQ ID NO: 249257 - DNA, 712 bp, Homo sapiens
cacttttaaattaaatgcatgttgtggaaaaacagtcttttaaaatgaaatttcagattccatttgagaaggttctgtagatatttcagtccatataaaataatacatctttactaaacttatataaggggagagaaagttatgaagttttggacattactaaaagtacagtatttgatttcactttcaatgaatgtgaagttaataaaactaaatctcataatgctcttggttcctaagaatgagtagtaatcatcaactttataatactccaatattccgttttataataattcagagccctgtggcttttacacaccgttaattatgtactctgttggaagtgcacatgaaaagtgaagaaaagttcctcttgtgattaaactaatgggaggaaataaatcaacaaagtctccattaagttctacattttgagaccttttaaaaattcccctcacaattctttaaggagcccccctttttatggaacatgagcctaaaaattatagaaagaagaattttaagttaataaagtttgtatttataaatgctgaaaaaatacagaaactttctgttccaaatgtgttgcctttgtgtattttataatacagatactacattgtaaacatttccattgttttatgatttagccagtgattccccaaagcagcctcttagtgttttaatatattaataactgttttgttaaaaa

SEQ ID NO: 249258 - DNA, 708 bp, Homo sapiens
tccactgtgaatcccttggggcagaagtcaggccctcccaggacccaccaatgggcttctgcagcatgggcgcccagcctatatccacgtgaaaaggaatgggaggaattcatgacaaagggctttataaaatataacgtatgaccgtgatcataactagcatcatctctattttgagtggctcccaggatatgccattgaattaggcagtaactcatttctaatcctcatgatgaacttaggaggaatttggcaccattttccagaagaggaaaccaatgtgcagggaggtgaagcgatttgatcaggtcatgaaggtaggaagtggtccacaggactttacagcaggtctagccctgtaacaggggagaccaacaccacatcaggaaacaggaagacgttggaagtcgtctctagggcagaaatgtcccttgtaggggaggaggggaaatgataggaagttcccggctggcatgacaatgtgattatttcaatgagcttcttagaatggaaatattggggccgggcgcagtggctcatgcctgtaatcccaacactttggggggccgaagcgggtagatcacgaggtcaggagtttgagaccagcctggccaacatggtaaaaccctgtctctactaaaaatacaaaaaaaaattggccaggtgtggtggcgcaatcctgtaatcccagctactctgaaggctgag

SEQ ID NO: 249259 - DNA, 410 bp, Homo sapiens
tttcaccatcttggccttgaactcctgaccttgtgatccactggccttggcctctcaaagttctgggattacaggtgtgagccatcgtacccggcagccctggtttcttcttagttttattggtctgtgttttgatcagcacagtcacttttttgttctctttcctggtaagcagggagtcaaaacaatagcaagaaaatgccagaaatagaatttctactactttgtaaactctaggctcgtgggtctcctagctctcagtacctggctcactgtaggatgggtagatgggtgaatgaatggataaagaaaggaagtttgttcaccggagaggagatgaatttcagtaagtttcatgtaacagtgatcaggagaaataaaggcagttataactgtgaccactctgttct

SEQ ID NO: 249260 - DNA, 769 bp, Homo sapiens
attattcattttcctaatgcttttaacaccaattgataattcttgcctgaatcagtaactttacagaactgtcatattctaattctgtcattccttccacattagctgacatttgactaaacacagctcttctttattaactgggactattcgtagccatcaaacacagttctgttggacaggcaggttaaatgttgaattttttactttttaattcccaatttcagagtaagagttgatttaataaacaaatggtggcaaatgaaccttttcctttctttcctttttagaaatatttttgtggactaatggagtttcatgaattgaatgtttcaattaactacagtcattattctttttatgtttaatttgtttttgttttacgttcaatttattaaaatgattgccagtgatagttccttgtggttggttcctatcttctttaaatataactctccattaattgtgagcactttcttgcttccttgcacagcaaaatgcataagcttatcttgcagcttccttgtcccaaatgtcaatcagccacttcactaataagccctaatttcttttggtgggaatgatatagacatgaaattcttgtaacttagaatatctatggtgtgctggggtgacaaggtttatggaccttttcagtagtctatttagttcatgaatttttaatattgaaagtttgtacaatgaaaattcagatagtaatggaaaactgtattttgaaaaataatgggatgtattatatacttaaaaa

SEQ ID NO: 249261 - DNA, 220 bp, Homo sapiens
tgatatcaagtttgaaatttgttgaaatgttttcctattgacctacttataaatgggttatttacatattcagcgtaattacttgtgcttaaaactgttttcaagataaatttgaactatgtcattgttcatataaaagaaagatgcttcttttcaattaatttgtattagttaataattctacaaattgtgtttatttcaatggagattaaagaatata

SEQ ID NO: 249262 - DNA, 541 bp, Homo sapiens
aaagtcttaaagtagtagaaagactggatctgattggcaggtcaaaaaatccacctttgcttctctttggagaatgagattgtggaggagcaagaatggaaggaaggacctcagttgagaggactttgcaatcctacagatgagttgggccaaggtaatagaagcaaaaatggagatggactaattctgaatccttagggggttgagccaagaggcctgcaaacagattaactctcgggaataatggaaagagaggaatcacagataaagcctagattcctggtttgaacagttaagtaagtggtggtattattctttgagatgaggaagcccaggagagcaggtatgcattatgaatgttcagacaggtggtgacacagaaaggagcattctacaaacttggccacgtcactcttcttattttatagagcatctcactgcatagggttccaaggaacatgcattgagaaatagtggcttgtgtcactgagctttgctaacctgaggcatccatttccatggtaggcgtttgttttcttaa

SEQ ID NO: 249263 - DNA, 280 bp, Homo sapiens
tttacaaatacctctcttgttccagttacacaagtcataatttactgagcacgatggtaaaatcctttaaaaatgtagtaaaaagaacagagtatgcatatgcaaaggaggagattggggaaagcaaattagaagtctatgcattctgtagacagtgaaagctggttcaagcagaatgaataagaaagtaatttaaaaagaaggcatcacttattgactaaggtcaaacaggaggaatacacataaaaaccagaaactaacttcaagcagaatgaataag

SEQ ID NO: 249264 - DNA, 571 bp, Homo sapiens
gagaaatgtgaatgtttaattcattacaagctaagcagaaggcttttgcctgggaaattcccattagattgatgggatgggagagcaaggagaaataggagaagcttaatgaagacgttgctcctcacaccagtatgtggcacttactccctgccaaaatgtttactcatcatcttacagatccttgcatgctcattatttatagataatattgattttttaattttaattactagagtatttcactgccttgcttcttgacttacagagcaaaagccttcatggtctttttaagccatgcgtgttggcaaataagtcacagaaggttacctttaggtttggtttggaagcatgctgtctccaaagtttgataggagatttggaaaatgggccatagttgatgtcatcgttaacctgcttgcaagttctctgtatatgtgctgaattacaataaaaagaagtgcctgcagggtggtgttacattttaaatccctccaaattctcatcttttcttggctataatgcagtatcacctattaatttctttaatgactttacctcctcaaattta

SEQ ID NO: 249265 - DNA, 872 bp, Homo sapiens
gtggcattcgagaccttctgggtgggaaggaggcagccatgtggtgatctggggaagagtgctgcaagcagaaaggcaagtaaaaacaaaagccctgaggcagaaatgtgctccttatgcttaagaaacaccgtgaaggccaacgtggttggagcaatgtgagcaagaagaatagaggggccttgggaacataggtagctgagtcctcatggatcaaggcaccttgactttaagtgtctgttacaccaaaggttatggcaaactgtgtctgcagcccacagtaaaatccagtttaaggctctccacactggagtgcagctatccagtttttcagccatttccaaaaggaattatattgatgtgttagttgacaagcctacaatgaaaagatagatgggaaaagaagaccatcagacaggtggctggatatgtggagacaagcacgaagaagtccaggctctgtcacgacgttgctgactggcttctgtcacattttcaggcatcttttagctagaggtgcgcgtgtgacaccacatggactgtgagaaatagtcaagttcagcctagtgacgcttctggcaaagcttgttttcctgatttttaaaaaaggagttgggggagtgccatgccttttgtccttcctccctcctcctgcctggaacatggatgtgagaccaggaagtacagcagccatcttgtgaccatgaggactaaaggcctgcgctgaggatggtacagtaaaatgaaagaagcagcctggatgcctgatgagcagctgtgccagccccagggtcatgcaaatcagtgtcaatcattgtggttctggttttctcctatttgtagccaaataaattccttactgatataggcag

SEQ ID NO: 249266 - DNA, 280 bp, Homo sapiens
accaagtccatcagagcagcctggacataattgggaatggtgcctgcacttttaagaggcgaacgagtgcaatgaccagttgtagagaagagtttatgcatggccttcggagctaagcagtgacctgaattcagtatgtcaccaaatttggtgtgctttctcctttgcctgctgcttctttcaagtaggacatggagacaacagccaaatttgtgcttcagtgatgtgaccttcccttcccaggcaggcaaataaatttagttttgtttctgattatcat

SEQ ID NO: 249267 - DNA, 224 bp, Homo sapiens
aacaacacaataaaataacaaaaaatgtaaataactacttctggggcagtgagagaacattactaccagtctgataagattatattctccttggaatatgcctccatatcacccctgaagtgtataagtggtgtttgcttaggggaaagaatgacttaaaatttagtaaaagattaaacaccatctaaaagattaaatgaaggatcattttacttgacattttc

SEQ ID NO: 249268 - DNA, 333 bp, Homo sapiens
ggagtcattctgtttattcagtacctcttttgtgatatatcctttatggttggtgttcacttgtaatgcaaaaatctttacactttgtgccgagtcccataggtccatccacatactttctcatcagacttcctagtcctaaactttctaacatttcttcttccttaaagtaggctcttctactacttatcactgctataacaaattaccataaacttagtgactgagacaacagaagtattgtctcttacatttctgtaaaagtctgacacaattcttactgtgctaaaaatcaaggttttagcaaggctctgatcctttctggaggcttta

SEQ ID NO: 249269 - DNA, 411 bp, Homo sapiens
gtaatcctaagtaaggggtgatctcttgcaaaatactaataaccttaatttcatagaggaaagtttaggagtctggtctcatgggatgttattcaaagttgacagcatatcgtgaccatacaaatgtataaaagtgacattttggggttatacatctttagaacgtggaggtaaactcatactctatttgcagtgttacatgattatagaatcacatcctattttactcctaagagtagtggtcaattaaatagctttttttcacctactttagtttagggtaccttaagataccctattgagcgtgattaactattatattgtaaaaagagaaaaaaaggactactctaggttagtctatattcttgaaagattttgactgattttgagcttttgatatggtaggaaaat

SEQ ID NO: 249270 - DNA, 317 bp, Homo sapiens
agtctcctgtgaagctggttttatatactcggggaagcaccaagcccaagcagttttgaataccagtggaaaaacaagactctcagcagttccaggaaaaataaattattaaagccgaaagagatggtggaacaattcatcccccaaatgtacaaaggattcttgggaaggaggaaggcaaaatgctttttttctttcaaccaatgccattaaaaataaaatttacattttactttagaaaactggctttccaagttgaaggttgtgacatttggccacacacctttacttatacaaataaacacattaatctcaat

SEQ ID NO: 249271 - DNA, 392 bp, Homo sapiens
atttgattgtgccctttcaggatgacagaggagtttataacactgtccttccaaaagtggtcagtcactctaagctttgaagttaacacaacctacgctggttgatctcttaagaaacaccacataccattttttcccaaggtttccatttggaaaatagttattagtaccatggtgaacaggagttagaagatgttttctgtaaaagggcaattagtaaattgttaagatttctgaaactttgttggaattacttaattctgtcattgtagtgcaatagcaaccacagatcatgtataaatgaatggaaataactgtgttccaataaaactttatctacataaacaggttgcaggctggatttggcttttgggtcataattaaccagcccc

SEQ ID NO: 249272 - DNA, 504 bp, Homo sapiens
cctttcttgtttttgagccttttctggttgtgtttttttacccattcatctcctcctaaccttttacctggttaactcctagtcctctttttaggttgtagcttagaagttactttcttgaggattcacaagtgtaaggtatttctaaaggaccctatactatttttttcataacacgaattactctgtgatttcattgactgtaggcttttgaaaatatgtggaagatttttcgttgttacagacttggggcagggtgttgctgacatctggtaggtgaaggtgaaaaacaataaatccccactgaaagaagccactcagagcaatcagtttccttaatttattaaggcatcatataactgtaaagccatttcagatacctttgcattttaatttgctttgatgataatgattatgttaatattatcatccctttcaaatcatgggtgggtctatttgtgcatcaataaaagcagtctttgatttccctttccaaggtcaata

SEQ ID NO: 249273 - DNA, 394 bp, Homo sapiens
gtatagaaaatacaactgatccacagtaagagagcagatcaatggctacctcgttgtgggtgggagcaggaaagaagaaaatacaaaaagggaatgaggaaacctttgggggtgatggatatgttcattatcttgactgtgataatggtttcacaggtgtatacatgtcaagacttatacactttaaatatatgcagtttataatatgtaaattataccccaatgaagattttaaatatgtgtataggtatatttaaaactgttaagaataagtttcttaaataatattgggcatataacaacactaaagttagtcttagccctaagaatctttatgccaagaaagataaattttgttgtttaaaaataaaacaagatgcagttccttacctca

SEQ ID NO: 249274 - DNA, 337 bp, Homo sapiens
ttcggaatctcgcgcggcccgtgcgacgtcgtgcgctgggaggaaagttggagctacctctcgaagtgggggaggctgcggccgggagggcccctttccctctcgctgccccgcgagggaggctcggcccggccctgggccgccgccgcctctctgtcgcactctgtcccatttcctccttgtggcctacgcgtctcccgccgccttagctggcgaagcctgtccccgtccgggtgcagggtcctacgggggggggggaaggggctccacgccagaaccgccacagacaccctcctccctgcagtggaaacgtgtcctgctgagcttccgggcgctc

SEQ ID NO: 249275 - DNA, 679 bp, Homo sapiens
ctgtgaagaacatttgaatcgagactctccattgacctggtaaaacatagaaattggttacattaactcaagttgtcaaacttcatcataaaatgtgtgtgttttagttactgtgttatagtatctctgttaagtggaaaagattcttcttatcaagtgtacccaccacctggagaacagggaaaaggtacaaatctgtctttattctcatgttttttggatgaggtattttgttttggtggtctttatgtatactttggcttatgggttgcaagagccaaagactctgttaatctttcatttgaatatgctatatgaaattgctttaagatatagagaaggccctattgaggcttttaccctgagctgctgggtgatccggaataggtgagaaggcaagatcctgtgaatactttttcttagtttgatctgagatcatgccattgcactccagcctgggtgacaagagcgaaactccgtctcaaaaaaaaaaaaaaaaaaaaagcaaataaccttaccatagtttacaaggccttgtatgatctgacccctgcttacctcttagtctgatctcctgccagtatccccttgctttcctgtgttccatacattttgtacccttacataatgctgttccttctgtctggaatgctttcttcaccagcgccctttccctgga

SEQ ID NO: 249276 - DNA, 153 bp, Homo sapiens
ggaggaggcggaggagcagcagcagcagcaacaacaacaacaagaggagcagcagcaacccaattaaacatcttaaataaagattttggtatcttggccaggcatggcagctcatgcctgtaatctcagcaccttgagaggccgaggcaggtg

SEQ ID NO: 249277 - DNA, 462 bp, Homo sapiens
ttcctgtggctgagctccactggctcctgactgcctgcttggtttgtctgccagcttgccttacccttgggcttcaatcttcacaatcctcataatcttgctctgagcatagggtaccatgcagcccaattctacgtggttcatctgctcctgacttaactgaatctacctcttacttgagccccttatattaaagagggtcgatggcttttataatgaaagtgactgcaatacaaatacattttaatggtgtcacaacctttaaacattagcagtccaggttgttcaaggaccaccttaagttctgaacttagtgtgtagaaaagtttccacaagtaaaaaatattttcatgcttctgaatattttatgggttttgtcctacataggaatacttgctatctttattgaaaggggtatgtggaatcaaatatctgaataaattatgtcatatatatacagca

SEQ ID NO: 249278 - DNA, 470 bp, Homo sapiens
cagtctgtacacctttattattagtttttgagttatttatgtaccagatattatacttttaaacattttaatattctctgatctttacaattatttatgttcaaatttgtagttgggagttttgtttcctacttaagctcaggacttgataccctctgagttgagtggctttgagtgacatgctaacagcaatttcatagtaaatgtaaataaggtcagaggatctaacatagaagctgatgacgcattaatgtaaaaatggaacttatttttgtcaaaaataagatgtacacttgtcatgttttatatacgttgaccttttgtgtttattgctgttttgaatagagccatgttcattttctttccagttagagtaagtacttctgtggttaatgtatatttttattctggcttttaaaatgggaataatttgtatgtatctgtgcaaataataaatgcgcatttggaaa

SEQ ID NO: 249279 - DNA, 504 bp, Homo sapiens
agtgcgacaaggcaggccacgccccctcgctccgcctccgcagcttcgggtagacacacacaaacaaccagcttgctgcagcctggcacaaagagggcgcactgcgcaggcgctgccagcgagctcttttgggaagaatcggtcccgcgaacaatgaaattgggtttccgccccaccctctttactcctccccagcacgcccctgcgcttcgccgggctagggagtggtggtactgaaatgtcccggcggagtttgttgatgggggtggggaagggagggggcagggggagggcggcaggaagaacgggggctgggaagaggggatgactttggcaaggccacggttgcctcctccgctgctgaccttggggaagtatccgttttattttcagcccaacataacagcgttatcattttaaaacaaagatttctaagtacgctgtaaggatttcttccctagcaatcgtgaagaaaatcagtctacatttaaattttatctactg

SEQ ID NO: 249280 - DNA, 392 bp, Homo sapiens
tttacaaaaacaggcagcagtccagtttgggttaaagggccaaacgttactgattcctgctgtaggtagtacttacctgaaatagcaaaacctgggttgtaaagcaaggtctgtaattaatttccaacagttgatcagccgtataaccttgggaagtcatcctacctttactgagcttctccattctcttactggactaaacctatacaaatggggacctgtatgtgtgtgcaggtgaaagtccatgagtgtgtgagagagaacatgcatgtagctttcatggatagactttggaccctagctagcccagaaggtgtgaccaatatgcttatacatgtatttatgtttctcataaacgctctaacacttcatgagatacagcagaaacagtt

SEQ ID NO: 249281 - DNA, 503 bp, Homo sapiens
aaatcaggtccactattcatttattttgttttgtactttcatgtaaatgttttcttgtatatatagatatatgaaaaatggaactattttcttacacatactatgcaacatgtttgtaaaattgcaatattaccaaaattacaaaagctgtgcttttgtactctatcttgctttatgtaaaatcactttttctatttaaatggactgtctgccctataaactgtagataacatatctattcaaaaatcagtctattgtatcttttgtttagatggaacttaattggggtatattttgggggagagaaaatgcagcaaagttttggcaattggaaacctttttttctctgaaatgagaccttttgaagcatgcaatgagctcatataatttaagatctctcctgtgattcttgtaatttgtcctaattttggtgctactatgtaaccatgattaaatgtgatagtcaaaacaaagaggataaaaacttacatgatatcatttca

SEQ ID NO: 249282 - DNA, 1085 bp, Homo sapiens
ctcaacttttttatttttaaacaatctcaaaccctcagaaaaattgcaagtacagtacaaaatttttttatctgaaatatcttaatgtaaatagccaacaaaatgccccttcaccattaactatattattgtgtattttctccaatgagaacattctcttacataacaatacaatcataaaaattaggaaattattacattgatacaatgtaataatgtcatctaattctcaaacccattcacattctgctatttgtcctggtaatatcatttttagcaaaatgatacatattttgtgaatgctataaagaaggcaccaagattaactttttaataaatgaatattcagttgaaataacatcatttatttaaaaggccatcctttccgtgctccattgcagtggtacctttgttgcaactttataactttgttataaatcttgatgtaaagtaacgtgagttttacaactttgtcttcttcaactttgccctggctattttggccctttgcatttattctcatatttaaaatcagattgtcagtttctataaaattatgctagacttttgattgggattgcattgaatatatagctcaaattggtgagaactgaaagcatattgaaactacaaaacataatatatctctccatttatttaggtttttctttaaattttgtcaaaattgttttgtagttttctgtttaaaaattataaacttgtttcactagttactcctaaatgtttacttttttgtatcattgcaaatcatatctttattttcattttataattgtttgtggcaaaatacagaaatacaatttttgaacatagaattatattaaattgatcatgtgtcaagcagctctgataaatttgctcattaactgaaataaaataatataataaccagtgtatagattcatattttttctacctattaattatattggcaatgagtaatggaaattctatttcttcccttttaatccttatctttcttattctgttttgcctgtgatactggctaggacttccagtacacggttgaacagaagtgatgatagtagacattcttgtctcat

SEQ ID NO: 249283 - DNA, 404 bp, Homo sapiens
ctcaacttttttatttttaaacaatctcaaaccctcagaaaaattgcaaatttgaagcctctttcctgaaatctgcaaatttagagagagacattacacaatgaggaatggcatcctgatcttaccctgtttgaaaggaaaccaatggatagattgaatacttcttttcccactaacatttatcattgataaccattcccttcttctcaaaagttgttccctggctcccaaaatatccattctctcctcactctttgcttactacttgggctccttcatggttatcttccaccaactccttaaatgtggcagtttctaatgtcacagatgcttcctttctccctaaggggagaagttaatccccagccggtctattcaataaaatccttaattattagtctaaa

SEQ ID NO: 249284 - DNA, 477 bp, Homo sapiens
tttaaagtacagcacatgcaatacataagacaatttttttccctcaaaagtaaaaattctcgtggaacttttagatagagaaataaaaatgtaggtttgaaactggctgcaatcttcatgtatttcaggatatccacagaagctgacttataaaaagcatttatattccttaatttcaacatagatgactaaaagaaaattaagtcaataactaataaagttagtgaaacaaacacttcctacttctagagaagctttcacccacacactataagaccaaaagacatatttaaccttcagagtgcaaataagcccacacatttcaagcagcttgggttttcaaattctgtgcatgttacctgtttcccatgtaccagaaaagtagtaatgtgtggggctatagaggaagaaaatttctgggtaaatgcagccccgtagcgcaccgccaacctgggtgtgtcagtggaaagccataaa

SEQ ID NO: 249285 - DNA, 709 bp, Homo sapiens
gcagcatcttttactcagctgggtagtttcctccatatcacgggcttgagcaattactggtgactcttggatctataatatagctagtacagacttccttttttagcttcagacccacgtatcccactgcctgcttggcattttcacgtgcgtggtttatcaaaagtatgtccgaaatagcccggacattcttccgtcttcctcaaacctgttcagcttacatttgtgttgatgaatgccaccagcagccgactatgcgtgggagccaaccttgaggacacctgatctctcacttcttatgtcagatggtttgaattcataattctaaatatccatcctctcttgtttattagcattgttgttctggtccaggccttcatcaataaagcaattgcagcagcttactagtaggccactttgcctcatttgagacagaatttttccattatacatacctgaacacataactcttgcctacagctatggttcacaaactttactatgcataaaaatcccttggggtgctttttgtcatccagtccagggactgattctgatttcagtagggtgggagggaacccaggaatctgtatttttaataaacatttcagttggttccagtaggagaccagtctgagaaacaataaagtccaaacttatcacagcacccaaggaacaagctgttaattcaactacctacagactctta

SEQ ID NO: 249286 - DNA, 695 bp, Homo sapiens
gcagcatcttttactcagctgggtagtttcctccatatcacgggcttgagcaattactggtgactcttggatctataatatagctagtacagacttccttttttagcttcagacccacgtatcccactgcctgcttggcattttcacgtgcgtggtttatcaaaagtatgtccgaaatagcccggacattcttccgtcttcctcaaacctgttcagcttacatttgtgttgatgaatgccaccagcagccgactatgcgtgggagccaaccttgaggacacctgatctctcacttcttatgtcagatggtttgaattcataattctaaatatccatcctctcttgtttattagcattgttgttctggtccaggccttcatcaataaagcaattgcagcagcttactagtaggccactttgcctcatttgagacagaatttttccattatacatacctgaacacataactcttgcctacagctatggttcacaaactttactatgcataaaaatcccttggggtgctttttgtcatccagtccaggcaccccctttgtaggctgccgtcctttccgtcaagcccttctttggcttattatttttcctgccaggaggttacagcaagggctcggtcttgtatacaatatagttcttgatccttttagaaggcaatgtacaatgtgttgaaaaaaaaa

SEQ ID NO: 249287 - DNA, 300 bp, Homo sapiens
taccaggagggggaattggaagactaccctaagcatgccgaccggagactgtgtgtgtgtagtaggtatttcttactgggagatcacggaaaagcaagtttgagaaacactcccatcagatgggtgggccgaggataacctcaaagcctttggttctccgaataggtgcgtaggactcacccaggcactctttccttttttaaattgtggtaaaaactacataacagtggccaggcgtgatggtgcacgcctgtaatcccagctattagggaggctgaggcagaagaactgcttgaacca

SEQ ID NO: 249288 - DNA, 762 bp, Homo sapiens
gtacaggccgtagacctatcctctacctacattgactccccaggttttcttagtccagttgtttaaactaccctgtacctgctgataactcctctaaattctagactggtacatctaattgcctcttaatatcaccagagtataaaataggaaccccaaatttaacataccccaaacctgagattcctctttcctgcaaatcctgaccttactctgtggaagctagtttccaagatgtcctcaatgatccccacttcctagtattcacacccttatgtagtcctctcccacaatgagtaaggctgacctgtgtaagcactagtatattgcagaaatgatggtgtacaacttctgaggctgggtcataaaaaaggttacacgtttttttgttgttgttgttgagacagagtttcactcttgttgcccaagctggagtgcagtggcgtgatctcggctcactgcaacctctgcctctctggttcaagtgattctcctgcctcagcctcctgagtagctaggattacaggtgcccaccaccacacccggctaatttttttttttttgtattttttagtagagatggggttttaccatgttggccaggctggtcttgaactcctgacttcaggtgatccaactgcctcagcctccaaaagtgctgggactacaggcgtgagccaccatgcctggccaaaggttatggtttctactttgttctctcagctcacttgcaagatccaagtgagctgaggaccatcgttg

SEQ ID NO: 249289 - DNA, 307 bp, Homo sapiens
cggcccgtggccaggcttgcaagcctgcacaggttgactttaagaggagttcccctttccaaaaaaaaaaaaaaaatggttcaggccaggcagcggtggctcacacctgtaatcccagcactttgagaggctgaggtgggtggatcacctgaggtcaggagatcgagaccatcccaacgatggtgcctcagcctccaaaagtgctgggactacaggcgtgagccaccatgcctggccaaaggttatggtttctactttgttctctcagctcacttgcaagatccaagtgagctgaggaccatcgttg

SEQ ID NO: 249290 - DNA, 223 bp, Homo sapiens
caacgatggtcctcagctcaacgatggtcctcagctcaacgatggtcctcagctcaacgatggtcctcagctcaatgatggtcctcagctcaacgatggtgcctcagcctccaaaagtgctgggactacaggcgtgagccaccatgcctggccaaaggttatggtttctactttgttctctcagctcacttgcaagatccaagtgagctgaggaccatcgttg

SEQ ID NO: 249291 - DNA, 373 bp, Homo sapiens
aaggcagatatgaaagagccatggactgctgacctttgaaccctgagaggagtgcagagctcactcatattctaatgaagtatttttctacccttattatgattctgactcactatacttcttatcaaaattacatgatgaggaattgtatgtttgaatagcagtcaaatgagaagagactttatcatttagcaaatctatctgcccaatttcgtagcttgagacaatgcaaaaatgtcaacccatgatctctatcccattttcttttgattatctctacagcttgtaaaaatctctgtactttttttccagtttaattctatctaggttatattatacattgatttagttgaataaaatctattacataata

SEQ ID NO: 249292 - DNA, 393 bp, Homo sapiens
tttactgagggcttcctatggaccaggcactgtgctttgcaacaaaccagcatattggaaggatcgccagaactgaacacagatttaacatatcaatctgtggggctttggcaagattcttcaccactctgaggctcaattgcctgatccctgatgtggaggtagtattaacagtcttgcctgcctcggggagttgtttgtgatgacatgcactgtgagcaggatatggctccatggtgggagtatacgctaatgtgtaagattacaggttcactcctcagcagccccactttataatcccagaagaaggcctgcgagaacacaatctctgcttcacttcctggtgtatctccagcactggggcccgccagtaaacatttcctgatgacatga

SEQ ID NO: 249293 - DNA, 409 bp, Homo sapiens
gtaaaatgtgtttaggttaaatgtgacaatgttattgataggatacttaatacttttagtctttctgtggaaaagcaataaaagtaggacaagtcaacaaaccgtcttttcaaagtgatgttaggtgaagaccaccaccttcttggagaagcaggagccttcaggaagtctgagatctgcaaaaggaggtagtggaggaacaaaagggttgcatccctcatatgaaggacatttgggtaatgttttaaattataaagatggaaccataggactaaaagacagtcagtttgaagatatcaaaacttctcaattttgtttatttcatgtacagaacattaatttactgataatgagcaaatttctttgtaagtactaaagatgtattaaaagaatgattgaaataatgtga

SEQ ID NO: 249294 - DNA, 340 bp, Homo sapiens
tcccagctactcgggaggctgaggcggaggttgcagtgagccaagatcgcgccactgcactgcagcctggcctacagagcgagagtccgtctcaaaaaaaaaaaaaaagtgattactacccacccttgtcccatggaatcactcctattttgaagccttgaaaatgataggttttgaatatacctatcccttcttttttgttttgtttcgtctggttctgacaagtcattgtttcatatatataataagtatatgcaacattctaacgttatggggtataatgtactgttttgatatgtgtatacaatgtggtatgattaaatcaaactaattagcagat

SEQ ID NO: 249295 - DNA, 500 bp, Homo sapiens
aaagagtggtttcttgagatagaatttactcctggtgaagatgctgcgaacattgttgacatgataacaaaggatttagaatcctatataaacatgattgagaaagcagtggcagggcttgaaagaattgacttcaattttgaaagaagttctactgttaataaaatgctatcaaacagcatcacatactacagaaaaatctttcatgaaaaagagtcaatcgattcaagcttcattgttgcctttattttaagaaattaccacaaccaccccaaccttcagcaaccaccatcctgatcagtccacaggcatcaacatggaccgaacaccctccaccagcaaaaagattagaacttgctgaaggcttagtttattgttagcatttcttagcaacaaagtatttttaataaaagtttttaatttaatgatttgtttgacataatgctattacacatttagtagactacagtatggtataagcagaacttttacatacatta

SEQ ID NO: 249296 - DNA, 1057 bp, Homo sapiens
ataaaataaacaactgtgaaatacttagaattgtattgaataacctgaggagagagggagaggggagagagaaagagaactccacttttccctttataaattatgacaaaatataatgcttgctctttttctcaaatttagttgctatcttataagaatatatgcttattttacaagcttgaggatttgtgcaaaaaaaaagtatgtatatttatataattattccttaaatttctgtatgtgcttctttttttcttaagcataacaaaatactctttcattaattctgaatgctgtatttcgatattacattcaataattgaaattttagtgccatagagatcagggaattcttcacatcttgtaacctaaagatatcaacaaataaaacgtcttgatatttggctttccaaagcaaaacattgaaaagaactcactgtattgctctttaccttttgaaaattgttacccattagacagtggaactaagtgatactttttcagtagtgttgcctcttagtttcaggattcattttgtgactggttgttatttaagtgtgtgaatggacaagagtattgagacgactttatgggtttgatttttattaaatgattgaaatatttcattgttttccatatttctagtattatgagaagtcatgtgagattaatttccacaccattactgatgctaaattatttaaacatgagagaagtctacttacctatcatcatacatgttatcttgcagtatttctgtacatttttttaaaccttctaaaatgcttccatattaatgcattccctcctagttttggaaccagactttttttcaaatcaaaggtgaacccattttcctttaactttccagctgacttctttgtattggtaatttcgtctatacatccattttaaagagcagtgactatgtagaatcattgacgctgacactaactataaatgtttaataattaggattgatttgatgcatctaaaaccagcaggttatgctgtctttgtattcaaaatgcaataaattccattcatagctagaaaa

SEQ ID NO: 249297 - DNA, 460 bp, Homo sapiens
ttttttgttgtgaccttgtctgattttggaattagagtaaattgttgtgaccttgtctgattttggaattagagtaaattgttgtgaccttgtctgattttggaattagagtaatgctggcctcataaaatgagtgtggaagtattccctccttctcctctttagctgtctgaaaaggtcgagggtcagtattagttctttaagtgtttggtagaattcagcagtgaagttttcaggtcttggttttttctttgatggaaaacgttttattcctgactcaatttactcactacttatcgctgtgttcatatttctattttttattatttaatcatggtaggttgtatgcttccaggaattgatccatttcttgtacattatcagatttgttggtgtatggttgttgttcataatactgtcttataatctttttaatttctgtggtatgaattgtaatgta

SEQ ID NO: 249298 - DNA, 488 bp, Homo sapiens
cgtgaaactccgtctctactaaaaatacaaaatttagccgggcgtgtcccagctactcgggaggctgaggcaggagaatcgcttgaacccgggaggcggaggttgcagtgagccgagatcccgccattgcactccagcctggggaccaagagccagaactccatctcaaaaaagaaaaagaaaaaagagggaggaagggaggaaaagaaaaggaaaggaaaggaaatattgtaaggatgcagaacccacagatctgaagagctgacttcatatctgctgtttggcagggccaactgtaggacttgagcgcctgcagatttcggtattcacaggcggtcctggaaccaatccccagcagttaagcatgtataactatcaatcatataactatgtaacggttgaactatccgtcttagcaatatacaagtgtattgcaaagtgccagaccgggtaggtactcagtaaacattccctttggctattctctg

SEQ ID NO: 249299 - DNA, 3164 bp, Homo sapiens
  misc_feature (1019)..(1019): n is a, c, g, or t
  misc_feature (1042)..(1042): n is a, c, g, or t
  misc_feature (1299)..(1299): n is a, c, g, or t
atacagtttctctttgccagactagactaaagaaggagcactactttattctgataaaacaggtctatgcagctaccaggacaatggaatctacgttgactttagcaacggaacaacctgttaagaagaacactcttaagaaatataaaatagcttgcattgttcttcttgctttgctggtgatcatgtcacttggattaggcctggggcttggactcaggaaactggaaaagcaaggcagctgcaggaagaagtgctttgatgcatcatttagaggactggagaactgccggtgtgatgtggcatgtaaagaccgaggtgattgctgctgggattttgaagacacctgtgtggaatcaactcgaatatggatgtgcaataaatttcgttgtggagagaccagattagaggccagcctttgctcttgttcagatgactgtttgcagaggaaagattgctgtgctgactataagagtgtttgccaaggagaaacctcatggctggaagaaaactgtgacacagcccagcagtctcagtgcccagaagggtttgacctgccaccagttatcttgttttctatggatggatttagagctgaatatttatacacatgggatactttaatgccaaatatcaataaactgaaaacatgtggaattcattcaaaatacatgagagctatgtatcctaccaaaaccttcccaaatcattacaccattgtcacgggcttgtatccagagtcacatggcatcattgacaataatatgtatgatgtaaatctcaacaagaatttttcactttcttcaaaggaacaaaataatccagcctggtggcatgggcaaccaatgtggctgacagcaatgtatcaaggtttaaaagccgctacctacttttggcccggatcagaagtggctataaatggctcctttccttccatatacatgccttacaacggaagtgtcccatttgaagagaggatttctacactgttaaaatggctggacctgcccaaagctganagacccaggttttataccatgtnttttgaagaacctgattcctctggacatgcaggtggaccagtcagtgccagagtaattaaagccttacaggtagtagatcatgcttttgggatgttgatggaaggcctgaagcagcggaatttgcacaactgtgtcaatatcatccttctggctgaccatggaatggaccagacttattgtaacaagatggaatacatgactgattattttcccagaataaacttcttctacatgtacgaagggcctgccccccgcntccgagctcataatatacctcatgacttttttagttttaattctgaggaaattgttagaaacctcagttgccgaaaacctgatcagcatttcaagccctatttgactcctgatttgccaaagcgactgcactatgccaagaacgtcagaatcgacaaagttcatctctttgtggatcaacagtggctggctgttaggagtaaatcaaatacaaattgtggaggaggcaaccatggttataacaatgagtttaggagcatggaggctatctttctggcacatggacccagttttaaagagaagactgaagttgaaccatttgaaaatattgaagtctataacctaatgtgtgatcttctacgcattcaaccagcaccaaacaatggaacccatggtagtttaaaccatcttctgaaggtgcctttttatgagccatcccatgcagaggaggtgtcaaagttttctgtttgtggctttgctaatccattgcccacagagtctcttgactgtttctgccctcacctacaaaatagtactcagctggaacaagtgaatcagatgctaaatctcacccaagaagaaataacagcaacagtgaaagtaaatttgccatttgggaggcctagggtactgcagaagaacgtggaccactgtctcctttaccacagggaatatgtcagtggatttggaaaagctatgaggatgcccatgtggagttcatacacagtcccccagttgggagacacatcgcctctgcctcccactgtcccagactgtctgcgggctgatgtcagggttcctccttctgagagccaaaaatgttccttctatttagcagacaagaatatcacccacggcttcctctatcctcctgccagcaatagaacatcagatagccaatatgatgctttaattactagcaatttggtacctatgtatgaagaattcagaaaaatgtgggactacttccacagtgttcttcttataaaacatgccacagaaagaaatggagtaaatgtggttagtggaccaatatttgattataattatgatggccattttgatgctccagatgaaattaccaaacatttagccaacactgatgttcccatcccaacacactactttgtggtgctgaccagttgtaaaaacaagagccacacaccggaaaactgccctgggtggctggatgtcctaccctttatcatccctcaccgacctaccaacgtggagagctgtcctgaaggtaaaccagaagctctttgggttgaagaaagatttacagctcacattgcccgggtccgtgatgtagaacttctcactgggcttgacttctatcaggataaagtgcagcctgtctctgaaattttgcaactaaagacatatttaccaacatttgaaaccactatttaacttaataatgtctacttaatatataatttactgtataaagtaattttggcaaaatataagtgatttttttctggagaattgtaaaataaagttttctatttttccttaagtcccctaaaagccataatttttattattcctttttctcttttttcaattctatgaatatgtattattttaaagttatatttttcacacagagatgatgctatattacaccttcccttttttgttggtttcttaaactctaatctcatgacagattataccttccttattacttgttttatcttactcagaatctttgaatatatttttctgcccagaattatctaaacaaaagggagaacaaaagaagtatgtctcacttgggaactgaatcaactctaaatcagttttgtcacaaaactttttgtatttgactggcaatgctgattaaaattaaaaatgcac

SEQ ID NO: 249300 - DNA, 1144 bp, Homo sapiens
atacagtttctctttgccagactagactaaagaaggagcactactttattctgataaaacaggtctatgcagctaccaggacaatggaatctacgttgactttagcaacggaacaacctgttaagaagaacactcttaagaaatataaaatagcttgcattgttcttcttgctttgctggtgatcatgtcacttggattaggcctggggcttggactcaggaaactggaaaagcaaggcagctgcaggaagaagtgctttgatgcatcatttagaggactggagaactgccggtgtgatgtggcatgtaaagaccgaggtgattgctgctgggattttgaagacacctgtgtggaatcaactcgaatatggatgtgcaataaatttcgttgtggagagaccagattagaggccagcctttgctcttgttcagatgactgtttgcagaggaaagattgctgtgctgactataagagtgtttgccaaggagaaacctcatggctggaagaaaactgtgacacagcccagcagtctcagtgcccagaagggtttgacctgccaccagttatcttgttttctatggatggatttagagctgaatatttatacacatgggatactttaatgccaaatatcaataaactgaaaacatgtggaattcattcaaaatacatgagagctatgtatcctaccaaaaccttcccaaatcattacaccattgtcacgggcttgtatccagagtcacatggcatcattgacaataatatgtatgatgtaaatctcaacaagaatttttcactttcttcaaaggaacaaaataatccagcctggtggcatgggcaaccaatgtggctgacagcaatgtatcaaggtttaaaagccgctacctacttttggcccggatcagaagtggctataaatggctcctttccttccatatacatgccttacaacgggtagtgaagcactttcagatattctcccagctaggcagaaatgatcaagatgttttctgtcttaatcttggtggcaattctattaatccagttgtttaagccaaaaatcttgggaatcaccattgattcctttcctttatgtcactcaagcagtctctcagtaaatgcttttggctgtaattaaaaatc

SEQ ID NO: 249301 - DNA, 264 bp, Homo sapiens
cttataaaggcaatactggtttgttgttccaaagataaaagacaataactgggttattcacagatggctgttcatttaccatttttacatagtaaaatttatgtgtattatggaatttttgtctcaaatcattatggaagaatacaagaagtcttgggacttcatcctggctcctgatcaaaattaggcacatattcaattaccggataaatgaaacttcaggaattatatccaatagtttttttttttatttaaaaatttatc

SEQ ID NO: 249302 - DNA, 742 bp, Homo sapiens
tgagataattcatgtatatatactagatatgaagatatcatgatggattcaaattactgaaagatgaggaaactataccagttttatacaggaggaaatattgttgggagaaaggccaggtgacatagtaactacaccgaaattgaaagtcagacatcttggatttggattcctgtcgactagtgataacactcagaacaattcacttaggttctatatgactcaatttcttaactttcaaaatgctagtaataattatccttttctcatacattaattatgataactaaaaaatgtgtgtgggttcggggtattgttacagtccttactgtagtaccaagcacacagtaacctcctctaaaattgcagatgctattatttttatcaaacatgtgaataagtgaaatgcaatatcatttataaaatgcatatagtgctacagaattattctatgaacaaataaggtatttgtttattcacaagaagaagatttcaaaatacaaaaaaaaggagatgtagtcgtgggtataacataaagtacagagtactactatcatttcattttttatcacattcaaagtatcaacagaaaagtattttcatttgctcaactaataactaatgtttacttttgagtccaataatagcaatacaacttcagtatgccaagtttacaaagtgcttccctgtatattgtctcatccaaatattacgacttctttgaaagatacgtccaaaattt

SEQ ID NO: 249303 - DNA, 744 bp, Homo sapiens
gaggaggcaaagctttggggcgggagaggcaattttcacacaacggaagaaagttgagagtttgtaagggagaaactacaggcgcttggaagcctgctggctctcagggctcccaggctggcggcagtgtgaggaaggactgaaggtatgtgggctaaacacaacaaaagccactgccttactctagattaaatatgcaggaagaggcccctttgcataaacacaaacactcagcaaatgaataactggctcaatcagacgcccgctgtgccttctacctgtcctcactctgacaggagacactgcctattccaggggacaccactaaacaggagtcagttaaatgttatgttgctataataacaattaaaatgaattgtattcattagtaattaagaactcactcgtggggcgggggggagtgctattgttgtatctccagctactccaaaaagaacttgtagtatacccatccctggagttctactatgggttgcatttcaatctttaacattcaacgaattttaaacaatcggtttgtttagtcacaattgtcagatatacgtctcgtttctctgctttgtcacattgtaagttgatacttgtgactctgtacctacaaagatctgttatatatatgcatataaagtgtacatataaaaatatatacacacacatatatatatgtgcatatatactcacacgtaatacattcaagcatatctagttaaagagaataagcca

SEQ ID NO: 249304 - DNA, 395 bp, Homo sapiens
ggtctggacctttacgtttcacagggaaaactgtgttcatgctggtgtttgcaacttggggaatactgaaaattctcgggctctgtttcaaggaaacgtgactcctactgtgtgtatcatttctgtggcttctgctggccttgaaagcatttaggtgccctggtcccgtgcatggaggaagcagcggtaactcgaactacagcgtatcttccctccaccagcaatggctgagtctgatttccttctgaatccgtctaaggggaaacacgctttatccacagatgcaagaactttcttccaaatatcaacattctagtcttaggcaaagaattcgcattctttctattattttgactctgcttcttgcaaaataaaactcctggcatcatggcgct

SEQ ID NO: 249305 - DNA, 298 bp, Homo sapiens
gcccctgcaggagccatggagggaagtcactcagttcatggagtcaggccacatgggaggagaaggcagcctagaactagccatggtgaaggcttcccaggcagttcacgcttttgaaaatggccctgagagagatgctatcaggaggcgtatttaatgggttttggaaattggctaattttgccacaacggtctgagtgttatccgatgcatgctaagcatctggggccagcgtgcccaaggccttcaaagagatttgacagccgggaaggctgggcaaagtagctagtggtttcca

SEQ ID NO: 249306 - DNA, 1006 bp, Homo sapiens
  misc_feature (19)..(19): n is a, c, g, or t
  misc_feature (937)..(937): n is a, c, g, or t
tgttttgtttttttgaganggagtctcgctctggtgcccctagctgcttggccaacctgcctgtttctctagataatctcatcttggcgtagccccagcaatgatccacctgcctcagcctcccaaagtgctgggattacaggctgggataatgagccaccatgcccggccttgctccacagtcttacagtgtacacagttgaatattgtcatacacaagtataacgtaaaatgaatacatccttgtctgagatctcagataaaaagtgctctgctctttcctgtttagtatgatataagtcattgatttgtcatacatggcctttattgtgctggggtacataccatctatacctaatttgttgagtttcttaaagcacaaaggcatgttgaattttgccaaatactcctacatagaccagcaaaataaagatgtctagatgtctagtggcaaacttaattaaaaagggtaaccacgctctacactgagaattatataacattgataaaaaactgaaaaagacatgaaaaattgaaagatattttttgctcatgaattgaaaaaatataaaagtggctatactacccaaggtgatctacagattcaatgcaatctctatcaaaatgccaatgacttttttcacagaaatcggaaaaaaaaagattaaaatgtatagggaacaaccaaagacccacgaacggcaaaagtaatcctgagcaaaaagaacaaagctaggagcatcacacttcctggttccaaaacatactatgaagctataatgagcaaaacaggatgatactgacataaaaacagatgaaagtatccagtgagcctagcaataaattcatgaacctagagccaagtgattttcaacaaaaatgtccagaacacacagttggaaaaagacagtcttttcaataagtgttgctagaaaantttatctacataataaaaaaatgaacctaggcccctacctcttatgatataaaaaactcaatcacaaat

SEQ ID NO: 249307 - DNA, 1250 bp, Homo sapiens
  misc_feature (1181)..(1181): n is a, c, g, or t
gaggcaggagaatggtgtgaacctgggaggtggagcttgcagtgagccgagatcgagccactgcactccagcctgggcaacagagcgagactccttctcaaaaaaacaaaacaaaacaaaacaaaaaaacaaaactctcaatttacacaatctttcaggtcctagggtatattcacgtttgataccccatttctttttctcttgagcatattgcagggggggcaggttgttaggtacagttgagataagggccataaggagttccccagaaagggtggtgcccctagctgcttggccaacctgcctgtttctctagataatctcatcttggcgtagccccagcaatgatccacctgcctcagcctcccaaagtgctgggattacaggctgggataatgagccaccatgcccggccttgctccacagtcttacagtgtacacagttgaatattgtcatacacaagtataacgtaaaatgaatacatccttgtctgagatctcagataaaaagtgctctgctctttcctgtttagtatgatataagtcattgatttgtcatacatggcctttattgtgctggggtacataccatctatacctaatttgttgagtttcttaaagcacaaaggcatgttgaattttgccaaatactcctacatagaccagcaaaataaagatgtctagatgtctagtggcaaacttaattaaaaagggtaaccacgctctacactgagaattatataacattgataaaaaactgaaaaagacatgaaaaattgaaagatattttttgctcatgaattgaaaaaatataaaagtggctatactacccaaggtgatctacagattcaatgcaatctctatcaaaatgccaatgacttttttcacagaaatcggaaaaaaaaagattaaaatgtatagggaacaaccaaagacccacgaacggcaaaagtaatcctgagcaaaaagaacaaagctaggagcatcacacttcctggttccaaaacatactatgaagctataatgagcaaaacaggatgatactgacataaaaacagatgaaagtatccagtgagcctagcaataaattcatgaacctagagccaagtgattttcaacaaaaatgtccagaacacacagttggaaaaagacagtcttttcaataagtgttgctagaaaantttatctacataataaaaaaatgaacctaggcccctacctcttatgatataaaaaactcaatcacaaat

SEQ ID NO: 249308 - DNA, 481 bp, Homo sapiens
ggtgcagtcaacaaatatttactgagtgactaatgtgtgttatgcactgtgttcagcactgcaaaaaataggacaggtgtagaaggctcctctgccttcgtggagctcatcttctagtgagggagacagacattaaacaaacagacactacagattaagtattagaaaggaaacagggtcatgagttagcaagtgaagggcaaaaaccagggaagaggggaagaagtgactttaggtaaatttaatttcaaagcccaatccctatataccttaagattatgaaatagggtttatctcccctgtccccataactgtataacacactaaccagttattattataattatttttggagacagggtctcactctgtcactcagactgcagtgagctgtggtcaaggcactgcactccagcctgggagagagagtaaaactctatctcaaaaaaaataaaaaaagaaagaaaggaagacagaaaga

SEQ ID NO: 249309 - DNA, 398 bp, Homo sapiens
ggctctttcagtgatatgaagttaaaaccaggtactgtgttcgctcacctgattttggttcttatgaagtgcttttttgtgtggatagttgttcagctggttgttcttctgaaggagatgattactggaggcttctattcagccatcttcccctgcctcctcataattgctatctctttattgattttctcatgttgtttgtatattggttgtatatcattttcctgatttccatttattctttgtctatggtttcctttagctcataaagcatatttaagacagtcgatgatgtctgtgactagtaattccaatgtctgtgcttcctcagagatggtctctgtcaaaagaacttttttttactataaataagccatacttgcccgtttctttgtatg

SEQ ID NO: 249310 - DNA, 783 bp, Homo sapiens
gttatctccgaattggccaattgatggtttcagcagagcatttcagcatcggggaagccaatacaatttgagttagttgtgatggctgccactttaaataccgcagtgaatttctgtcagcgagctaatgcgtggaatagggaattgcagaaaacttgatcatcagagtgcttcagtcgattctgaccccaagctacagaaaatgaacttaaatctagttgactgtcgccacatactttctttggtgttattttgctggcagcgtcttcttcagagagagctggaagagaagagactaggaggaaatcaggatgtttgccgcgggtccctgggattttagagagtgacagtcttcatgggaggttgaccattgggagttggggtggtgagttcttggtgagggataaatttctaaacgacagcattatggcttagtaataatgagttttctatttaacaaagcaaaccagtgcttattgagcacttactatgtgttcagacccttaaaaggcattcttaggtatctccctgttggacaatgtaggggacaggcattcctcccatttcgtgacggaagaactgataacaatagcaaacaattattgagtgctaaccgtatgccaggcactgttgtaagtgctttaggttttgtctattgtcatactcaaaacagccctgtgagttaagttctgttattcctattttgtagagaaggaaatgaggcacttagagggattcagtcatgggcaaggtagacttaataggtttgtcttcttaatttaa

SEQ ID NO: 249311 - DNA, 729 bp, Homo sapiens
gttatctccgaattggccaattgatggtttcagcagagcatttcagcatcggggaagccaatacaatttgagttagttgtgatggctgccactttaaataccgcagtgaatttctgtcagcgagctaatgcgtggaatagggaattgcagaaaacttgatcatcagagtgcttcagtcgattctgaccccaagctacagtgctggcagcgtcttcttcagagagagctggaagagaagagactaggaggaaatcaggatgtttgccgcgggtccctgggattttagagagtgacagtcttcatgggaggttgaccattgggagttggggtggtgagttcttggtgagggataaatttctaaacgacagcattatggcttagtaataatgagttttctatttaacaaagcaaaccagtgcttattgagcacttactatgtgttcagacccttaaaaggcattcttaggtatctccctgttggacaatgtaggggacaggcattcctcccatttcgtgacggaagaactgataacaatagcaaacaattattgagtgctaaccgtatgccaggcactgttgtaagtgctttaggttttgtctattgtcatactcaaaacagccctgtgagttaagttctgttattcctattttgtagagaaggaaatgaggcacttagagggattcagtcatgggcaaggtagacttaataggtttgtcttcttaatttaa

SEQ ID NO: 249312 - DNA, 591 bp, Homo sapiens
aagcatgtaaccggataagtgtatttttacaatggaggagttacagtcatcttggtatttgtgggagattggttccaggatccccaagcataccaaaatccaaggatgctcaagtcccttatataaaatggtatagcatttgcatataacctacacacatcctcccatatacttttaatcacctctggattacctataatacctaatataatgtaaatgctatgtaaatagttatactgcattggttttttaatttatattttttgttattttttaaaatatatttttaatccatggttggttaaatctgtagatatagagggccaactgtactgttagacacaagggtctcgaggcttgcagatagagactgaataaccctctccatgatgatcccttagagttcccccactgtgcctttttctttacatgtgcatgcaaacatgtgtctccacatacattttttttaacaaaaattgaattatgttgatatatgtcctgtaatttgtgttttaaacttaatatatcttaggcattttccctgtgtgtgtgtataatgcagctattaaaaatgagtctgaggccaggaat

SEQ ID NO: 249313 - DNA, 723 bp, Homo sapiens
tccccagcctcttgtatagagcctacacatagcaggcacttacttatgcataatagtggatatgaaccgtatggaatacttcctcattcctcatcactcatcatttgcctggtgaaatgctttgtcccgaacctgccctatattactttatacatgttgtaccttcttcctgctatgttattcttcctcttgcccctgtttccaccccatccacctagcaaatttctgcttttattatctcagtgaagctttcacccagctacagtcaggcattccctcagggtgctctatctctagtctgctatgaatctattaatagttgtaatataacttttctcacctgtgttttacacacatatacacaacacagatgtgcacatatatgagtatctgtaggctgggagtttaactactacgacagttttttttggtttccccaggggtttggcacacatagccttattaaatgtgtaaatgaatgagtatagaaaaaatttgaacttgtaaacataaatagattttccccagtctcggcaacatagtgagacctcatctctacagaaaattaaaaaattagctgggtgaggtggcacatgcctatagacccattgacttgggaggctgaggcaggaggattacttgagcctgggaggacaaggtgccgtgagccgtgatcacaccactgcattccagcctaggtgacagagcgagaccctgtctcaa

SEQ ID NO: 249314 - DNA, 451 bp, Homo sapiens
atctcctgacattgtgatcagcccgcttcggcctcccaaagtgctgggactacaggcgtgagccaccacgcccggctaagagcttatattcttaaattttgagtaattaaagggctctggtcaactgcttgagatttagtgtctaaggatacctatttaaaattagagcacagcttttgtccaataaaatgcaatatatctaattgaactgacaccgatatctagttaacctgccttcaacaggctttcatacctgttactatgtcacctttggctgtttccaaaattagctttactttccagagactaaatcctgtattaaaaaacaactgtagctgggcatggtggctcatgcctgtaatcccaatgctttgggaggccaaggcaggattgctcaaggccagaagttcgagatcagtctgggcaaaattggttgagagtctatctctac

SEQ ID NO: 249315 - DNA, 275 bp, Homo sapiens
gattgcagactcagctcttggacggctaagacgaattccgccgcctcaatttttaatcattcattgagcaggtatttatggaacaactaggaagtgccgagcttcccgtatagcaggaaacgtgcaccatcaggtagtctatggacagtgtctatggacgctggagtgtgtattttgtgacatgggaagcacaagaggttaggggagcaataatcagaggacccgaccacattcatccaaacgagtaagtagcacccttatatttaaaaagaaaa

SEQ ID NO: 249316 - DNA, 505 bp, Homo sapiens
atttattagagttagggaataggtatgtagctaattgggggaggaaaagacaatgaaggaaaactcagatatgacccttccccaaacatataaacaacttggatacatgagaaatgtttagcgtattgttgccttcttatgttgtattgtctaagtcattttcttattgagtgttttggattgttgtctcccagaggagaaatccctaggtattttatgtgcattgttttgtgaataatttgcagttttactcaaggattgttgtctaatggttccctctcagtctagaagtttgtcagtaaaggtacacaataataatgagaagcagaataatttagtaattaagagcaaggattctggagccagactgcttgggtttctggttctactcaccagctgtgcgaccctaggtaaactacttaacctctccgtacctccactgtttgatcagatgtaagaaaataatcacatctgccttattagtttgtagtgagaataaattgag

SEQ ID NO: 249317 - DNA, 453 bp, Homo sapiens
agaacatgtggtgtttggttttttgtccttgcgatagttttctgagaatgatgatttccagcttcatccatgtccctgcaaaggacatgaactcatccctttttatggctgcatagtattccaaagaacatgttttgtatacagttctactgaccagatttgtaatccctgagtcctgttcaaagcttgtacattgtgggtgctcatttgatgtttgatgaatacatgtatcactataatggaaattagaacactatatttttatttttggaaaaaaacttaacccatcatttttctgtacttcagagttttatcatttgtcctataggagtttttagctctaaatatcattggatttaggaggaaacattatcaaaagcagcactcttcattagccaagttagcagatttttctctgaagattatatagaatcttacaataaatcctcagct

SEQ ID NO: 249318 - DNA, 588 bp, Homo sapiens
agtagtgcagcagtccaagaaagaggcagatttctaccttgaaagccccactggaaagaaggtcctgcagccagatcctgcatgtaagcaccctggggagatggttaaattctgctcctttgacctgcaggcctaaccgtgaaggctactactgggcagggagctacttaagacaactgctcggctgacatctcggagtgcctaaaatgaacttctggccctttcatcagtattcctcattctcaaaatgttccctttccccaacatcacccatcatcagaaaaacccaaaagacaggtaataacaaaggctggcaaggatgtggagaaaaagaaaacctcatacactgttggtaggaatgtaaattagtacaaccacaatagaaaaccatttggaggttccttaaaaactaaaaatagagctatcacatgatccagcaatcacactgctgggtatataacctaaagaaaggaaatcagtacatcaaagaggtatctgcactcctatgttcattgcagcactattcacaatagccaagatttggaagcaaactaagtttccatcaacagatgaatgaataaagaaaat

SEQ ID NO: 249319 - DNA, 433 bp, Homo sapiens
tcctggtgttgaggttgttaactacgctgccctaagaaggaagaaactgtgacttaatcgggcagggtaattcttttccagggcaacaacaggaataagccagtcagtcaacaaatattttttgagggtcagacatagtgatggcctcagacctcagagactacacaaaggtcaagatgaagagagctccagctcattctggagggagacacagaaaaggccagaggcactgggagataagaaataggacggggaaacctgaaaactgaagacaaacgcgccgcctgtgcaaaggctggacagccccagagaatggtcagagtttaacatggacctggccagcgaagcttccagttctgcctgtgttgcaggtgacttctatttccccatgtgatctttacacttgttggataaagtgaaccacttcctctta

SEQ ID NO: 249320 - DNA, 483 bp, Homo sapiens
gcacatatttatcatccttcagatcctcctaatacagcctcctccagaacactgtgaccttcagcaatcttgagacagtgcattgtcagtagccttagtgttgaatgccaccaagccccaagcgatgcaggtcaagctccccatgaactccatcgccgggctacttcatgtcttggcaccagagacttacagatcccagtagtcagcaagaactcagctgaggatggaggtgccagtctctgcttcttgcagaacactctgatgttgacaagtgattttctcaatgttccaacagggccacagggagaaaacacttccctttctccccttccatgacatggagaggaacaagaatggcctccaactgtgaacacagcatgcccctcactgtagcccacttcccagtctcccttttatttcgtctagaagccaggcatgaagctctgatctataatctgtgaataaactcttgggaaagcgaaa

SEQ ID NO: 249321 - DNA, 213 bp, Homo sapiens
atcagagtaaacacagaaacctcacatctcagggaggtttgcttaacaaacatatcaagacctgggatacctggaaaactgcagatgaaaagaatatgtctaagatcctgttaacagcagaacttagactgctagccctgctggaaattttccatgctcttcattcgttctcctgtatttcctaacgccaataaaagaggagatccctgagga

SEQ ID NO: 249322 - DNA, 338 bp, Homo sapiens
gggttcaagtgattctcctgactcagcttcccaaacagctgggattacaggcacacaccaccacacccagtagagatggggtttcaccatgttggccaggttggtcttgaactcctgatctcaggtgatccacccgccttggcctcccaaagtgctgggattacaggcgttagccaccgcacccggccaagaatttaacttacatctttaaccaaaaagctaagaaactgtgatttaatttttgctgttcttcattcttgaggcaagagtttcaatcgaagttgaacgtaattacttttccctccaaaacctattcaggctctaaaaattgctgtctt

SEQ ID NO: 249323 - DNA, 427 bp, Homo sapiens
tattttgtttcatttgtcataatattgtaaaatggatcatatttttgtcaaggctgtattttaaaacccatttttatggtgtcatacttaacatatttggctaaatttctatagcaacagcattttgaagagtagtcagccttgtctatttaacaaatgtatataaatataactggttgggaagagacaaaaacaaattctatacagaggtttagcaaatgaatttaaagtaacaaatatagtaatgttgaagttaggctttttttaaagaagtgtctctgagactcccaagaaagcaattaaatcaatagcaaatagaaaataaaaatagattacactataaaactttatgtaaattatttgtatacaatatatatatttgtgtgtgtgtgtgtgtgtgtataaaaattctacttgtaatgtatat

SEQ ID NO: 249324 - DNA, 386 bp, Homo sapiens
gatgacaccgtcgatgccgagttgttctacagatctagagcacacatgaccgttcagaaagtgatggcacgatcccgacgatctgctcgagacacccgctcctcagccaggctaagccagagttctcaagattccagtcctgttcgaaatctgcagtcttttggcactgaggagcctgcttactctaccagaagagtgacccgtagtcagcagcagcctaccccagtgacaccgtaaaaataccctcttcggcagactcgttcatctgcttcagaaactgatctataggagtggcgcaccactcatatagatcagttctcagttcttgtctttctagacctatcaacagcacttaaacagctgatcaatctctcccccaagaactg

SEQ ID NO: 249325 - DNA, 367 bp, Homo sapiens
tcgtagggctgaaggtggcagagtactctacttctcgctgttgcgtttctttatttgacactcacctaagataaaaccttttgtgactcctgactcttaatttttctcctgtttctcagttgacagtggacttatgcccaaactctagctgaggagtggaagaacttgaatagaacctcatccaaattcctgggtagcaagtctgtgttcctgctggtgatagtagtagtaaagttattgtagtgtttgcacaagaaaaatgtgaaaattcaggaccaagtttgggggaaaagtagagcaaaacaaaatagaagatcaaaagctgggaattagtaaaaaagaagtggatgaggaagaatggtatgaa

SEQ ID NO: 249326 - DNA, 373 bp, Homo sapiens
tgtcctttttaattgttgttgttattgttaattctgccttattctctgcactgaaaagaaaggttgggtgatgttctgccccccccccttttttttggcactttgaggtgacattataacataaaggttgttgcttttttctctccaatatttgatgtattttcaaaggctttaaaaaggaaataactaaatttaaagtaccacctgtcttgtttaatttgctttaggaatttatccctatatgcttagttagaatgataggattgatattgcgtagtaatttctgatgtttttgttttagtttgtcaaaagtaaaactaaatagcatgaatttgcgtctgtaattaaagattgaccgcgcttgaataaagtt

SEQ ID NO: 249327 - DNA, 212 bp, Homo sapiens
ggtgagtgaggctctgagacatgccgcctcccatggcgcctgaaagcgggtgcctctcatcctcccctggagtccatgcatgtaagtccaaggcagggagaagagacttcattttagctacagtcaattcagagtgaggaatgagttcttagttcctagaggagagaatatgggagtctaggatctgagaaactgaggctgtttctgccttg

SEQ ID NO: 249328 - DNA, 395 bp, Homo sapiens
cgtgggagttataaaatatcagcgacgcctctgggtgggttcgaaccgccaaccttttagttaacagccaaacgcgctagccgattgcgccacagagacatggctgagctcctgatttcgttctaaaagagggtaagctgtcactaaacgctagctagcaccatccgccttttgcaaaatgattgggtaatctccaaagcctgaccaacatggtgaaaacctgcctccactaaaaacacaaaattagctgggggtggtggtgcatgcctgtaatcccagctacttaggaggctgaggcaggagaattgcttgaacctgagaggcggaggttgcaatgagctgagatcgcacccttgcactccagcctgggcaacaacagcaaaaactccacctca

SEQ ID NO: 249329 - DNA, 402 bp, Homo sapiens
gcccttctatgtctgtctagctcttggcttgctgccttgccacctgggcagcttgtccttcaccaaaaggtgtgtcccaggtatctctgcacatctcagcatccacaccaaccacaccagaccctaggggagaggagagtatttttcccatccaaactatgtgcacgtatgtgcatgcttgtggacacacacacacgagtctaaagctataccttgaaaccccatttcctatcacagaagaggattaaccaagaaaggctttgggctaccaaaaactgaaagtggcaaggaaggatccccacctagaggcttcagagggagcatgaccctctcaacaacttactttcagacttctagcctccagaactatgagaaaataaatgtctcttgttttaagcaact

SEQ ID NO: 249330 - DNA, 416 bp, Homo sapiens
tccactgctccccggggggacccccacaattgagatgagtgtgagtcatcatgcgtcatcccacacaggccctgctgcacacattcacactgcctacccagctcctgcaggcattggacagtgtaatttcttttgttgggacactgaggctgctgttgtaaaccaaagaccttaatgtcctcctggttgtctgtgtggtggggttgctagatttagcaaacacaaaatgctgaagcagaacaaccaccacccaagaacaaaataaaatggaatgtccaggtaaatttatatttcagacaaacaacgaatgatttttcaatataagtatgtcttcagtactgacattttctctagcctctttgtgaagcaaagcagcattggtgctgagatggtgtcctgaccttgtatttctggta

SEQ ID NO: 249331 - DNA, 434 bp, Homo sapiens
gaaactgccatactgttttccagagtagctggtttcacttttccaccagcaacgcatgagtgatccagtttgtccacagcctcaccagcatttagtgttactactgtttcttactttaatcattctgataggtgggtagtgatagctcactgtgatttttaatttgcatctccccaatgactaatgaacatcttttcatgtgctacttgccatctgtacatggtcgtcagtaaaatgtctgttcatgtcttttgcctactttctaactagactcctttgaaaatttctcatattgtttttaacaatagattttaaaagaatttacagagtaagaatacatttttgagacaatggggaaaatgatacggagtgaaaggtgatattaaagaattaatgttaatttcattatgtgataatagctgagtggctgtgca

SEQ ID NO: 249332 - DNA, 443 bp, Homo sapiens
tcagtctctaccagattctttcaaatgctaaagcaacctcttaaccattagtactaattcagctttctgaagccacagataaattgctattttctatacaatgttaccagatcgataataaatacctaatatatgagaaacaattgtaatgtataaatatatattagttttcattagatttatatttcttttataaaacattataaatttaaccatttatggtgtttattgtacatttaacttagaaccttaagcacaacatcttttaaagaaaccttttttaaaataaagcattaactagaaatgttaaaagttttgaattctgaaattaaaatcctttatgaattgtagcttcatacaatttaaatattaaaattcagtgttttcatttgtagcatgtttgaatacacagatgacttcagattattaaaagttataaaatc

SEQ ID NO: 249333 - DNA, 405 bp, Homo sapiens
caaacatgtgcaggcaaaacctagttactttaggcctgccagagtcccagactgtgcctctgggtgcagggggggactgtcgtcctagggctagatctgattggccccatttcacatggaagcatcaggctgagagctcatgatagcgtctgggacagcgactgcccaatctccctggagtctctgagcctaaatctctgggaggcccttttatcctgctcctactcgggtgcctctccgtgcctggactgtatcccccacacccacaggcaagccaaggcaagcaacattgtcatacgatttttttcttccctgaagcaaggaagatagtcagtcctaagggacgatgaagcctccaggtctgtctctgtcctgggggctggaagtgggtgaaaaaattattga

SEQ ID NO: 249334 - DNA, 509 bp, Homo sapiens
taaaaatattattttaaatactaacttagaaatggaaaaagattttaaaagtccgtgctgttactattcaacaacatggttacgaactaatttgtgttttccccacaattcataggttgaagccctagaccccaatgtgactgtatttggaaacagggcttttaaggaggcaattaaggctaaatgaggacattaggatgggcccctaatccaacagtgctggtgtcattatgagaaaaggaagagatgctttttcactctgcatgcatgcaccgaaaaaatgttgtgtgagattgcctgcaagtgaagtagagaacctcaccaggaaccaccttgctggcacctcgattttggacttgcatcctccagagctctgagaaaatacatttctgttgtttaaactacccagtctatgggttttgttatggcagcccaagcagaccaatacaaacatgtaagcatttttagccaattcaatacaaaaataaactaaaataatgaaaattaaa

SEQ ID NO: 249335 - DNA, 415 bp, Homo sapiens
gatagcattggggtatgggatcagacccaaagccccatgatgcagagtcacataggaaagccactatctggtgctcctgccctgggaagaacatcagttgtcctctctcttgggacgaatagaggcatcccaaatcgtgatcttggatctgctgtgccttcactgatcctattcccctacaaattcatttcccgggaagttcctaggaactggtgtcaaacatcctcatactttccttcctttctcatgaaactgttctagtatctggctgatatccccgtgtctacctttacgtagctcagtttttgttgggtttttgttgctgttgttgttgtttgcttgtttttaatgtgccaacattatgtttgggcttttttgcttgctttttgaaataaatttttacaattcagaattc

SEQ ID NO: 249336 - DNA, 703 bp, Homo sapiens
agccactttgcaccatggcttcgtctctctgtgcctttaggcttcccacatgtgaattaggaaggtgggagctacaggccaagggcgtcccacccctagccttagcctgtgcccctaggtgaaaagtgctcagtggcagcccctgggggaccctgcaggcttggcccagcctccacctccctcgtccccacctgctggctgagcgggtctctctgcttccagtttccaactctttgcagatgccagttcccatacctggctcacgcctatcaaccctcccagcctagcaggaatgacgctaggtcttccctcacttacagtctggcggtaccctgctatcacctgtgagacatgcacacttgacacgtgtcagacacaatcctgagccttctacaagtgttccctcttactccttgtggccgtcttcaaaagtaggtccttcagcaccataggaaaggttaaaaaaaaaaagtaaattctgttacagtgctttttacagacatggaaactgaggcacagagctagtgactgacccaccaagggaggtggccaggctggggctctcctgggtccacctccagagcttcctcccctaacaccgtgcggctcccccatggcatgcatagtcacagggaatgacacactgatttctctttggcctacatctacctccccgatgtgtttattccacgggcacagggac

SEQ ID NO: 249337 - DNA, 450 bp, Homo sapiens
ttgtttgtgcctgctagagaaaggtcagaaagccactgtagtaccagccctgcttcctgaagttcagctgctttgccctgttggggcagcagcagagggcctcagcgtcattgcctgatgggatgctcagcctgacaaccaacgttcctgtggccacaatgcccagcattaacagcagcttaaattggaagagtcagccagggcaggggaaggacaagtattctttctcatcccacctgtgtcaccccaaccagctgtatgcctgaaggcaaattacctcccctctctgggccttattttcatcattatggaaggggtttaaatgggctgaccttgaaggtccctttgtcaaatatctatgagtcacaggagtgtctattgaagacagagaagtagtcagcccatttaagaaaaatttccatccagatagtttaaataaaacattgggtt

SEQ ID NO: 249338 - DNA, 423 bp, Homo sapiens
gtccggcggtttgcccagtgtagaatgactctttgaattttggttcccgtctgggttgagggagatgcagcagcagcacagcagagtagccgcatcagtgactgttacggggaagtgtttagatacagcctcatcttagagaagtagttctgatcgggaatgcttattgatgggaattgagttactttgtaaagccaatatgatatgagcaaggaaacaaagacctgactacccctggggatgttacctccttccctcaccctcctttagtccttggtggtgtgctggtgccattcctgcattttagtctggaaaaagaatagaagtccttagttctatttaagaagtggttactcctgaagatgatgctttccgtctttacttttaaacaaatcaatactatctttttcctccaaaaaaaaa

SEQ ID NO: 249339 - DNA, 611 bp, Homo sapiens
gtatgcccattatccttccctgacaagccaggatcagccctgaggattagaggagacttcatcttccaccacttttgtgatcagatatggtccagtgtttgagcgtaaaaccactatgtgaataacacggcataggtcacgtaggttaatattgacttgcagtatgtatttgaagcaggttcttgtctggaaaaatatatacaaatgttgaattgaatgcctaggtgaataggcaggtggaggtctccatcccaatggcttgccagatcttttggtgacccagttatgctgtgtcttttctgagtttcattctgcattgggaaggtagctggacaagttctttttctgcagcatttttcagaaatagcagatatgtcctctctgggcaactgtactttggatttgggaaactgtacttcacccagttctgggactccaactcagcagttttcaaatttagcaggtcctgttccgtagtttctttgtctaatagagctcggttgtaatatctaacttgaccagaaggaggcgctattgttaagcaacacagtacactgaaaagtctggattttagactgtgggtttcctcaataaatagcttgtcttccata

SEQ ID NO: 249340 - DNA, 316 bp, Homo sapiens
gctttttggaagttgggtgagagcacgtgaaaatgctttgtgagttgtggtcccctttgagaaggctgtttcagatgtgcaagaagaaggagacactcagtttccagatggggacactgaggctggtgacacagcaagcctggggccaccactgacttgagaaaacctccacctaagaggctggcgcccgtgtctgtgtctgtgccatcctttaggaattttgcagctttctttgggagaggctgagagcttcctgtggcctttggccatccagccggtgctgagggggcagatggcccagtgggcaggcctggtg

SEQ ID NO: 249341 - DNA, 436 bp, Homo sapiens
aagatggatacaatgtataattgagattaaaaataaccttctctttttgggtagtctgacagtttatcttaaagggagggttttctttgttggaaatatttctgaatgggcttactagaggcaaaggctgagatcaaaaggcatctaagcctggggggatgggctctggggagccctggtatggatctagctatagctaaaggggaatggggctggatgtggagtttgagaacagcttgggcaatagagtgagacttcatctctacattttattgtttgtcttaaagttagcagagtatggtggtgcgtgcctgcagtcctagctactctagaggctgaagcaagaggatcccttgagcccaggattttgaggctgcagtaagctgtgtctcacccctgttctttagtctgggcaacagagtgagaccctgtcact

SEQ ID NO: 249342 - DNA, 345 bp, Homo sapiens
gctaaaggttgagtttgtctgtttcatcctgtcttggctgatcacatgcacatacaaccacacactcacttgcatacaaacatataagtatgaggagaattcaaaatgttcatggaaaaatgagattaaaagataaaagtttaaagatgtaaactttacttctcaacataagcaccatcacattcaagatactgttataagctatgatagcggccatttagtccatccctaaagaactgagggtcctgggaatttaatcacatcaatgcaatctttcttacattgttaactaaagaaaaatgggtgccctttgaagatttttaaagattaagtaacaaaaaaaaa

SEQ ID NO: 249343 - DNA, 475 bp, Homo sapiens
gtctaactgtcaggcggtggcagtggagctgcttctgaccctgcagctggtgctctgtgtcttcgcttccaccgacagccgtcagacatcaggctccccggccaccatgattgggatctctgtggcactgggccgcctcattgggctgtctctccaggaggacacaaagaaaagatcaagacagcatgtagcaaatgtagcaaggaggcatccaatcatctgcaacccaaggggcaaaccctcgccacacaccaaccctgctggctccttgcttttggacttccagtttcagaattatgagaaaatacatttctgtgtttaggccatcaagtctattgtattttgttctgacagcctgaacagactaatacacagtataatacaattgaattgttgattcatctaagaaatatataatttctacatggtttgttgcaattatctgggaataaatattaccatgaccacttaaaga

SEQ ID NO: 249344 - DNA, 436 bp, Homo sapiens
agcccatctactcacgtgcccttgactgaagatgggtccttctccatcgcggatggtcatcctcttttaccgagcacacagctttggaaggaacgcatatggagtgctgtctctccaggaggacacaaagaaaagatcaagacagcatgtagcaaatgtagcaaggaggcatccaatcatctgcaacccaaggggcaaaccctcgccacacaccaaccctgctggctccttgcttttggacttccagtttcagaattatgagaaaatacatttctgtgtttaggccatcaagtctattgtattttgttctgacagcctgaacagactaatacacagtataatacaattgaattgttgattcatctaagaaatatataatttctacatggtttgttgcaattatctgggaataaatattaccatgaccacttaaaga

SEQ ID NO: 249345 - DNA, 1259 bp, Homo sapiens
cgccgcacttctccctgtagcggcgggcctgaccgtccggaacggccggagtgtgctgatgcctgctgctatctgcttgatcccttcaccctacctctcatccaggacttcttccgcggatgcgcagctagcgatttcgacaggcgagattgaaaattccgggcgagtatatgaggttgagtaagtcccgcttcagggaggaacgaccagaatgacatttctttaagcctaaatcaaacttttattttcgtttataaaaagcagaaggccagcaggaaagggtcgcggaggactggcacatccacaaccgtaggactcttggatccaagtttttaggctgagactgggcggtccggggttctccttcggcgctcacaccccgcaaactcgtgggcagtgcagtgctggaggccgggggcagtggcggacccgcagggtaaccttgtctcgcgcacctcccgagcccccagcagcccactctcgtccgaatgctttgtttatttggtgacaccagggaacgtggagaagaagatcgaagttcagtttttcttttttctttattttaaatatttttcttaactaaatggtatgtttatgtgaacccatcatctcttggaattaagtgtcctcagcgaactccagattcctaggggaaacctacgtgcccagagcaggaaacgcacaagtcaattcaggttccggtgccatccgcagtaaattcccttccttttgctccaaattcctcctctgcgtccaggagagggacccccgggactcccgcacacccaggaccgggagcggcagagcagagggcgggtgcgagggcgcgagggaagggaggcggcctgcggacctggggcgcgcagtttcccggctccgtgggaacctccaaccccggggcgcgcggcctaggctccgccctgccaggcttggggccgagcggcccacctagtgggtcctgacctggggaagccgagtccgcgcgcgggtcgggccgcgacgagggaagctcgcctgggcaagtgccgcgcggggtcagacccaccccaggggttgcaaaccgcaagcgaaagtcgagaggggctggagctttccctctgatccgttttacactgtgaaaaccgcaggcctgtcgcctaggcggccacttttaaattgggaagcaaatagacgaaaaaccaaaacaaacgtacgagctgacttttcccagctaagtttcccctcaataaaaagcccgctttctgggaaagacagaaact

SEQ ID NO: 249346 - DNA, 468 bp, Homo sapiens
ttgccccgactacacttattatttttaatttaaaaaggtgttttttaagtagaagtgttggttttgtaatcctcaggtgttctggaagaaaaggatttcagaagcatgacagtctcccgtgtctgtgctaatggtgtgtttagcataacgtggtggggagttccgtggttctccaggattctcctcactgttcttttcgtgaagtgaatcgttcatttgataatcgtgaaatgcaaaaagcaaggctgtgttttaatggctgtgaagtgggaacggggtagccaggtttgaggttctgtttccactgaaaatacctactgacagagaagccagtaccaggtaatactgttttgttatctgcaatgccagtcttcaaatgattgtttttcttggaaatagctaaactgttggggaaaattaaacactgagattgaagtttagtgactgtgttaataaaacaagggaaat

SEQ ID NO: 249347 - DNA, 381 bp, Homo sapiens
aaaaaaaaaatctggacatacccaagctgtgtatgtgcctgagatcttcccttccaagtgatttattaaactgggaagtcagaagcagtcctgtgaacatttgtttgttgaagcatgaaaaggcagaattgatgagtccttgcttgagtctatgcctccacccagtagtttgttcttagtctcctaggggctgatctcagcagagaaatggagacagttcagtcaccaacagtttgttactggattttggaaaaggtaccaaagtaagaatccaaggcttgtattcttatcttagctctgtgattaacaagcttaggtaaggcttctaatctttctgggtttctttccttatcaataaaatgcgcaagtcagactgcataa

SEQ ID NO: 249348 - DNA, 605 bp, Homo sapiens
cccttaagccagtagccggtggcactttgttacagcttccctggcaaacacgctgccccgacggctggtgctttgagctggcagcattctatctgccacgggcctccaggtgatgctctagctgcaccagcctctgcccacgtgcaggggaatcctgttggggcccagatccagccccaggacactggccctgcagaagcagcaaaccccccagtgcccccagtgacactgagtgggggcccggcccatagcatgggtgtgatgtggtggagcccatgtcgggaggggacttggtcacaggacagggaggggccctgcctcatccagtgggcaagagtcagggtgcttgggcccccaacggcctgtgtgggtggatcacgtgaggtcgggggttcaagaccagcctgaccaacatggtgaaaccccatctctactaaaaatatgaaattagccaggcgtggtggtgcgtgcctgtaatcccagctacttgggaggctgaggcaggagaatcgcttgaacctgggaggcggaggtttcagtgagccgagatcatgccattgcactccagcctgggcaactgagcaagactctatctcaaaaaaaaa

SEQ ID NO: 249349 - DNA, 473 bp, Homo sapiens
tctgtaacgtattagaaaccttcgaatgaatgagctatgtcttaaagtgttttttttttcataatatggttaaaaagccctagtaaatcttctcttagaagatttcttacattcaccctttcctttcagttttcacatcactgccctgtgaaacactcatgttcagggcctctgtctcaggcttggactggttttaagattttcctcattgccctaagtctctcccattctatacttcatatttttgtgatgttgagcttcctaaagtactctaaatataagccttcatctcttaaaaagctttgaaaggaatatgacctaaaagatattaataccctaatactctgtaaaatcttcctagttatatactagaaaacttaatgtatttcagaagacatgtatagcctacatgtaaaagtttttagcagcactgtaatagtaaaacactggaaacaaaccaaatgtccaacaaa

SEQ ID NO: 249350 - DNA, 667 bp, Homo sapiens
taccctcctatctgtctggattttaattctacccattgatatcttttcttttgggtgatgaaagcacagacactggattttagactagaatatggcctccaagtcttagtttgtgggtagccttcagaaagttacttatccccctttggcactgatatttctctttaaaattgatgtattactgctaaccttatttaattactaggaagactaaaaaagatatcagcgcaacatatgtcctgcacagggccttccacttagcacaacctctctcccttcctctatcagctgctgtaatgatgaccaaatcaggaaattctggtcctaaccccactgtatatcttaggaggttcaatcagctgaagttggtgctggtgtgtctaccctagcaggttgctgagcaacccacagtgagttgtagcagccctgaaaacagtttgcatcaacaaggcttcaatgatcacagacaaacacaagcatttactaaagctgaagggacagcaaattgctagagtgctttcccaacccctttgcatttatgatttcttttctgagaatgatatatgatccaattacagagttcacgaaagcattagggagttcatgaaaagcaaaggcttatactaaacatactaaacagcttgtcctttgaccatcactgatggtg

SEQ ID NO: 249351 - DNA, 386 bp, Homo sapiens
ggaaaaaataaagtcaatttgaggaagccagaaacaagcattccaactggcaactgagggaaaaaatttaaatgttagaatatgcacacatatatttctacctggctagaccatttttaggttgtctatttaagtggcctaagagacagtaactattctataaaatgtgtggagtggggcagaaaggttaaggaccctccgaccctgattttctccctctttgagcattggcattcaacatgaaggaaggaacaagtcaagccacagagaggtgaatgcactggaggaaagcttcaggaagggttgtatgtatacaatgtataggttagtttccatcttttaaaaagcttataaaaatgatataagaaaatgataatacattttta

SEQ ID NO: 249352 - DNA, 383 bp, Homo sapiens
atttgtttcctcatttataaaatgaaataatgtaactcacttcacacagtattataaaagttaaatgggagaatggataataaaagtgctttatcaactacgaagtcataccaaaatcttagcagttattttggcttaccctctaggattagagctgatcccctgtcctagactgtagatgttcacttcacccccagggaagaggaaacaccttcctaccgtccccattgtatcttttggatgaatgttgcacttattttacttcctgtggaggttacagattacactgaggggtgtgtgtgctggggcgggggtgtctctactgaagggggtcgtcatttccagtatcaactatacatggatgaagccaagttctcaggcca

SEQ ID NO: 249353 - DNA, 599 bp, Homo sapiens
caacagcatcccaaggcagaagaatttttcttagtacagaacaaaatggagtctcctatgtctacttctttctacacagacacagcaacaatctgatttctctatcttttccgcacatttcccccttttctattcgacaaaaccgccatcgtcatcatggcccgttctcaatgagctgttgggtacacctcccagacggggtggcggccgggcagaggggctcctcacttcccagaaggggtggctgggcagaggcgccccccacctcccggaaggggcagtggccaggtggaggctgccccccgcctccctcccggatggggcggatgagctttttttcatatgtttgttggtcacataaatgtaaacttggcaaatttactcatatttttggacttttgaaagctgagctgttttatttcagtgtatttcgaaatgaattatcaataccgtgtccattgagcttctgaaagtgtaaacattttatgtctcttcctttatccctcactatttctccctgtttctcactcttttgactggtcttcctatgcattccagagtgatgtctggtttgacaatactttaatatatttattgat

SEQ ID NO: 249354 - DNA, 729 bp, Homo sapiens
tagatgtcagctgtcttaaatatgctcagtgactaaagaaaaccatcaacaaaagaagtaaattgtcagaacaatgtatgaacaattagggaatgtcaataaagaaaaataaattttaaaaaggaaccaagtagaaattctgaagcagaaaagcacaatagctgaaatgaaaatttcactagaggggtgcaatggaagattttggcaggaaggcagaggaaataatcagaaaacttgaagatgagacaatggaagttatccagtctgagcagcagaaagagaaaaatgaacaaaatctgaggaaccagtgagatggcatcaaacttaccaaaatttgcatcatgggagtcccagaaggagaatagagggagagaaaagaggagaaaaatatatttgaagatgtaatggctcaaaactcctcaaatttgatgaaagacatggacatatacatcaaaatggctcaacaaacatcaagcaagatggactcaaagagattgacaccaagacatattgtagtcaaattatgtagacagtcttgaaaacaacaacaacaaaaatgacttttcatgtacaaaggatctttaatgagattaacagctgatttctcatcagaaatcatggagtccagaaggcaacaggatgataaagtgctggggaaacaacaaccaaaagcctgtcaaccaagaaatttatatctggcaaaattactgtatcctttaagaaagaggg

SEQ ID NO: 249355 - DNA, 598 bp, Homo sapiens
tccctcatgccacttagctgcctcagaaaaactgacagtattggaggatgccaaaaaaagaaaaaaagaaactggtcaagagaccctttgtgattttgtctgctattgggcagcaactcatgagaactggccaataagactctacggttatattagaagtggctctggagaccttaaagttatgctattctcatttattttagtgcagaaaggactcaaacaatctgacatcagtgggaagagcgtatacaatgaaaatcgagtgtctttggacactctctgtactcaggtcttttgagcttttcaaataacaaggtaccaaggctcctaaaaagccaaaaaatgtggattcatactggctgctctactcagagatttgggcttacagatctaatagctccattaaatgcatcgtcattttgttggaggagacagtatagagcggtagttaagaacacagactgtggagacaggctgctagatgtagaaccctagatctgccacttgctagctgtgtagccttagataaagtacttaagttctctgtgccccagtttctgcatttgtagcatctcttaatttttacacaacatgtaaa

SEQ ID NO: 249356 - DNA, 317 bp, Homo sapiens
gtattaaaaataaaagagattacttagattccccacttcctttcctgccttgattctttccatttaaaagtgagacccctgtctctacaaaaaattcaaaactaactgggcgtggttgtgcatgcctgtagtcctagctacttagaagactgaggtgagaggattgcttgagtccgggagttccaggctgcaatgagctatgacggcaccaattcactccagcctgggcaacagagtgagatgctgtctctaaaaaaaacaaaaacaaaaatgaattgtattggttttcacagtttcaaaaacattcaataagagta

SEQ ID NO: 249357 - DNA, 501 bp, Homo sapiens
gccgcggacgcgcacgtccgcgaccatcgagtaaattcacaccctccgccctggcgtccgtcgggccctccaccagcagcgccaaccctggggcaacaggtcccagagggcacggcgccgccagcctgcaccgcgaaccgggtcgggtgtgctcgggcatgcgtgagccgctaagatagcccggcccagggaccgagcaggttctgccggccgcgactagtcccctgcgcggtccaggtggtcaggggaggacctagatttctcgctgccagggaatcgtgcggatggcacaggccgcaggactcctgcagagcaagcaggggccccaggtacgcttgagaaagcgaacgcagcagtggccccgaaaccttggcctgaatgagtaaaaggaaaagccgtgtctcgtcagttaaatcaccaccgcagttccgcaaatcctccgcaacaggcccacgcgccccaaaaaaccaagacacgaaacaccctcacactgcgcggccg

SEQ ID NO: 249358 - DNA, 764 bp, Homo sapiens
tgtttggtgctatacatctttaataaagctggtatactgctactaatttttaggtggtgattataatgaataaacacaaaggattattagaaggcatcctgaggataaaaccttttaagtaccacatagtttcctatttaggggaacaatattccattaaaattcacatttttggaatttgatttctttcttttaaaaatttatttattttttgcccttttccccaagttctgatggaatttggtttctgtttagtaatgtttgctagaatatgtacttttatatgaaacatttgcatatttgttattagtacgattaatcgtattgtcactgaacaaaaagtagaagtaaataattttgtttgacgggtaaacctcttccatgttcagccgatctttttttttaaaaaaaattattattattttccccagatcagagatgtacagcccatctttcaatgatgattctactcaactgctcctgtgccatctctggtccagaggatgtaattcctgctaacttgaaagggcaaaactgacaagtgcctatttcagtagcttattaccacttaatgacagaggatagcttccaggaaaagtactataatacatcgaaaaggggacttttaactgtatctggtagaattccaaagcatttaacacccactagggtcaacgcggtgactcccatcctactgaagtgcagccacttctggcctggagcgcagctgctggttaacagctgtccaacctcagtgctcccca

SEQ ID NO: 249359 - DNA, 431 bp, Homo sapiens
tgagacagtcttgctctgtcgcccgggctggagtgcagtggtgcgatctcggttcactgcaacctccgcctcctgggttcaagcgattccactgcctcagcttcccgagtagctgagactacaggcgcccgccaccacgccctgctaattttttgtattttactggagacggggtttcaccatgttagccaggatggtctcgatctcctgtcctcgtgatccacccgcctcggcctcccaaagtgctgggattacagccgtcagccaccgtgcccggccaggaggggcagagtcttaccccgaagacccaggaaggagaggcttcatttatttttttgtttttccccagagacagggagtcgcccaggctggagagccgagattggccattgcactccagcctgggtgacagagtgagactttgtctcgag

SEQ ID NO: 249360 - DNA, 470 bp, Homo sapiens
agttcggcagtgtggcaggccaggtttccattagcaaccagaacagtttccattaacactttactataattttgatgaatgcataagttaaacgttaaagaaattgagaaactggtgcctgagtatcagggatggaatgcgaaaacgaacccattaagaccccgcctgggtcctctcagaccctaaagtctgatcgaataataatagtattcttacacattcacctgggcctgtcttaagattcagaaactttccaagactctagagaaatctttccagaccctagaccgtagttaaagattagatgttgattgaatgcaacatttctgcttgtaggtgcagtcccaccatagcattgagcttaagatgtatataagcactagaaaaaaacttgaaactttgagttggtctggtgagttacttggcttctccgtctaaccggttgcagaaataaactcctttctttccca

SEQ ID NO: 249361 - DNA, 258 bp, Homo sapiens
tagaacatttctgtcactccggaaagaaacctcatatgcatcagcattcactcctcatttctcgctaaccccttacccctaagcaactactaaatctaccttttgtctctgtatatttgcttattctggacatttcatgtaaatggaatcacacaatacacggcctttgtgtctggcttctttcacttaatgtgtcctaggttcaagcatgctgtaacatacatagtacttcatgtctattcattgctgaaaaatatt

SEQ ID NO: 249362 - DNA, 345 bp, Homo sapiens
gggacaggaagtacgggttgaaatctttagaaaacgcttgagaaactgcaaaaaagacgcatgctgatgaaaaacagtcctgcggttgggcgtctacaaaaaaaggggaagttctgcctggggagcgccgtgcagccgtccccttcccctccgggaaatgcataggtggacacgcgagcggccggcccgcgggggaggggaggggagggtccgccctggggacccctcagatcatcttcatgttgaacttgcgcgcgcctccctggcccgccgcggcggccggcccatccaccttgcggaaggagtactccaccgagaagttgtttttgtgctgcccgcggccgc

SEQ ID NO: 249363 - DNA, 611 bp, Homo sapiens
tgtatttttagtagagatggggtttcatcgtgttagccaggatggtctcgatctcctgacctcgtgatctgcccgcctcggcctcccaaagtgctgagattacaggggtgagccaccgcgccttctattagcttttataatggagaggtaactgtcctagaaagtccatgtaaattccagttcagataatgaacaattacttattctatgaagacatttatatttcctggactgtacctttcacatctttccctatgtgaatgggttccctgaagaactttttctgcctgctgagcacttatttggaggtaagtctaacaatgagatgatatccaaacttatcactagactactgaacgatattctattttccctaatggataccaatgcttattccagaattatattctatagttttaaattttcatgctttcaaaagtatctgacatttagctgtgaaattttctgctgccaaagaccttgtcatatgatccacggacagatacacagctaggctttttaaattttgtattaattctgttattcaacacacatctaataaataactgctgtgatccaggaacagcattagacaataggaaatttttttt

SEQ ID NO: 249364 - DNA, 399 bp, Homo sapiens
ccgttcctcacggcatagtccatcatggcttcccttgggtagggaagagaattccttgacccgttgtgcttccctggtgagagccccaccatgctttagctcgctgtctgtggctacacccactgtccaactagtcccaatgagatgaaccaggtacctcagttagaaatgcagaaatcacctgccttctgcatcaatcttactgggagctgcagaccggagctgttcctattcagccatcttgccagcaatccgaaataattttatagtgaatacttgtatactcagcacttagattctgaaaactgagcaaggagctttctttgtttatttatttttttgagatggagtttcagtcttgttgcccaggctggagtgcagtggcacaatctcagctca

SEQ ID NO: 249365 - DNA, 532 bp, Homo sapiens
ttaaaatcaagtgcaaatgactggcagatagaacctaaagtatggaacctgaatgaccagctgaaatgacagaagccccaggcagaggcggttcagcaaaggggaaagcagcactgggagtgatgcacaaggtggaaccagacccagcgtgtccttgcagcccccaagcaggcctgccatgccagtcatagggtgaagaatcagtggagaatgaggagcagctgagctgcctcaattctgctcaagccacacaaattctgctcaagagcatacaaaagggttatgtccatttctttaacagtatttacaactaggaactgtgtacctggcaaataagctgccactgtctttgttattcactctggcaaggccaaatgaaaaaatgcctggtagaggcttcttgagtagtcttggctgggtgtggtaactcatgcctataatccaagcacttaggaaggccgaggcacgcaaatcactttgaggccaggagtttgagaccagcctggccaaaatggagaaaccccatcactac

SEQ ID NO: 249366 - DNA, 435 bp, Homo sapiens
ctgggacaatgagaccgttgtcatccactcagaaatgtgcagagccacacgaggcagcaagctgggcctcggaggttttttccaaggcaagaattttcacctggacatgctgggctcccatgattccatgggtagaagtcagaaggtcagagaactttgatgagaaaaaaagttacatcattgttttcactaacctccaggcgaaatttagtatttccttccttgatgaatgcaggcaacaaaccactgcaggacctgtcaccttggcctgagagcagtcacagatgtttttgtatcacgtggctctggctgcaaacagctggaatgatgttaaagctcatctctgtaatcatggtggttattacagtgactatatctactctctcacatagtgttattcaatataagaataaagaaatggctgttttataaaaa

SEQ ID NO: 249367 - DNA, 417 bp, Homo sapiens
aaccctctcattgcaattgctgataaaataaactagggatgttcagactcctccctcctggaccagcattatccctaaagaatgttccttgtggctacagagaaatcactttttctaccacaacgcagtgtttaggatctctgcttactgtggagggccccacttgagcctgaagttatgcagtcgatattggagcaggaaaaagttgaatgtgcaaggaggggactgtgcatgtgtcccctgccgggcccagttgtggcagagggtggtgctctcccacgttgtgagtgagtgtgtagattagtgcaaactctgtggaaagtaagctggctaaatgagtgaagagccacacaaaatgtgcgtcatttttgactcattaatttcatttaggataaacaaatttcatcaaaaacagag

SEQ ID NO: 249368 - DNA, 431 bp, Homo sapiens
tcttcttgagatagttttgtgtcgtagcttctggttttcacatgcattatagttaagacaccaagtggactttcttgctctgccagtatggttcagctgccctggactagtctctgcctgtcaaagcactccctatgttagaaaatgagtatagaggccaggcgtggtggctcacgcctgtaatcccaccagttggaaaggccgaagcgggtggatcacctgaggtcgggagttcgagaccagcctggccaacattgtgaaaccctgtctctactaaaaatacaaaaattagctgggtgtggtggcgcacgcctgtaatcccagctactcaggaggctgaggcacgagagtaacttgaaccagaggcagaggttgcagtgagccgagatggggccactgcactgtagcctgggcgacggagtgaaactctc

SEQ ID NO: 249369 - DNA, 719 bp, Homo sapiens
ctgtgtttaagaccaacattgcgtgctctgtgctttgatgagtgaatccttccttgtcaagccaaatctttgctagcatcccggtggtctccttaactgcggacttgcaagatccacatatagacattttaaagacttttcctgtgtgttgccaaaaggcccccttcataagcattgtaccgatttgcactcgtgccggccagcgcagctagtaaagagtatgcccgtttcccctgcatagtctcctggtcactgtaattgatcgtgtgtgtgcgtgcgtgtgtgtgtgtgtgtgtgtgtgtgtgtcttggccagcttggcgggctacaaagggtgtttcgctgtcctcggtagttttgctggaaacaaacactgcttatgaccccattcccctgtgccctcttcctgtccttttccctgttgtcagaaaagtaattcagcgtcattgcaggaaaaaaaaatcacaaagcagacaagttaccagaagaaaattaaagtcaccagtaatcatttctgatgattacacacacattccagaaacattttcatgcacacctctctgatattttctagaactacctgaaacatttttgtctgtaggtctagtttttttcttatgcatatatcatatatgtatattatgatgtacagactgtttttatatctgcttttcacacatacatgtgtgtgtgaaaaacaaaaaaaaacacttgcggccg

SEQ ID NO: 249370 - DNA, 826 bp, Homo sapiens
cttgtttaagttcagtttaataaatagtagataatgcctcttctcttttttccttttgaagaggagaaaaaggaaagaattgtagttgattcttatgtagcaacttattcattcattcagtagctatagaagcgaattgttttgtaggtaattattaacgatgctttggataattccctagctaactattccttcttttccatcccagaaagcaatgaagagaaaagctgaagtcagtgattaggagtgtctgtgtaagtaaaagcaacaggcaattactgagtgtggtgtgagaggcacggaaagattgggaattcagcaagaagaggaattgaagtcaaacctcacctacttcccagagtcttctggattttctgttagaagcttcagtatctgaggaaaggactcaggcaacaaataaacagctaagattttactagagtatgaaagggagagcactggagtgcagtgcggggatggagatgcagctgtggtggctggaagtacaggagggcagctggaggcacctggcctctgaagcctgtcttcttcatctgggtgagatctgctggagtcaggaaggacttcctgctgcaaggataaagaatcccacccatcctaaggcattacatttagtcatcatagctctttcttcacagaattagaaaaaactactttaaatttcatatggaaccaaaaaagagcccatatagccaagaaaatcttaagcaaaaagaacaaagatggaggcatcatgctaactgacttcaaactatactacaaggctacagtaaccaaaacagcatggtactggtgccaaaacaga

SEQ ID NO: 249371 - DNA, 610 bp, Homo sapiens
cttgtttaagttcagtttaataaatagtagataatgcctcttctcttttttccttttgaagaggagaaaaaggaaagaattgtagttgattcttatgtagcaacttattcattcattcagtagctatagaagcgaattgttttgtaggtaattattaacgatgctttggataattccctagctaactattccttcttttccatcccagaaagcaatgaagagaaaagctgaagtcagtgattaggagtgtctgtgtaagtaaaagcaacaggcaattactgagtgtggtgtgagaggcacggaaagattgggaattcagcaagaagaggaattgaagtcaaacctcacctacttcccagagtcttctggattttctgttagaagcttcagtatctgaggtaaggaaaagaaactgcaggacttacagaatataccctttcctttccatcctctgtattacttaataggtattttgctttgttttcattttttcattcctcctcttatcttctgccttaattttcaactccatattactaagtggcatggttttcaagttttctgtacagtgttttactattttaaataaaaaaaaatttttagttttaaa

SEQ ID NO: 249372 - DNA, 347 bp, Homo sapiens
gccacacaccagcagcattggtgtcacatcagtgttactgtgaaaatcaaagcgtttatgaagtgtgggccacagaccagcagcatcagtgtcacttgggagcttgtcagaaataatctcaggcctgcccaagcccactaagtaagaattgcacttatacaagaaccctggatgagcatttcataaagtttgagaagcacagctagtatgaagcaaaccactcgaagtgcaacctgttacctgtctgcaatgagtcagacattgagaggaaggatttagaaactttatagcaatttgataaagtaattttgttatatctaataataaaactcagagcttgtcttttt

SEQ ID NO: 249373 - DNA, 613 bp, Homo sapiens
ttttaaaatcttctttcccactaatacttgtttcattaaacattcttaagcacctaccatgtgccaaaaactgtgctaggttataaggattcaagaatatgcaaaacatagccactgtccttaagaagcttataaaaggagaatggcatgcaattaaatttttatgctaaaggacaatatgggctgggcatgaggcctcacacctgtaatcccagcactttgggaggccgaggcgggtggatcaactgaggtcaggagttcgcagcctggccaacatagagaaatccgtctctactaacactacaaaaattagctgggtgtggtggctcatgcctgcaatcccagctactcgggagggtaaggcaagagaatcttttgaacctgggaggcagaggctgtagtgagccgagatcacaccactgcactccagcctgggcaacagagtgagactctgtctcatgggtgtagatgagacagcgattcactttgaagaaagtggtgtttgggaaaggcatgcccaagagggaacaacagggccctgccccccagtgcaaagaaatgggctgacatggaagtgggaaatagcacagcacacttaaggaatgccaggcat

SEQ ID NO: 249374 - DNA, 358 bp, Homo sapiens
aagaagggagaccaggtgttcccatgcacctctgggaggatccctactgctctgctatgaactgctgtgagattgaggctagagcaaaccacattcttcacatcttcttgtctatgctgctcacttgagaatggccctgccctctctggtgacaagcccacagatggcaccgttttgaacatttaatgctgggctatgccctgtgttctggccaagtttcaggtgacacagctgcagctgccagtccacctagggaggaacagcacacttaggacaatacccactgccctgctatgggtagctctgggactgaggaccagcacacccaactcttcacagcaatactgacgtggactgc

SEQ ID NO: 249375 - DNA, 331 bp, Homo sapiens
ccagtgccacctcatgccagcacaacgagttcaaacctaaagtcggtgtctgagtgggacaaagctagagacccatttcaggcaagactctgatgcctctaaggagtgagtggaaagccagtgtgcgtgcgcagggtgtgcgtgtgtgatacatcggcaggatacagagctcccaagggcatttcccatcccctctctccaattaattaacctaattaaccagcttgcttgtgtatccaacaggaactccaaacatttccttcaagaatgggaaaatctatgtcctttgttttcttttgaaaataacttgaataaaatcttacatgaaaca

SEQ ID NO: 249376 - DNA, 743 bp, Homo sapiens
gaaaaagaaaggaaagaagaaagggaagaagttatttttaaaaaataaataaataaataaagagtgcctcggaaatcacctttataaaaatcaaactcatcttttcccaacactgtcttctgtacatgagaagcatcttaaaaacaaaatgaaactgaccttttaggagggacagggaagatgactttagtgcttatcagtcttgtcgatgtccttttcttatttttgtcctctaaatgtacttgattggaaaaaacaccgtttttaaatctctttatattgaagatatataaagagtaagagtttaggtatataaaggcaatgctttcatctagtgatttcttgtccttggttttagacagggccatcaacaactgaaaaggaaatcattacttcctgtagcaaaattaaaattaaaaattaataaactagtaaacagtcatggtgcacctaccatggaccaaatcctttgccaacaggctgcattcatatatagacaaatgaatgatcagagacctggttacacagatagacaaaccattgatggatatttgggttggttccaagtctttgctattgtgaatagtgccacaataaacatacatgtgcgtgtgtctttatagcagcatgatttataatcctttgggtatatgcacaccaacatggcacatgtatacatatgtaacaaacctgcacattgtgcacatgtaccctggaacttaaagaataataataataaaaat

SEQ ID NO: 249377 - DNA, 395 bp, Homo sapiens
tcctgaccctgcttttatgttaaatggttgtcagtgtgagagaaataaaagtctcgggcaaaacgcagcaaaaggcatctccacactttcacacccccctcccctacttctagagttctgtggagagaatctcacagaacagtgcttttcagtgaacacctgtaattttaaatttaatgatttacattttctagtagcctcatttttaaaaagtaagaagaagcaggtgaaataaattttaatacttcttatttaacccaaatatatctaaaaatctttcaacatgtaatcaatataaaaattattgagatattttgcattctttttttgtgctaaggccttgaaatggtaatgttaaatttaatgatttaaattttttagtagccccatttaaa

SEQ ID NO: 249378 - DNA, 546 bp, Homo sapiens
gctttctgctttaactaggtttgaatgtatagagtaagtgatgcaggttaaaatattttggggggatacagaagaaggtactgatggttcttgttatgagggtgtcaggaccacataatttgatgattgttggtactctggaaagaaaaaattgtgggacttggatcactgaataatctctgaatttctttcagtgcttaaagtagattattcagtgatggggcagcacagttgtatgtggtaggtatttctagccccactgctggcctttcaaacccagtcgtgtcaaaccctgccttattaattagcattttccaaaggttcagtttgcttatataattgcagtggtatagtaagcagagaaattgacccaataaatttagccatctaacaattagtgtgggaaaaatagtggagaagatatgtctattgtgataatatgagatatgaatatgaatatatgttttccacatatatgtgtatatatatacacacacctcattaccactgtaatatatatataatatatacataatatacataaag

SEQ ID NO: 249379 - DNA, 544 bp, Homo sapiens
tgccaatttatccctaatactcaatactaccactgagaagctgaatctactgacataatgaaatagtaatgtaaataaatgttacttttttaaaaatagaattgacaacattcttttcttttgcacattaaattcactttttacatggggcagaaacactcagattatgactaatgggactggtggagatagtttgaggattctgtgtaacagagcggttttcagcttttgacataacatagcccttcagagcatcatgggaatctcagttttttaaaaaagtcatttttaattgaagctataatcactctacttgagaaacaaggaacaaaacgatgcatttcttgtacccaatgtgctgacaaagctaactcatctataattaataaaggaacagtttattatgaaacaatacagagtttcaaaaatgctaaaagaaatgtacaaataaagtacctcgggacatttatacagtgcaaatgtcaaacttttgtattgatcatgcctgattagggtccttttccccaaatttgatgaaagaaca

SEQ ID NO: 249380 - DNA, 452 bp, Homo sapiens
ctacatacttaagacatccccatacctcataagaatatttttgttttaattaattttgagctgcttaagtcactgaaatctcttaactaaaattcatgcagaagaccatccagtgcctgcagcttttaaacattttctttcatcacttatctagggatgaaaaagctcttcatcacatccacagatgacatggccaccagaggtggaaaagaagggtgagtcattcacccttagaagataaattagatttccaaatgaccctggcagcagaaggaggcagaaataaaaataatgactttcaaccagcacaaaagtgcattttgaaatgagaaacaaagtgcaaaaactccagatgagaaacagctgacattatgcagctacaaaaagagagttacagatagagctgacctcaagctaaacaggtgtcaagaatggttctgtcattggtgaaa

SEQ ID NO: 249381 - DNA, 511 bp, Homo sapiens
gtaatattaaaagaaagcttagcatagtaaggttcagttgaacctgtgggacttaattctaattccattatggatttctcatatgattctactaaaaaatgtaacttgatttaactacttgaattacttatctaaattatgaaacccagttggccctgtcttcagaaactagaatccagataaaattacctattgtttgtgatgttaacatgtattatcccatcagcagaagaatctgagcagtgcattgtagtttttttaaacaatattgatgatatggtagtagaaactgaacagctactccctggactttgtcaatgtacttgttatgacttagcactgttttatttaccatccaaaaacatattttttattactcactgcaacatgacaataattccagttttgagtggtgtatatttctcattatgaatctaaatacacagaacgtttgctctgttttcagtcactaggctgcgtgaaaatggtgtattaaaaatagtctgacata

SEQ ID NO: 249382 - DNA, 270 bp, Homo sapiens
gtagattctctgagggaaaaaaaaaacaccgtgtagatggtgttctcagcaggtgagagtcagactgcagaagcaggccagctcctctgtaagacccacatgaagattactgttgccactgccagattatgttatgtctcacacagagtcgccaccttcctctctctactccccatcctgttccgccttctgaatcgcagcatcaattgttgacttaagcaggcaaaaactcaaactacatttgaataaagaatttgtcagtatctgcat

SEQ ID NO: 249383 - DNA, 656 bp, Homo sapiens
aaacagccaaactgcgcatttcagatgtgccacaaatttggatattggagatctcaggctcgtcactaaataggaaatctgtgatgccaattacagaagctctgagaccatgggaattaagagggtaggggtaaaatgtcaagtgatgagcaggtgtaatttttaacggaaaagcaattccccagccttcaattgagttcaggtattcaacacagtttcttcattaacattgttccatttttataaaaaatattgaaattttatactgtctaaagaaaaatctcagaatacatgctttcgctgttcttatttaagaagtaacttcccagtggaaagaagataatgtataaaacacttggttgtcttaacagcctgtacaaaatagttgggtgtatagtcaaaagtttgctttctttagcatagctagactagtaaggctaaatgataactgttctaaacatttgttctcaaaaaagtctcacataaaataattttctcaactatcaaatatagaaaacatttatccatatcagatagaccatatttcattgcatagttacgtaatgcaggcttgcagacagctgtgtaactagaattcatcctaagacaggcacgtccttccctttcagatcatcaatacatatagcctattgata

SEQ ID NO: 249384 - DNA, 374 bp, Homo sapiens
caaggtgaaacccatagaatgtttttaaagctggttaaaagttgaacacttttcttattgcccatgtcttcaacacgtcagtatttttgatggatatgaaatgattttgcctaaaggaagagcagtttttgtggccatttttgagaaaagatttttatgtacaagtacttgcttggattgcctcctttcctatgttcttgttctctgggttgctctctaattgtgtttacttctgtctgaggcaattgtctagctagctcttttgtgaacgagaggcatgacaagggatgggtgagaggggatgagtaaattttgctgaagaagctgaaattatgccagaagagccaaattttaataaaggaactaaaagtcaa

SEQ ID NO: 249385 - DNA, 102 bp, Homo sapiens
tcaagcgcttagttaatgttacctggataatgattatgcaaattatttttgttaataagtagcagttttaaataaataaaaactgttttaaggaggaagtgt

SEQ ID NO: 249386 - DNA, 751 bp, Homo sapiens
catattaggagaatgatggagtgaaaagacaaagtgtctggggcctgcctgcctaagaatgtggagaaaattacattggggaataaattatattaactccttctcatcattcacttaccttttgtaaatttcatctcactatgctaaacaatcctggatggcctgggaataatagagaccattatattatctcatgagattatctgcatctaaattaacagactcctctgcactagtgaacagggtgaatgcattcatttgggttggggttgggtggggttcttacctctgtatctgtaagaactatcatatcggtttcagtagcttgctcatatcccatatcatctacatgtaagaatggtgtgaggtcatctttagacgcctgtatagtaagctggtgagactcttaggcgacgcaccttatccttcattgagtgcgaccactatcataaggggttcttactgggggcctcagcttaccatatgttgccttgaactagctctggcgtcttacttcaagctcaacagcgctctgacttggggatcttccccttctcacaggcactccatatgcatccctcacctgtcctctgggcttggtctcattgcctggaggattcacctacaccctgacttaactccgctcacacatcggcacgcctgccaccattgcgtccgggtattctaattgcacggcctgtaacgccctcgcggcgcctcgcccccgtgtcccacgtgtcgcccgtccacc

SEQ ID NO: 249387 - DNA, 715 bp, Homo sapiens
catattaggagaatgatggagtgaaaagacaaagtgtctggggcctgcctgcctaagaatgtggagaaaattacattggggaataaattatattaactccttctcatcattcacttaccttttgtaaatttcatctcactatgctaaacaatcctggatggcctgggaaaaaagtcgtgcaccttctcactaacaggctcagattccttgttcatcgttaagataatagagaccattatattatctcatgagattatctgcatctaaattaacagactcctctgcactagtgaacagggtgaatgcattcatttgggttggggttgggtggggttcttacctttataactcttgctttttttaaaatgattttggagataaagcaaataaaaaatcattatcttgatagagtagttttaaataaacatttgatggaattatctttttattgtttcattcttggcatccattcaataataatgatggtggtagtgatggtgatgactgttgattgcctgggggtgcaagagccttacctatggctggtctgtgacagagcagggaccccaacccagtactgcataattttctgtggatattgtcatccccaatttccccattagaaactgagacctaaattctagtctgagattcttcacttgattatgtgccccttagcataatcctagttcagttttaatagtcactctgaagg

SEQ ID NO: 249388 - DNA, 661 bp, Homo sapiens
catattaggagaatgatggagtgaaaagacaaagtgtctggggcctgcctgcctaagaatgtggagaaaattacattggggaataaattatattaactccttctcatcattcacttaccttttgtaaatttcatctcactatgctaaacaatcctggatggcctgggaaaaaagtcgtgcaccttctcactaacaggctcagattccttgttcatcgttaagataatagagaccattatattatctcatgagattatctgcatctaaattaacagactcctctgcactagtgaacagggtgaatgcattcatttgggttggggttgggtggggttcttacctttataactcttgctttttttaaaatgattttggagataaagcaaataatttattgtttcattcttggcatccattcaataataatgatggtggtagtgatggtgatgactgttgattgcctgggggtgcaagagccttacctatggctggtctgtgacagagcagggaccccaacccagtactgcataattttctgtggatattgtcatccccaatttccccattagaaactgagacctaaattctagtctgagattcttcacttgattatgtgccccttagcataatcctagttcagttttaatagtcactctgaagg

SEQ ID NO: 249389 - DNA, 462 bp, Homo sapiens
atctggatctcctcggcaggaaagtcaagggccttcaccctttgctcctatcttccgccagtcccctcacccatcctagtcaccaattacatgagacatctagttgctgcttgaatacattatgtggttccaagcttacatatggcttataccctattttctacccgattctaattgtccaactcttatcctttcttccagaatcagctcaaatccactgcctttttgaatccccatctacctggtgatctccttgcccccctgcgtctcgcttacaagcactgcctctgtggacccatctcccgcctcctgctttactattagggttagcctttcatgaactaaactacgttcttggagggaaggaatcagagactatttcttagatacctttatgtctgtcccccaatacccagcaaaggtcttgcacagtaataaaagtttccctgtatgattgacaaa

SEQ ID NO: 249390 - DNA, 437 bp, Homo sapiens
acacctgcaatagaaacctgtacgcaacaagttggatgtcacatcttgcagtagtcgtgccgggttagatgcagggacagagcacggaggagtcggtggaggctgctgccctcaagtttcctgaacttgaaggggtttagaatgtgccacggtggcgtgaaaattattttgagcagaaggcatttgaattcctgaaatttcttgtctgctgaaaagcagagcttcccaaaagatctcaaaagaactcagttgtcataaatcccttcttgggaaggaactaggaaagattgacttgggccaggcgcagtggttcacgcctgtaattccagcactttgggaggcctaggcaagtggatcatctgagcccaggagttggagaccagcccgggcaccatggtgagatcctctctctattaaaaaaaaaaaaaaaaaaaaga

SEQ ID NO: 249391 - DNA, 674 bp, Homo sapiens
ggagaaaccccgtctctactaaaaatacaaaactagccgggtgtggtggtgcatgcctgtagaattgcttgaacccaggagccggaggttgtggtgagctgagatcgcaccattgcactccagcctgggcaacaagagcgaaactccatctcaaaaataaaattaaaaactcccttccccaagagtgaccagtctcctgatctttatcatcgtaaattagtgtagtctgtccttgaaacttctctaagtggaattatacagtatgtagttatttgattctggctttcttcactcaacattgtggatgaaatgtggatccatgctgggtgtttttatttttattgctgtgtactatttatcgcatgaatgtattacaacttattgtttcatccctcccttcatgaacattttatgtttctagttttgggatactatgaatgaagctaccatgaacatttctgtccatgtcttttggagcacacaggaagttttttccctcagatgtctgcctagcagtggaatcgctgagtgatggtatacgtaccttaggctttcgtagttactgacaaaccatttctcaaagcagcttaccagtttaccatcctgccagcaatgtgaggaagcttcatttgccccatattcttgcagatagttggttgttcgtcttttccatt

SEQ ID NO: 249392 - DNA, 954 bp, Homo sapiens
tcaattccagggaagtgtcaaacaatgctgtgcaatgtagccaggcttctacggcagagacatggagccctgaactctcctaagaaggtgaatgtgtcccctcatgaagtgcagctaatgggaccaatgcagtggagcagctactttctagttctttcttgaagccactcatgcataagaggtatgagaagtcatatttgagttagagccagatgaaaacctcaagaattaccagttattccactgaagtaaagcactgtttccagaggacttccatttgaaggaaaacatgcttcttccttcattcagtgcacacttattggatgccttctctgagccttgtgctgagccacaagagctaaagcataaacccaccaggaactaacaatacctaacataagttgattttttttcagagtgcattgatcacagtagatcatagtcaagcattatcttcatagaatagaacttgatgtctgtaggtgtaatttctgagtggttgataaaggtctcctgctaaggtgctagtaaccaggaaggaattggagggttggtgggtactgtgggtacagcacgggacctaggctaattgggacagtagaaaaaggcacctaaagaaaactatttctgattttgtgtttggcctgagactgagcctgctctctgtattgtaaaggaatggtacattatttcttacatctggttcaaggcccaactgcagagggtgtatacatacatcctgaacattccagagggacttatctgacagtagaaccagtaaatgttacatttctagagattagaacatcctaaaattgcacacagctggcagtaaacttgggagaaccgcttttttgtgtggtcaggacagtttacccttccctgatagaacaaaaattagtcaaagggaagtatgggtaaaaggaaagggaaaactttcctttcctctaggtt

SEQ ID NO: 249393 - DNA, 377 bp, Homo sapiens
cccccaaaggagctccattatttaacggccagcacgaaacgctggcactggatggaattcgatgctcttccacagtaaaatgttggaccctgtgcctctcatccacactgccccagggagcagggcagcagagactcccttgtggaaacaggaaaaccggtcagatagctctttgacctgtttccatatgtgagccaaattgtagaagagcattttggtttagaaaataacttcactgttgcacagaaagatctctggaggcccacactccccacctgactgccccgttttccttcaaggacccagcaggggagatggcggccctaactgagctgctgtcacaggaggggaggggctccatttcctgtggccttaaa

SEQ ID NO: 249394 - DNA, 402 bp, Homo sapiens
tctgtgaaccactccatttttcatcagatagcagaacaactacaacagcaaaacctagaacatctcagacagcagctcttgggagcagcaacagcctcaaaaggccactcctcaggatagtcaggaaggaacctttgggtcagagccatcagcgtctgaccacatagttcagcgtctgactcagacgctgaactatgtgcagttggaaatagatataaaaaatgaaattataattttggccaacacaacaaatacagaactgaaagatttgccaaagaggattcccaaggattcagctcgttaccatttctttctgtataaacattcccatgaaggagactatttagagtccatagtttttatttattcaatgcctggatacacatagttcagcgtctgatg

SEQ ID NO: 249395 - DNA, 472 bp, Homo sapiens
gcggccgccgagctctccccgcccggcccagcccctccgccgcagccgcggggcagccccgagccacggccccggctggcgggcgggctgcgggcaggatcctggcgctcgggctctggcaaggggaaaggacagaaacggcgcatcgggagggaccctgcctcaccgcttgtatatggcaaagtttctcgccgagctcctgggctgcacgttgccgagcaagggcgcctctcccatgtttgagtctaaaagtcattcccgagttggcctgaaatcaagcaccaagcaaaagaccaccattttcagcacattggccagtgagaagtccttatctgactgcaaaaaggaacagcaatggaaaccttccatgtacagcagcataactccagtttgctttccaagccctctgattgagaagccaataggcaaagtaagaatgaacctacttttatcagacactatgattcgagcc

SEQ ID NO: 249396 - DNA, 573 bp, Homo sapiens
gcggccgccgagctctccccgcccggcccagcccctccgccgcagccgcggggcagccccgagccacggccccggctggcgggcgggctgcgggcaggatcctggcgctcgggctctggcaaggggaaaggacagaaacggcgcatcgggagggaccctgcctcaccgcttgtatatggcaaagtttctcgccgagctcctgggctgcacgttgccgagcaagggcgcctctcccatgtttgagtctaaaagtcattcccgagttggcctgaaatcaagcaccaagcaaaagaccaccattttcagcacattggccagtgagaagtccttatctgactgcaaaaaggaggctgtgttccctgtcacgtggggtgagccaatgggctgaagaagcatgaggaaaaggagactcgagtatggcaggtggctgtgtggagaggacacttggaacagcaatggaaaccttccatgtacagcagcataactccagtttgctttccaagccctctgattgagaagccaataggcaaagtaagaatgaacctacttttatcagacactatgattcgagcc

SEQ ID NO: 249397 - DNA, 482 bp, Homo sapiens
gcggccgccgagctctccccgcccggcccagcccctccgccgcagccgcggggcagccccgagccacggccccggctggcgggcgggctgcgggcaggatcctggcgctcgggctctggcaaggggaaaggacagaaacggcgcatcgggagggaccctgcctcaccgcttgtatatggcaaagtttctcgccgagctcctgggctgcacgttgccgagcaagggcgcctctcccatgtttgagtctaaaagtcattcccgagttggcctgaaatcaagcaccaagcaaaagaccaccattttcagcacattggccagtgagaagtccttatctgactgcaaaaaggataattgaaccagggcacaaggagacttttgtacttgttcaggtcacacagtaagtgatggagccaggattacaacctgcccttccttacaacctgctcttccttacaacctctgacaccatattctgaaagagg

SEQ ID NO: 249398 - DNA, 617 bp, Homo sapiens
gcggccgccgagctctccccgcccggcccagcccctccgccgcagccgcggggcagccccgagccacggccccggctggcgggcgggctgcgggcaggatcctggcgctcgggctctggcaaggggaaaggacagaaacggcgcatcgggagggaccctgcctcaccgcttgtatatggcaaagtttctcgccgagctcctgggctgcacgttgccgagcaagggcgcctctcccatgtttgagtctaaaagtcattcccgagttggcctgaaatcaagcaccaagcaaaagtttatgtattcatcctcctgtagcttcctgagaagtcatgggagaccaccattttcagcacattggccagtgagaagtccttatctgactgcaaaaaggaggctgtgttccctgtcacgtggggtgagccaatgggctgaagaagcatgaggaaaaggagactcgagtatggcaggtggctgtgtggagaggacacttggaacagcaatggaaaccttccatgtacagcagcataactccagtttgctttccaagccctctgattgagaagccaataggcaaagtaagaatgaacctacttttatcagacactatgattcgagcc

SEQ ID NO: 249399 - DNA, 656 bp, Homo sapiens
gcggccgccgagctctccccgcccggcccagcccctccgccgcagccgcggggcagccccgagccacggccccggctggcgggcgggctgcgggcaggatcctggcgctcgggctctggcaaggggaaaggacagaaacggcgcatcgggagggaccctgcctcaccgcttgtatatggcaaagtttctcgccgagctcctgggctgcacgttgccgagcaagggcgcctctcccatgtttgagtctaaaagtcattcccgagttggcctgaaatcaagcaccaagcaaaagaccaccattttcagcacattggccagtgagaagtccttatctgactgcaaaaaggcatactcagaccagaccctggaacggagcaggtttttgatgaatgcctgttgaatgatgaataaacggatgaagggaaccaagaggctgtgttccctgtcacgtggggtgagccaatgggctgaagaagcatgaggaaaaggagactcgagtatggcaggtggctgtgtggagaggacacttggaacagcaatggaaaccttccatgtacagcagcataactccagtttgctttccaagccctctgattgagaagccaataggcaaagtaagaatgaacctacttttatcagacactatgattcgagcc

SEQ ID NO: 249400 - DNA, 1003 bp, Homo sapiens
gtgcagagtatcattgcagcgcttttccagggagtaacgtgctgcactggttcagggctttgtctttattcacaacacattcatgtgcctcagcatgggggcagctgcactgttgcctgccagcctgtcctctttgactgccgaatgaaccaaaggataactctccattcgtgagagagagtgagctacagaggaagaaagaccacgcaaaagggagggggagagaggggggcgaagaggatgttctccggctcactcctacattaggtctctgtgcaaaggcagaggctgtgggagcagcatcaagcaagacttcgggcagtgattctaactattgcctatgaacaccgtggctgggacgactttgacgaggcaatttattacttacgcatagaacactggctgtgctgaaactgggagcgcaaacagccccttgttttctaatttagagacttgcatcttttcgacactcaacagtatcaagacactctgctactacagattgatttccaccatcaacacctttacctcttcccgcctgaaaataaaatatgaaatataacaagtaaatcgcaatctaccttgaatcttctggagaggaaagaagaaaccatgtctagacaaggtgctggaaagacccagggaagacacagggaaatcatctttcgggaatttatctaagaagaacttcttatgatatgaagtctgggggtaagacctgcagtaatttcccttaagatactacagaatttccaaggacttgaggaataattgcactcttgaaagagcctatgaaaaaagaagagacttgggaaatttaacagaagttcactttccaccactgcgcaaactaaggaaaaacttaaagcagtaaatagctgcggttggcaaagctgttttggctcaggagcagctatcaggccttgataaggtccacaagtctgctgttctaaaatcaaaaaaaaaaaaaaaaccccctaattgttgaagaggtattggggga

SEQ ID NO: 249401 - DNA, 2094 bp, Homo sapiens
gtgcagagtatcattgcagcgcttttccagggagtaacgtgctgcactggttcagggctttgtctttattcacaacacattcatgtgcctcagcatgggggcagctgcactgttgcctgccagcctgtcctctttgactgccgaatgaaccaaaggataactctccattcgtgagagagagtgagctacagaggaagaaagaccacgcaaaagggagggggagagaggggggcgaagaggatgttctccggctcactcctacattaggtctctgtgcaaaggcagaggctgtgggagcagcatcaagcaagacttcgggcagtgattctaactattgcctatgaacaccgtggctgggacgactttgacgaggcaatttattacttacgcatagaacactggctgtgctgaaactgggagcgcaaacagccccttgttttctaatttagagacttgcatcttttcgacactcaacagtatcaagacactctgctactacagattgatttccaccatcaacacctttacctcttcccgcctgaaaataaaatatgaaatataacaagtaaatcgcaatctaccttgaatcttctggagaggaaagaagaaaccatgtctagacaaggtgctggaaagacccagggaagacacagatatgtgtgcctttattagcggagccactacttgagggagatgaagcgggaggagtgggtggacccaatgccaggccggccgtgcttcacgggcttgtaggtgatggagaactcgcccaggtcgtggccgatcatctccagcttgatctccacctggttgaaggtcttgccgttgtagacgcccaccctgctgcccaccatcttgggagggatgatcatatcgcgcaggtgcgtcttcaccacttcctgcttctctatggtcggcgcctccttcttggcctagcataggcgcctcagcagcgaatgcggcttgagcctcagcattccgccacaggccgtggttcagccgccgcagctggcgcgcgccgtacagctgcctcagctgctcaaaggacatgtccagcagctggcccaggtccacaccgcggtaggtgaacttgcggaagatccgctgcttcttctcctctacctctgccatcttgccggatcctctgaaaatgattccgtaagtgccagagtccttcacatatggattttaacctaattctgtaatgattttaattagctgatatattaaaaacaacgtcagtaagtttttcccttcaaggaagcctcaactttgagaaacggtgaattacgtgaggtgaacctcgtatttatgtgaggaaagctctgcactggttttgattctcacattttaattagctgatacattaaaaacaatataagtaatttttcccttccgggaaacctcaacttggagtaacgctggattacgtgagctaaacctcgtaattatgtgagaaaggctaagtattggttttgtttcccacatttacgtgaggaaattgaggcacaatgttaagtgtcacaaggtcaagtaactagtaaggggcaggccaagatagaaatctgtttgcagaactcttgtgcttaatgactaagaagcgtgcgcagatgcaagggccagacagggaaacaagagatccatttgtaccaatagcatggaagattgactttgtttcagggaatcgcgttttttcataaaaacttcgggattaacccacctcacatattttctccaaagttatagttatgtattggatttaagaatagactgaacctgggctccccactgcacaagataaaaaactgatagaggctgggcacggtggctcacgcctgtattcccagcactttgggagaccaaggtaggcggatcacctgaggtcagaagtttgagactatcctgggcaacatggtgaaaccctaactctactaaaaatacaaaatcagctgggtgtggtggtgggtacctgtaatcccagctactcgggaagttgaggcaggaaaatcgcttgaacctggaggcagaggttgcggtgagccaagatggcgccactgcactccagcctgggtgacagagcgagaccccgtcacc

SEQ ID NO: 249402 - DNA, 919 bp, Homo sapiens
gtgcagagtatcattgcagcgcttttccagggagtaacgtgctgcactggttcagggctttgtctttattcacaacacattcatgtgcctcagcatgggggcagctgcactgttgcctgccagcctgtcctctttgactgccgaatgaaccaaaggataactctccattcgtgagagagagtgagctacagaggaagaaagaccacgcaaaagggagggggagagaggggggcgaagaggatgttctccggctcactcctacattaggtctctgtgcaaaggcagaggctgtgggagcagcatcaagcaagacttcgggcagtgattctaactattgcctatgaacaccgtggctgggacgactttgacgaggcaatttattacttacgcatagaacactggctgtgctgaaactgggagcgcaaacagccccttgttttctaatttagagacttgcatcttttcgacactcaacagtatcaagacactctgctactacagaatcttctggagaggaaagaagaaaccatgtctagacaaggtgctggaaagacccagggaagacacagggaaatcatctttcgggaatttatctaagaagaacttcttatgatatgaagtctgggggtaagacctgcagtaatttcccttaagatactacagaatttccaaggacttgaggaataattgcactcttgaaagagcctatgaaaaaagaagagacttgggaaatttaacagaagttcactttccaccactgcgcaaactaaggaaaaacttaaagcagtaaatagctgcggttggcaaagctgttttggctcaggagcagctatcaggccttgataaggtccacaagtctgctgttctaaaatcaaaaaaaaaaaaaaaaccccctaattgttgaagaggtattggggga

SEQ ID NO: 249403 - DNA, 1073 bp, Homo sapiens
gtgcagagtatcattgcagcgcttttccagggagtaacgtgctgcactggttcagggctttgtctttattcacaacacattcatgtgcctcagcatgggggcagctgcactgttgcctgccagcctgtcctctttgactgccgaatgaaccaaaggataactctccattcgtgagagagagtgagctacagaggaagaaagaccacgcaaaagggagggggagagaggggggcgaagaggatgttctccggctcactcctacattaggtctctgtgcaaaggcagaggctgtgggagcagcatcaagcaagacttcgggcagtgattctaactattgcctatgaacaccgtggctgggacgactttgacgaggcaatttattacttacgcatagaacactggctgtgctgaaactgggagcgcaaacagccccttgttttctaatttagagacttgcatcttttcgacactcaacagtatcaagacactctgctactacagattgatttccaccatcaacacctttacctcttcccgcctgaaaataaaatatgaaatataacaagtaaatcgcaatctaccttgaatcttctggagaggaaagaagaaaccatgtctagacaaggtgctggaaagacccagggaagacacagatgggatcatccagttgctggaaaacaaactcaggtctcccactggttctacattatgacggagtctcactctgtcacccaggctggagtgcaatggcacggtctcggctccctgcaaccttcacctcccagatggagtttcactcttgttgcccagactggagtgcaatggcgcgatctcggctcactacaactctgcctcccgggttcaagcgattttcttccctcagcctcccgagtagctgggattacaagtgcccaccaccacacccagctaatattttgtatttttagtagagacagggtttcaaccatgttggccaggttggtcttgaactcctgacctcacgtgatctgcccacctctgcctcccaaagtcctgggattacaggcgtaaactagtatctttaaaagaacaat

SEQ ID NO: 249404 - DNA, 1099 bp, Homo sapiens
gtgcagagtatcattgcagcgcttttccagggagtaacgtgctgcactggttcagggctttgtctttattcacaacacattcatgtgcctcagcatgggggcagctgcactgttgcctgccagcctgtcctctttgactgccgaatgaaccaaaggataactctccattcgtgagagagagtgagctacagaggaagaaagaccacgcaaaagggagggggagagaggggggcgaagaggatgttctccggctcactcctacattaggtctctgtgcaaaggcagaggctgtgggagcagcatcaagcaagacttcgggcagtgattctaactattgcctatgaacaccgtggctgggacgactttgacgaggcaatttattacttacgcatagaacactggctgtgctgaaactgggagcgcaaacagccccttgttttctaatttagagacttgcatcttttcgacactcaacagtatcaagacactctgctactacagattgatttccaccatcaacacctttacctcttcccgcctgaaaataaaatatgaaatataacaagtaaatcgcaatctaccttgaatcttctggagaggaaagaagaaaccatgtctagacaaggtgctggaaagacccagggaagacacagatttgttcctttctccaccatgcctcactatgtgtcaccaaacttaattcagcatcagtgctccaaatactccatcctacaattagagaaaccactgaattccgatatcctccacccaaatggtaatgaagattggagaaagtgacgcccatgcatagcggagaagtggattgcagatataacaaggagcacagtaaactgagatgtaaaacaccttattcaacaacgaggatgctgactcaaaagcaaaagttgaagcacattatgaatgaatgtcaaaagggaaaaatctaaagctaacataaaagagtgcaactacatcaaattggataaggaatagtattttatagccaattaatgaatatttaaaggacatcaacctcatctctttgaaacacatatgaacatagttgagctagagggtgacatgatgtatatatttaatc

SEQ ID NO: 249405 - DNA, 1177 bp, Homo sapiens
gtgcagagtatcattgcagcgcttttccagggagtaacgtgctgcactggttcagggctttgtctttattcacaacacattcatgtgcctcagcatgggggcagctgcactgttgcctgccagcctgtcctctttgactgccgaatgaaccaaaggataactctccattcgtgagagagagtgagctacagaggaagaaagaccacgcaaaagggagggggagagaggggggcgaagaggatgttctccggctcactcctacattaggtctctgtgcaaaggcagaggctgtgggagcagcatcaagcaagacttcgggcagtgattctaactattgcctatgaacaccgtggctgggacgactttgacgaggcaatttattacttacgcatagaacactggctgtgctgaaactgggagcgcaaacagccccttgttttctaatttagagacttgcatcttttcgacactcaacagtatcaagacactctgctactacagattgatttccaccatcaacacctttacctcttcccgcctgaaaataaaatatgaaatataacaagtaaatcgcaatctaccttgaatcttctggagaggaaagaagaaaccatgtctagacaaggtgctggaaagacccagggaagacacaggctttggtatcaggatgaagccagcctcataaaatcagttagggaggattccctccttttccattgattggaacagtttcagaaggaatggtaccagctcctctttgtacctctggtagaattcggctgtgaatctgtctggtcctggcctttttttggttgacggagtctcactctgtcacccaggctggagtgcaatggcacggtctcggctccctgcaaccttcacctcccagatggagtttcactcttgttgcccagactggagtgcaatggcgcgatctcggctcactacaactctgcctcccgggttcaagcgattttcttccctcagcctcccgagtagctgggattacaagtgcccaccaccacacccagctaatattttgtatttttagtagagacagggtttcaaccatgttggccaggttggtcttgaactcctgacctcacgtgatctgcccacctctgcctcccaaagtcctgggattacaggcgtaaactagtatctttaaaagaacaat

SEQ ID NO: 249406 - DNA, 969 bp, Homo sapiens
gtgcagagtatcattgcagcgcttttccagggagtaacgtgctgcactggttcagggctttgtctttattcacaacacattcatgtgcctcagcatgggggcagctgcactgttgcctgccagcctgtcctctttgactgccgaatgaaccaaaggataactctccattcgtgagagagagtgagctacagaggaagaaagaccacgcaaaagggagggggagagaggggggcgaagaggatgttctccggctcactcctacattaggtctctgtgcaaaggcagaggctgtgggagcagcatcaagcaagacttcgggcagtgattctaactattgcctatgaacaccgtggctgggacgactttgacgaggcaatttattacttacgcatagaacactggctgtgctgaaactgggagcgcaaacagccccttgttttctaatttagagacttgcatcttttcgacactcaacagtatcaagacactctgctactacagattgatttccaccatcaacacctttacctcttcccgcctgaaaataaaatatgaaatataacaagtaaatcgcaatctaccttgaatcttctggagaggaaagaagaaaccatgtctagacaaggtgctggaaagacccagggaagacacaggctttggtatcaggatgatgctggcctcacaaaatgagttagggaggattccctctttttctattgattggaatagtttcagaaggaatggtaccagctcctccttgtacctctggtagaattcggctgtgaatccatctggtcctggactttttttggttggtaagctattaattattgcctcaatttcggagcctgttattggtctattcagagattcaacttcttcctggtttggccttgggagggtgtatgtgtcgaggaatttatccatttcttctagattttctagtttatttgcgtagaggtgtttata

SEQ ID NO: 249407 - DNA, 998 bp, Homo sapiens
gtgcagagtatcattgcagcgcttttccagggagtaacgtgctgcactggttcagggctttgtctttattcacaacacattcatgtgcctcagcatgggggcagctgcactgttgcctgccagcctgtcctctttgactgccgaatgaaccaaaggataactctccattcgtgagagagagtgagctacagaggaagaaagaccacgcaaaagggagggggagagaggggggcgaagaggatgttctccggctcactcctacattaggtctctgtgcaaaggcagaggctgtgggagcagcatcaagcaagacttcgggcagtgattctaactattgcctatgaacaccgtggctgggacgactttgacgaggcaatttattacttacgcatagaacactggctgtgctgaaactgggagcgcaaacagccccttgttttctaatttagagacttgcatcttttcgacactcaacagtatcaagacactctgctactacagattgatttccaccatcaacacctttacctcttcccgcctgaaaataaaatatgaaatataacaagtaaatcgcaatctaccttgggaaatcatctttcgggaatttatctaagaagaacttcttatgtgaactcctgtgcttaagcaatcttcctgccttggcctcccaaagttctgagattatatggatatatgaagtctgggggtaagacctgcagtaatttcccttaagatactacagaatttccaaggacttgaggaataattgcactcttgaaagagcctatgaaaaaagaagagacttgggaaatttaacagaagttcactttccaccactgcgcaaactaaggaaaaacttaaagcagtaaatagctgcggttggcaaagctgttttggctcaggagcagctatcaggccttgataaggtccacaagtctgctgttctaaaatcaaaaaaaaaaaaaaaaccccctaattgttgaagaggtattggggga

SEQ ID NO: 249408 - DNA, 579 bp, Homo sapiens
tcaacaatagcctactgtcagcaagttaaatggctggggctgtttcagtctcccattacatgaagaatcttctggagaggaaagaagaaaccatgtctagacaaggtgctggaaagacccagggaagacacagatttgttcctttctccaccatgcctcactatgtgtcaccaaacttaattcagcatcagtgctccaaatactccatcctacaattagagaaaccactgaattccgatatcctccacccaaatggtaatgaagattggagaaagtgacgcccatgcatagcggagaagtggattgcagatataacaaggagcacagtaaactgagatgtaaaacaccttattcaacaacgaggatgctgactcaaaagcaaaagttgaagcacattatgaatgaatgtcaaaagggaaaaatctaaagctaacataaaagagtgcaactacatcaaattggataaggaatagtattttatagccaattaatgaatatttaaaggacatcaacctcatctctttgaaacacatatgaacatagttgagctagagggtgacatgatgtatatatttaatc

SEQ ID NO: 249409 - DNA, 1056 bp, Homo sapiens
gtgcagagtatcattgcagcgcttttccagggagtaacgtgctgcactggttcagggctttgtctttattcacaacacattcatgtgcctcagcatgggggcagctgcactgttgcctgccagcctgtcctctttgactgccgaatgaaccaaaggataactctccattcgtgagagagagtgagctacagaggaagaaagaccacgcaaaagggagggggagagaggggggcgaagaggatgttctccggctcactcctacattaggtctctgtgcaaaggcagaggctgtgggagcagcatcaagcaagacttcgggcagtgattctaactattgcctatgaacaccgtggctgggacgactttgacgaggcaatttattacttacgcatagaacactggctgtgctgaaactgggagcgcaaacagccccttgttttctaatttagagacttgcatcttttcgacactcaacagtatcaagacactctgctactacagattgatttccaccatcaacacctttacctcttcccgcctgaaaataaaatatgaaatataacaagtaaatcgcaatctaccttgaatcttctggagaggaaagaagaaaccatgtctagacaaggtgctggaaagacccagggaagacacaggtgagctaagaaagcagtagaaactgggtaattaaaagtcaacataatggctggaaacttgttcaaggagatataaaaagaaagaaaaaccaaaagagagactgtatggatgaactttgtctatttacaattttgtctaaggccaaatctgcagtctggtcccaccgcatgttatctaagttgttcatataccaatactaagagctactgaaattcttccaaaaaatcaaaatcatttcccctttgatttgctagttttccctcttggtaaataaagattcattttttagtaataactgacctgccctaagggttcaccactttcttctgatctcaaatcttgtgctaggtctttaggttacaattcatgaaactaaaaaataaacaaaaaaattctcttact

SEQ ID NO: 249410 - DNA, 865 bp, Homo sapiens
aaaaaaaaaaaaggcaatttgtttacttaccttaaacccttccatgacacatatagttaactggttttcaacaaaggcacaaaagcaattcaatggactgtgaaagggaaatatcttgggcctcttcaagctggggaccccgctgagggcaaatctgcctcccattctattcaaagtcatctctcagctcacagagatagatgcatattctgattgcctcttctggaaaaacttatcagaaactccaaagaatgcaaccatccctctctcacctacatgtgacctggaagtccccaatgggggggccttgctttgagctgtctccacctttctggatggaactaatgtatttcttacatattgattgatgtctcgtgtctccctaaaatgtataaaaccaagctgtgccccgaccaccttgggcacatgtcatcagaacttcctaaggctgtgtcacaggtgtgtcctcaatcttggcaaaataaactttctaaattaactgagacctgtctcaaatttttggtgttcataggacaaaggaatttttggtgttcacagaaaaggctatcgccttttcaacaaatagtgctggaacaagtaaaccttaatccaggcctcacaccctataataaaaattaacctgaaaagagtcacagacctaaatgtaaaacctaaaactatgaaacttctagaagaaaggataggagaaaacctttgtggcttcatattaggcaaagatttcttagatatgacatctaaagcacaatccataacaggaaaaaaagatcaactggacttcatcaaaattaagaacttctgcatatggaagactattagaatggaaagataagccacaaactgaaaa

SEQ ID NO: 249411 - DNA, 358 bp, Homo sapiens
cagtctcactgcagtgtgggagatgatcattctctcatctcttaacagtaaatataccctagtgcatcatgttaagttgtaatagccaagctaattagctttggacctagagatggcagagttgtataaagttaagagtcttggctcaggagtcaatagacttgggttcgaatgttgcttttactacttaacagctgtgtagctttgggcaagatacattgtctctgaaattctgtttcctcttttgtaaaacggaatgataatagtacatgcctatagaattgctagaaggattaaatgagatttgtaagtagtacatctaatacataagaagcagtaaactgttattatgactgta

SEQ ID NO: 249412 - DNA, 272 bp, Homo sapiens
caacagaaggaactggtggtgtgtcatgtgaagacttaaggcagtggttcttaacctcttggggtttgtgtccccatttagaatctgatgaagcggtgggctttccttcttcaagaatagatgaatatgtatgtaaaattttgcatttaatttgagggattctacaggtttacaaacttccttcagaaaacataatatgtaataaaatgactggcttatgactaaagttatctgttatgtcaataaatatgtatgatatactttcctactga

SEQ ID NO: 249413 - DNA, 578 bp, Homo sapiens
gacaacggcttactgacattctcaaacctgagccctggcagtattacttcaaacccatgatgaaggagttcggcagggagagctattaggaagctccttggatggcccagacatgaggtcatcggggctggaaatactgcgtgacaatgggagatggcagggtaaggaaagaacatatgcaagagacactctcagagaatggacagtatttgggaccagtgtgtgtggggaggagaggggaagaaaggaaagaagaaaaggtcttaaaaggccactgcagggaccctccaactgccgctactcagctccccagagcagaatctcttttcttctacctccaccttcccgcactcctttccctgggtcaccgctccatttggaatctctgtacctcccctcttaccccctcatcagccaccctctgactcctgccctctccctctccataagcttcttcctctcttgctacaagtaaattggatcacctagagaaaatattttctgaatcatgttaaatattaatcatctcaatctcttcttttccttttaccaacattctcaaaggagtaatcttaatt

SEQ ID NO: 249414 - DNA, 148 bp, Homo sapiens
cctttgttgagatttttctcttgcatgagcatttcatcatttcatcctctgtggtcctttcgatctctctgctgaaatttgctatattcattcatattcttcaattttccattgaagcctttaatatattaatcaaaattatttgaca

SEQ ID NO: 249415 - DNA, 473 bp, Homo sapiens
tgcccagcccgtctctaaagagtatcagcatggctgggcatcagcattctacaagttagagggagcttgcagacatcgaaccaatggatttaatccacatcctcagaggcttaggctttctgagaaagatgaataggaaaccaagtcactgtgcatccctccactcattttagccaacgctgcttcacttttactgccttatattgtgaagttcttggggagatttttaatagtcctcatactgaaaaattaaaatccactcataagccagcagttagaaagtcgagtcagtacccagctgaatcgtgaccacccgaaccaaggggtcctgcccccatggagccaggtccatgcggaatgaacagcatcctcctttacttcactccctggagcggctgtgcagagaatctgtgagaatcaatctcctcccttctttggctttttgttttcatagagttgaattgaagacaatg

SEQ ID NO: 249416 - DNA, 263 bp, Homo sapiens
aaagaaaatctagaaaatggagatgtgtttgcttttatgtgataaaactaaggaaatgcaaagggttcagcacagtactccttgtgtaggtaataattcttataaatgacaaagccagaaggcattaagttttaaccatacatatatgcagttatgtgtttctctaatatacatactctacattagtttctcttgcatattgttgatggaaattaacatcttctttaaaatgctcttctttcttaccataattaaatttaaaa

SEQ ID NO: 249417 - DNA, 400 bp, Homo sapiens
ccagcccaagaagagatgaagcacatcactgcaccagctacccttactgctatagctggaatgtttatcaccgccgaaactcctgttgaaactgaatccccagtgctgcagtattgggaggtgggcttttaagaggtgattgggtcatgaggtctctgcccttatgaaaggatcgatccactcatgtattaacagattaatgggttagtagatgaatgggttttcactggagtgggattggtggctttataataaaagggagagagacctgagctggcctgcctgggaactctgcagaggccctgccccaggaaggccctcagcagatgtggcccctcgacctgggacttcccagctgccataactgtaagaaatacattctttatctttataaattacc

SEQ ID NO: 249418 - DNA, 147 bp, Homo sapiens
aaaaaggaaatgagttgaaggccactgctgtggctactgaaataattgatgcattttatcttaatacttgactggaaatttcctgtttctttggtttgtatcttgttattaatttttatcattaaaatgtataatagctttatagta

SEQ ID NO: 249419 - DNA, 393 bp, Homo sapiens
cctagaggcaagggatgataaatgtcttaacaggagtgcagaacagttcagcgcagtgaattgcccatcccctatgcacattgagaaacgctgattaaaaattgaaaacttgtcctgtgaggaacacctgaaagttcgaaggacttattggctggcgaagaaaagatggaggaatgtgttaattttaagggctggcatgtggaagaagagcatttatttgtgttccgatgaataactgcctcaaaatagtccctctagcagagattacttgttactaatagaagatgataatttacctctcagccctagatgattgcatatcagataggatgatatatgtgaagaattattcataagttataaatttgtaaaaacatgatgtatttattattg

SEQ ID NO: 249420 - DNA, 1181 bp, Homo sapiens
tctacacttgccagtatataagcaggttgcctctgactgcaaatctctcaacaaagcattttcaattaaagcagatgattttttttttttttcactatatgcaatctgctggaggtttctatttgcatggaatgtctttttccatcccttcactttgagtctatgtgtatccttacaagtcaagtcttttgtgggaagcatatagttggctcttttttaaaaaatccattcagtcactccaggtctttggagaatttaatccctttatatccaaggtaattaccgacatgtaatgtaagaacttcctactgccattttgttaattgcttctagttgttttgtagatcttttgcttctttctctttctcctttcctttatgattatcttctgtactattatgctttgattccttactttttatcttttgtgaatctactttaggcttttcctttatgattaccatgagacttacaaaacccatcttatagtgataacaggctattttaagctgataacaatctaactctaactgctaaaaagaaatcctctacacttttactccactatccccacatttaaaaaattttaagtcacaatttgtatctatagcaaagtacatcttgcataaagatggataaaatacactgctgtctggtaagagcttacaggaaggaaagacattcaaataagcatctatgataattgcaagtcactgaacaaaatcgagcaggatatatcagatcacagctagattttatttgattttgtgaataatttctgacaaaatactgatccccatctggtatctgccctgaaaaagcaaattttttaaagctcatctgagattttctacaactctgttttagctggaaaatctttcttttaaaaaaagataactttggccagatgcagtggctcacacctgtaatcctgaccctacaatcacaattttaaacttttttttctggtgtcactcactctattttaaatacgtctttacatctatatttgattttccttttaaatctattgattccttcctagaaaaatgtaggacttgcttcattattttgcaccttcttgggaaatctgatgtttgttctctcgattccctttgggttttgaatactaatatcactcttcctctattaacttatcttgaccttatgctgatatgacg

SEQ ID NO: 249421 - DNA, 412 bp, Homo sapiens
tgccacgggcagtaccaggggtgaccctgcgatggaccactcctgctctttttccctccctgagttttagagtctccggcggacctgtccagaggcctgcggccttttcatcctttatgctctccaccccaggagagccccttggtagatccatcttggagctgtgtccagcagcctggaccacctcaaggccctgtccctgagaaaggatgcaggatgaacattacaaaatgctgatgaaaaatatcaaggaacatctgaataaatggagagacttcccatgttcatggatcggaaaatgaacataataacatacacaagcttattctacgtggaaaaacacaggtccaaaaatgtccacaagatttctcaaaaagaataataaagtggaagcactcacttctcccaatat

SEQ ID NO: 249422 - DNA, 485 bp, Homo sapiens
tccacagccgctcccacctgaagtgaaaggcaggaaaagccagcctggccccctggcctgaagtccctgcctcagtcttcggccaggcacagtggtctctgaacagccggcacaggacagtaaagctcagtctgctaacagctcggctcaggacagcagcaaagtgaaactgccgccaagtgctgatatgtctggcacggcccaggagagccccttggtagatccatcttggagctgtgtccagcagcctggaccacctcaaggccctgtccctgagaaaggatgcaggatgaacattacaaaatgctgatgaaaaatatcaaggaacatctgaataaatggagagacttcccatgttcatggatcggaaaatgaacataataacatacacaagcttattctacgtggaaaaacacaggtccaaaaatgtccacaagatttctcaaaaagaataataaagtggaagcactcacttctcccaatat

SEQ ID NO: 249423 - DNA, 410 bp, Homo sapiens
agatgctcactttcccagcctcccttatgcctagggatccccatttgatcttgttctgactaatgagaggtaaagagaagtcatctggaagtcttctgggaaactttttggtttcctgtaaaaggaacaggcatgaagtcatacatagaagcgctttcacctcatcccaccccacctacaaatacatacactgtatcttctttgaattcagatgcaatgcctggagctggggtagccaccttgtgaccaagaagcagtaagtttgaaggcaacagtcaaaagctaagtagagagaggcagaaatgaagaatgaccctggatacttgacgagacattagagctgataaatcaacctcaaaatacctacctcatagttctcaagtgagattataaatgcttgagtacttaag

SEQ ID NO: 249424 - DNA, 478 bp, Homo sapiens
ctggtacagctccagaacctggatctatgtgtgatatcacctgttctgattagctaggtcttaggtaagagaaaggacaagaatactctactccagtatcacattttacaaataggtaaacttatgtcattgctctgggtattttgtggctttgatctctccctgctgacatgcatgtttacacttacagattgtgcaaccagattctatttacaccagcagcctctcacataaacatagcaggtcactggaaaagatctggaaagctcaaagggatacactctgaaaggagggctttaagatttctatgctgacatctcacagatcagaaaatgtctcctatgggttttctgtacattctcaatccaaaatctggctctctcctgtgattcccagggagagctcagctcttatgtacagattacaggtaagatcaacctgactcttcattctttggtgttacagcaaggagagtaaa

SEQ ID NO: 249425 - DNA, 111 bp, Homo sapiens
ttttaaaagatttcttttttctctcaacaccatgattcctttaacaacatgtttccagcattcccaggtaggccaaggtgtcctacagaaaaaccttgggttagacctaca

SEQ ID NO: 249426 - DNA, 285 bp, Homo sapiens
aagtaaggagaaaggtgagaattttcagctatgctgattggcgaagacaaacctgagggagtatttggataggaccttactcagagaatgggtagaactttaatacataagaagaaaagcaggtataaatgggagctaaacattggtacacatggacggagacgggaataacagacactggggactacaagggaggggagtgagggaggagtgagggttgaaaactacctattaggtattatgctcactccctgggtgacaggctgaatcataaagcctcagcat

SEQ ID NO: 249427 - DNA, 284 bp, Homo sapiens
aaaggtagatgagtaggaagattaggactcctgagttgcccatgatttcatctaatttttggattcagaatgtattttatgaataatatgcagagatgcatattaggaatgtgaagccagaatgggtcagttgtagctgctgcaaagttctgtagctgatggtcatttaattgcatgggggttattttatctttcatgattgtggtgcacctgatgctggcggggtatttgtgtgtttttgtattgttatttgattacaaaaataaagcaaaaactaacaaata

SEQ ID NO: 249428 - DNA, 430 bp, Homo sapiens
gagccaaccaatcaccacgcagatcactggaaagattaaatcagtccaatagatggagatatttctatgaatatagctgatattaacattccaatatttcattacactgacaaagattgcaatgagaacagacaatggaacaaattaatctattcttctgacagtatgtaatgagaatgggatgtggtttaaaaaattaagccattcttagtgcaatctcaagattgcaatctcatggtctctctcagatgctatacactctggtgatacgtcattgaaaagtgtcagtttaacaaagaatgtgtcttagctcttgctgggattgtagaacacatttgctttgtctcaccgcagccctgcccattaaaaacaatgaagtagaatcaattatacttttcagaacacacataaacacaatcaaagttgaaaa

SEQ ID NO: 249429 - DNA, 827 bp, Homo sapiens
aaatgatgcttgagacacaccaagatacctgcacactagaggctgcagtcacctcagaagaaagatgccccctgctctggctggtcaaacggaaccaagtccgtcttcctgagaggtttggtccccttcaaccagctacagcagggctggcaatgcccagtccttggagaaacagaagagattcaactgcaactgaaattacctactaaaactttccttgagaaaacaattctggttttttcaccatattcttatgctcccaggaaggaagagaagaggagtcctggagtcaaaagtgagcaagattttaatgctcaacacacactgttctgtgcctttgcactcacagctgcagccacttacatgcttttgacagacacacagtcaagaaagagtttgaggatggagtttgtgccaaccctaagccagccaggggaagagcatgagacatagaagacagggctcctgctcactaggggctaacagtctaaggaaagaaattagacatgtatatatggtgtgatccaattgaattgcaagttatagcatggctagttccaaggcataattcttacctatcccaccaaatatgcctagcacattatgtatcatcaagtctctattgatctattcagcccaagatatctattcactaagcaatcatttctcagttccctgatctgtagaatagggataatagtacctgtcacaccaggcacagtggcttatgcctaaaatctcagcatttggggtggctaagacaggggattgcttgaggccaggagttccagatcagcctggtcaacatagcaagatgctgtttctac

SEQ ID NO: 249430 - DNA, 232 bp, Homo sapiens
taatgtccttctctgattcccccagtgaatgatacaggaggatatcaggataagaaaggcaaatagttcctggttaggctggagggaactagcatgaacctcctgccacagccacatcatgcaaggtactatgtccaatcaccctctcaagggtactgcatccaattaccctcagcttataaattttcctcccatgaaaatgactgtcctggctcagcagaccccggtttta

SEQ ID NO: 249431 - DNA, 313 bp, Homo sapiens
gtcccacttgtgtctgtcttggagctttcctaatcccgggtttggccagactcggcaggaatttctgtctgatttcattagggccccaagccattcattggaaactggtgatgatttccaacaggggatcgactcacattactgttttctaaattagggataattttcgctaacgatgaaaagcaagaatgtgtaaagttcctatggggaatctttaaaatacaaggtattcaggaccttcttgtcacaaattaatagacgtagtatgttaagtaatctagcctgtggtaataaataggcctctaaaagttta

SEQ ID NO: 249432 - DNA, 614 bp, Homo sapiens
attttctgctgctataataaaatatcacagactaggtaatttataaagaaaagtaatttatttatcttatggttctggaggctgggaagtccaagaccttggtgctggcttttgctttgcttctggtgagggccttcttaatctgtcatcccatggcagaatgtggaagggcaaggaagcatgagggacagagagaacacaggagctgaacttcaacttttttatcagaaggcaacttccacaataactaacccacttctacaataaattaagtgaacctctggcagtggccagattactggattctgcgggtgacatgctccaaagcacagtgtctctgctcaaagctcacgagagtgagccgacattgctcaggtgcccaggcttgaagggtgtccaccaacacacagccaacactctgtgttctccagagtgcagggcactaatggtgatctctggagtcctgggaaagtccttgtcctccctctcatcttcccccagcacagaacaccacagccagtcaagaaagagtgtggcaggctgtgggtgaccggatgtgtagactcataatctaattacctcttaaaggtcccacctcttcatattgttataaa

SEQ ID NO: 249433 - DNA, 476 bp, Homo sapiens
gatcacctcctttacactcatctatgtttctattaatctggcccactgtttaatgaacactatactttcatgttgtgccatgctattttttcatttctctcgcagcaccatatcttcccatactctgctggaacagttcattttctcggttagaattcagtaacccagtattaatggggaaaacatctaacttgtagtaagaagacctggcctccagttttgattctgctgtatataggctgtttgatcctcaaaaaaaaaaagggcgagttgctctatgagacgcctcatttttaaaaggttatctggtgccttccttgagtcaccaaatgtaattgttgtatgagtgaaataataacatgttttgtaagtggtttataaattgtgaagtgggtcacaaatatttctaatttcacttatttttcctggttaaatctcccctatttgatttagctaacactcctgcttgccttaaa

SEQ ID NO: 249434 - DNA, 445 bp, Homo sapiens
ccagtcatggagccatggagatttctgcctctcctatcctgcttctggtccccgacaatgaagcacccaggtcttaggtggggataggagtacctccaagccagatcacaccctctgcttactacaagcagggatacctgtgctgcaatagagaatacgagataacctctgaatcaagttcaggattagagatttttaatgaaaaagaatgagttctaaataccaaaattaggccactatagtagccaagagttactattagaccactatggtaactgaaaatttatggagtctgggaaaaaagatgtggcaaaaggacctagaatgtaatgaaaaattggagttcaacagagacattattgaaggacagttattaaagaaaaaaatatatatttattgatgaacttttaataaaaattatttgttctgtattttctaggaaagt

SEQ ID NO: 249435 - DNA, 507 bp, Homo sapiens
ggtccaatgtgtgagttaccatatgacctaacaattccacacctaggtatttgcccaaaagcaatgaaagcgtgtctacacaaaaactgtccacaagtgtttacagcagcattcttcacaacagcccgaaggtgagagcaacccaagtgtccattgcctgatggataaacacagcatctccatctacacagtggaacactgttcagcagtaaaaatgacgagtgctgaggcatggcactacgcagctgaacctcaaagacacagtgccgagtgagagaagccggacaccaatggacaaataccgtgattccatttataggaagtgtccgggagaggcaaatccatagagacagagagcggcttggtggcgattaatgctggagaggagtcgggggtgacagctcaggggtacaggggtctctctggggagtgacgaaaatgttttcatgattgtggtgatgcttgcacaactctttggataaacaaaaactcacagaattgtgtgta

SEQ ID NO: 249436 - DNA, 543 bp, Homo sapiens
aagtttgactcttcagtctgctgcatctcagccaggagttcatccatcttgaaggtctgaggggcacgggatacaagggtacactgtggtcctgcaggaattcacccaccaattcatcttcagaagctactcccaaaggcttggagactgcctcagaggctggggctcggaggcggggcaggggtcaggcgtcaggccttagtgccttctgctggggtcggcgggtgttttctttttactgtatttaactacattaatcgtgctcagtatttcggttcactaatctcatcagctgagactaatttaatatttaacccgtatgttgtatattaagtaggttgattctacttccaactgtttgtatttgcctctttttcaaatatggcttgtcaagcttgtagtcatttgctctttaacattttttttcctatttttctcattgtgttgacttaaacatttaaaaaataagtcctataactgtgtgtaacatatgttttaattttcttttcacttatgggagacattacatttgacacatctgca

SEQ ID NO: 249437 - DNA, 384 bp, Homo sapiens
acaaatcaccagatagcctattttatagccagcagctaagccaaataattcagaacactagaagggaactgaaaagatgaaatgacttgggagaaatactttggattgctgggaaacctatttggaatgctgataatgggtgattatttggtcaaagcacctgtgttaaaataagctttgctgctttgaacccttacttagtgcagtgaaatttctttatattaagtgtttctatttggaaagatcatttggcagaaaatgtttgttttgtcacttaaaatgttttaaatttagtctttctttttgcaatttactataattggttgggtaatataatgttgcgacctggggcttatttgttattgtggctttgtatggtgtaaa

SEQ ID NO: 249438 - DNA, 372 bp, Homo sapiens
aatccccccagttttatttttttattttttgtcatatctgattcaatacttttatttatttttattttttatttttgagacagcatcttgctctgttgcccagtgtggagtgcagtggtacaatcttggctcactgcagcctcaacccccgggctcaatcaccccaatttcatatcagactcacttgcttataacagcacacttcaaatccttctcagaccattttccaaccactaagaatcagtatatttcatgccagcttctgtcctagatactatggctataacacagttttcaaggaactcacaatttggagagagagagagaaatactaagtatgtaactagctgtcatagttctttaaaaaaaaaa

SEQ ID NO: 249439 - DNA, 229 bp, Homo sapiens
atattagtcttcctggagaggcatttggatttataactctcctctacccggaaagtgtccatcatagcaacatcttccagggattcttaaatataacgatgctgttgacatgtctggttatccctttaccttttcagaatttgtgggaggtgagaagtctgggagaggttatctgggttattatgaaacctacacacttactgaattaaaaaaaaactatgtaacacaa

SEQ ID NO: 249440 - DNA, 817 bp, Homo sapiens
  misc_feature (766)..(766): n is a, c, g, or t
ctgtgtgatctgtttttcgcctgttcttccctgccctcattcagactttactctaagacaatatgggctgctttttcccacagctagccccttcccctgccaccccctgctccccataggccttttattgcttctgtgcttttactcatgatgttccctaggctaggagctgcctgcatcttcacttgactggccagtttctactcattcctcatggcatattgcttgagtaacctctgctaggaatcgtctccttattctacctcccccctagaaaaaactggcttacgtgttcctctcctgtgtttctactgctctccatgtatgtgtctatcattctaagcctttttttgtgtctttttccccataccataacatgaccaccttcaggaaaggaattatgttttactcaatttgtattttcttgtttctggcattttatggattagaataatcggaaggatttactcccataaacaggtgagattggcgagagaagaaattatttttcaacgttattattaaatagaagctctcatgctctttatagccacattcctccatttacaatgtgctgttgaggctgagaacttccttgttctttaggtttctcacagattatttttctgttacaagctatttgttacttactcagttctgagttactgagattgtttaattctatacttagttgtatggcagattacagctcacacctgtaatcccagcactttgggaggatcacttgaggccaggcattcgagancagtctggcaacatacacatatctggatacaatttcacatcaggaacaaca

SEQ ID NO: 249441 - DNA, 339 bp, Homo sapiens
cgcctaagcagacgtgacaactaaatgtagtgtgggatcctgggtgggatcttgggacaagaaaaggacattaagggaaagctaaggacatctgaataaaccatgaactttagttaatgtatgggtagtggttcattaattgtaacatgcttatcatactaatgtaatatgttaataataaaggaacctattttagtctaaaaaatatttttgggccaggcatggtggctcacgcctgtaatctcagcactttgggaggctgaggcgggcggattatgaagtcgagttggagaccagcctggccaacatgatgaaacccccatctctactaaaagtaga

SEQ ID NO: 249442 - DNA, 905 bp, Homo sapiens
actccactcaaaaaaaaaaaaaaaaagacagtgtttcaccacgttgcccaggccggtctggaagtcctaggctcaatcgatcgccgcgctcggccgtccacagtactgggatcacaagcatgagctaccacgccaggccgatctattcctttctggttactaaattggaccgggggcgcggtggctcacgcctgcaatcccagcacccagggaggcggaggcgggcggatcacccgaggtcaggagcttgagatcagcccggccaacacggagaaaccccgtctgtacaaaaaaaaaaccaccaaaattagctggcatggtggctcatgcctgcaatcccagccactcaggaggcttaggcaggagaaccacctaaccgggaggtggaggccgcggtgagtcgagaccggaaaacactctagcctggaaaacaagagcgaaactccgctcaaaaaaaaaaaaaaaaaagaccgtgtttcaccatgtcgtccaggctggtctggaactcctagaacctgtagatgttacctcatttggaaaaagcatattttcaggtatgattaagttaaggatcttgaggagagattatcctggattgtctccgtgggcattaaatcctggcacatatatccttataagagggagataaaggagatttaacttcagacagaagagaaggaggccctgtgaccaagaaggcagagcctggagtggtggagctgcaagccaatgaatgccagcagccatcagaagctgcgcaagtcaaaggatggattttcccctcagcctctgagagcactggctctgctgagacctagatttcagcccagtgatactgattttggacttctgatatccaaaactgtgagaaaataaatttctgttgttttaagtcaaaaaatttt

SEQ ID NO: 249443 - DNA, 416 bp, Homo sapiens
acgtggttctttattcttttcatacatagtgtcatttaatcttcttgagaaccctaaatgagtcagggcctactgttctcattttataggagaaactgaggctcgctgagattgagttgcttgcttatggtcatatatctaaccaatggcacctatttgtgactcttctaactatacaactgattgtttttgtgttattctcaacccctggttatttcttaggaaataagttaaaattctagctgaaaaatgcgcttacagcaaattatttcatatcttggctcccacatctctaaaatatggataacaatcttttttaatagggtgattccgttaagtaagatgatatatgtgaagcatgtagcatgcaggatatgtaataagagctcaataaatgttacagtacctttcttact

SEQ ID NO: 249444 - DNA, 267 bp, Homo sapiens
tttgttttgttttttcttgaactgttttgttttgttttctttgaattttatcaagaatacaaaacccccagatgcaatattttaaactccctatcaaagcgaagaccttaaaattaaaagctttatgtctccaaaaagcaaaacccaatgacaaaggtataagccaagcatgcatcaagttgttcaaattagaactgaagtgagatttcttgaataaatatagaggaattaactccaaacaacaggaaaaatgaagataggagacaa

SEQ ID NO: 249445 - DNA, 669 bp, Homo sapiens
  misc_feature (646)..(646): n is a, c, g, or t
  misc_feature (648)..(648): n is a, c, g, or t
ctcagcctcaaactcaaacggactgagccacgcttctggtttggtttccctggttctctggcttgcaagcatcatatcatgggacttagcctccctactcacacgaccaattcgcctaataaatcccctctcatatatctatatatctctctatctctaatcatctttatatcatctatatttatctatatctatataccttatcagttctgtatgtacagctgtgactaatacactgggctaggggctgacagtgagagacaggactagctgaatttcctaggccaactaagaatccctaagcctagctgggaaggtgaccgcatccacctttaaatacggggcttgctacttagctcacacccgaccaatcaggtagtgaagagagctcactaaaatgctgattaggcaaaaacaggaggtaaagaaatagccaatcatctattgcctgagagcacagcaggagggacaatgatcgggatataaacccaggcattccagctggcaacggctaccttctttgggtcccctccctttgtatgagagctctgttttcactctgttaaatcttgccactgcactcttttatgttccatgtttgttacagctcgagctgagcttttgcctgcactccagcctgggcgananagtgagactccgtctcaaacc

SEQ ID NO: 249446 - DNA, 322 bp, Homo sapiens
ttatgtgtatatctttttttgctgcctgtgcatcattattccaaatgaaaagtcaaattaggctgggcacagtggctcatgcctgtagacccagcactttgggaggcttagacaggaagattgcttgagcccaggaatttgagaccagctgggcaagatggtgagagcctatatctacaaaaaattaaatgggcatggtgacacgcacctgtagtctcagctactaggaaggctgaggcaggaggatggcttgggcccgggaattcaaggcagcagtgagctatgatcgggccactgggtgacaaagtgagaccccatcttg

SEQ ID NO: 249447 - DNA, 325 bp, Homo sapiens
gggttaaatagagatttaaaaaaataaaataaaaaggctgggctagggtgctttttgtgctgaattctccacattgttaactgccaaagctagttttagagaatgagaaagtcttaagcaaaatactcccaggtctcactccagaacataaaaatggtgtgtgatcgaatggtatatattagaaattacatctgttgtaattaaaattgtgtgagcaattaaacatggttgactttttcaagcaaaaatcagttcatcttttgatgtaattttctaggctaaatggcaatctctgaaagatgaataaagctatatttatttaaat

SEQ ID NO: 249448 - DNA, 1202 bp, Homo sapiens
gagactagtgtgtgcaaagaggcaggcggatgatccccatcctacaggggcatttattttgtggacaccggggtcacctgggaagcaggtctggcctcagttctccggcctggggcactgtttgttctgtgtctcgcttgtggaataaagaggattcctgtttcagtgaggaaccacacctgctcagagggaaaatactctgcttgtcagaatctttcactttctgtgaaccagctccttggcctgatagggtcacagggcccaggagtggtcaaggaagcttctgtgaatgtattgaacgtcaagagtgtccagggggatgtgtggtgtttggcccgattcctgtcattgccagtggaaatgccatctctggagtttgccccaggtgtttgtgaagcaggttgggattcggagctgaacgctcctctaaagatatgtgctggcttcttatgtcatggctagacagcccctgctgggcctgtttgctgtccctttctctttgcccctgagttgtgtcaggagatttgaggaacttctgactcatcctagcaagtggctatggcctttttgcaaaaagctgtgtcccaagggaagaggcaaatgtgacccaggtaggtgccagcagtcacatggcttgcagggatgacaagctcaaacaggacttgatggctgggtgtgatggaaaccataacacatgattcttgggagcaggtccatgctggctggcaggatatttggctctgtttgtgtttgaacagtctgacaacagccataaagcctagcagctgtgaggtatttcaggtaccggaggacttctggacttcggttaaccttggggtcttgggagtagaactttagctttgaataatttaagggcttggcctgtaacctcacgcctgtaaccccagcgctttgggaggccaaggtgggcggatcacttgaggtcaggaattagagaccagcctgggaaacatagcgaaaccccctctctacaaaaaaaaaaaaaaaaaaaaaaaaaaaaaaaaaaaagaaagaaagaaagaaaaaaaaaaagagccaggtgtgggggcacgtgcctgtagtcttagctacttgggagctgaggaaggaggattgtgtgagcccaggaggtccaggatacagtgagccatgattgtgccactgcactccggcctgggtggcaaagcaagaccctgtctcac

SEQ ID NO: 249449 - DNA, 866 bp, Homo sapiens
gagactagtgtgtgcaaagaggcaggcggatgatccccatcctacaggggcatttattttgtggacaccggggtcacctgggaagcaggtctggcctcagttctccggcctggggcactgtttgttctgtgtctcgcttgtggaataaagaggattcctgtttcagtgaggaaccacacctgctcagagggaaaatactctgcttgtcagaatctttcactttctgtgaaccagctccttggcctgatagggtcacagggcccaggagtggtcaaggaagcttctgtgaatgtattgaacgtcaagagtgtccagggggatgtgtggtgtttggcccgattcctgtcattgccagtggaaatgccatctctggagtttgccccaggtgtttgtgaagcaggttgggattcggagctgaacgctcctctaaagatatgtgctggcttcttatgtcatggctagacagcccctgctgggcctgtttgctgtccctttctctttgcccctgagttgtgtcaggagatttgaggaacttctgactcatcctagcaagtggctatggcctttttgcaaaaagctgtgtcccaaggtgggcggatcacttgaggtcaggaattagagaccagcctgggaaacatagcgaaaccccctctctacaaaaaaaaaaaaaaaaaaaaaaaaaaaaaaaaaaaagaaagaaagaaagaaaaaaaaaaagagccaggtgtgggggcacgtgcctgtagtcttagctacttgggagctgaggaaggaggattgtgtgagcccaggaggtccaggatacagtgagccatgattgtgccactgcactccggcctgggtggcaaagcaagaccctgtctcac

SEQ ID NO: 249450 - DNA, 184 bp, Homo sapiens
gcaaaaagcatacttgaataggaagaaagaaattcagtttgtagaaaaaggaaaatctcaggtttttgaattacaaacagtctttcagttgatagaaacatagattaatttgggggaaattatataattgctgggctattttcagcaatcagtcatgtaaaatgctgtcctaaacacaatgtta

SEQ ID NO: 249451 - DNA, 429 bp, Homo sapiens
tcttaatgtgaattagtacatgatgtgctacagggcgattcatattgtttatgttcttttgtttgttctttgttctgttttgtttttgttggttggttgatgtcatgtcacaaggaaatgtgtagaatgttttcataagacattaaatcctagtttaaaatttagagatgccagaaccaaagttgtcaccctttaacagggtgacaggcttcatgctctattctctcaaataattcattctctgaggggtctagatagctaagatttaaattctctaggtataaataaaattcaaaagtaaccttcagggtagcacatttcaaagaacgtagcctgaaactctgtataattttttgtttttggagacagagtcttactgtgttccccagactggagtgcagtggtgcgatcttggctcgctgcaacctc

SEQ ID NO: 249452 - DNA, 460 bp, Homo sapiens
aagattacgaagcctgcgttatttcccctaaatccccttcgaggaagatttgaatccctcatcaacaaattttcattgattatgtttctattatatatactgtagactctatattcacgaatgtaatcatactcattcagaaaaatataggaagagaaaatgagtatgacctgtagcctgaatttcattataaaagatttaaaaatatacattttatattaaaattgatgtaatcttttaattatgaagtctttgattctttagatgttttcatccataacccaagagcaagatcttggcatcagttttttccaggttatgtctatatcatctattattacttaaaagttggagttacatatagatatatagatatatagagagttatagatatatgtaattttttttcattccagtcccccacccgagcaagacccatattttatgtaacttaaaagta

SEQ ID NO: 249453 - DNA, 199 bp, Homo sapiens
aaaatcacattaaaagcattctgggaaataagagttaatatcacatggccaggagttaaagtatgtttttatgttttctttaaaattgtaaatgcacatttttaccactaagacatactaattgttacttcaataagccccaacagaaaaaaaacaactgtttcatattttatatgggaataaatgtattttggcttca

SEQ ID NO: 249454 - DNA, 358 bp, Homo sapiens
ctgcattttagcaaacattttcacagtggtttacaaaataggttagaaaggctgaaggcagaaagatctggttcttagtgagaaccagaactagagcactgatgattcagaggagggtagagcatggaatttatgaagacttgcagagagaattgatgagattggtgaaccattagagctggatgatgaaagaagtggagtaattaaggatgattccaggtttcttttaagtatgatctattgggaaacaattccagagattaggaaatactgaaggagaagctgtgttttgttcttttctatcatgggtagggtgaatcacaggttgattgggaggatgatgaacaagagaatgaaa

SEQ ID NO: 249455 - DNA, 198 bp, Homo sapiens
ttggtggtaaagggatgggaaacgtgtgttgccaaggagttcccagcacctgaaagaagcagaaagtgtgtggcaattaattgtcctataaaggttggaaattgtataaagcaaaaaaattaaagtttaaaaaattttaataattattttaaatacctgaacaagtccccagaataaaaacttatggctgttttaaga

SEQ ID NO: 249456 - DNA, 839 bp, Homo sapiens
tgttaaaagtacatccatatcataaatgttattagttctccctaaaataatcatctgtatgttcaataaaattttaatcaaaatatccaaagaatttttcatggaaattaataaactggtcctaactcttaacataaaaattaagagtaagattattattcaagagggaagatatttttattagatatccaacttaatatgtgggagtataaaatgctatataaccactttggaaaactgtttgtcatttacttgaaaaattaaacatacacctactccatgacccaggaatttcactcctaggtatttactcaagagatgaaaatcagttccataaaaagatctgtacaagaatgtcctttggatttccttagtagccctaaactggacataacctcagcatgcattaacaggagagtgtacctcagggttgttgcctcttggtgacaaagtagatgccgtatcactaggctttacatccacacttcatatggcacatgcaggaagcaaggggttttttcctaatgaggctttgctttttgatttgaaagggctgctttcccaggcttgatgtttatcttgttgaccagatctatgttacatgagccccagccagctgtatatttcagctggacacacactaaatgaagttggagttgtgtttgaaaagaaggagcaggaatggtagagggcaagaaggtgtcagctgtgtctgtaatactttattttctggaatgagatctgaagcacgtgggaaaatatcaacagatttgttaaatctaggtggtagggactgggtctttttttgttttcagtttttttttaatatttcatatttt

SEQ ID NO: 249457 - DNA, 597 bp, Homo sapiens
cagagaagaatttcatgccagggattggctataaagttcttcaaaagactgaaagaacagaagggaggtagaagcgggagccagacaaaagggaagaagggctttgcagccacagatcaggagctgctccggcccttggcttggagccccgagcccacatttgccactgagctgtcggagctgctgtggccactgcagtgctcagaagcccaggagtctctttgccagtgctgctgacaacttaacactgctgctgtccaggctgccaagcccaccaccaaaagaagaaacatctctgcactttctccaagcttctaatttttaccccagtgccaagaaatagcagaaccaaactggaagccacctggctagaagtctgggaggagtggtccgcaactgtaaacccccagcactgcagccggtggcctagaaaggcgtgtggagcaaaaagccagcacacagaagtgttaattacacctgttattctgactttgtagtcctttgccatacttgcgaataacttaagtgaatttgatgttactggaattagtttgcctttattttgccagttgaaaaaaaagatttctaaaaaactca

SEQ ID NO: 249458 - DNA, 492 bp, Homo sapiens
gcggttgtgtgagtcaggaagaggggccagatatctgagtgttcctctttagtttcttcaattgcaggaaagacagtggttcctgactcaggaagacagtctcagaaacatgtggaatgatattgagctgctaacaaatgatgataccggaagtgggtacctgagtgtcggttcaagaaaagaaacatctctgcactttctccaagcttctaatttttaccccagtgccaagaaatagcagaaccaaactggaagccacctggctagaagtctgggaggagtggtccgcaactgtaaacccccagcactgcagccggtggcctagaaaggcgtgtggagcaaaaagccagcacacagaagtgttaattacacctgttattctgactttgtagtcctttgccatacttgcgaataacttaagtgaatttgatgttactggaattagtttgcctttattttgccagttgaaaaaaaagatttctaaaaaactca

SEQ ID NO: 249459 - DNA, 392 bp, Homo sapiens
tgcaacctctgcctcctgggttcaagtgattctcctgcctcagcctcccaagtagctgggattacaggcatgagccaccacacccagccgagttgagagagtctttgcaggtgagggatggaagcactgaatcagcagccaagtttctgattaggtcatcagagaagatggggcagagcggaagagccgcacagacacactggaaactggcaacagtaagcggcaaagctccaaaaggaccaccacagaccaccttcaaatcagtgggcgcttagctgatacaagaaggtagtcttaggtatttgttgaaattgaaattacaaagacttcagatgctcttcctagctcatcaggatcctacagtgtaggaacacgagtgtttttccagtccc

SEQ ID NO: 249460 - DNA, 165 bp, Homo sapiens
gtacagacgaggttttgctgtgttgccagggctggtgttgaactcttgggctcaagctattcgcccaccttggcttcccacagtgctgggattacgggtgtgaaccactgcgcgtggccattattaaaatagttttttcttcctgatactaaggatcactgttta

SEQ ID NO: 249461 - DNA, 1166 bp, Homo sapiens
ctggaggcaaagcagttatgcctcccactctggacacaggagaacagtgggagaggggtttctgtttgttctatcagatgctcccagaagagagcagatcagggctagagtcctgcagcacagtcaatggtaaaggttattcctttcctttcctggagctacacctttctttgtaaaactgtactgtgggccgggcgcggtggctcacacctgtaatcccagcactttgggaggctgaggcgggtggatcacgaggtcaggagattgagaccatcctggccaacatggtgaaaccccgtctctaccaaaatacaaaaaattagccaggcgtgacggtgcgtgcctgtagtcccaactactcggaaggctgaggcaggagaattgcttgaacccgggaggcagaggttgcagtgagccgagatcgcaccactgcactccagcttggcaatagagtgagactccatctcaaaaaacaaaacaaaacaacaacaaaataaactactgtggcagcgttggtaccctgcatcactgccatggttgtgctattctcatctcaacatagaattggtgggttctcctaagggtgtcaggaacctctaaaaagatgtgattctttgggaggggatatttgaaattccaacttccattccccctagcaaaaggaagcagctgctgtttaagggttttatctgagccactttaaagatgaatccatggtattactctggatactagccattccttaggattttaaggtcacattttattcctggatgctttatgtccccacctccacctgagccctcatcctctgttccctactatactcccaacttctactctttgttttatccacctatccctattacctgaccctttgtcttccctgtctcccatccttggggggacatgtagccctgtggtcatggttctgatgacatcatcagggcagcccccctgcccaggtattatggcctgtcagcattccctgtgccctccaaaccttaggcctagaatgcggagctgccaacataacattcacccttttgaacagatggagtcaggcacactaacacagccttctgtcctcaataacacagccattattgccacttgctcagtcgtcaatgtaaaccctcagagtcagctgaactattttaggccaa

SEQ ID NO: 249462 - DNA, 349 bp, Homo sapiens
cttttaaaatacatttttgtagttcttgtttttgtctctatcatgtgcatctagtggctcttccaaagcttttgttgtggggttagaaggcagtgttgtatgcattacagatgactgaagccatagagcctttgttcatgatcactgctcagatggtctgaaaagcagtaacagcaggggctactgaattagtccatttcactatattaaatccaggttcaacccaatggttctaattttatgtgctactgaatttaaggttcagcagaccaatttaacccatctatcaatcaacattgtttctgagaaggatgactcgttgttagcaatgtcagaagtctaaaccact

SEQ ID NO: 249463 - DNA, 498 bp, Homo sapiens
cacccctcacctcctgtattcccagaaagcctcgcgttgaggtgtgttggccagctccctagtttgtgcttactatacctggccacgcctccctacctaaggccgctggcttaaccctaggggcaggcagtgttagatcagacccagaccttctcatcccaccctcatcacatcggggagaggggactccaggggcgggaaggcaggcgtccctccatttggccagggtgggcggcgaggagggggtcactctgcaggaacactgagctctgaacacctctcgcctgctgcctgcctcacaccctctgcattcgctgtttcctctgttgggggagggggtttgtgaggggaatattagattacaccttgtcatttggaaagccccgtgtctccggcggccacagcgaggttgggggggtggtgagggaagtccatggattggccagaactgggggaaaaacaaaaagaaatgagagaaagagagagcgggtaccaaaa

SEQ ID NO: 249464 - DNA, 278 bp, Homo sapiens
atataatatgggaataatagtatctgactcataaacatgtttagactaaatgagctactccatgtaaagaatgcagaacagtgcctaacacctagtgtttaattcgttgtgttagtcattattgttactatcaatgagtttggcacttgaacatacgtagtttgccaagacagctaatatagaaaaatctacatctaggtgaacaaagagctagaaaagaaacagagtggttagagacaagcccaggcagatctccagacatcagagcactctaaaac

SEQ ID NO: 249465 - DNA, 501 bp, Homo sapiens
tacttaaatcctcctaaatattgtattatttgccttttgaaataatgtttattcttcatatttatatccagaatccttcaactataatataaacaccacaagggcggaaatttttgcctttttattcattgattcattgatgtatactcaatacctgggtcagtccttggcacatagcagatgcccagtaaataatgtggaacagaggaaagttacctccagaaatacctgcaaaactcctctcaagcaagtgttagggtctaaataacacagccagacccctttgcatgggtaactgcatgtcatcacatttcttagaaaccacatatttcagtaagattgaaccataaataggagatgtctttcaaatggtcctcataaccccaataaaggaaattatctctgatcatggggtttcaaaataacaggtgcaaatgacattcataaatttagtaatttaaatccctgattccaaatactaattttgaacttgtcgttaac

SEQ ID NO: 249466 - DNA, 339 bp, Homo sapiens
gaccaatatgatcacagttgctgtgaaggtgagaaaagttcatttttattatgtttccacaagagacgcactctattgttctcttgaaaacacacagctcatgtcctcctttagaacacacatcctctttaaagtaacatacaaagatgccaaaacaaggtaaaaaattacatctgaattctcacatttcaaacatatatgaaatatcaaataaaaatttatttttacaagaatttaggggaactactacatagctataaatgtaatatatatgttaactaagtatcacagataaaaaccatgctcccttcagcagcacgtgtaataatagatacaaag

SEQ ID NO: 249467 - DNA, 500 bp, Homo sapiens
caccttggcccagctcacctgtaactcataccagccccaggaacagattgcaaaaatggtcacaattcatcttcttcccgccttgcaatgtgactttgcagctccttccttcaagaggtcagggctatttctttatcctttgaatctgggctcatcctgtgactttggccaacggaatgctgcagaagagaggatgtgccagttccaagcctaggccttcagagaacttaatgggcttctcttctgtctcagaaccgtgttttcccagcagactgaaagcaagcccaggctagcctactggacaaagagagacatgtggcctagctgcctctgacattccagctgagagcctatcagccctcagagaagaactgttttgctgaatgcagctgaccagacacataactgagtctagctgagagtgtaagaaccgcctagctcagcccaggccaactgctgacccacggaatcctgagctaaataaacagttgttttaagta

SEQ ID NO: 249468 - DNA, 448 bp, Homo sapiens
agcagtaagaagccgaggaggagaatggacagatacaacaaaatctgcagcacggtggtcactcttggtgtggagatgggtctggagctcctgcaggccttgcatggtcagttgctgacttcccacctagactccgggcaccaactccttggaagaagctgtccagccagccatgattccatctcttctggtgaaggggctccaggccccagggatttctcagccactatgaggtcacagacttcctgtggtggaaccttgtcttcccagctacagtccaatcctttgcaacgagtatgttgaaagcaggactcctgatatgtctgcttagacttgctaagtgggagcgtctctcccctgcccctagaaaaatataaggcaaaagccttagaatttctctgatcattcttaggtaataaaaagtcttgcaatcactaaaaatggaaaa

SEQ ID NO: 249469 - DNA, 259 bp, Homo sapiens
ataaataaataacaagatataatggataaatacattccatttacaactgtgattctaaatggttaaatataaaatatctacaaataatcataagaagtttgaagaaaatcataacactttaaaaggaatcataatagaacatttgtataattatatacatctcacatgtttctggatatgaagatggaataatatttaaaacaatgattcttccttaattatttaatagagtaattgcttaaataattacaatgtaaaa

SEQ ID NO: 249470 - DNA, 618 bp, Homo sapiens
ctgccgtgaatcaaaaacagcttttttttttctgaggggacagagtcttgctcttgtcacccagactggagtgcaatgccgcgatctcagctcactgcaatcgccacctcccgggttcaactgattctcctgcctcagcactcccgagtagctgggactataagcgcacactaccatgcccagttaattttttttgtatttttatagagacaggatttcgtcatgttgcccagcctggtcttgaactcctgatcttgtgatccgcccacctcggcctcccaaagtgctaggattaggcatgagccaccgcgcccagccaaaaacagcatttttaagcaaccatttgccttggtttctctaggctatcaagtaggagtaacttcatatgaaggcaggagtgcggatggcatgtgtgaagaatctatccttttagatcaggctgtctttgggtgatggattgatgaaggagagtagagccatttgcaaagggcgtcagatgccaattgaaccagtttgggtcttaacctgtacaggaagatttagagcagagggatgaaatcagagtttaatcaggccaagtgcagaggctaaatgggtagggagaagtggcacgaaagg

SEQ ID NO: 249471 - DNA, 710 bp, Homo sapiens
ttttttttaatattttgtatagaggaggcctcacttgtgttgcccaggctggtcttgaacttctgggctcaagtgatcctcccattttaacctccagagtaaccaggattataggcgtgagccaccatacccaacctttagtattttcaacatcagaactgtcagagtggagagacaaagaaggaaaaatgttagaagggatgcagagaaggggagagagaggtagggggaagagaagaaagcataggtagagattaagacagacttaaatatccatttaaaattatttccctttggttaaagaatagcctaatgttctttattgtgccctccactaaagacaattgtaaagggttttaggaatagcatgaacctttcacacatgtggctaaagcaatggaaagaaaaaaaaatcatgatgtattctttattgtcattatttttaattttttttaatagagccatatttatgtactacagtttgacttcttcatatttcatttttgtggcttttttttcaatataacattttcttttgaaatagtttaagattgacaagcagttacaaagtggcccaggctatggcatacccttcactcagcttccccaattccatcgttaattttttgtatatgaaaaagtgaatggatcactttcattgtttccaaatcttctgaaaagcacagaaactaacacttgtgcagtacgca

SEQ ID NO: 249472 - DNA, 185 bp, Homo sapiens
tctcaacttactttcaaaggggttttctgactttaagaagttcttttcccctctatcttataacagttgctgagtaactggtttaaaaagaagccaacaatgcaaaagtgaaagtcaattgttagtaaattttaagtcagcctctagttgggaggagggtcagaagaacaatggggaaagaaaaa

SEQ ID NO: 249473 - DNA, 365 bp, Homo sapiens
ttcagagacctgccctgtgctcccaatctaaaaacagccctctccacctctagcatagcacccccatttcatgccctgtaacacttttcacaaggcgcggtggctcacgcctgtaatcccggcactttgggaggccgagatgggcggatcacctgagctcaggagttagagaccagcctggtcaaaatggcaaagccctgtctctactaaaaacacacaaagttgggcatgctggcccacgcctacaattcccagctacttgggaggctgaggcaggagaatcacttgaacctgggaggcagaggttgcggtgagccgagatggctccattgcactccagcctgggtgacaagagtgaaactttt

SEQ ID NO: 249474 - DNA, 461 bp, Homo sapiens
tggtatttcttaggaattccttaggaaattcccatgaattatagatgtatactgtaccgttttgtgagaacctctctctcctacacagagatgtcaagtccttgggtctgaattttctggtttcaatttgaaaagaaaccctaaaatgtgttaacttagagtttaaggatcagtctgagtaaaagaaaagtctaagttgaaggctatataaaatttcaagatcctgagatattagaggtgccgtttcttccgtctcctctcccttgtatcattcccaaaagataaataatccaaaaaggatgaagaaaaatataattgggagtcaaagaataacaacataatgttaaaccagagacctttgttcacgtgtttatctgctgaccttctctccactattatcctatgtccctgccacatccccctctctgagaaacacccaagaatgatcaataaatactaaa

SEQ ID NO: 249475 - DNA, 401 bp, Homo sapiens
aatggttttctttcacaacaggtggactttttttggcttgtttctacctctcaaattagggtcttcatgtggatgccacctaatctatagaccaaagcattgcttaatgcttaaacattttttctccgtttttcattatcaataagggcagtaggtcaaacatttttgtcatttacctaggtcctgggttgtgctgataatattgcttatggcacagattttgaaaaagagcagcaaattttagtgcagcagaaaaacatacgaaagtgttggaacaggttgggcgcggtggctcatgcctgtaatcccaggactttgggaggctgaggtgggtggatcacttgaggtcaggggttcaagaccagcctggccaatgtggtaaaaccccgtctctactaaaa

SEQ ID NO: 249476 - DNA, 1073 bp, Homo sapiens
gcctcttgacgggggagcggggttgccaggtggcaagtcggctggacgaggcgctccaaggatcggcgttgagggaccagctccgcaggcggtgccaagaggagggggatctgctaccagggctgctgggcctggtcgggggcgtggcgggttcagccagctgtggactagggctcggaggggctggggccttgtggagccaatactggaccctgctgtgggcagcctgtgctcagagtctggacctaaatctgggaccctggagggaccccagggcaacagcgcaacagctgagtcaggcactgggtcagggtgagtgatgggcttgggtgggcgtttgggaaggctggggtctcttccttccccttggccaactcactgacctgccatcctgaaggcaaaagcaggccctttagaaagaacacccctgggttcagactatagcttctgagctttcaaggcaaagtcttgctttccaccccagtcccgagtcttggaggaagcatgccttcttgcctcatcattgagtgggcaggggttgtggaaagtgagaccttgttttcaggccccagagtcatttctcccactagcatccctgcctcaggagtgtgagaaggagctggcatctttgtgtcacagactacttcatcagtcgcttatctggagctgggaccaaggtttctgccaggccttgggatcagctcttgggggtcagagcagccttcccacatcctctggcactgctgaacttttgcagcagctctttcctcctctcttggatgcccttcgagagcccaggttacgacggattttctgccagcctgcaggtgagacgaggggctggggctggggacacagagcagttgaggatatctcttttctttcactctgttctgaaatctgcctcttcccaaaggtactccatgacccctaagatactcactctgctgctcaaatccccagatcctgcgcctgtcgccctaggtctctgtacccttcagaccaccttgctctggttcctgggcagagctcagcagtacttggcagcatgggacccagcttccttcctgctc

SEQ ID NO: 249477 - DNA, 386 bp, Homo sapiens
ataaaacttttaccctgcctaaaagacggacttttttttagttggctctttatttatctattttgaataagcatctcaccctatcacccaggctagagtgcagtggcacgatcatgactcactgcagcctcgacctcctgggctcatgcaatcctcctgcctcagcctcccatgtatctaggactacaggtgcacaccaccacaccttgctaagttttttttttttttttaatttttgtagagccaggccaacatggtgaaactccatctctactaaaaatacaaaaattagctgggtatggtggtgcatgcctgtagtcccagccgcttagaaggctgaggcaggagaatggcttgaacctaggaggcggaggttgcagtgagcc

SEQ ID NO: 249478 - DNA, 399 bp, Homo sapiens
ctcctatccagcttctccatcatcttcctccacctgattcgtagagacctctggacatctgagcctaagcagggccactaaatgagagagaatcccatcactgaaaagcaacaatgaatatattaaggaccacaggagagatagaagaaatattgcaactgaagctgctagatggttatgattatctgaataggtgtgatcttgactttagcgaattaacagtcatgtaggtgaaattatcttggactctccagacaagaccagccaccagctgaataccagtgggtgaccccagtcaatcacatggaacagaagaatcactcagctgagccctgccagaattcttgatccacaaaatcctgaagtgcaattaaatgatggttgttttaagcccctaaa

SEQ ID NO: 249479 - DNA, 436 bp, Homo sapiens
gacaaatatctatttagtgtttattgtttgtcgtgtactgtcttaggcactggcatacaatggcaaacaaaacagacatggtttctgtctacatgcggcctaagatttaacagagaagacagatattattaattcataatttagtttgataagtgctatgtaagcacagcacaaaatattggagtgtaaaatacagagccctaatgtacttagatcagtgctgtccaacagaactttctgtgatgacagaaatgttctgtattctgtgctgtccaatatggtagccacatgttcatttatgtaaaatgtgggtagtgtgactgatgattgatttttatttacttatttttattttcaatcccttcgtcaatttgaatgattttaaattttaaatttaatttaaaattaatttaaataaaattataaaataaaaaaa

SEQ ID NO: 249480 - DNA, 1090 bp, Homo sapiens
cagaaatgattataaatttgcactactcttgttccatcctctccagatacctggttgtggtcagtgtctgtggtcaaggcaatgcgaggcacatccagcatccctgagcaagatgtgctcaaacacatgtacgctacaatgttcccataacatctgcctccatagcatcagcaactgacctaaatgcctgccttaatgggcagggcttttttgcatgctagatgtccaggatgcttgctgtccctacttgtaatttaccattgcagttgttatttacattattttccaagtaaccaattcatagaacagccagacaagagctgagtcatcttggaagagagcccaaaaatctcccctgcacagcaagctttacaaaaagatcatcctttgtggaatgcaaacaaaatggcctccacaatttattaatgttcccaagagctgtgattatgaatccagacattttaacaatgttgaatctaattatgccaggtgaacagagtatctatcacaagttactccaaaccatccagaggtacaatgtaagcctcttgtttttacaggttcttctgtcaaacctaactgagagcattttgtcttttgagctagactaaggttaaacaagatttacactgaaggcagccacagcaatcaatgactgatgcttagactaagccaggatgcatatgtttcagagtcatcacattctccaattttaagaagaataaaatattggcatattcccaattcaacatatttaattcaactgctgtttgttttcaaaggaaatttaaaacaatagcaaagaaggaattcaccaatactaattctataacactaaaaaaaatttcttttgtttttaattatactttaatttctggggtatatgtgcagaacgtgcaggtttgttacataggtatacatgtgccatggtggtttgctgcacccatcaacacgtcaccctacattaggtatttctcccaatgctatccctctcctagtccccccaccccgacaggccctggtgtgtgatgttcccctcactgtgtccatgtgttgtcattgttcaactcccacttatgagtgagaacat

SEQ ID NO: 249481 - DNA, 284 bp, Homo sapiens
acccttccagtgtttcatcttcattgctaatgatttcacaggtgatgaaatttaaattcattgaactctgttctgggcattgagaagacagaaatatgtatcagagagtctctaccttccattgtttcacagtgttgtgaaaacagcagacacaaaaccgagtactgtaatgtaaggcagagagaagtggtgctctaatcacagcacaataagggaagtcttaagggaatttttcattttgtcctggagtaacatagcgtagataatattttagcagctgagga

SEQ ID NO: 249482 - DNA, 343 bp, Homo sapiens
actgaaggggggaaaaggaagatactgattttagaaactagcaatgtgccacatgggaaaagacgttcagttgccaacaggacaaaggcccagccgccttccagcatgagctccccaccctcctctacagagcctctgggatgtgcctatctgccccactccctttccccaagacacattctgcctttcccccctgcatgcttttgcttctttcaaagaacagaaacataatattttgccaagactttgcgtgcaccttatctatatgagttacattgtaaatagcattctattcaactttcaaaccatccccatgaggtagaaatctctattttacaaatta

SEQ ID NO: 249483 - DNA, 353 bp, Homo sapiens
atgacgagctactcttcaaaattaagctggataacaacaagaaattctagaaagcaattgaggcaacctccaccctaagacccaggtaaaccctacatttaaagtgctgttctggggcacagtgaaagatttctgccagaaaatttgctccctaggatttacatgatgatgagattacatgctgccttgtggcaacaaaatcaaaagtctgtaaaagaaaaagcgtgctatgcttctgaatgtttggagatcctacaatagatttttcattcagctattttgttgctgcttcatgagcacacctgacagtcttgtgggataatagaaataaacttctcataaacaacggtcaa

SEQ ID NO: 249484 - DNA, 296 bp, Homo sapiens
gtcctgcttttatactcgttttcctctcggaatggtagccggcaaaaggtgttcttagagatggggggtcctgtgtcttactaattcccataaagggaaggggagtggcagaagaagaaaaaaagtaggaaaagaaaatgttagttatgtgtggttgatagtggctcagtgggtttacatattatgatagttatcaatttcttagcgctagatgctgcaaatctaaatctatgtaagactcaagaagtggttgtgtgtcttgcatgtgaactgtatctcacagctaaaatttaaaa

SEQ ID NO: 249485 - DNA, 424 bp, Homo sapiens
cgaggggctcccgggggctcaggcttccttccgcagcagccacccttgctggggctgcttcctcccagaaggtcacggctctgcggtgtcttgttggtcatctgtcctgtgtccagcactgacactgctgcagctgtgagccttccccagggctcggccagttgaacccaggaggaggcagatccatccagctgctcagaggcccagggtggcctctttgggaaggagctgctctgtgcagagctgggcctctgaagatctgggatcctccaggcctggggtaatgaaagcccttcattgatggccaaaccttccctccaccagggcaatatgtcccacacatcactgtcccttccttgtcaccttcctccctggagctgacccagttatgggcttgaaaatattaatctacttctttgggtga

SEQ ID NO: 249486 - DNA, 424 bp, Homo sapiens
ctttaggatcctgcctcagaaaaaggcctggtgttatctgtcctgaaactcaatgaaaatgaattgatgagcagacaatagctagtgtgcccagctgattgatctatgcagccccgaacatccccaagctgtttggcagcaagtcgtttttcttctgtcctttccttattaattcaggctatgataaatggccttgctgacagcccactacaatgaaaataaaatccttgtcagggagtcttccgtcttcctagaagctaagaaaaacttgtccagtttttcttgcagtggaattttctcacacaatcatagtggtgatgtgtgagtgtgacagtgtatgtgtatatcctgctgaacgctatgaggtcacttcaaggcaaaaagcacaaaagttaattaaaaatagacctcttgcaaacagaag

SEQ ID NO: 249487 - DNA, 411 bp, Homo sapiens
ccatgttgcccacagcgccagtctcaaactcctgagctcaagctatctgcccacctcagcctcccaaggtgctgggattacaggtgtgaggcactgcgcctagccaaacacataaaatatctttccatttttactaccgaattcacattcaggcagcttctcctgatatcagcgatgctctttgaccccaagtcaaggacttccggaagccgaatttgctacctcagacttccaatgtactatgtgaagtataaaatgattacaacacggagatgacatcctgtttcacttgtaagaattggtagtttgggctcagagaaagctcaatcaatattgccacaactgcatgtatgaaaatatatcccaccaattcaattaagtgattaatcaataatgcacataagtttaaaa

SEQ ID NO: 249488 - DNA, 320 bp, Homo sapiens
gtatgtggtggctcacatctgtagtctcaccccttgggagaccaaggtgggaggactgcaccttggtcttccaagtgatgggattacaggcgtgagccactactgagctcaggaattcgagatcagcctgggcaacacagtgaaaccctgtgtctacaaaaaacaaaaaaattaaccgggtgtggtggcacatgccagtggtcccagctactcaggagctgaggtgaggggactgcttgagccagggaaggcaaggctgcagtgagacatgatcataccactgcactctagcctggacgacaaagtgagatcctgtctcg

SEQ ID NO: 249489 - DNA, 889 bp, Homo sapiens
gtggagctcaatagttttcaaagcctcaggtgattctactgtgctgctcagacctaggaccacctgcagaaattccatcctggtcctgcgacctcgcaccgattcctgacggagcacccactcctaggaggcggttatccagcatttgaggaagctgccttccataccatctcttcccactgcagaggagttttctcaggagttccctcccacggcaggttttgcagtgttcccaaaacccaggtcgatcctcctaacaaggtgcaggactttctttttaaaaaaccttagtgggaagcacaggctctccagcccccttcccaatgctgccatatctcagtaccagatctggaaaccaggcctggttcaagccctgtgtcatatctaaccgtactaccaaccagcgttgcagtgtacttcttttgttcattcattcagtcaatctacatgagcaaccctatgttagaacttgggaaactaaacgagaaagcctcttgccttcaaagacttttctttctgatcaaactgataaatcatcattattggacagtgtgagctagttacttaacctagttaataatgattaggcttgtttactgatatggtttggctgtgtccccacccaaatctcatcttgaattcccatgtgttgtgggagggacctggtgggaggtaattgaatcatgggggcaggtctttcctgtgctgttctcatggtagtggataagtctcaaaagatctgatggttttaaaaagaggagttcccctccacaagctctctctcactttctgcctgctaccatccatgtaagacatgacttgccccttcatgtcttctgccctagccatgtggaaatgtaggtccattaaacgtttttcctgtataatt

SEQ ID NO: 249490 - DNA, 251 bp, Homo sapiens
tgaggtgggagaatcacctgagccagggaagtcaaggctgcagtgagccgttattgcccctaccgcactctagcctggacaacagagggagaccctgctttagtccatcaatcagcaatcagccaatcatcagttttcacctccctttggttgtattagggtttctggctcatttttctctcatgaaactctgttgaattcctgtatagacctttctccatcctacttgcctatcaaagcacattttcata

SEQ ID NO: 249491 - DNA, 402 bp, Homo sapiens
aaactcccgttttccctagaggcaggaaagcagcgtagcttcagggactcgggtttttttgcgtgaaacgcacaagaaaagagaagaaacctggcgcggagactcacatccgcaatcccaacacttaggtgttggtggcaggatcttttgagcccaggagttcgagaccagactgggcaacatagttagactgtctctacaaaaacttttaaaaaatcagccaggcatagtggcgctcgtctgtagtcccagctactcaggaggctgaagtaggaggatggcttgagcccgggaggtcgaggctgcaacgagccatggtcaggccactgcactccagcctgggcgacagagtgagaccctggctctaaaaataaacgaagaagaaggagggagagggggagg

SEQ ID NO: 249492 - DNA, 696 bp, Homo sapiens
cggcttccacccttcacctacttcccctgcggggccggagtgggggagggtcgggggaggccatcgggaagccacgtggtggcccggggcctcgcggctcattctgcgttgcgccgtcccttccaggtcgagttgacggccttttcccccttggcgtacaagtattgagtcccgcgccctgggagggagacggcgctcagcaaatttagatgaatgcaacgcttcaacgtgggctctcgacctctggtcccccatcccctgccggctctattaggacaatgaagtccccaaactccactggagggttcttcacccactcttcttcccctccaaaggaaccatctcttgaacttcacgaaatccaggagcaatgctaagcgttttgtatacatcacctcattttcaatcctgtgaggtgggagctgggaacttcattttaacaggaataaaatgtggcctacagctggttggggtggagccaggacttgaagtccagttgtgcttattaacttcaagtgtctgcctttttataatgctcaagttcgtcctctcagctgcctcttggctagcccagcatccccctttgctgtccaaacacccacaccagccaggacacactgtctggaacatggtctgacaaggggattaaaaacttgaaatcaaggttgtccaaaaaatctggggcatacggtttat

SEQ ID NO: 249493 - DNA, 575 bp, Homo sapiens
taagacaacgcagctccaaaggcagttcaaatgtcctaggaagaacacccccacaaaaaacaagctttatcattatgccattatcaagttccccttgaccactaagtcagccatgaagaagacacaaccacatttgtgtttactatggatgtcaaggccaaccagatcaaacaggctgtgaagaagctctatgacactggcatggccaaggtaaacatactcatcaggtctgatggagagaagaaggtgtatgttcaactggctcgtaacttaacgatgttttgaatgctgccaacacaattgagatgatctaaaatgagtccagctggctaattataatttttttttaccatattaaaaaaaaatctacaaaactgcagttcttaaatgaggtaacaggtaagtaaaaggacttggcatatagaaggttccaaaaccaccaggtaagaagtccaactaccttgttaccaccatgcttagatgaagtcatccacatgggaggactacccagcaagaagtaccgaaaccaagtatcaggaagagggagagatccatgtaggggagagtatggtagc

SEQ ID NO: 249494 - DNA, 595 bp, Homo sapiens
agacttcactcgaaaaccgtgtatacattgcctcgagggaaagctctgggagttttaatcgcccagcaagaacctgtttctgcagcagccaccagctcccatcaccccttgaccctccagctcatgctggagaagagggaattttggctgtttaaagaacacagttgtgaatctcagaatgtgcctgaaaggaatactgacagataaggccggaaacaaaactgatggcttgaaaaacatttttatggaatgtatttactatcattttgttttactatagaggtagatgggactcttaacttttgggtacatggaaacatgctgaaaactgaacacaatcctgatcatcactcctgcctggctgtctcctgggaggctgccgggtgccacggagctgggacacagcagagcccgctaggtgttgcagggccctggaggccaaggccaccctgtgtggggtccctgttggcagccaggtccctacacaaacaagtaatcctgtttggcctcctaggttttgcatatgacctgcagcctaatttggggtgtaggggaagctctgctggcccctgctcctttgtatgttgggtgactt

SEQ ID NO: 249495 - DNA, 1149 bp, Homo sapiens
agcgggaggcgccattttgtagcgagggagggaggctggtccttgtgattacccgggagggagccggggtgacgagcgccattttccccacaggggcgaggaggcggctttggttctcccggtgggcttgccggagtgcgttctgcagaccagaagggctttgtctggcgattgctgaatgctcaatagcagcctgctgggagggaagtcgaagggagaaataggacagaaagagagacctgacctctccctggaggctctcagtgtcggccgaggcccttggtcttgctctagggctctgcattcccgagagctgctgtatgccggggattggcttccaagcctgcctgagcttctccagtctcccgggcatcgccatgcggtgggagggtgagccttcctctcctgctgaaattccggcggcttggcaaccggccggggggtcttggattcctcggggagacaccactgatgctttgtggtttcacgtaatttggatttaaaagttgaaggcgtcagaaatggttgtcgctacggtcttttgtatgttcttgtgttgcgaactaataaaggaaagtcaaaagggtgggagaagcattcagtctggttccctaaagttactaagaatggatacaaattagttgtggccgttgcggttaatgcttcttgtagctcttaacccagccctttctaaacctttggatatacttactagtcagttccgaaggtactcagtacaaatttgcgttggcgcaccaggccgactaaagatgaggtgggtgtattagactcaaaatttcttaagtcggccagggggtagaattgagctaccaagagaatgagagactaccctgttgtaacagatttggatcgcgcttagaaaaacagggagaaagctggatgatgttcaacttaatgtcttgcatttcagacgattatcgaatggacggggataaataaaaacgatgttacagatagccctctaagtgtggatagtaaatattttgatttacaattaagcctaccttgaggtgcaggccctaaccaacggatagttgagtaataggggcctagacgccaatggaaagaaaatgggactttaagctttgtttgaacatatattctgttaataaagaagtttaaatcagt

SEQ ID NO: 249496 - DNA, 1095 bp, Homo sapiens
agcgggaggcgccattttgtagcgagggagggaggctggtccttgtgattacccgggagggagccggggtgacgagcgccattttccccacaggggcgaggaggcggctttggttctcccggtgggcttgccggagtgcgttctgcagaccagaagggctttgtctggcgattgctgaatgctcaatagcagcctgctgggagggaagtcgaagggagaaataggacagaaagagagacctgacctctccctggaggctctcagtgtcggccgaggcccttggtcttgctctagggctctgcattcccgagagctgctgtatgccggggattggcttccaagcctgcctgagcttctccagtctcccgggcatcgccatgcggtgggagggtgagccttcctctcctgctgaaattccggcggcttggcaaccggccggggggtcttggattcctcggggagacaccactgatgctttgtggtttcacgtaatttggatttaaaagttgaaggcgtcagaaatggttgtcgctacggtcttttgtatgttcttgtgttgcgaactaataaaggaaagtcaaaattagttgtggccgttgcggttaatgcttcttgtagctcttaacccagccctttctaaacctttggatatacttactagtcagttccgaaggtactcagtacaaatttgcgttggcgcaccaggccgactaaagatgaggtgggtgtattagactcaaaatttcttaagtcggccagggggtagaattgagctaccaagagaatgagagactaccctgttgtaacagatttggatcgcgcttagaaaaacagggagaaagctggatgatgttcaacttaatgtcttgcatttcagacgattatcgaatggacggggataaataaaaacgatgttacagatagccctctaagtgtggatagtaaatattttgatttacaattaagcctaccttgaggtgcaggccctaaccaacggatagttgagtaataggggcctagacgccaatggaaagaaaatgggactttaagctttgtttgaacatatattctgttaataaagaagtttaaatcagt

SEQ ID NO: 249497 - DNA, 646 bp, Homo sapiens
agaagtgatttagtttccttcctaaggtgcactttgttacaaaactagccaaacttccttgcattttgaggtgcagaaaaatgttggaagttctagaattcttatgagggtcatgtgaataatgtgaatatatgaatacaaaggctaacaggatggactgattgcaaggcatgctaacactgagactaggagtagccacatggcccaggggccctgaaatgggaactatgtgcctgaaatagttgaccattgtcagaacccagaaattctctggcctgtgcctactttgtagcttgtcttccatgtcatttcaccttacaacacaaaaacttcagttctgaagttgatgaaagggaaatagaagtggaacgccaggaaaaagatctgtaaaaagtaaaaggtgggtgtaaagtcagaacggttaaaattctatgcagggcttcataacattaagaccaagatgagggctcacaatgtttattccacctagtcctgttgcttttcacttctgccagccttactttaaaaaaagttactaaaagttctgttattcaagtaatacatgaatattgtctctttcaatttattttttttttcttttttttccttttcttttttccattttttcttttttatttttaatatt

SEQ ID NO: 249498 - DNA, 428 bp, Homo sapiens
gcagcacggggctcatgtgcttgtctctctgtgcccactcgatgccatggagaaggtcagttgcagcaagggtgcgacccagctgggcaccttcctggccatggagcagctgctgcagcaggcagggtctgagtgcaccgtggatgtctttaacgtggccctgcagcagtctcaggcctgtgaccttatgaccccaacgctgaagcagtatatctacctctacaattgtctgaacagcgcactggcagacgggctgcccctgagtcggcactggtcactgtgcaggagaggtttgtgccctgtgggatggggacagcattcctgacacatccacgtgggcctgggctccccagaagggcggcctccactgggccctgtgctgcaaaggtaaagggtcttggaataaagacctgtggccaagcgtgaag

SEQ ID NO: 249499 - DNA, 666 bp, Homo sapiens
gcagcacggggctcatgtgcttgtctctctgtgcccactcgatgccatggagaaggtcagttgcagcaagggtgcgacccagctgggcaccttcctggccatggagcagctgctgcagcaggcagggtctgagtgcaccgtggatgtctttaacgtggccctgcagcagtctcaggcctgtgaccttatgaccccaacgctggtgagaggcgatggggctggggtgggggcgtgggggctcagctgtgggaaggggtgggaggtgagggagcttctgcccaggcctctaggcagcaccacccgggtagccaccaggtggcgctgtggacctctgtgcattctcccagatggagccctaggggttgggacacacaagggagcccttttctgttagattggggcaggcggggcgagcctcctaaccctatgtccatctccagaagcagtatatctacctctacaattgtctgaacagcgcactggcagacgggctgcccctgagtcggcactggtcactgtgcaggagaggtttgtgccctgtgggatggggacagcattcctgacacatccacgtgggcctgggctccccagaagggcggcctccactgggccctgtgctgcaaaggtaaagggtcttggaataaagacctgtggccaagcgtgaag

SEQ ID NO: 249500 - DNA, 643 bp, Homo sapiens
gttcggtgtcccttctcagtccctgcacccaggttggatttttgcagatccccggacacccccgccacatccccggacacccctgccacaccccctttaggtacctcatccaactctaggtcagttgcagcaagggtgcgacccagctgggcaccttcctggccatggagcagctgctgcagcaggcagggtctgagtgcaccgtggatgtctttaacgtggccctgcagcagtctcaggcctgtgaccttatgaccccaacgctggtgagaggcgatggggctggggtgggggcgtgggggctcagctgtgggaaggggtgggaggtgagggagcttctgcccaggcctctaggcagcaccacccgggtagccaccaggtggcgctgtggacctctgtgcattctcccagatggagccctaggggttgggacacacaagggagcccttttctgttagattggggcaggcggggcgagcctcctaaccctatgtccatctccagaagcagtatatctacctctacaattgtctgaacagcgcactggcagacgggctgcccctgagtcggcactggtcactgtgcaggagaggtttgtgccctgtgggatggggacagcattcctgacacatccacgtgggcc

SEQ ID NO: 249501 - DNA, 1181 bp, Homo sapiens
ctgggcaacacagggagaccctatctctacagaaaaatgtttaaaaattagccaggtgtggtggcacatgcctgcggtcccagctactcaggaggactgaagtaggagcattgcttgaccccaggaggtcgaggctgcagtgagccgcgctcatgccacagctctccagcctgggcgacagggcaagacctgtctcaacaacaacaacaaaagtatccgttaagaattttttctgcaatcataaaatcataaaataaccagtatcaaagattttaaactgtaatttctatgatattcataaatataaaataaatattgttcaataaatatttattctaaagcactatgaaaagaactgtgggaaaagtaaaagatgagtcaaacgtgtacctcattcttataaaggacttactgtctggtaggtaataaactatgtaagccatgtacagcacaagttaaggcatgctaaattgcagaagacaggtgtagataatgtacttagggaggcaaaaagagagaagttgtttttacataggaaatttgtgtttatccttatggaagaaggatcatttaagcttgaccttgaagaatgtataggatttggtaaatggatacaaaagaattaggggagaagtaatacacagaaatggaaaagtattgtaatgattcataaaaaggcagggcttcttgttgtctacactgcctcgggtataaagtgaagaagcaagataatgagggataaagctgaaaaggtaagtaggaaaccttatggagagctttgaatactattaaggattgatatgtgcccctcccaaaatttgtgttgaagtcttaacccccaccacctcaaaatgtgaccttatttggaaatgaggttgttgcaagtgtaattagttgagatcatatttcaatagggtgggctctaatacagtattactggtgttctgataaaaggggaaaatttgaacacagactcaaggagaatgccatgtgaagataaaggcagagtttaagattatgtttctatatgccaagaaatgacagagattgccagaaaactaccagaagttaggggagaggcattgaatacatttttcctcattcctcagaagaccaaccctgtcaataccttatctcagacttttgcctccagaactgtgagacaataaaattctattgtt

SEQ ID NO: 249502 - DNA, 268 bp, Homo sapiens
gatccacctgcctcgacctcaccatcctagactttaaaccttgaaattttctagagctgcctcccagtgactttaacttactgtgtggacctgccttgctgccctcacttcttcatcttctcaccccgtcctcaccacttccttgtcttcttttggactggcttgtgtttacaacattggattagcagttgtaaggtcagcaatgaattcccaaatagcattcagcacctattttcagcctttcgaatttttcttgatgaactactgc

SEQ ID NO: 249503 - DNA, 376 bp, Homo sapiens
gacaaaaacacaatctgcattttagtttaagtatgacactgatgacttaaaaaaaaactatatacaaacgttctatataaagtttgcctccaaagtatttctctttctctttcttttttgcaggggagatggggtctcattctgttgcccaggctggagtgcagaggcacaatcatattatactacaacctcaaactcctaggctcaggataaaacaagatttattttattctgacctggaaatgagaaaaaatatgccacctactattaatccatatgatataaatgaagaaacaaatggtgaaagggagaaagctcttctttacaggagtatgtgatctaataaataagaataaagtttttttaaaaatcacta

SEQ ID NO: 249504 - DNA, 544 bp, Homo sapiens
gggaaaagtggttggtggggatctgaattaactaaccgtgtttgagaaaataattgaggcaataaaacgatcaataggaaatcaggccactctccagtacctcacggtttctcaaaggaatatttttaaagaagagcattttattgacttgtctcgtttttaatgcactaagaaatgcagctaaggtgcctggtcactgtagaaaggggtacatgcaaagacctatgctaaccgtagagccagcaaatgactgataaaaaggaacttggccatatacctctctctactcaatatagccctgcaggtatatcaaaaaacaacagaaacattgttccagatcataaaaataattatgttgctttagaaaatttggaaaacctgagagaatacaaggaaaataaaaatcacgttaaaccaccatccagatagaccactgttaaaatattgctgtatgttttcagttttttgtgtgaaaataatatacatttatattttattgtatatacactactaaatacaatattttgatctttttgtaaaaaaa

SEQ ID NO: 249505 - DNA, 256 bp, Homo sapiens
ataggtatttaaattgtcttaacagcttagtggtcatttgaaaaaatcatatgtcaagttgaaagaagaaataatattttttgctaggagtggtagcacacacctgtggtcccagctcctcaggagactgaggtaggagaatctcctgaaaccacgagtttgaggctgcagttagctatggtcacacctgtgaatagagccactccactccagcctggacaacatagtgagaccatgtctctattaaaaaaaaaaa

SEQ ID NO: 249506 - DNA, 421 bp, Homo sapiens
cttacaggtgagactcatcttagacccagtcaacctgagctgagaaagacaaagaataggaatagcggaagaaatttacatggctaaagaggaccaacgatgaaattacttttaaaagaacagagaatgctgggagcagtggctcacacctgtaatcccagcactttgggaggccaaggcggacggatcacgagtcaagaggttcctaataatgctggacaacttccagtttggaaatgaccaactccccgggtgttgtctaatcacattgtccaaatgctacgacaacaacttcttgagaaacatccacaaactcaggtgatcttacgcctgagtgaagaatataattgttactctaaaatgtatttggcgtattgaaattatatggtactgcaaaataaagcattctcagaatgatatt

SEQ ID NO: 249507 - DNA, 643 bp, Homo sapiens
atggggagtgggcagtgagatgcttttagcagactgggatgcgcctgggtgtacatttgaggaagatcaccgcagctatgggcacagaatagttgtgggagatgcttctcccttcctcatccctcttacactcaagaaagagaagaaagtgggctggcttaggaaagttgccctggggaggggaccatgcgggcagattcaggaaccaattaggagggaatagactgagtgggagaagaggaaagttggtgacgactctcaggttacagggtcagcttgggggatagggaagacggagacttcgtggttcagatatcttgagtctcaggggctcaggggacagccagctggaggtttgtgctcattcattcacgcattgattcatcaagcgaacaatttgttaattcactttccattcattcagtaaatattaatgacctactaggtggggcttaaggcggggctggaaatgggcctgggagagcaattatggtccagctctactgaggccttgaatgtcagaacaaggaatttgggctttggcctcatgcaagagagggcggctgccatatatgggcctgggcagggacagatctgacagggatctagccctggccaccaggcatctaggagctcttgttct

SEQ ID NO: 249508 - DNA, 482 bp, Homo sapiens
atgtgcatgttagacagttgaggctataaaataaggacatgtcagaagtagcagttctatgtccttcccttagaatttcatgaggtgtagggtacccttccccaccccagggcgcatcactgaagtgtagtggtggcagccatggcctgagggcaggtcagcacagaaaaacaccaactccacagagagagtctggcgggagcaggtgcatgggcatctggtgacctgagttcctccaacagaacaagccatggggcctctttgtgcctctgtttattctttccccaagtggggtcacttcagacatttggagatatgaggcaacaaggagatgggaaagttcaccaacaatgtaaacactctacatgagagagttttgttgccaatgtgctagaagaggcatgcttcagggaagaggtgagaatccttccttcccaagtgtaaagccaaagccactctctaataaacgttttgcatgatga

SEQ ID NO: 249509 - DNA, 478 bp, Homo sapiens
gagaatttttagagtgtataaattttactattcaaattcttcattatttctgagaaaaaaatattgagacatggtattagatgtctttttactactttcttacattataattataggacaatcacacttgggtatggggagcacttgcatatctactttatatctcagtgcagttttatctaaaagttccgttatagctaaatggctacatctcctctgagggaaaataaaactaatgtgttatctaataagctaaaagccatggagtgcataaaataaattttgtacatactgtttttaaagaaactttttaaaaaagttaaatggtttgaattttggtttaagattttaagagtacctaccctctcaggcataaagtgatcatcctttttgtcttataaagcacaagtatattttagacacttcataaataatatcattaaatgtttttctcatggagaaaaatgaagacttaaac

SEQ ID NO: 249510 - DNA, 279 bp, Homo sapiens
gcactggagataaaatagaccacaatgacactgtccctggcttcaagaagttcatggtcaactgagactgacaaactagcattctaccgtaatgtaattcatggttgtaattgccacagagtactaggaaagcatatcaacaaagacactaaactcaactgggctgtggggaagtgccgagttcagaccaggcctttctgaagtattgaggctgttgtggtacttgagctgagtcataaggggccaggaagcattagcctggcagatgcagaagaaaaa

SEQ ID NO: 249511 - DNA, 349 bp, Homo sapiens
agcacttgggatttcctgtcgagaagggggactgagaagtagaactaactggatttcctaggtcgactaagaatccctaagcctagctgtgaaggtgaccgcatccacctttaaacacagggcttgcaacttagctcacacccaaccattcaagtagaaaagagagctcactaaaatgataattaggtaaaaacaggaggtaaagaaatagccaatcatctatcacctaagaacacagtgggagggacaatgatgggatatgcacccaggcattggagccagcaatggatcccctccttttgtatgggagctctgtattcacgctattataaagtcttacatctgcaca

SEQ ID NO: 249512 - DNA, 583 bp, Homo sapiens
ctttgttatagctatgtactgtttgagttttctgtagtttatgcttgctaaaatttggattacatttgaataaggataaagggcatcatacctattcattcctcttagatttctaagctgtatttcagtaaattgattctcaaagagtggtataactggatcataatatccttgtttgccactcaagaaagtgttccataacttaagataacagtggtgggaaaaatcatttaagaccttgtttcatatgctttaagatacaagaaatagagataacactgggaacatatgaaactttgtcagcatcagataatagtgttgtagcgacttgaaacattttttgtctgtgattgtgccagtcactatttgtgacttggattgaaccttgatatgactttaaattcaggttgatgttttaaaattatttctgaaatatattgagcttattgccctaaattaaaactatattctgtaattttacatgagttatgtaagttttctgaagaaataaggaggaatcctttaggcacagactgtcaatctacagattacataggagatggcacaaatggaaaaaaaaaaa

SEQ ID NO: 249513 - DNA, 416 bp, Homo sapiens
agttatttgtaagaaagaaaaattatgaaaaatgaagtgtgtgtaagtcatagctgaagacctcaaaattgtgctaagatcctcaacaggaaagagcattaagactcttattagactccttggctaggcttgatggctcatgcctataatcccagcactttgggaggctaaagcaggagtatcacttaaggacaggagttcgagaccagcctgggcaacatactgagaccctgtttctacaaaaaaatttttttaaattagtcaggcatggtggcgagtgcctgtagtcctagctactcaggaagctgaggtgggaggattgcttgtgcccaggagtttgaggtggcagtgagccttgatgaaggaactgtactccagcctgggcaaaagagcaagactccgtctcttaaaaaaaa

SEQ ID NO: 249514 - DNA, 757 bp, Homo sapiens
ctggaaataattgtggttgaggctgtagctggcaccctagctgagctcaaatcctgaagttaagagttgctgcattgggcccttgcttgatttttattagaaaagaataaatcattctgcaatttactgctacaaaaagagaaactctccttactgtagtggaacatattacatattataaaaaccaagtttagataccaattaagcaaataaatatttagtgagcatttatcctttaccaatgactctttttgtgaagacacaaagatgaacaagctctgatccctgactctgagaagttcagttctgagaagtctatttcccatgtccccacacctcatctgtacgtgaagataagccagatggtcttgaagggctcacctcatcccaaaaaccagtggttccacacccagatcacaggaggtgagctacctgcccaactagcgacatggaatcttcagcttactcaattattgaaataattgagtaacaataaatagcctttgtcttttgcaggtggaaatcaaagaatttcacagaaatcagtaattgtcagaaacatcgataattttacttttgtaccctttaattattttgcacacaaaatatgtgtaggttaaccaagcaattaaataaaacacacatactgatttgaatttttataccagaagcacttcatatgtaacaatgcgtatatctggtaataaggaaaggtaatttctatgaatacgggctcagtaaatgtttgcagaatgat

SEQ ID NO: 249515 - DNA, 750 bp, Homo sapiens
agctggacagtcaataggctggagtgatctgggactaggtgagatgagaatgcaaatgtgatcatttcatcctgcaatgtggaagtcactgaagaaaatcagcaagcgtagatatggaaatgtgaaggggatgggaagctggatcagagagcatcaactcagctctgggaaaaagatgaagaatcgagtcctgccttggagtggctcatcacagtctagatggggagaccaaatgagactctttttgtgaagacacaaagatgaacaagctctgatccctgactctgagaagttcagttctgagaagtctatttcccatgtccccacacctcatctgtacgtgaagataagccagatggtcttgaagggctcacctcatcccaaaaaccagtggttccacacccagatcacaggaggtgagctacctgcccaactagcgacatggaatcttcagcttactcaattattgaaataattgagtaacaataaatagcctttgtcttttgcaggtggaaatcaaagaatttcacagaaatcagtaattgtcagaaacatcgataattttacttttgtaccctttaattattttgcacacaaaatatgtgtaggttaaccaagcaattaaataaaacacacatactgatttgaatttttataccagaagcacttcatatgtaacaatgcgtatatctggtaataaggaaaggtaatttctatgaatacgggctcagtaaatgtttgcagaatgat

SEQ ID NO: 249516 - DNA, 689 bp, Homo sapiens
agctggttgtcactgtgctaagccaaggagggagagacaagtctggactcaggagagaggtccaagctgcaggactctttttgtgaagacacaaagatgaacaagctctgatccctgactctgagaagttcagttctgagaagtctatttcccatgtccccacacctcatctgtacgtgaagataagccagatggtcttgaagggctcacctcatcccaaaaaccagtggttccacacccagatcacaggagagactacatctctaggaatcatcacaccaggcaacagattacaggtgagtattttagatattttgttgatacttgtgtgctgttttaaaatcacatttggtctctggtaggacacagggcagagatgccctgtcattatgtcgcctgttttgaaataaggagagtaggtggctttcatcttcagaaaatttgcttaacaatcagaacctctaaaattgcatgccaagtttatttgtgcatatgtatttttttgttaagaaaataatccctagctttcataaaatacacaaagagattgtgattctctccaaattaaaattacttgtatagaaagcctatagcaattagatagtttacaaagtttttcactcatggctcaaggacttgtattcatttctttcttctttctttcatccactcacttagcaaatattgat

SEQ ID NO: 249517 - DNA, 401 bp, Homo sapiens
gataggggctagtcaccagaaggactgaggcaggactaggattgggactttcagccctgctccccaacctccggggagagtcaaggggctgaaggttaagttgattgacagtggccaatgatctaatcaatcatgcctatgtaatgaactttccataaaaactcaaatggactaggttctgagaacttgccaatagacaaatatgggtgacgggggtgcttccaggaaagtaaactagaacgcttccgtgtgccaagaaggtggcacaccccagctccacagggacagaagcttctgctctgggggccctttcagaccttgccctatgtgtctcttcatctgactgttgtgtttgtatcctttaaaatactctttgtaataaactagtaaaagtttggttt

SEQ ID NO: 249518 - DNA, 400 bp, Homo sapiens
ggggggagggatagcattaggagatagatatacctaatgttaaatgacgagttaataggggcagcataccaacatggcagatgtatacatatgtaacaaacctgcacgttgtgcacatgtaccctaaaacttatagttattaaaaaaaaaacgcttagcacagtgcctaggacataggagattcttaattaatgtcagccataataatactaaatattattgttattcaaggtgacatcccctgctcctccaactgacaacttattctttaaatgtctcctactctctttcccatcataatgctcttttatgctctgatggcagtttgtggctgccccagatatgtaagaacataattcatttcattatagttacttttgcttgccatcccccttaccag

SEQ ID NO: 249519 - DNA, 1177 bp, Homo sapiens
gtgtgtatgaataaaatttataaatggacataaccttatacacaagatttaaaataacccctgggcacatgtgggcccaacccagagatagcccttcctgaaatgactggagccaagagcctgtcacgctcgcggtattcagtgcaaggtctgatcgcgtcttctgtcactcaaggcctgagggcgcggagcctggagctctatccattaagggcgctggggtgggaactgtccaatcaggttcacagtcagagaggaaggggtggctcccggtacctggcggggcctttgtctcttgctccagcgagagctcgaggttagctcttcactgccctgtgtcttctttccaagggtctcggtgattcggccacagcctcagcctccatcacgcggtgaactgatggtgctggaagattcatagactccaggacattcctgaagccgagaaaaggttaagtagggtctggcctggaatactctcctagatgaagatagcccaaccatgagccaccttcgaagcagatgagatgaaattaaagctcttcaactcctaaaggcccagagactatcacaaaagaggtcagaaatcctgaaggtcactttctgacaaactcaggaaccccaggtttatcttggagcctcaagaggagataaattcacccaactcaggctggagtgcagtggaatgatcttggctcacttccgtctccgccttccagtttcaagtgattctcctgcctcagcctactgagtagttgggattacaggtgcctgccaccacacccagctaatttttgtatttatagtaaagatggggtttcaccatgttggccaggctggtctcaaactcctgacgtcatgatctgcccgcttcagtctcccaaagtgtgattacagagttttgctcttggtgcccaggctggagtgcattggcacgatctctggctcactgtgacctctgcctcccagattcaagtgattctcctgcctcagcctcctgagtagctgggattacgggcatgtgcccccatgcctggctaattttgaatttttagtagaaacagggtttctccatgttggtcaggctggtcttgaactgccaacctcaggtgatctgcccactttggcctcccaaagtgctgggattacaggcatgagccaccgagcctggcctgat

SEQ ID NO: 249520 - DNA, 949 bp, Homo sapiens
gtgtgtatgaataaaatttataaatggacataaccttatacacaagatttaaaataacccctgggcacatgtgggcccaacccagagatagcccttcctgaaatgactggagccaagagcctgtcacgctcgcggtattcagtgcaaggtctgatcgcgtcttctgtcactcaaggcctgagggcgcggagcctggagctctatccattaagggcgctggggtgggaactgtccaatcaggttcacagtcagagaggaaggggtggctcccggtacctggcggggcctttgtctcttgctccagcgagagctcgaggttagctcttcactgccctgtgtcttctttccaagggtctcggtgattcggccacagcctcagcctccatcacgcggtgaactgatggtgctggaagattcatagactccaggacattcctgaagccgagaaaaggttaagtagggtctggcctggaatactctcctagatgaagatagcccaaccatgagccaccttcgaagcagatgagatgaaattaaagctcttcaactcctaaaggcccagagactatcacaaaagaggtcagaaatcctgaaggtcactttctgacaaactcaggaaccccaggtttatcttggagcctcaagaggagataaattcacccaactcagagttttgctcttggtgcccaggctggagtgcattggcacgatctctggctcactgtgacctctgcctcccagattcaagtgattctcctgcctcagcctcctgagtagctgggattacgggcatgtgcccccatgcctggctaattttgaatttttagtagaaacagggtttctccatgttggtcaggctggtcttgaactgccaacctcaggtgatctgcccactttggcctcccaaagtgctgggattacaggcatgagccaccgagcctggcctgat

SEQ ID NO: 249521 - DNA, 782 bp, Homo sapiens
gtgtgtatgaataaaatttataaatggacataaccttatacacaagatttaaaataacccctgggcacatgtgggcccaacccagagatagcccttcctgaaatgactggagccaagagcctgtcacgctcgcggtattcagtgcaaggtctgatcgcgtcttctgtcactcaaggcctgagggcgcggagcctggagctctatccattaagggcgctggggtgggaactgtccaatcaggttcacagtcagagaggaaggggtggctcccggtacctggcggggcctttgtctcttgctccagcgagagctcgaggttagctcttcactgccctgtgtcttctttccaagggtctcggtgattcggccacagcctcagcctccatcacgcggtgaactgatggtgctggaagattcatagactccaggacattcctgaagccgagaaaaggtgagtgtgcggggcagggcgtttggagacgggggaggcctctttgggacgcgccagaaatggcggtggcgggacggtcttgtgagcctgagtgccccgcagctcagccctcactctcctccggtgcagggaccccggggcgtcctttaccgtttcagcacagcggctttagccccagcctgtagccctctttgcgcagctctgcgcccgcagcccgtcatcttccccaggttgtgaggtcatcagggaaagactccgactggttgtgcgggtctcctgcgtggaaggagctgcggtctgtggggtccccagttcctactttaccctgttc

SEQ ID NO: 249522 - DNA, 1447 bp, Homo sapiens
gtgtgtatgaataaaatttataaatggacataaccttatacacaagatttaaaataacccctgggcacatgtgggcccaacccagagatagcccttcctgaaatgactggagccaagagcctgtcacgctcgcggtattcagtgcaaggtctgatcgcgtcttctgtcactcaaggcctgagggcgcggagcctggagctctatccattaagggcgctggggtgggaactgtccaatcaggttcacagtcagagaggaaggggtggctcccggtacctggcggggcctttgtctcttgctccagcgagagctcgaggttagctcttcactgccctgtgtcttctttccaagggtctcggtgattcggccacagcctcagcctccatcacgcggtgaactgatggtgctggaagattcatagactccaggacattcctgaagccgagaaaaggttaagtagggtctggcctggaatactctcctagatgaagatagcccaaccatgagccaccttcgaagcagatgagatgaaattaaagctcttcaactcctaaaggcccagagactatcacaaaagaggtcagaaatcctgaaggtcactttctgacaaactcaggaaccccaggtttatcttggagcctcaagaggagataaattcacccaactcaggctggagtgcagtggaatgatcttggctcacttccgtctccgccttccagtttcaagtgattctcctgcctcagcctactgagtagttgggattacaggtgcctgccaccacacccagctaatttttgtatttatagtaaagatggggtttcaccatgttggccaggctggtctcaaactcctgacgtcatgatctgcccgcttcagtctcccaaagtgtgattacaggtgtgagccaccatgcctggcaaggcattcttttttattaggggggtgttgtttattacctcttctatagaaaagtaaagacattaaaatgtaagatgcataataaaaatctaagtggagaggctcttataacctataatattgagtgatgcatcaggtaggtgttcagagtaatctgcattatcatgagaagaaaacatgtttaattttatttaaaattaaatgagtagtatattattgtactaattgtactaattttttctgagacagagttttgctcttggtgcccaggctggagtgcattggcacgatctctggctcactgtgacctctgcctcccagattcaagtgattctcctgcctcagcctcctgagtagctgggattacgggcatgtgcccccatgcctggctaattttgaatttttagtagaaacagggtttctccatgttggtcaggctggtcttgaactgccaacctcaggtgatctgcccactttggcctcccaaagtgctgggattacaggcatgagccaccgagcctggcctgat

SEQ ID NO: 249523 - DNA, 846 bp, Homo sapiens
gctgtctgcaggccctttgccatcgtcagtcctctgaccttactcagttactatatatagggtggtcagcagccacttctcttgagctcaaagagaagcattttgtgaaagtccttgaagagcatttgagggctggcagaggtggagctctgagtcgcaagtgctcccatccatgcatgtttgagaagcatgctgtcatcttcattctgcatctcctctcctgacaccaagactatgaagggaacagaaaatgtcacggaggtcaccagacctgtctatgtatcataagatgtcaggcccttcctggattccagtcactgcttatattctgccccatttaactttttgggaacaagagtccctccatccagataaagtagggcaggttcttaactggccatgtcaagtacagccactgttgatgccaccaaggacgttctgatgttgccttgcttctgtgaggaggcagagctatgttgtcctcagtggctctgcctgccgtgtcagccacccggaaggtttggagttatgcaacgagtcttcagttttccgtgtttctcctatcttgtctcttgttttgtgtacttaagcctcttgagcttgtccttgtagaatagtgtgggaccactgactaaaggaacagaacgttctggatatctccttcctccagctttagccacagggctgtgcacagctctgttgatttccagccaggcgtgccagcggcactggacagtcatctgcagcccttcatatatcgtaccttggagttgttttccttggaccctcctaccttccaatatcagcttttcaataaatgaaaatggaatccttccaatctgttgt

SEQ ID NO: 249524 - DNA, 492 bp, Homo sapiens
tgtaaaatagtgacccaagatggaaaggatattctaagcaatgggaaggcaaagagtcgcttaagcttttcattcattgtgatagcaactgaacttcttaatgtatttattgttataaaaatgtgcttgaaaccaccaattattttttcctgtagatggttagaacttttaatattgtctgggaaacttctagaagcataatttgtcaagtcaacctgcatacagcatttgtaagtactctctatgagaacactcagaaaatgttacagtttctgactcattctctctagcccagttgtgtgttaaactgaaggacacacttgactattgcactaggaaaaatgggttaggttctttttatctctgtcagtttccctttatccacacatttaaaataatttctctcttttctttttaagtcacagctgtgttattcaagtgcacttttttttttcaataaagaaaatatactgcattggcaaaaagagtcat

SEQ ID NO: 249525 - DNA, 261 bp, Homo sapiens
ggtaaggactcaggtcagtttcaagattcagaatatttctggaaagaaaaaactagattggggaacatctgaaaggaggctttaactttctaatatttaataattctatagccaatatagcaaaatactaattgttaactagttgattttaactatccctattttttgtgagttggaaatattttatggtaaaaaagattagtaagaacgatatttctgatgtatatagaaactaaagtcctaaataaaatactggcaaat

SEQ ID NO: 249526 - DNA, 391 bp, Homo sapiens
atcaccctgcatgaatctgctgcagtggagggtctggccgttttcccaccagcccggaggcacagagagccagaatacagcattccctctccatcacaggcattcacaccagcagtgctggctacactgtgacaggacagcttggtggccacacccaaatccagcctgggcaacagagcgagaccctgtctctaaaaatataaaaaagaagaaaaacatgagtataacaataatgaatgggtaataatgagtccagcctggattatactggtcattatacagagtcgtaaaatatgatttttaatcttgttttaccaaggaagggacccatgaaggcaaaaatgccgagggcccacaaaagtcatgagatggctggaatccggggtaatgt

SEQ ID NO: 249527 - DNA, 461 bp, Homo sapiens
attcactccattatttttctagttaagctcagatagtgatcacagagatatgttagtaaactatctgtagtttgtagttctccctttaacagttcctttttggagtgactagggcacatttcctcctcattattcatacaccaagtctgactttcttcacttatccttatattcttcattctcctgctccctgtttgcctttttttcctcccactccttccccctttttatttaaaaaattttaagtgaaacagacatccactgatgagaaataacttagaatcacaaactatcacggctgaaagatacgtatcatgtagtacagtggttggcaaactttctgttaagggccaaagaatagatacttcaggctttacctgacatttggtctctgtttacattgctcacctctgctattataagtttgaaaaccaccacagacagaatacagacaatctgta

SEQ ID NO: 249528 - DNA, 1097 bp, Homo sapiens
tgagaatttgcatttccaacaagttcccaagagattctgatcctgctggtcgagagtaacaatttaagaatcatcattctaggttatatacctgggagtggaattactgtgatatatagggtatgtatatctcaatttctaatgtaacagggtttcagagatcctcttcacattcttgccaaaactttggagtattattttgccagcctaatcagcttgaaaagttatctcattgttttaatttgcatgtttctgatttccagtgaggttatgcatgtattcttaacatttattggcctttcaggaactttctgtgagttacctgttacattcctttgctgaatatttaatcgtttgttttttcatatttatttatagggattattttaaaattctgcatatgaatcctttctgttgtttagcaaatatctttgcccagtggatgacttaccttttaactttgttcctgatgtcttttgttgagcaaaagtctttcattttaatgttatcagattatcggtattttattcaatggtttgtgctttttgaatcattttaaggagatccttccctacaaatcaataagaaaaatacaaacaacacaataaaaataaaagtgtttataaaaacagacataacaggcagttcacagaggcaaaaacaccagtggcctatagacttaagaaatctcattagtaatcaataaaatgcaaaataaatctatactatgatatatacatttagtacttagaatgctggcatatatttaaaggcctgacaatgccaagtattggtgaacatacgaaacaataagaactctatgtaacctcagcactttgggaggccgaggccagcagatcacctgaggtcaggagttcgagaccagcctggccaatgtggcaaaaccccgtctctactaaaaatactaaaaattagccgagtttgatggcacacacttgtaatcgcagctgctcaggaggctgaggcatgagaatctcttgaacccaggaggtggaggttgcagtgacccaagatcatgccactgcactccaacactccagcctgggtgacagagcgagactctgtctcaaaaaaaa

SEQ ID NO: 249529 - DNA, 596 bp, Homo sapiens
accactattaatagttggtatgatgtagcattttctatgaatataaaaagatatgtgtgtgtgtatgtacgtatatatgtgtatgcatatatatatacctatagatctatttaaatattaataaatctgtatacccactatttggcaacttgcttttgccttaatatattatagctgtcttttcctattagtacatataaatttattttagtcctgttaatgactatgtgatatatatggtggatgtatcataatttaactgtttctctgtgatggaagtttgggttggttgcagtcttttgcaattacaaacaatactccagtaaatatccttctgcataaatttccgcatgcttgtataattgtatctgttaattcctaaaaaattgctacaagaggaagttttaaaatttgatggataccaccaaatttctatccgaagcagttataccaatttatcttatcaaaacttacagtaaataattctctacacccaagggtgtccaatcttttggcttccctgggccacattggaagaattatcttggatcacacataagatacactgacactaacaacagctgatgaactaaaaa

SEQ ID NO: 249530 - DNA, 866 bp, Homo sapiens
cacttcgtctcactcatctttttctctcttattacccactctattctccctacctttctcgggaaatgacagttgaaattagaacaggagctaagaggagccagcagaaggggacggcaggaactaggaaatttaaggcggggagaaacaactgagagaagtggacagaaaaaagaaagcttagcataaataagaaggcccgggactcccgtgcgtccagtagacctgctctgctatggatcaaaacaaatgatttgtcattctgaaatgactctgaaagggggaatggaatgtgccccaacgatcaatattaaattttatgcctgctgcacctttcaaaaggctcaagaagacattgattcaagacccgtgttttctgtatgagtccacaagatcgaagactttatggacagaagtcatgtatcttcaacacagaaaatcctataacctcctttgatgttgaccgaggttgacttgcctccagaaataagagattctgctccatgctggcggtgtcctactttgccagaaatgtgcaggtgtcaggtggactacctggagaagatgctacaggagaaagtgaaccctgactcgcaggcttcttgagtttgtgagtctatgccttcaccttgatctggcctttttcttcttttcttttttatctgttctcatgtttgcacttccaacaccattgtattagcttctcctgtgagtgacataccagtgtgtcccaagattacttaatgtatttagtgcacgggcctgtggtcaatgaagttataattaccattccctcttgtccttaatacaataacaacctcaagacgggcccgttcccaatcacccatattaatctattcttctgc

SEQ ID NO: 249531 - DNA, 561 bp, Homo sapiens
ctatctgcaggcctatgagatgagaactgcagtcttcaaaatgatgatcatggggtatcaaagagagcgagttatgatgagttatcctctactccctaccacaggaaatggacctatctcatttaaactttacttcattaagatctaacaatgcaggacttttcttcttaattctcagttcgctagaacaaacccttctctcagcatttctgttattaaagttcactggaatgcttaaataaaagaggacccctaccttttatatattgtaattaagcaacaaagctgacatctttctaaaatacatatgtggtaaagcagaatcaacattgcactaggagactggaaaaaaacatgaaggtttttgatatatactacttatataaacttgagccatctttttatttctttcaacttccatatcctcaactgtaatatggggcttagcctctatagccaaaaactgtttggggctacaaggaattaattaatatgagagtccttggatatttctaaaatacaataaaagtgcaaaagattattatggttaaactgataatt

SEQ ID NO: 249532 - DNA, 434 bp, Homo sapiens
agtctggatagccaaaacaatagctgaaaagaaaaaagctggaggcctcacaattccagatttcaaaattacaaatctgcaaaaatgaaaagtgcagtactggtgtaaaaataaaccaaaagtaattagaaatgggaaaaaatggcccagaaataaacccacaaatatatgttcaaacgatttttgaaaagggtaccaaaaccattcaatggggaaaggacattttcaacaaatggttctgggagaaattagatatacatatgcaaaagaatgaagttagaccctcacttaacaccaaatacaaaaattaagtcaaaatagattaagaccaaaatgtaagagctaaaagtaaaaaaatctgagaagaaatcagagagaaaacgctctgaaacactggatttggcaatgacttcttagatacaataccaaaggca

SEQ ID NO: 249533 - DNA, 722 bp, Homo sapiens
ttgttcagttcccacctatgagtgagaacatgcggtatttggttttctgtccttgcaatagtttgctcataatggaaagccaccatcatctcttgctggataactgcagcggctttgtaactgttctctgtgctttagcccttgcccctgtagcctattttggttttagagtaaaatgaaagcaagtttattaagtaagtaaaggaataaaaaagttgctactccataggcagagcagccccttgcctatacagtctattatgaacacaggaaacaggctgttaaactgtgagtcagattaggacatccctaaaaaattcttcaatggcttcccatcattgaaaaactggtctttacaatggctttcaagagctcacacaatctgtcttcattctcccctataactataatcgtatcttctaatcccatttttgctactgtaccccttgtttacttccctccagaagactggcatcttgttcctgggacatgctaattatacttctgccttaagatactcgcactttttgatcttttaacttggaatgcttttcccctaggtatctgtctgtattacttggtttctttcttttggtcttgattcaaatattactttctcataaggtcttccctggccaccttattttaaattgcctccccctcagcatttcctgttcactcttctctctttgttttttcaaagcatgcatcaccatctctat

SEQ ID NO: 249534 - DNA, 1120 bp, Homo sapiens
ctttcctgaagtggctgtaatatctgcggtggacagagcgtctggaaccctggctgggagcgggcagggccaggtttgggggcagccttggcagcagtcgggggcaggggccgcctacactgagaagtctgacaggcctaggtgccacttgctgtgtgaccttggacaggcccctgatctctctgggtctcagtttcctcctctgtaaaatggaggcaaatgaggatggaaggagatgcagtgtggagcatcgagggcagaggagagctgagccgaccccaccctctgccccagccgcactgagagaggcgatccacgcagctgtttgtctgacctctgtctcccaacactccccaacactccccccgccatcaggcccaggctcatgggtggccctgagccgtaccctccactgagcaccaggagaaggcaccgtggggccaggggtggccgagacgtttggaggtcacagggctgcgagtattggcgttgcccatcaccccaggttcccagcacgtgccccagcctggccagctcagtggcagggcctctgcctgtggaggaagggaggccaaggcacctttcctgagcaggaagtgagaggaacagctctgcatacactgggtcccacatggcacaatctgaaggcagacagtggctcctctgtacctggggaaactgaggcccagagagccagggacttcccgagaccagccagcagcagctgccccttcctggggtgccatctcccctgtccctcctgccctgcgcctgcccagccctcctgctctggtgactgaggaccgccaggcaggggctggtgctgggcggggggcggcgggccctcccgcagtgcaaggccgggcctggcggggtgaggtagtaggttgtgtggtttcagggcagtgatgttgcccctcggaagataactatacaacctactgccttccctgaggagcccagtgacacgaccccatgggagggccgccccctacctcagtgacacgaccccacgggagggctgccccccacctcagtgacctgcagggggcctgagccgaagctgggtgggcatctgggagctagattcaataaagctgttctgaccatgaacttggaa

SEQ ID NO: 249535 - DNA, 292 bp, Homo sapiens
atattaaccttgaacataaaaggcctaaatattccatttaaaaaataaacactagcaaattggataaaagaagcaggacttaaccatctgctgcctaccagagacccacctaatggcaaaagacaactacagactcaaagtaaagggactagcagaagaagagaaataacaaagagcagaaccaaatgagattgagaccaaaaaaaaatgatgaaaaggatcaacataatgaagagtttgttctttgaatggataaacaaaattggtagaccactaactagtttaatgaaga

SEQ ID NO: 249536 - DNA, 337 bp, Homo sapiens
tccttgaacaaaccatccgaccttactggccctcgggcagctaatgatatggtatacaagaagcgcttgatcgagccaccctacagaaatgcaaccttactattactgatattacatattacattgggcagcctcttgtctagaaataggaaccaggacttctgtttattcctccatcacgggttcttcaagagtcgtattctaaaatgaaacagccagcccccttctctgctaactccctctgatcagttaacaccaaatagatatgagaaatcagagagatggctgagaggaaaaattagacttgtgttgggaagacaaggaagaaggaaagcca

SEQ ID NO: 249537 - DNA, 868 bp, Homo sapiens
  misc_feature (3)..(3): n is a, c, g, or t
  misc_feature (5)..(7): n is a, c, g, or t
ggnannngggggtgttcctctctccccacacccggagtttcccgggcctgccattgtggacccgccccctatgctttacacctagtctctttgcccacagacctcctcattccctcccaaaacatcctctcaagagaagggaggagaagtttcaagaaatcaggaggggtgggtttggaccctgggcagggtggaggcagtgaccttgcccttggtccctctagccttcttccctgtgcaaaaaaaaatgaccctggagaggcattcttgtaggagaagaatctagcggccggggagaattggggccgggccggcggtgggcagagtccgctgctatacacacagggaggaattctcacgcccaagccccgcctctctacgccttggaggactcctgtgacttcactgctctgcctctggagaacactgggagagtcctaccgacgttcaaacaacaggttaggccaggtaacagccctgcaccaggccgctgcccacgcctctgccctggcacccccaggggattccttgcccatcccatctctctgcagacggatgtgtgtggccccctcctaggtgccccacaaccaggaccaagatggggctcccaaaggaggtaaggagaacctttggcaggtgcttaggacactgactacctagaaagtagacgcagcagagttgctcccaagtcgaggctcctcagagcaggtgggtcctgacagcagtggattctcccagcaggatgaggaaggagggtgtgttaaccaaccaagggagtgggccccccacccaggtgtctccgcaagaccacaaaaagcccaaagatctatgtgtcactgatcattgtaaataaagtggacctgctttt

SEQ ID NO: 249538 - DNA, 814 bp, Homo sapiens
  misc_feature (3)..(3): n is a, c, g, or t
  misc_feature (5)..(7): n is a, c, g, or t
ggnannngggggtgttcctctctccccacacccggagtttcccgggcctgccattgtggacccgccccctatgctttacacctagtctctttgcccacagacctcctcattccctcccaaaacatcctctcaagagaagggaggagaagtttcaagaaatcaggaggggtgggtttggaccctgggcagggtggaggcagtgaccttgcccttggtccctctagccttcttccctgtgcaaaaaattggggccgggccggcggtgggcagagtccgctgctatacacacagggaggaattctcacgcccaagccccgcctctctacgccttggaggactcctgtgacttcactgctctgcctctggagaacactgggagagtcctaccgacgttcaaacaacaggttaggccaggtaacagccctgcaccaggccgctgcccacgcctctgccctggcacccccaggggattccttgcccatcccatctctctgcagacggatgtgtgtggccccctcctaggtgccccacaaccaggaccaagatggggctcccaaaggaggtaaggagaacctttggcaggtgcttaggacactgactacctagaaagtagacgcagcagagttgctcccaagtcgaggctcctcagagcaggtgggtcctgacagcagtggattctcccagcaggatgaggaaggagggtgtgttaaccaaccaagggagtgggccccccacccaggtgtctccgcaagaccacaaaaagcccaaagatctatgtgtcactgatcattgtaaataaagtggacctgctttt

SEQ ID NO: 249539 - DNA, 381 bp, Homo sapiens
gaaaatgagttaagtgagatatttataatatagtaatgctatgtgcatgagatatacacacacattatacatctataatgttaaaatgactgagcgaagtggagaagcatgtctagtccatatatctgcagctcctaatacacatactcaatcataagttcatatcattgcaaatatgataaaaaattaaatcagcaagctacaccttcactgtgttgaatttgtgaatagtattagactagccagggacagagagttactttgacactccagacttaattagttcttctaagaacatttaaataacttgaatcaagggtttcattcagtctgtggccaagttaagttcttgctttttaataaattgtcctaattcacgcc

SEQ ID NO: 249540 - DNA, 515 bp, Homo sapiens
acttgtaagaactggaaatggggataatgctctctatggttatgcagcctactcttttactaacctttctggactagatctttgaagtgcgtcttagctttcctcctttcctgaagagagcagagatagtgctgctttaactgtggtcatacatgtatgaggaataactttagtgtgagctgttggttttaaagagtcatatattattctatgcacttttgtaagttcattttataatgagcagattggtcaactgacatttttgattatttgtaatacatgtgttgcttggaataatactgttaatttccagaaatataagtgaaccttagcttttctgttggtggcttttaaactttttatgatgggaaaatgtgtgaattttctcctgggaaagtatagactggagacttagataccagtagatgaattgaggaatttctgtgtagcagtttaatatagaaaagagttagctgtccatgaggaagggctttaagaacaacaataactaccaa

SEQ ID NO: 249541 - DNA, 401 bp, Homo sapiens
accaaatataatttaaatggacttccaaaaacttagttataattctcagcctctgtagaacattgacagccaactgtcctactgtctcctcaggacctcttagattttttgggccagggttcacgcagatattgcagagaagagttgatcacaatcccagggtggaagagtcttgggcttccttcggttcccctacaggtagtctgtaatgcatgcttccagaccatcatgaaaattattgacaaaataagaaatgtgagactaagcatgaggagactattggtgtaatcaaaggatcctatctttgtaccaagagccatggtatttgagtttacccttttcttgctaccataactgacttgatgttctgtgaatcaggaactacctttagctccctccta

SEQ ID NO: 249542 - DNA, 312 bp, Homo sapiens
tagactaaaagtttcagacaccctgttcaaatatcccattagttgctagagacttaaaatgaacagaacgcacattgtcaggatgactattaccaaaaaatcaaaagacagcaagtattggtgaggatgtagagaaactggaacttttgtgcactgtttatgagaatgtaaaatggagcagctgctgtggaaaagagtatgcaggttcctcaaagagtaaaaccaagatgtggaaacaactaaatgcccatcagtggatgaaggggtagacaatatgtggtatatacataccatggagtactattcagcctc

SEQ ID NO: 249543 - DNA, 432 bp, Homo sapiens
gcgttagtcctaaaaagctctattccctcttccctctttgatactattatttttatacatattacatctatatatgttataaacactataataaatatacttattactttagataattttgtcttttaaagaaactgagagaacaaaagaaaagtatatgtagtatttgctatattaaccttatttgccatttttggttctttttatttgttgccatggattcaagatacaatctggtgtcattgtcttactccagtacagctttgctttcaacttacctcctttgtgctgttatgtcaaatatatatgtatctataatgtaagttcaacaatataattatatacggattattttatacagttattttaaaaatcagtttagagaagaaatatgtatttatcttttataattaaatagttacttttaccaat

SEQ ID NO: 249544 - DNA, 476 bp, Homo sapiens
gcagcagagacttataacacatttgtatgccacactaaggagtatggcatacaaattatcctgaaggtaatgaaagggaaccactgaaaagaatcagagaatattacagtaatttgatttacggaagaccagtcttggtgcagtgtagagaaaggactggacatgttggcattacagacatcagtatgtccttctgagtaaaacagaccagaacctgaaagagcttctccacctgttagctgtaagtccttaacaagtttctcaacctctctgagccccaatttccttaaatggaaagtggagacagtaatgtttacatgtcagggttactctgagaattaagagataatgggccctgccccgcgtctgcctcagaggggcccgagccacccggggcgtgcgccgcgtccccgccggggccgacagagccgagccgggccaccatggaccacaagactctgctgcaggagcggccg

SEQ ID NO: 249545 - DNA, 445 bp, Homo sapiens
tttaatttaacaagggcccagtggttaaagtttcttaaaaacaaatggacatatgaacaattaattataacacaatgtgatcagtaaaatgaatacagatgttgaattcagacatctgggtttaaattttgacactgtgtcaaaatttaagtgtgtaattttaggcatgttaccaacatctctggaaattattaaaaagattatatataaatatgtaaagcatctagcagggtagactgcacatagaaaatgaatggtagctaattataatcctcatacacacatggtacaatgaaataataataatgggttaaaccaggtgccacactttttctgtaaagagcaagataccaaatattttaggctttgcaagccatacagtctgtattgcaaccactcaaatctgctgctgcagtgtgaaagcagccatagacaatacaaaaaa

SEQ ID NO: 249546 - DNA, 424 bp, Homo sapiens
agaatgtgatatgggataaaagtggtatcacagagtagtgtaaaaaatcaggttattaacaaatagtattgaagcaattagctaagtatttgggaaaatataaagttaggccctactctaaaaataaggtagattgtacttagttctgaattatgagctgccttttcaatgagattacaattccatgcctcattgacatcaggcttagccatgtgacttaatttggccaatgaaatgtgaacagaagtgacaaataccccagtatagtagaagttctatatgccattgcacgctcccactgttgctctttgtctctcttccaggagctcagagtagaggcttcctcttcggtctaggtcacagaatgaggcacaactggaatagcaccaaaggtaacctacagctaacatgtaaagtgagtgag

SEQ ID NO: 249547 - DNA, 619 bp, Homo sapiens
taaataatacaaagataaagtattagcatataatctttctacattttcttagagtttctcctgtttttttttccaggaaccctgaaattatctgcaggagttgcttcatgtgattgctctttttaattatctccatgtgaagaaaacattgccaataatgttagcttgctttttctcagcagtagtcagttttgacattacttgcctatgggctagccctctacattttacagggcataatttcttaataaacttttccccccatattggaaactttatgacttaaaaatatctgggaaataatcattactcatagaactgacacagaagttgtagaatccacacacgtaagcataaagacttttattttactagggagaagtcctcacgtgatttttttgtactcttattttaggctctttaaaaaaaattttggcaaattaagagttgcagattagtatggaagataaaaagttgtcagatagttttaagaggagacagctgaaagcaagacgaaaggcggacaacctgctaaaagcaaacataattcccaaaaagcgtgttaggtgttttagctgcgtaagctattggttataaggacattgttgtgtaacagcag

SEQ ID NO: 249548 - DNA, 446 bp, Homo sapiens
tagcatagtgattaagagcatgggttccggtataaaacagctggagttcaaatcctggttctgtcatttagtagttgtaaaattatgttagtcacttaactactctaccttagttctgtccttcataacatgggaaagaaatgtgccaatcttacagagttgagaagattgagatgataagaaaaatggctagagtagtgaccagcataaagacaatacttgggtaacttaagattttctcattgttcttaacatgttgcagtcttatttagctgtggatttaattctgtttgttccgcgtgggctttatcatatattctaatgtaatattgtttttcagcaacttggggaaattcccattctattcattatgttttcaaatattgtttcctttctctttctgaatatcatttatatagcatactattaaaaaaaatattgcccat

SEQ ID NO: 249549 - DNA, 780 bp, Homo sapiens
cattcctgtctttctgcatgtgtgtgtgtgtgtgggctgggtagggactgtttttgagatcactgggctgaaatgtattctaggggtgaaggatctaggatgtacctgctcgtcatttcctgacttcaccttttaccaattcttttcttaacaaatttaaaattggtcagagcaggagctgctagctggctttttaacagtgtttctcataatggcagtactcagcaaatagtttttctcttgtctcctaaaattaagttgcaagactaatgtaacaaacagtaaaatttaagctaaagaactcagtataggctgggtgtggtggtttacgtctataattccaacactttgggaggctgaggtggaaggattgcttgagcccaggagtttgagaccagcctgggcaacgtagggagaccctgtctctacaaaatttaaaaacggcaacaacaacaaaaaaccctactagctgtgcagcggagtggtgcgcacctgtggtccctaactacaagctactcagaaggcaaggtaggagcatcactggggcccaggaggtcaaggctgcactgttcataccattgcactccagcctgggtgacagagcgagaccttgtctcaaaagaaaaaaaaaaaacaatctcagtaataatgaccactgtggctgggtgtggtggctcacacctgtagtcccagcactttgggaggctgaggtgggcagatcacctgaggtcgggagttcgagaccagcctgaccaacatgtaaaaaccccgtctctacta

SEQ ID NO: 249550 - DNA, 2378 bp, Homo sapiens
ctgagccttgggctgccgtcagcgcctttgccttcaaccaggagtaaaagtggccgtagcctcttccggcgaggactggtgttaagggtcacgcaagatggcggcgcccagaggctgctgaggcgcggaacggaggatggcgctggtggcgttggtggctggggctcggctggggcggcggctgagcgggccggggctggggcgagggcactggacggcggccaggcgctcccggagccggcgcgaagcggcagaagccgaggcggaggtgcccgtggtccagtacgtgggcgagcgcgctgcccgcgccgatcgcgtcttcgtgtggggcttcagcttctcgggggcgctgggcgtgccttcctttgtggtgcccagctccgggcccgggccccgcgccggcgcccgaccgcgccgcaggatccagcccgtgccctatcgcctggagctggaccaaaagatttcatctgctgcttgcggctatggattcacactgctgtcctctaagactgcggatgttacgaaagtctgggggatgggactcaacaaagattctcagcttggatttcacaggagccggaaagataaaacgaggggctacgagtatgtgttggagccctcacccgtctccctgcctctggacagacctcaggagacacgggtgctgcaggtctcctgcggccgagctcactctcttgtgttgactgacagggaaggagtcttcagcatgggaaacaattcttatgggcaatgtggaagaaaggtggtcgaaaatgaaatttacagtgaaagtcacagagtccacaggatgcaggacttcgatggccaggtggtccaggtcgcctgtggtcaggatcatagtctgttcctgacggataaaggagaagtctattcttgtggatggggtgctgatgggcaaacaggtctgggtcactacaatatcaccagctcgcccaccaagctgggtggagacctggcgggagtgaacgttatccaagttgccacctacggtgattgctgcctggccgtgtccgccgacggaggactttttggttggggaaactcggagtacctgcagctggcctctgtcactgactccacacaggtgaatgtgccccgctgcttacacttctcaggagtggggaaggtgcgacaggctgcatgcggtggcacgggctgtgcagtgttaaacggagaaggacatgtttttgtctggggctatggaattcttgggaaaggtccaaacctagtggaaagtgccgtccctgaaatgattccacccactctctttggcttgacggagttcaacccagaaatccaggtttcccgcatccgatgtggactcagccactttgctgcactgaccaacaaaggagagctgtttgtatggggcaagaacatccgagggtgcctgggaatcggtcgcctggaggaccagtatttcccatggagggtgacgatgcctggggagcctgtggacgtggcatgtggcgtggaccacatggtgaccctggccaagtcattcatctaaacctccctcacctgcttgggcggccccgtcccgggaaccactggcactccttggcagaggccagcgcgtggccagccccccggggttcttggatggtggtggcggaggaccctgcgtgcagtgtgacgctctgtcctgaatcccttagcgggtacctaccaggaggatcagggcaaggtccctctccagctgcaggtgaggcctgcggaactcagcttggatggcagcctttggtgggccgctgtggcccgcacgtctctgttctctccaagtaacatgcgacggtgtctggtgtcacgtctcgcctgagaagcccgtcttaggaaagcttagcttgaacacagtgctcgggaggtttctgctctgtctgtcatggcagtctcttggtttgtgtctggccaaggccatgcgtgtgcctcggaccgagccccagcttaggcgagggagtcaggctggcttcggccctcggttttcattcaggccaccctgctcatggcccttcctggccgcctgccacaccgcaagctcgctggggggacactagaagcaccgtggcctgggattccatctggagctgtccgcaggcaccagccccagcctcccaccacgctcactgcctggcttggaaaagttaagaagcccctcaggaagagaatcgaggctaagttcctctgcgccgagggccccgagcatatccgccaaggctcagctgcagtgccaggcggaggaggaagatccagaaattgtgaacaatgtttgatttagtagcgtgacttgcctttccctttaaaaacatcttttacaaatctgtcttggaataaagtctattttctgccttttggttttt

SEQ ID NO: 249551 - DNA, 440 bp, Homo sapiens
  misc_feature (242)..(242): n is a, c, g, or t
tgagactgtctcaaaaacaaaaacaaaacccccgtaaatagtatgtgttcttggatttgataaataacctgtcatttactactgaacaaacttgacattataaatcagttcatgctttgtgggaactgcttttcagatttcatctgctgcttgcggctatggattcacactgctgtcctctaagactgcggatgttacgaaagtctgggggatgggactcaacaaagattctcagcttgganacaggcgtgagccactgtgcctgactgaaagaggattgattttaaaatcaaaccatctttggtctatatccaacctcactggaagccccggttttctcatcgggtcagtgaagggaggattgatgagagtgtagttaaaacacccaacaaagactggggtgtcactgtgtaaattcacagagctgtagtacagggcca

SEQ ID NO: 249552 - DNA, 2317 bp, Homo sapiens
caggctgtacggtccggaggtttctttagatgcaagatggcggcgcccagaggctgctgaggcgcggaacggaggatggcgctggtggcgttggtggctggggctcggctggggcggcggctgagcgggccggggctggggcgagggcactggacggcggccaggcgctcccggagccggcgcgaagcggcagaagccgaggcggaggtgcccgtggtccagtacgtgggcgagcgcgctgcccgcgccgatcgcgtcttcgtgtggggcttcagcttctcgggggcgctgggcgtgccttcctttgtggtgcccagctccgggcccgggccccgcgccggcgcccgaccgcgccgcaggatccagcccgtgccctatcgcctggagctggaccaaaagatttcatctgctgcttgcggctatggattcacactgctgtcctctaagactgcggatgttacgaaagtctgggggatgggactcaacaaagattctcagcttggatttcacaggagccggaaagataaaacgaggggctacgagtatgtgttggagccctcacccgtctccctgcctctggacagacctcaggagacacgggtgctgcaggtctcctgcggccgagctcactctcttgtgttgactgacagggaaggagtcttcagcatgggaaacaattcttatgggcaatgtggaagaaaggtggtcgaaaatgaaatttacagtgaaagtcacagagtccacaggatgcaggacttcgatggccaggtggtccaggtcgcctgtggtcaggatcatagtctgttcctgacggataaaggagaagtctattcttgtggatggggtgctgatgggcaaacaggtctgggtcactacaatatcaccagctcgcccaccaagctgggtggagacctggcgggagtgaacgttatccaagttgccacctacggtgattgctgcctggccgtgtccgccgacggaggactttttggttggggaaactcggagtacctgcagctggcctctgtcactgactccacacaggtgaatgtgccccgctgcttacacttctcaggagtggggaaggtgcgacaggctgcatgcggtggcacgggctgtgcagtgttaaacggagaaggacatgtttttgtctggggctatggaattcttgggaaaggtccaaacctagtggaaagtgccgtccctgaaatgattccacccactctctttggcttgacggagttcaacccagaaatccaggtttcccgcatccgatgtggactcagccactttgctgcactgaccaacaaaggagagctgtttgtatggggcaagaacatccgagggtgcctgggaatcggtcgcctggaggaccagtatttcccatggagggtgacgatgcctggggagcctgtggacgtggcatgtggcgtggaccacatggtgaccctggccaagtcattcatctaaacctccctcacctgcttgggcggccccgtcccgggaaccactggcactccttggcagaggccagcgcgtggccagccccccggggttcttggatggtggtggcggaggaccctgcgtgcagtgtgacgctctgtcctgaatcccttagcgggtacctaccaggaggatcagggcaaggtccctctccagctgcaggtgaggcctgcggaactcagcttggatggcagcctttggtgggccgctgtggcccgcacgtctctgttctctccaagtaacatgcgacggtgtctggtgtcacgtctcgcctgagaagcccgtcttaggaaagcttagcttgaacacagtgctcgggaggtttctgctctgtctgtcatggcagtctcttggtttgtgtctggccaaggccatgcgtgtgcctcggaccgagccccagcttaggcgagggagtcaggctggcttcggccctcggttttcattcaggccaccctgctcatggcccttcctggccgcctgccacaccgcaagctcgctggggggacactagaagcaccgtggcctgggattccatctggagctgtccgcaggcaccagccccagcctcccaccacgctcactgcctggcttggaaaagttaagaagcccctcaggaagagaatcgaggctaagttcctctgcgccgagggccccgagcatatccgccaaggctcagctgcagtgccaggcggaggaggaagatccagaaattgtgaacaatgtttgatttagtagcgtgacttgcctttccctttaaaaacatcttttacaaatctgtcttggaataaagtctattttctgccttttggttttt

SEQ ID NO: 249553 - DNA, 2612 bp, Homo sapiens
ctgagccttgggctgccgtcagcgcctttgccttcaaccaggagtaaaagtggccgtagcctcttccggcgaggactggtgttaagggtcacgcaagatggcggcgcccagaggctgctgaggcgcggaacggaggatggcgctggtggcgttggtggctggggctcggctggggcggcggctgagcgggccggggctggggcgagggcactggacggcggccaggcgctcccggagccggcgcgaagcggcagaagccgaggcggaggtgcccgtggtccagtacgtgggcgagcgcgctgcccgcgccgatcgcgtcttcgtgtggggcttcagcttctcgggggcgctgggcgtgccttcctttgtggtgcccagctccgggcccgggccccgcgccggcgcccgaccgcgccgcaggatccagcccgtgccctatcgcctggagctggaccaaaaggtgcaggccgcggcttcctccctctctccttctctctcttccgcgctcccggcctccctcgacctgttcggctctcttcaagaagttggctcctctgggtggacagacttccggcaggacgaccctcgagctggctgcaagcccaggaggggaaggcgttaggggtggccatcaacatttattgggtggcagtgccagatgttgtgccgggtcgtgtcattcgcttagcacccaatttcatctgctgcttgcggctatggattcacactgctgtcctctaagactgcggatgttacgaaagtctgggggatgggactcaacaaagattctcagcttggatttcacaggagccggaaagataaaacgaggggctacgagtatgtgttggagccctcacccgtctccctgcctctggacagacctcaggagacacgggtgctgcaggtctcctgcggccgagctcactctcttgtgttgactgacagggaaggagtcttcagcatgggaaacaattcttatgggcaatgtggaagaaaggtggtcgaaaatgaaatttacagtgaaagtcacagagtccacaggatgcaggacttcgatggccaggtggtccaggtcgcctgtggtcaggatcatagtctgttcctgacggataaaggagaagtctattcttgtggatggggtgctgatgggcaaacaggtctgggtcactacaatatcaccagctcgcccaccaagctgggtggagacctggcgggagtgaacgttatccaagttgccacctacggtgattgctgcctggccgtgtccgccgacggaggactttttggttggggaaactcggagtacctgcagctggcctctgtcactgactccacacaggtgaatgtgccccgctgcttacacttctcaggagtggggaaggtgcgacaggctgcatgcggtggcacgggctgtgcagtgttaaacggagaaggacatgtttttgtctggggctatggaattcttgggaaaggtccaaacctagtggaaagtgccgtccctgaaatgattccacccactctctttggcttgacggagttcaacccagaaatccaggtttcccgcatccgatgtggactcagccactttgctgcactgaccaacaaaggagagctgtttgtatggggcaagaacatccgagggtgcctgggaatcggtcgcctggaggaccagtatttcccatggagggtgacgatgcctggggagcctgtggacgtggcatgtggcgtggaccacatggtgaccctggccaagtcattcatctaaacctccctcacctgcttgggcggccccgtcccgggaaccactggcactccttggcagaggccagcgcgtggccagccccccggggttcttggatggtggtggcggaggaccctgcgtgcagtgtgacgctctgtcctgaatcccttagcgggtacctaccaggaggatcagggcaaggtccctctccagctgcaggtgaggcctgcggaactcagcttggatggcagcctttggtgggccgctgtggcccgcacgtctctgttctctccaagtaacatgcgacggtgtctggtgtcacgtctcgcctgagaagcccgtcttaggaaagcttagcttgaacacagtgctcgggaggtttctgctctgtctgtcatggcagtctcttggtttgtgtctggccaaggccatgcgtgtgcctcggaccgagccccagcttaggcgagggagtcaggctggcttcggccctcggttttcattcaggccaccctgctcatggcccttcctggccgcctgccacaccgcaagctcgctggggggacactagaagcaccgtggcctgggattccatctggagctgtccgcaggcaccagccccagcctcccaccacgctcactgcctggcttggaaaagttaagaagcccctcaggaagagaatcgaggctaagttcctctgcgccgagggccccgagcatatccgccaaggctcagctgcagtgccaggcggaggaggaagatccagaaattgtgaacaatgtttgatttagtagcgtgacttgcctttccctttaaaaacatcttttacaaatctgtcttggaataaagtctattttctgccttttggttttt

SEQ ID NO: 249554 - DNA, 832 bp, Homo sapiens
ctgagccttgggctgccgtcagcgcctttgccttcaaccaggagtaaaagtggccgtagcctcttccggcgaggactggtgttaagggtcacgcaagatggcggcgcccagaggctgctgaggcgcggaacggaggatggcgctggtggcgttggtggctggggctcggctggggcggcggctgagcgggccggggctggggcgagggcactggacggcggccaggcgctcccggagccggcgcgaagcggcagaagccgaggcggaggtgcccgtggtccagtacgtgggcgagcgcgctgcccgcgccgatcgcgtcttcgtgtggggcttcagcttctcgggggcgctgggcgtgccttcctttgtggtgcccagctccgggcccgggccccgcgccggcgcccgaccgcgccgcaggatccagcccgtgccctatcgcctggagctggaccaaaagatttcatctgctgcttgcggctatggattcacactgctgtcctctaagactgcggatgttacgaaagtctgggggatgggactcaacaaagattctcagcttggatttcacaggagccggaaagataaaacgaggggctacgagtatgtgttggagccctcacccgtctccctgcctctggacagacctcaggagacacgggtgctgcaggtctcctgcggccgagctcactctcttgtgttgactgacagggaaggagatccagaaattgtgaacaatgtttgatttagtagcgtgacttgcctttccctttaaaaacatcttttacaaatctgtcttggaataaagtctattttctgccttttggttttt

SEQ ID NO: 249555 - DNA, 2248 bp, Homo sapiens
ctgagccttgggctgccgtcagcgcctttgccttcaaccaggagtaaaagtggccgtagcctcttccggcgaggactggtgttaagggtcacgcaagatggcggcgcccagaggctgctgaggcgcggaacggaggatggcgctggtggcgttggtggctggggctcggctggggcggcggctgagcgggccggggctggggcgagggcactggacggcggccaggcgctcccggagccggcgcgaagcggcagaagccgaggcggaggtgcccgtggtccagtacgtgggcgagcgcgctgcccgcgccgatcgcgtcttcgtgtggggcttcagcttctcgggggcgctgggcgtgccttcctttgtggtgcccagctccgggcccgggccccgcgccggcgcccgaccgcgccgcaggatccagcccgtgccctatcgcctggagctggaccaaaagcgaggggctacgagtatgtgttggagccctcacccgtctccctgcctctggacagacctcaggagacacgggtgctgcaggtctcctgcggccgagctcactctcttgtgttgactgacagggaaggagtcttcagcatgggaaacaattcttatgggcaatgtggaagaaaggtggtcgaaaatgaaatttacagtgaaagtcacagagtccacaggatgcaggacttcgatggccaggtggtccaggtcgcctgtggtcaggatcatagtctgttcctgacggataaaggagaagtctattcttgtggatggggtgctgatgggcaaacaggtctgggtcactacaatatcaccagctcgcccaccaagctgggtggagacctggcgggagtgaacgttatccaagttgccacctacggtgattgctgcctggccgtgtccgccgacggaggactttttggttggggaaactcggagtacctgcagctggcctctgtcactgactccacacaggtgaatgtgccccgctgcttacacttctcaggagtggggaaggtgcgacaggctgcatgcggtggcacgggctgtgcagtgttaaacggagaaggacatgtttttgtctggggctatggaattcttgggaaaggtccaaacctagtggaaagtgccgtccctgaaatgattccacccactctctttggcttgacggagttcaacccagaaatccaggtttcccgcatccgatgtggactcagccactttgctgcactgaccaacaaaggagagctgtttgtatggggcaagaacatccgagggtgcctgggaatcggtcgcctggaggaccagtatttcccatggagggtgacgatgcctggggagcctgtggacgtggcatgtggcgtggaccacatggtgaccctggccaagtcattcatctaaacctccctcacctgcttgggcggccccgtcccgggaaccactggcactccttggcagaggccagcgcgtggccagccccccggggttcttggatggtggtggcggaggaccctgcgtgcagtgtgacgctctgtcctgaatcccttagcgggtacctaccaggaggatcagggcaaggtccctctccagctgcaggtgaggcctgcggaactcagcttggatggcagcctttggtgggccgctgtggcccgcacgtctctgttctctccaagtaacatgcgacggtgtctggtgtcacgtctcgcctgagaagcccgtcttaggaaagcttagcttgaacacagtgctcgggaggtttctgctctgtctgtcatggcagtctcttggtttgtgtctggccaaggccatgcgtgtgcctcggaccgagccccagcttaggcgagggagtcaggctggcttcggccctcggttttcattcaggccaccctgctcatggcccttcctggccgcctgccacaccgcaagctcgctggggggacactagaagcaccgtggcctgggattccatctggagctgtccgcaggcaccagccccagcctcccaccacgctcactgcctggcttggaaaagttaagaagcccctcaggaagagaatcgaggctaagttcctctgcgccgagggccccgagcatatccgccaaggctcagctgcagtgccaggcggaggaggaagatccagaaattgtgaacaatgtttgatttagtagcgtgacttgcctttccctttaaaaacatcttttacaaatctgtcttggaataaagtctattttctgccttttggttttt

SEQ ID NO: 249556 - DNA, 857 bp, Homo sapiens
ctgagccttgggctgccgtcagcgcctttgccttcaaccaggagtaaaagtggccgtagcctcttccggcgaggactggtgttaagggtcacgcaagatggcggcgcccagaggctgctgaggcgcggaacggaggatggcgctggtggcgttggtggctggggctcggctggggcggcggctgagcgggccggggctggggcgagggcactggacggcggccaggcgctcccggagccggcgcgaagcggcagaagccgaggcggaggtgcccgtggtccagtacgtgggcgagcgcgctgcccgcgccgatcgcgtcttcgtgtggggcttcagcttctcgggggcgctgggcgtgccttcctttgtggtgcccagctccgggcccgggccccgcgccggcgcccgaccgcgccgcaggatccagcccgtgccctatcgcctggagctggaccaaaagatttcatctgctgcttgcggctatggattcacactgctgtcctctaagactgcggatgttacgaaagtctgggggatgggactcaacaaagattctcagcttggaggcagcctttggtgggccgctgtggcccgcacgtctctgttctctcccaccacgctcactgcctggcttggaaaagttaagaagcccctcaggaagagaatcgaggctaagttcctctgcgccgagggccccgagcatatccgccaaggctcagctgcagtgccaggcggaggaggaagatccagaaattgtgaacaatgtttgatttagtagcgtgacttgcctttccctttaaaaacatcttttacaaatctgtcttggaataaagtctattttctgccttttggttttt

SEQ ID NO: 249557 - DNA, 785 bp, Homo sapiens
ctgagccttgggctgccgtcagcgcctttgccttcaaccaggagtaaaagtggccgtagcctcttccggcgaggactggtgttaagggtcacgcaagatggcggcgcccagaggctgctgaggcgcggaacggaggatggcgctggtggcgttggtggctggggctcggctggggcggcggctgagcgggccggggctggggcgagggcactggacggcggccaggcgctcccggagccggcgcgaagcggcagaagccgaggcggaggtgcccgtggtccagtacgtgggcgagcgcgctgcccgcgccgatcgcgtcttcgtgtggggcttcagcttctcgggggcgctgggcgtgccttcctttgtggtgcccagctccgggcccgggccccgcgccggcgcccgaccgcgccgcaggatccagcccgtgccctatcgcctggagctggaccaaaagatttcatctgctgcttgcggctatggattcacactgctgtcctctaagactgcggatgttacgaaagtctgggggatgggactcaacaaagattctcagcttggaaaagttaagaagcccctcaggaagagaatcgaggctaagttcctctgcgccgagggccccgagcatatccgccaaggctcagctgcagtgccaggcggaggaggaagatccagaaattgtgaacaatgtttgatttagtagcgtgacttgcctttccctttaaaaacatcttttacaaatctgtcttggaataaagtctattttctgccttttggttttt

SEQ ID NO: 249558 - DNA, 343 bp, Homo sapiens
gcaattacttccttactagctggggctttacatacacacagatacacacatactctcaatttgctaagactgaaaccatcttggcaactttttttgcatctcagttttctctctgtgtacgaagaaagttattacatgattgctaattttcctatagctgtacaatcctgtaagtcatttaacatttattaagcatttgctatgtgtaaatgagaaagattttgctaagagaagaaatatatacagcatgagtaaaacccatctggccttaacgagtacaatttattggcaggacgccaaatgcaaacaactacctttataggacctttatatacctgtataa

SEQ ID NO: 249559 - DNA, 384 bp, Homo sapiens
atgcagaaggttgttcttgaagctctgttttgaaaggatagtggccagaacgcgctgcctgtgtccagcgtccctgatttgtcacaatgagcaagatctctgagcatcgtcaatctctttctctgccccaagaaactcaagcttggttaaaataagaaacatcttcaaaaacatctctagctatctcttttgtaattcactttctttagtatcataattaagttaagatttatatgtatgtgttgggagcgcctctggctctggaaattatgcccattgttcattactatcagcaagctgtggtgtgtttgcttgcatgaaaaacatcaccattgctactacttagaaaggagtctagtgcaaaataaagggaagtctgcgttt

SEQ ID NO: 249560 - DNA, 618 bp, Homo sapiens
atatgatattgtgaagagccgggtccagagtaagtgagtgcaccattttaactcccttccctcaccttgagcttctattgcaattattgtccgaaaatctatttggcaatcatgaccatctcttctatgctatccaggattgttaattatcttagattcaccattgttatcagaagttatctgtgtccattcatttattcaacaaacatttactagtgtggtttttagcttgggcgaatgggggtgtggtggtgctgatgaccacagcaggggagataaggggctgcaggtgctggtgggaggtgtgagagtttgcagtccatcacgttgagcttccttgacacacaaatagggcgttccagacaatggttgctacgtgagacggctgacaaggagactcagaaatctctggtctgcaatagttgacataagaatggggcccacttagttcaggggctcctctctaaaaggcacataaaaagatctggaatttgggccgggcaaagtaggttacgcctgtaatcctgacactttgtgaggccaaggtggcaggattgcttgagaccaggagtttaagaccagcctgggcaacataacgagaccttgcctttccccttc

SEQ ID NO: 249561 - DNA, 313 bp, Homo sapiens
cattagcgaccattatcctgaccatctccccccggagttacatcagaataaccctttgtgttttatacagatcaattatttcattcatagttcctcttttcccagtgtcagagaatcatagactgctttttagattgtatgccatacttaatgacatgtatagactatcagctgtctcattcattcattctttttcatttactcagcattcactagttaccgtcttcttaggccaaggggtaggagcaagttgaatatagaattcagccctgctctagagaatggcgtgaacccgggaggcggagcttgcagt

SEQ ID NO: 249562 - DNA, 304 bp, Homo sapiens
aggaaactgtggaacagagacatcctcctgtgttcagagtcacacagcctagatagtggcagtggtaggactacaatcatggcagatcagtgctagaaaggctttagagtgtctgtatgtcattcagggttcccagccttgagaagaggacctgctatgcagttactgcggactgcaaattcacatgtacaccaactgttgtttgtagactaaataaataacatctaacatctgtataccgttactttaaaaacgaatgttgactctgctgtgattaataaattggaagtttattttcaactgt

SEQ ID NO: 249563 - DNA, 1027 bp, Homo sapiens
gcgcgcagcagaggctccgattcggggcaggtgagaggctgactttctctcggtgcgtccagtggagctctgagtttcgaatcggcggcggcggattccccgcgcgcccggcgtcggggcttccaggaggatgcggagccccagcgcggcgtggctgctgggggccgccatcctgctagcagcctctctctcctgcagtggcaccatccaaggaaaccattagatcctctaagggcaagaagccttatgggatagaggtagatggcaatcatacgcagtcgagctggaggagggagtgacggtggagacagccctgacgctggggattgagttgttcttgtgcttctgtgttccttcatgggaaaactgtgaccactggctctctcctttcacaatggtcatacaacagatggctgtgggtggggggttggccaagtaacggcatggccctgtgggtctttcttttccgaactaagaagaagcaccctgctgtgatttacatggccaatctggccttggctgacctcctctctgtcatctggttccccttgaagatgggctatcacatacatggcaacaactggatctatggggaagctctttgtaatgtgcttattggctttttctatgggaagcatgtattgttccattctcttcatgacctggctcagtgtgcagaggtatcgggtcatcgtgaaccccatggggcactcaggaagaaggaaaattgccattggatctccctggaaatatggctgctgattctggctggtcaacaatccttgggatgtcgggaagcagaccatctcaatctgggccgtggaaaatcaagaacgtggtcatgaacgtttgcctgtaaaagcacatgtggggcgagcaacgcgttcaaaaacatcactcatcggggcaagggggcctacatggtacacaacgaatcctacaaagcctgccaatggtggcgaaaacacaaaagcggacatgtgccggggaaaaaccgacgaaagagtagggcggacacatgatacgg

SEQ ID NO: 249564 - DNA, 403 bp, Homo sapiens
acagagtgtcgctcttgttgcccaggctggagtgcagtggcatgatcttgactcactgcaacctccgactcctgggttgaagcgattttcctgcctcagccttccgagtcactgggattacaggtgcccgccaccatgcctggctaatttttgttatttttagtagagatggggtttcaccatgttagccaggctggtctcgaactcctgacctcgggtgatccacccacctcggcctcccaaggtgctgggattacaggtgtgagccaccttgcccggcctcaaattttttttttaagagttctatttcacagcccactaatgggccccacctgcgatctggaaaaattgctctaatcagatggctgcagactggcccagcgcctgcccttctgctctactc

SEQ ID NO: 249565 - DNA, 518 bp, Homo sapiens
accctcctctgtaagctaccaggaagtagatactgattttgtagtaagtggtcaactagctagctacttgtcgctcttttcagggatggtgtagaatagaacttgctgagaatagatgatttttaaagatttttccaactcttgaggtatgtatgagtagactccagaacagatcaccccactgatcaccctttttggttttacagatgcagcactcaaacagggcctcctgtttctagcaagactcaagacagattcctgggcccacattgacttcagacatttgactacccataagtggctgaacttaattgggaagagaatcccaactctcaatgctgtctatttttacactgacaattttgcttttttttttttttttttgagacaaggtcttgctctgtcactcaggcactcaggctggagtgctgtggtgcaaacatagctccctgaagccttgacctcccaagctcaagtgatcctcccttctcagcctcccaagtagctgggaccacagg

SEQ ID NO: 249566 - DNA, 491 bp, Homo sapiens
tagtggttcaaccactaaaacattcccgctttggattcaagagcaaacttgaattacagaaactcaagtctgaggaatggtggaccttgtatgccatagaaatatccagctgccatgctgtgagctgctttattaagatgcccaagtggcaaggcactgatgtctgtagccaaaagccagcaacccaaggcctgccaaaagccacgtgcatgaacttggaagtggatcttttctcaattgggccctgagatgatgacagcaccagctaacaccttgatgacagccttatgagataccctgagccaaaggtacccagctaagtcatgtttggattactaatcaacagaaacgttgggaaaataaatgtttttgttttaagctgttaaattttgggctagatagataactaatatgttgtataactacaatacaggattatttttatctattatataaatttaatatatatatatttgtaactatatatagta

SEQ ID NO: 249567 - DNA, 364 bp, Homo sapiens
gaagacaacacagtaaatgtgtcaattttccccaagttgatacacaagtttgactgaaaactaatgtcagccatacttctcacaaattaaaaatagaacagttgaccccggcgcagtgcctcacgcctgtaatcccagcactttgggaggccaaggtgggtggatcacgaggtcaggagttcaagaccagcctgaccaatacggtgaaaccccgtctctactataaaaatacaaaaaattggccaggcatggtggcgcacgcctgtaatcccagctactcgggaggctgaggcaagagaatcgcttgaacccgggaggcggagggtggcagcctgggtaacagagaaagactccatctcaaaaa

SEQ ID NO: 249568 - DNA, 401 bp, Homo sapiens
tagaacttgccattgtccctgctctttagagttgcttcaaattaagagtctgggctgggcgcatctagttggcataaagtaatctggggctagagtaactttgtgattcctacagtgtgtgtacaaactattgtgtgttttgaaaatcgctacaggttgagtatccctcaactagtgttaaagtctgttgacaaaaatgcagagtagcaggaaatacagtgaaactcaaaatccatgttttaaatactcttcagattatcaaatcactgaagaggcagagaactgtctgtccctaaaattgtgctctctcccccaccagtctaagctgtcatctgcttttactttaagcttcatcctgtttgactttttttttttttttctgtgactgagttttgctctgt

SEQ ID NO: 249569 - DNA, 273 bp, Homo sapiens
cacatatgtttatgcacatatgtgtataggagaaagaaagtgaatgtggcaaaatactaacaattgctgaatgaagttaaaagctacatgggtctactttgtattctttttaaaaacagctttataaagataatttaaaatacgaaatttaccctttgaaagtatacaattcagtagttttttagtgtatttgcagagttgcacacccatcaccacgatctaattctagaacattttcaccccaaaaagaaaccctgaacccattagctgtca

SEQ ID NO: 249570 - DNA, 456 bp, Homo sapiens
agggtgaatgaagtagatttgaatagccgggagaaagctgagattccatttcacagaattattaatacgttattatctacatcgacaaatttgtaatttcagtagaaattatgtctcttcaaagttgtttctctgaatttctactgaagtcaatgataagaaatggcagtcttagctgggcacagtggctcacgcctgtaatcccagcactttgggaggctgaggcgggtgaatcacgaggtcaggagattgagaccatcctggctaacacggtgaaaccccgtctctactaaaaatacaaaaaaattagccgggcgtggtggcaggcgcctgtagtcccagctactcgggaggctgaggcaggagaacggcgtgaacccaggaggcggagcttgcaatgagccgagatagcaccactggactccagcctgggcgacagagtgagactcagtctca

SEQ ID NO: 249571 - DNA, 564 bp, Homo sapiens
taaaagaaggagcccaccattttggttaggcatcaatagcttattcagagtagaaaacccggtattttgtaggaatggcctgtacgatattggtaaaatgcaacacattgcagggaaatatttgaaaatctggcccgtggcagtataactgagaatgtaaattagtggctgaaagtgtaacttagcagtcaagatttcaggccatgccgggcgtggtggtgcatgccggtaatctttgctactggggaggctgaggcaggagaatcacttgaacctgggaggtggaggtttcagtgacctgagatcgcaccactgcactccatcctgggcaacagagcaagattccgtcttaaaaaacaccaccaccaccacaaaagagatttcaggccagtcagcatgtagaagagctgagcaggttctcagtaaagcccttgtgaagagcccctgaggaaagataatgcagagcattgatatgactagtgcacatcccctgcaaccagctgtcttgcttgttggaaacttcctactgctgctttatcctcctttctttcctttaaaaaaaaa

SEQ ID NO: 249572 - DNA, 443 bp, Homo sapiens
gattcactcccgcaccagggccacatggtctcagtctccttgctcactcctcctcctcagcctggcctctgaaattgcaccctaccctcccctgcccctgctcagctgctcagttgctcagctcctgcccttctcttgccacctgacctccctagacctgaggttctcaatcttagctttgcacgagaatcatcagggagttctgcgaaatgctgatgcccaggctgatcgcgtccaggggagggccagggtcactggcatttttccaacactctcaggtgatgtaagtgctctgtgggggctgagaagcccaacccagggtggtgcctccactctcaaggcaccagcatcgtgtcctacacaggtgccttccagcctgacccctcctctgagcaccacctgccagtgtgacagctccatctggcatgggaagcaaaaaaaaa

SEQ ID NO: 249573 - DNA, 337 bp, Homo sapiens
ccatagtaacacccacatgtagcttctgatagaaacccacaaaataagatgaaaatagtttctcagtcaaatggttggaatatttagtaatacttggcagtattttttattttgttaataacaggtgtcatttaatacaatgacttttaaattatatattaaaagaaatttttaaaagttttatggcaagctgtgaaatactcagatggataatgtgaattaaggcgtgttctttggccactcaaagtgctccccacccaacactggcatggactgctcactaggtggccaaaagagatttcgtttatggatgtgttttgaatgttttaacattaaa

SEQ ID NO: 249574 - DNA, 404 bp, Homo sapiens
gggaaattgatctactttggtagagattgtgggctgtccaccaatatctagctaccttactttattaaaaatagaatccttaatttttagctaggcaaatgcctcctacccctagttggaataaagacatttttcagttttcttgcatcagaatgggtttgcatgagtacacctgggcagtgatttgtcagactttgggaaaatatgatttttttgttggcaagaaagcagcctggatggagctccagtgaccatcttaaaccactagacaaaaactcatgttgaagataatggagctataagatagtgactgatgatgactgtagagttgccatacttgtcccaggctgccaacatctggatttcattgacatgggagagaaataaatgtacattttatttat

SEQ ID NO: 249575 - DNA, 402 bp, Homo sapiens
caggaccaccggtcatttacacagcttgtccattggcaagtgctgctgagcctaggcaaatcatccatggattgagggtatctgggatttcctctgcttgcactcactccgtcgtcttgccttgtgaagaaggttcctgcttcttctttgccttccatgactctgcaaggtcacaagacagataagcataagctgcaaaccgagttctcacagagatgtaagacatgtagcagaagtgtcacagcagccttttgttctcgcttctgtaagcctgcttcatgtagttcccacctcaaaatgcttaaaaaggactcattttgtttgttctgggctcagcctgtaggacacatgtctgctgggccagggtacaccttaaaataaacacccttctgcactgtctct

SEQ ID NO: 249576 - DNA, 782 bp, Homo sapiens
tacaatggcaaggaagatacaaataactctgatggtggtttgcacaatacttgatgctttgacgacaggctggcagaatgcttcacacttcttaaggaagccaggaaaccaattatcaatccattagcagccactttcaaaagaagcttcaaaacagccttcaccagagatatgccaagaatgcatgaatgcacactttcctttgccattttgtaaaccaccttaagaagatgtgaatcctaattgctcagttcttaatgtgtatagtatatgtgtgaaatgtgaaggcaggaacttcttggatgtatacgatttaagttacaaatcagcaatctaatcttgagaggtcaagggagggaaaattggatccttgggtgctcagggaaaatgtcccagaagatacaagacttgagctgggcttttggagagttggaagggaaagagatgctgtgggaaatggcccacagagatgctgtgggaaatggccctactggccctctgctagtatcttcctgtcctttactctgacttcctccttacttatcccaccttctgttctggtgacacacacacacacacacacacacacacacacacacacatccccccacatttccgataaatgggaatggatctgagaaattgacattcaaggccattcttcaagaataattttaaattacactattgattttgccttaaaatcctttttgtggggcgaattgggattatagactataacacatattttcattaccactatcccgcccacaccatgtact

SEQ ID NO: 249577 - DNA, 419 bp, Homo sapiens
  misc_feature (412)..(412): n is a, c, g, or t
aaggcgtttttgccctttgtttcatttagaaataaatataatattggaaaaaagaagtcagtggaatattgctacataaaggcaagaatgttaagtaaaccatctctagatatctggggtaatataactacacaaggactatttattttatagtcattttctgaggtacactctagcatgtggtgagcacatcatacaaacaaatgattaatgaccgtgataaatcactgaacttgaaatggtgggtgtcgctgccggcaagccatcactgttttaggtagaaatgtaaaaaattattcttctgaattataaagttatctgaggtgagaaattaattgcttactaaaggatgtgtgtaaattataagtaattgcaaggtttcattttgttggagttgaatatattagaattntaagaga

SEQ ID NO: 249578 - DNA, 449 bp, Homo sapiens
aacagaagtaatttagaaatcaattaagaattatatatctagaacatctcccaatatatttaggaattaaacacaacattcaaaataacatgagggtcaaataagaaatcataagaaagtatttcaacctgaataataatgaaaaaatatcaaaatttgtgaaatgcaggtgaaacaagtatgtagttaacagttctaactaaagggaaatgtattactataaatattatactagaaaataacaaaaagctttaagtcaatgatttaagtttccactttagaaaaatagaaaatgaaaagcaaaccttcaaaaagaggtaagaggagagaaataattaagatcagaaatcagtaaaaaaggaaagagataaacaagaaaataaaatcaaaagtaagttgtttgaaaacataaataaatttgataagcccatgggaagaatgatcaagga

SEQ ID NO: 249579 - DNA, 398 bp, Homo sapiens
atcattagacattcactcattgtaacaataacacatatgcatgtatacagagagagacagagaaatttagactttgccttaatctgaacttagtgcatcccttgtgcctttagttaacaaaacatccatcctgtggggcagcaagactgctaaatagacatctgcacaatgttggaatccaggctttactcaggatggctgctctgggcactactttcatctaagcaaatgcaataactttagggaataacagtgaattttttccctaaacagttatcacaatgccactgaacatattttaccaccaataactgatctagaaaacccatgtgttcaatcttgtttgtgtattcttcccattcttccatgagctttttcatatctctatgtttgtttta

SEQ ID NO: 249580 - DNA, 410 bp, Homo sapiens
agcctcctctcccacccccatcagcccatcacccccaccctccacacacactcagggtaagattagcgtccaggaagcagactattcgagcaaggagcaaggagctggtaaagcccggagcctgggtttttggaattccacctcccacttccagtctggagacctccagactgtgctgagggcactaagggcaccctagtaacctcaagatgttaattaggtgctccctgaaaaaagacttccttgaccaataggattgggaatatggcacatttatcttccagtttacaatattatggtaaaataaatacagactcacagtaaaaaagaataagaagtataaagtataaaaatacagatttatagtatcatcaacacattaaagaaaacccagtttgctttgacttgtc

SEQ ID NO: 249581 - DNA, 1185 bp, Homo sapiens
tcccaggttaagtgattctcctgcctcagcctctgagtagctgggactgcaggcacgtgccaccatgtccagctaatttttgtatttttagtagagatggggtttcaccatgttggcccagctggtcttaaaactcctgacctcaggtgattcacccgcctcagcctcccaaagtgctgggattataggcatgagtcactgcacccggcctagattctgtttttaatgacactggaaaacaacgaatttttgttttggcatatatatagctttacttttaaaagcaagaacacacacaaaaaaagggggaaaaaagcaagaacacaataaatgcaacatttagatcaacgagtacctgtgcacgagaagcacagggatggtttcagtaggatttcatagtttgatggtgacttttgccaagctgctgctacttggattgtgtggtgtgtttgtgagtgtttatatcattaaaaaacaaaacagccactgcactgggttgttttattttttaatgatataaacactgatgagacaaggcaagaaaacagcaaggcaaaaaagaaaaaaaaaaaagccaggcatggtggtatgcacctgtagttctagctatttgggagacaaaggcgagaggaccactttgaaatccaggagttcgagattacagcgagccatgatcatgacattgtagtctacccttggcaacacagcaagaccctgtctcaaacagcaaaacaaaacaaaaaaccccagaatcacaggatttttttcatgcataatttttctaatattgtcatgttattgcatatggctatagctcattccttttcactgccatatatgacttgtgtgattaaacatattctataaatggattgtttccagtttcttgcttctgtgagcattgttttatgaataatcatgtcttttagcacacatagatattgattatcttcatcaaaagtttctcttgggtataaacctaggacagtagtcttgctgctaataagatatgcagtattagtctttatgagacaatgataaattgttttcctaagtagttccttctcaccagcaatatgtaagaattcctactgagccacattttctccaacatgtggtattatcaggtctttgccattttttttctttttttttttagagaccaaggatgctgctaaagatgct

SEQ ID NO: 249582 - DNA, 604 bp, Homo sapiens
tagtaaatcaagcaaggccctataaggaaaaaaaataaaagccagggcatggtggtttgaaatccaggagttcgagattacagcgagccatgatcatgacattgtagtctacccttggcaacacagcaagaccctgtctcaaacagcaaaacaaaacaaaaaaccccagaatcacaggatttttttcatgcataatttttctaatattgtcatgttattgcatatggctatagctcattccttttcactgccatatatgacttgtgtgattaaacatattctataaatggattgtttccagtttcttgcttctgtgagcattgttttatgaataatcatgtcttttagcacacatagatattgattatcttcatcaaaagtttctcttgggtataaacctaggacagtagtcttgctgctaataagatatgcagtattagtctttatgagacaatgataaattgttttcctaagtagttccttctcaccagcaatatgtaagaattcctactgagccacattttctccaacatgtggtattatcaggtctttgccattttttttctttttttttttagagaccaaggatgctgctaaagatgct

SEQ ID NO: 249583 - DNA, 470 bp, Homo sapiens
cttttctgagtgtttctgtctttccatttgttataacggttgcctttacttcttagagaatggttgtaatagctactattaaaatctttgtgtgataattttaacctttatgtcatcttagagttgttgtctattgattgatttccttgtgagttgagatttccttggtctttcataggccaagtaactttggtttatattctggatattttgttattatcttatgaatctttatatcctgtttatattttaagaagaacgtagttattgttttgtttaacaaacaatttacctagttagattcaggcgataagtttcaatgcacattttatagactttattcccaatgtcagttaacttttcacaggttttgttgttctattaggacctgtccttcatatgcgccactgagtgttctgagaactggagagtagcctatcctatacttttcacagcctttggcatgctat

SEQ ID NO: 249584 - DNA, 529 bp, Homo sapiens
cagtatcactggttattaatatcatttgaattgcaaattaaactgctgaaatccagaacaggacagaaacaaatctccagtccatgaggtccacttgtctaaatatgtcacttgaagtgcaaggtaccaattgctcagtggctcaaaatgattttctggttctgttgtcatttcaagagcttctcttgagggttgagagagtctgttttcctaagaatctggttctctccatcagtctctgtttccaccttatcttcctgggaaggtgtgctttctttgaggtgagatgtgaagcctgcccacgtgcagttttatgtcgaattccaagtcagatcttaacttggtactcccggagcctgttggaagtcttaggaattggggggagtactttggtaaggaagtagccatgacgtaatggtgagaaggtgttgtggtcctagtgcttgctgcaagcttgacatgtggttattcttgtcatccttgcaatgtcattgtgtgcgaaagaacattctccactggaacctgtgca

SEQ ID NO: 249585 - DNA, 439 bp, Homo sapiens
tgtttaaatgcttttcagaatgttatggggaaaagggctgtgggttacttgaagcgtgagaggtctttgacaaaagtggtagatgagaagcacacacagacgcacacacatgtgaagggatttttaatatttatcaaggcaactaaatacataaagatcaattggagaagctggagaatttctctaccttaagagaaaacaggttaaaattaggaattagctgccaagaaaatccctgaaagaacatttaaggggaatcacaactctgatacacagagatttcatttaaaaacccctccccattttttgccaagccacagagaaacagaaaaccagcttccttctcattgaaggagacagagaagccttgggcattaacatcgcaagagtatctctgccttgctcagagtgtgtagtaataaaaagaatcacagttaaa

SEQ ID NO: 249586 - DNA, 254 bp, Homo sapiens
aatcttaaaaaaaaatcttcttttacaagatgaagtgaggtttcattagttttataagatatgtatattaaaagccagtttcattaaatgtcaaacagttcataatgtttagatttctaactttaaacatatgaatgagatttgagtctaaaacttaacagtatttttcagtgtcaagagattggtattgtcttgagaatctcttctaaattgtcacaatggcaataagaatagaaaatagagctgaccgaact

SEQ ID NO: 249587 - DNA, 373 bp, Homo sapiens
ggacttttcttcacctactgcttttccatgttcagacaacacatgaagaacattgaacaaccaaaaattcactttaatagtcttttaatgcttgtcttccagtaatgccttgcttctctaagtagaggatccactttcctgttggaaagagtacttccctagaagtcctaaaacctgtattttaggttcacccttggcactcttattaaacattcatttagcctctctcggtcttgatttctttacttgtggtagactaatagatatagaaagaggttcttttatcctgttttcctgataagttcctaaattccataaatctacactttttgctcacacaaacttttatatatccttattcttatacaatatc

SEQ ID NO: 249588 - DNA, 270 bp, Homo sapiens
agtaaggatagcagcaggacctaccttacagggttgctgaaggtactaatgagttaacccatcagaagcttagcagcacctggctctgtctgctgctctcatcactgctctgttcctaagcctggccgtgtccaggctgtggctaccacctcggtcagctaccacagccctgctttgtggcagacacctggaccctgaaggagaaactagctccggaagcactttctcatgactctgcttaataaaggaataaatagtattcagagtgtt

SEQ ID NO: 249589 - DNA, 358 bp, Homo sapiens
aaaagagagagtactccatttctattctattgccatcttacagcgggcacttgggtttttaatttagcattgtagggctggttgttttgttcgggtgtgtgtccatgtgtgcacatgcacatgtgtagtgtgagatttttaattgcccaaatcatccaaatgcaagtgtttcctcgtattcgaatctcacattgactagtgtgtgttggtaagtgcgcaagggcctgggctggcagattgttatgtggtgagaatccggttagtcaaagtgtatgtggtcacaaaggaatccaacctttattttatcaatttaatttaatttttagatttcaattatgaaatatttcaagaatacaaa

SEQ ID NO: 249590 - DNA, 499 bp, Homo sapiens
gccaccaagctggtcttttgttttgtttttgttttttttagacagggtctcactcttcacccaggctagagggcagtgccacgatctcagctcactacaggctccgcctccggagttcaagtgattctcccacctcagcctcccaaatagctgggactacaggcggcgtgccaccgtgcctggctaatttttgtatttttaatagagacgaggtttcgccatgttgcccaagctggtctcaaactcttggcctcaagtgatccacatgtctcagcctcctaagtgatgggactacaggcgtgagccacggcgcccaggcacgtacttctttatagcggtgagagaaagggctaacacaaggcaaaaaaaaccaggctacatatacacagaaacgcaagtagaaaagggagtagttttttttttttttttttgagatggagtctccctctgttgatcaggctggagtgcagtggtgcgatctctgctccactccgcctgc

SEQ ID NO: 249591 - DNA, 237 bp, Homo sapiens
ggtcaatgttctggttaggtttaggtcagggtcagcttcatggtcagggaaatgtttaaggtaaagatcaagtttatggttaagttaggggttatggttgaagtcagggtcatgaccaggtcatatttaggatctagtttatggtcagcgttagcattaaggtttatttttttatttttatttttttattttttgagatggagtcttgctctgtcacccaggctggagtgcagtggc

SEQ ID NO: 249592 - DNA, 333 bp, Homo sapiens
agtaattaatagtgatttcattttctagcaattttagaactaaagtagaatctactaatgtataatatatccagaaagcagaaagtcatgatatattcaaattattaaactgattaagatacattttactcatgtatcaaaattattgaatatatttgtagtattcttcaatataaataatttctctttttattctggctaccaggccattgtcatattcacaaaataggttcttttatttctgtaaggaaatacattctctctttttttctattccatatctttgaaaacagagaatgcttcatagtctttatatcatagagttcaatttaa

SEQ ID NO: 249593 - DNA, 399 bp, Homo sapiens
cagggtttcaccatgttgtccagaccggtctcgaactcctgacctcaagtgatctgtccgcctcagcctcccaaaatgctgggattacaggcatgagccaccacgcctggcctgttaagataaaacttctaaattgagttttcttccttctggcttgagttaaccagtccagattcacgtatcatgactgaaacttcttatccagccaaatgcatccctttcccaccttgcatactttctaaacacacgatttttccctgctaaacagacacttctatgctgttttttacccttctcaagggtgttctttttttttatttttcttccagacctagcctcttcccctttctggctgcatatctgaatctgtcctcatctttcagacctcagtttaaattc

SEQ ID NO: 249594 - DNA, 453 bp, Homo sapiens
tagcaaatcaaaaaagaaatagagaccagaggctagatagcatctctaggctgcttgttttcaactctgtaatcctgtctgcaccctctcctgctcccctttttagtggatcattttgcattatgtaagaacatacttttggaagtacatggggatatttcttaaaccttaaccctgcctatcactttagtcatttgtaaatctcaccaaacttctgcatgttggattattgcctgatacaactttgtccaaactaacttttgtatgaaaccattcaaagcactgtctgtgcctcttcccccaccaactctgccaactaatgcttccctattaaacatgattcacagttgttgtttacttataactatttcaactgggagggattctttatattatggtttgcagttactaaaataaaaagaagtacttttttttgtaattacttctgtagtc

SEQ ID NO: 249595 - DNA, 342 bp, Homo sapiens
gttattgggtctggataaaataggactaaagatgggaagctgcactgaggagaggaatctgtgtaggacatagtggaaaacttgtatgtctaaatagtaagacacaggcttttgacttcatcaggtttaattaatgatcggctctgtggcatactggctcttagacttccggcttagtaataggctgccttcttatttttgctttattttttcagaagagttatatattccctataaacggtcgatattggaataatacagtgtaaattcttaagtaatttatgaggtcttgctgtgtcacccaagctggagtacagtggcacgataatggctcactgcagc

SEQ ID NO: 249596 - DNA, 664 bp, Homo sapiens
tcttctgtgcatggacatctctattgcagagttagcttccagagaaccccatctaagatggccagctgtccccaacatgggtcatcagggacctgagtaggccactataaactgaaaactctggtttctgtccaaatttgcagagtaaatgttgaaatgcccaatctgatggttccttgaatttttatggaatgaaaagggagcctgacatgccaggtgctctgggttgagggattgttggagtcagatctccctgcaggaaagcccggggcagggggagcagcctcacccctcacaggaaccacagatacacccacaaggtgagctgcaggatggatgctgcccacctccaccctccacatcctctgtaaatgttgctcctttctacaactccaaccagatatgtagatgtggcgaactacgtaaaatacggatcattcatcacatcaaaacccactgcaggacaccctggtcaacaaagaacccaatcacatccccatcaactacatagtttccaaattttccatctccagaaaaataacaataacaatatacatgaaaatcgatgtaatttatctcatacataatttcatgttgataacgtgaaaatgatagtattttgctctactgaaataaataaaatatatatatatctgaaaatatt

SEQ ID NO: 249597 - DNA, 887 bp, Homo sapiens
ttttagtagagacagggtttcaccatgttggcgaggctggtttcaaactcctgacctcatgtgatctgcccgcctcggcctcccaaagtgctggattacaggcatgagccactgtacccggccaaatgtgtagtatttttaataggataaagcctacataattctgtccacagttcctttacttagaaattgctcatttgttcatgttaatcctatgtttattacaaataacagcatacaggtttccaccccccccccaccccatcatgtacagctgaatcacgtagaatttgaagatcaagatgatgaagccagagttcagtatgagggttttcgacctgggatgtatgtccgcgttgagattgaaaatgttccctgtgaatttgtgcagaactttgacccccattaccccattatcctgggtggcttgggcaacagtgagggaaatgttggacacgtgcagatgcgtctgaagaaacatcgctggtataagaaaatcctcaagtcccaagatccaatcatattttctgtagggtggaggaggtttcagaccatcctgctctattatatcgaagaccacaatggaagacaaaggcttctaaagtatacgccacagcacatccattgtggagcagccttttggggtaaaatatgattacaataacttgcctattgccgagattaaactttacaggctgtgttattttagctttgtgcttttcctttcataaaattccactcctaagatgtttctcttttctgggagcggggaggtggtttggagtatatatgtacatctatatccaaatctaagtgtccatatccagtatgttaaactagaatctaaaatttctggtttgctatatttctttttttccttttccttt

SEQ ID NO: 249598 - DNA, 531 bp, Homo sapiens
ttttagtagagacagggtttcaccatgttggcgaggctggtttcaaactcctgacctcatgtgatctgcccgcctcggcctcccaaagtgctggattacaggcatgagccactgtacccggccaaatgtgtagtatttttaataggataaagcctacataattctgtccacagttcctttacttagaaattgctcatttgttcatgttaatcctatgtttattacaaataacagcatacaggtttccaccccccccccaccccatcatgtacagctgaatcacgtagaatttgaagatcaagatgatgaagccagagttcagtatgagggttttcgacctgggatgtatgtccgcgttgagattgaaaatgttccctgtgaatttgtgcagaactttgacccccattaccccattatcctgggtggcttgggcaacagtgagggaaatgttggacacgtgcaggtgggtccctttgctgcgtatttggtgcctgaggctctgtggatttcccctccatcaatcatcttacc

SEQ ID NO: 249599 - DNA, 537 bp, Homo sapiens
ggccacattctctgggcattcagaagccaggatttcataggccatgaaatctgctgtcttttagaagtgggctccggtctgctttctctacacaagttcaaattttccaccatttccaggagcctgcagctaacacaagtgaatgagtgatttcctcgtcattgaccccataaactcagatacttgtaaaagagaagttaacttacagagcatataaaaatcagaaaaaaacgggaagagcctacggacagtccggtacagctgtgtatggatcacccattggaacaagcatttctttaggcttccaaggctgttggaggaccctaagagggaagaaaatggtttagctggagatggtttgggtgcagactttccagaaggcagtaccagtgaccagaaggtggacagacttcaattccagccccaagagcacaggcagggagaaatgctctctaagaaggagggtctgcccttgagattctttgtctgcaacagctttgcatcttccaccagtaaaaactttgttcccattttaga

SEQ ID NO: 249600 - DNA, 446 bp, Homo sapiens
  misc_feature (446)..(446): n is a, c, g, or t
tgaggatacagcagtgaataaaaattcttgtcttcttggatcttgcttactataccagatggtgataagtgctttaaaaaattaataaagactcagagggtgatgagagttcagtgggattgcaatttttaacaagactgtcagagaagttttcaccgaaatggtaacatttgagcaaacacctgaaagaagagtgagccatgaaaattcatgagggaaggtggtctcagacagagtttgatagtaatgctgtccttgctgtagtcactaaaggattcaggctgaggaatgttccgtcttgacacatgctttgattacagagctgagacaaaaaagagtactgaatcttctgacactcttaaaacttcttcctgaaaatggtatgactgattttccctattttgtgcttctcagaagttggtggtgtgggcctttgctctggctgn

SEQ ID NO: 249601 - DNA, 581 bp, Homo sapiens
gagcattcaggatgtttgttagggagcactttctgggccaatatctgtaaaaggaatacctccctctccctgggcagagggagaagttgagttgcaatgcaggtccaacagcctgagcagactacagggaaagcactggaggggaacagcccatcagaatcgtcctgcctccatccattgaaaacttaacagtctagaaaaataacagaatacttatgtccattatctgtaatctaaaatcatgaattcttagatttcaaagcaaccctagaaattaaacccaggatactttttatacaagtagaaattgaaactcagaattaatttcccaaggaaattaattgcccaaggtctctgagcagccagatagtatgactagatctcaaatctggaattctagattctcgatccaggtttctttgcacagtaccacgctatttttgattaatagttttgagtcttgcttgtattacatattacataaaatttacaataaggcactgggctcttttgctttgactacttgtatctgtcctttctggaataaaatgcagattttagacctagttacatctagaaat

SEQ ID NO: 249602 - DNA, 237 bp, Homo sapiens
tattgcattatcaagacacctgcatgctatgaatgttttaagcagcttttaccaagaaagtcacgttagattttatgagtagtctccttttcgtgtgctgtcatgagtatattgtttgtacaaatgttaacttttgactgtattatttcttttgaacacagaaagctgttcaggggaaattgcctatgtttactttcttgcatattcatatttggtagctctttaccatactgttac

SEQ ID NO: 249603 - DNA, 208 bp, Homo sapiens
agcaccatcccacattgctcttctaatggagcctttcaccccagatgttctttctcgtctgatgggaaggatccaagttctcattctgtcacccaggctggaatgcagtagcttcatcttggctcactgcagtcctgacctccagggctcaagggatcctcccgcttcatcccccaagcagctgggactacaggtgtgcaccaccatg

SEQ ID NO: 249604 - DNA, 410 bp, Homo sapiens
aattttttttctttcttagaagaaaaatatttaaaaaaaaatagatctggcctctggcttgctacccagccttggaggagtctgggaagtctagacaatgtcctaggagccagagccagctctgcagtcatttgtgaatgaattatgtatcatatgcagccttttgaattcatactttgagcaaataccactttaaagggtcataaattacatcagattattatcctctaaattcatttaacagcacagaaatgaatatttgtcaagtctcttttatttctcattatttttcttattattggatgccttttctccctccccacccataatctctgtatctgttttgtatcaatctaccacacattaacatgaatgtgtttttttattaaagctacatgactaatgaaata

SEQ ID NO: 249605 - DNA, 419 bp, Homo sapiens
tcaagatgagttttattatgactcattataactaattccaacagttgatagaaatcatttaaagaattgtaatactgtttggtaatatgttatgtggaaacatagttaggaaatctttccacttcctcagtctggatttcaggaaatgaaagcccccccaatctccccccaaataattcaagctctgctgtgtaagttataggaaataccctcccctgccagctcatttcctcttattgttcaccttgaatggggccctcagctaccttttcatgcctccctctccctacagatgtatcaagcctggtaaaagccaagggcttccacaggaaaagagctaggtcagagatacccaaggccaccatgaagtccccttctgtaagagaatgtgaaggggagtttgagaaaagccagaattt

SEQ ID NO: 249606 - DNA, 448 bp, Homo sapiens
ccttgttccatatttttgtatgcagtataacttacagatggtaaacaatatacagcttgatgtattctgacatgtaatgcagtatgtaaccaccacctggatcaagatatggagcatttctggcacttcagaaggttccttcatatctttttccaatcaatattgcctcaaaagggaaaccatatttggatttctatcaccataaataacctttgcctgccttgagcctcgtataaatggagcatatagcatgtatgcctttatgtctagttttttctgtgcaacatatttttaatattcactggtcttgttgcatgtgtcagacatttatttctttttattgctgtgtaatattctagtatttgcttatccatccatatgttgagggacatttgtttccagtttttggatatcataaataaagctgctgtgcacattgttatacatg

SEQ ID NO: 249607 - DNA, 150 bp, Homo sapiens
ctgtagaattcaagaagagttctacatatctgtgttgcatatttgctttgtcttttgacatagctgccacagcatcttcatgagttgcgaactcgacatctgcttcaccagttactctgccatcaggaccaatttcaatgtgtactctca

SEQ ID NO: 249608 - DNA, 421 bp, Homo sapiens
cgagaaactttgtaaatgttataaacaataaaatttcattttaatattagtgagaaacaactgcagaaaggaaatcggtaaacaatgtctcggcacactggtttccctaagagtttaactccgcctcatgtaaaagggggttgagctgaatgtagcatgtattaaatgaggatcaataaagtccacgtaatgagagtcagatgcctgaacactttccatgtttggaagttaatgctttccttttgagttaaatgtgtaatgacttcgaagaaacatgtacacaggttttggaaacctaattgttaattactatttttcatagtttgtgccacagaagacaaaagtaaatgaataaatgtcataattcaaatgtcatctaataagcagcattattcataattgccaaaaagtggaaacaacg

SEQ ID NO: 249609 - DNA, 505 bp, Homo sapiens
atggagtcttctttggtttccctcctggaggagatagagttaatctttggcgagccagtgatcttcaaggggcggccctacctggacaagatgaagagtgacaaagtggagatgctctattggctgcaacagcagcggcgggttcgccacctggtctcggccctgaaggatccccaccagtcaaccctgttcaggagctcagcagccagcctttagtagctcctgggaatacccctattactccttgaccaggcccagtgccctcaaatgcctccctcacccctaaatggccagcagctcatctagacctctttactgctttggaagaagaaatatttgtctatatctgggagtggagggttcaggaacattatgcttccaactatgaagggattgagactaaaactattgttttcttagtgaaattctcatgaaagaatccccaagcctagtagtcccattatgtcaagccttgcacaatacaagccaaatctcctatatcaaa

SEQ ID NO: 249610 - DNA, 450 bp, Homo sapiens
ggtgaaagctgaatctgagaggcttctgtttccagcaataaggccaataataccccaagctcctgactgaaaccaaacactctggagggacactctcacatgcaggccagaaggaatttgaatagaaggaaacaggctaaagaagagagctcatggcaaaaattacaaaccatacaaggaaggcattcaccacagtgagagtgcaatgtggatgaaatgctcaaatgccaccagccaacatggaccataaattaaatttggaatggaagccacacatgacatgggaacaagatggaaaactttaggttatcattgggatttcctggcttttccaatcaacctatggcctctaacaagctcacaaaacagcaggctgaagctatgttcatctaaaagcaaaacatttggtcaattaaaccaatttaataaaaaaactgaatttattggaaa

SEQ ID NO: 249611 - DNA, 416 bp, Homo sapiens
ggtgaaagctgaatctgagaggcttctgtttccagcaataaggccaataataccccaagctcctgactgaaaccaaacactctggagggacactctcacatgcaggccagaaggaatttgaatagaaggaaacaggctaaagaagagagctcatggcaaaaattacaaaccatacaaggaaggcattcaccacagtgagaccaacatggaccataaattaaatttggaatggaagccacacatgacatgggaacaagatggaaaactttaggttatcattgggatttcctggcttttccaatcaacctatggcctctaacaagctcacaaaacagcaggctgaagctatgttcatctaaaagcaaaacatttggtcaattaaaccaatttaataaaaaaactgaatttattggaaa

SEQ ID NO: 249612 - DNA, 501 bp, Homo sapiens
agttgcttcaacctcagtgccatgttcctgcagggtgccccaggctttcccaaggacatggacctggcatgtaaatactccatgaaagcctgtgacctgggtcatatctgggcctgtgccaatgccagtcgcatgtacaagctgggggatggtgttgataaggatgaggccaaggccgaggtgctaaaaaatcgagcccagcagctacacagagaacagcagaaaggtgtccaacccttaacatttgggtaatgtggtccaccctccctcccaggcaacaaactgcttgaggctggcagctcctgtttctgaagactgatgcagcccttgaaggtcaacctgctggagcaaaaaaacttgggacttgaatttgtagctccatttacatggatccattgccccagctactggagtatagcctacaatgtttatttcagtcaatattcctttatctgggtgttctgtacaatgtttattacagtcaatattccttcatctgga

SEQ ID NO: 249613 - DNA, 633 bp, Homo sapiens
agttgcttcaacctcagtgccatgttcctgcagggtgccccaggctttcccaaggacatggacctggcatgtaaatactccatgaaagcctgtgacctgggtcatatctgggcctgtgccaatgccagtcgcatgtacaagctgggggatggtgttgataaggatgaggccaaggccgaggtgctaaaaaatcgagcccagcagctacacagagaacagcagaaaggtgtccaacccttaacatttgggtaatgtggtccaccctccctcccaggcaacaaactgcttgaggctggcagctcctgtttctgaagaccaatgaggagatggctgcagatgtcaaggtgagacatggtggggcctgagctaaggcctgtcaagcaaggaagggagcacaggtgagaggccagacagctgaataagcaaaattgagccatgcgggggtgggaagaaggtggggttgagcatgaggttgaaaaatataaaccaaaacaggtttagcttgggcatctaggtggacagtggagctattcatattgatttggagcctgtggtgtggggatggggacaagaactctgaactgttgggtgattttttaagttttataaataaatagcatttttatttgtttt

SEQ ID NO: 249614 - DNA, 923 bp, Homo sapiens
cccatctggacctcctctcccactccttactcccagctcctgagccaccctaggttcctccccaagagaacaggtgctttcacactacatgtctttgcacatgctgtttccactgcttcaaatgccctttcttgtctcctaccagacaaattcctattcatctttaaatggcccacattcaaatctcatctcctgtgggaaactcttcttgagtccctctctcaaacactattagttgcttcttaatctgcaaggaatctcataattccacaaacacacataataatacttttaatattttattgcaggggtgtgagtgtgtgtgtctgtgtctaatctctctcactaaaccatgagcacctttaggacaggaactgtgtctcattcatctttttctccccagggtctagaacttcgcctgatacgtggtaggtcctctatacctgttggctcactgaaggcatgagccttagttcacccatctgtagtagggggattggaccatatgctgttaaagtaatgctatggaattctatgtttttacagagagctcgaacaagaggcccagccaggtgatgctttgtgtgtgcaatgcagaggggaagtgtgttgatggattgaaatttggctgcatcaccatttcaaaacagtgggcaaaagaggcacattggctcttttgaactttaagtagctgtcctaatatcttgtttcaccaccttaaagaatatttactatatatgtgaatgaatccataaacaatataaagtcaagtttaatagttgttttgttttttagcttatgtgactgttttagagatacatttgtgttaataacataagaagttagtttgtgtattcttgtataggtggacattacttggcatatgataatgagccttagtgccctgttggaccaaaaaaaaa

SEQ ID NO: 249615 - DNA, 703 bp, Homo sapiens
ctcctccctcggccggccctggggccgtgtccgccgggcaactccagccgaggcctgggcttctgcctgcaggtgtctgcggcgaggcccctagggtacagcccgatttggccccatggtgggtttcggggccaaccggcgggctggccgcctgccctctctcgtgctggtggtgctgctggtggtgatcgtcgtcctcgccttcaactactggagcatctcctcccgccacgtcctgcttcaggaggaggtggccgagctgcagggccaggtccagcgcaccgaagtggcccgcgggcggctggaaaagcgcaattcggacctcttgctgttggtggacacgcacaagaaacagatcgaccagaaggaggccgactacggcgcctcagcagccggctgcaggccagagagggcctcgggaagagatgcgaggatgacaaggttcacactacagaaacaacatatcgtatcagatcgcagacatacatcatctcacggagcaaactgctcgagcttccgccggcattcctcgccaccaagaccacctttcacgcctatcggacgaacacactacacttgtgagagtcgtacactctgcacgcttcggggacacacatccggatggccagccagtgaccactctctccactctcgcaccgctccacaccaccccagcccagcccctgcccgcctgcccccccca

SEQ ID NO: 249616 - DNA, 654 bp, Homo sapiens
ctcctccctcggccggccctggggccgtgtccgccgggcaactccagccgaggcctgggcttctgcctgcaggtgtctgcggcgaggcccctagggtacagcccgatttggccccatggtgggtttcggggccaaccggcgggctggccgcctgccctctctcgtgctggtggtgctgctggtggtgatcgtcgtcctcgccttcaactactggagcatctcctcccgccacgtcctgcttcaggaggaggtggccgagctgcagggccaggtccagcgcaccgaagtggcccgcgggcggctggaaaagcgcaattcggacctcttgctgttggtggacacgcacaagaaacagatcgaccagaaggaggccgactacggcgcctcagcagccggctgcaggccagagagggcctcgggaagagatgcgaggatgacaaggttaaactacagaacaacatatcgtatcagatggcagacatacatcatttaaaggagcaacttgctgagcttcgtcaggaatttcttcgacaagaagaccagcttcaggactataggaagaacaatacttaccttgtgaagaggttagaatatgaaagttttcagtgtggacagcagatgaaggaattgagagcacagcatgaagaaaatatt

SEQ ID NO: 249617 - DNA, 908 bp, Homo sapiens
ggagttttcttcatgactctttacagtacaagttttttgtttttgtttttttaatggtcagatggatagaacaacacaggttttgtttgttttgttttaacttttaaaaaaattataatagataaagggtctcactacgttgtccaggctgaggtgggaggattgcttgagcccaagagttcaagaccagcctaggtaacacagtaagaccccatctctacaaaaagtagaaaaattagcctgtcgccagggtggagtgcagtggcgcgatcagctcactgcaacctccgcttcctgggttcaagccattctcctgcctcagcctcccaagtagcgcggattacaggcatgtgccaccacctccggctatttttttttctatttagtagagatggggtttcaccatgttagtcttgaggtcaggaatttgagaccaggctgggcagcatggtgaaaccccgtctctacaaaaaatacaaaaattagccgggtgtggtgtcacgcacctgtattcccaagctactcaggaagctaaggcaggagaatcacttgaacccagaggtggaggtttgcagtgagttgagattgtgccattgcactccagcctgggcgacagagtgagactctggtgccaaaaaaaaagaaacacacaggacacaacacaaaactttttcgcggcacgctataagcccttcgaagaaaagtcttcaaacaccatccattagcgcagccgggcccccagagacggacgtgaaaacttggtgcacaaatcaagcccacagaagtagaccgcgagaaacaagcaacaggccgaggatcccccacaataaaagaccccggggacaccgcagtctctccgacactcccagggtgtccaagcgactacgcggggctctcaaccacgagag

SEQ ID NO: 249618 - DNA, 446 bp, Homo sapiens
catctctaaatttcctacatccatatggccaccatgaggccccaggctggccgatggttgctgttagcttattgggaaatcactgtttggaaggtgctggttgttttttgttgtttgttgtttttgtttttgtttttgttttgagacggagttagcctgtcgccagggtggagtgcagtggcgcgatcagctcactgcaacctccgcttcctgggttcaagccattctcctgcctcagcctcccaagtagcgcggattacaggcatgtgccaccacctccggctatttttttttctatttagtagagatggggtttcaccatgttagtcaggctggtcatgaactcttgacctcaggtgatccacccgcctcggcctcccaaagtgctgggattacaggcgtgcactgctgcacccagcctttttttgtttttttgagacagggtc

SEQ ID NO: 249619 - DNA, 590 bp, Homo sapiens
agggacccccttcacccatgcatcctctgcgacccctctacctctctcttcagacatttctgggttgcatggacctttaatcacaagttcatttggggatggaaacaatgcatattgtgcagtattaagacaggctgcatttactaacaagatatttatgttgtttgtagaggatttcctatccccaggacctggcccaggctgagagaagctgtgtggagtggaagatggacattgaggaagaagggcaggtgtggtctcacccagaatggttcctgctgcttccgcggtgcccaggcttttctcacggcctctgctgggttctcccctgggtgctgtggatgcatcctgcctgctggaaattctgtgctctctgtttccatccctttgtcgtggtaatgaccgtatacctctcccctgtaccctcctctgcctgctctccgtgcaggcccctctccctctggttgtcccatcagcatttccccacagctcgttgttcctccttcctcttttctggtgacctttctactgattgcattgtacctctttccctgatattaaagatgtttttaaaaacaacagacccatta

SEQ ID NO: 249620 - DNA, 1008 bp, Homo sapiens
tcagtgtattggctgggttctgaggagaaatttatcactcatgtcagtgtatgtgtatattgcagttcagagtgttgcttgcttaccttaataaaacaatgaggcataggtataaatgaaggaacatgcaggtcagctgtcagtgcatgagtggactgaatgctatgaaattgcatacttttctgttggatgtttcatgggagagactttgcttagaagttagctgagtaatcatgtgatcttggtatgagtgttaagcattcagcatggctttgagtctgaacaaaagagcaaacaagccctggtgagatgaagaagggagcaggagcctggagatgcctgaagatgttggtgagaatcacaacctggagtgcatgggggtggtctcctcaccaacccttggcacagtgggtttcatcttcaccttgaaggagagcaggccagacaagatctcagcacagcttcgcaactgcgtccaccctctcttctcttctaagagttcacttggaaggcttggcaaaactcagctctcaggtcacttctggcttccaacattctataaatgctctcagaaaacaaaagtccaagaggatttcctatccccaggacctggcccaggctgagagaagctgtgtggagtggaagatggacattgaggaagaagggcaggtgtggtctcacccagaatggttcctgctgcttccgcggtgcccaggcttttctcacggcctctgctgggttctcccctgggtgctgtggatgcatcctgcctgctggaaattctgtgctctctgtttccatccctttgtcgtggtaatgaccgtatacctctcccctgtaccctcctctgcctgctctccgtgcaggcccctctccctctggttgtcccatcagcatttccccacagctcgttgttcctccttcctcttttctggtgacctttctactgattgcattgtacctctttccctgatattaaagatgtttttaaaaacaacagacccatta

SEQ ID NO: 249621 - DNA, 1064 bp, Homo sapiens
tcagtgtattggctgggttctgaggagaaatttatcactcatgtcagtgtatgtgtatattgcagttcagagtgttgcttgcttaccttaataaaacaatgaggcataggtataaatgaaggaacatgcaggtcagctgtcagtgcatgagtggactgaatgctatgaaattgcatacttttctgttggatgtttcatgggagagactttgcttagaagttagctgagtaatcatgtgatcttggtatgagtgttaagcattcagcatggctttgagtctgaacaaaagagcaaacaagccctggtgagatgaagaagggagcaggagcctggagatgcctgaagatgttggtgagaatcacaacctggagtgcatgggggtggtctcctcaccaacccttggcacagtgggtttcatcttcaccttgaaggagagcaggccagacaagatctcagcacagcttcgcaactgcgtccaccctctcttctcttctaagagttcacttggaaggcttggcaaaactcagctctcaggtcacttctggcttccaacattctataaatgctctcagaaaacaaaagtccaagaggatttcctatccccaggacctggcccaggctgagagaagctgtgtggagtggaagatggacattgaggaagaagggcaggtgtggtctcacccagaatggttcctgctgcttccgcggtgcccaggcttttctcacggcctctgctgggttctcccctgggtgctgtggatgcatcctgcctgctggaaattctgtgctctctgtttccatccctttgtcgtggtaatgaccgtatacctctcccctgtaccctcctctgcctgctctccgtgcaggcccctctccctctggttgtcccatcagcatttccccacagctcgttgttcctccttcctcttttctggtgacctttctactgattgcattgtacctctttccctgatgggagcaagacgcgcgcatcttctcccatcagcattactaataagtggctcctttaacctctccacccttatcacaacacaagaacacct

SEQ ID NO: 249622 - DNA, 569 bp, Homo sapiens
ccaaatggaaccaaggtaaggttgtgatcagcttaagacaaaagacatggtggctgcaaagtcaaaatgtttaatattgtcatatgacagtgaccataccctaggggaaataatgattgctcattgttgtagctgttgtagagacaatgttgacagcaccattcagtgttctctttagacagatccagagggagaaaaatcccctctattcttagtaccgagaatagtataactaatttcatgagcaattggatttttttttttttctgatgaacgctgcgtctgtttaactgatatggtctccctttttgtgttatctgctggaagaaggcttagagtgaaatgtataccttctctttaagtttacatgccttctctcattggttctgtaggagattttaccctattcctggctctgttttgtccctgcctctgtttttttgttatttctcccacttaaaaatgctaaactggggccatttcctctcagaagacccctctctctcactagagagagaactattttcctttctctttctcttgcctattaaacctccactcctaaacgc

SEQ ID NO: 249623 - DNA, 560 bp, Homo sapiens
gtgatcctggtatcatattttctgtattgaatttatttctccatgtgccagtttcactacactttccaaagtgctactaaatgcttagtttataaggttttaaaaaactcactgcataattactttaaaataatttcctcaaccctgccttcattcaaaatgtctggagacagactggcccacttccaattttctttcacgttatcattactgtgaagtcattctatagataggagagcattctggcatacagaaaaacagcatctgtgaaactatatggcacagtttggttggggttgttgctccttcagaaccgcattatgtaattttagtgtttacttaagctcctttgggctgcctccgtggtagctatgagctcacagagaagtaagtacagtttagatctgatagcaaagtctatcagtttatcctgaatgctgcatcctttttttgttgttgttgttaaatcattactgtatgagaaactttaaaaacaaaggtatagtttcttcattttattttttaaaaaagctacttcaaacatcattaagtaatacacc

SEQ ID NO: 249624 - DNA, 986 bp, Homo sapiens
gtatgttcctggcagaaaagttgcataacttgggggttaaagacaggaatatggcacaatgcccattgtgggcagtgtccagacagaagaagagactcatatcacctaaatgacaaacccagaatatgtcacaatgtatcctgttgaaaggaccagaaacgaggatgaattgccacatcatctggttctgagttctgagatattcacaagtccccttagaaaacaactcaggcaagagagttacatcacctaggagcccgttccacccttatgtcacagtgcttcatgtgtacaggactaagaagaaagtcacatcacctagatgatagacccagagacacgtcacaaagccttcctgaaagcatggccctggcaaaatagtacaatcacctttgtacctggtctagcaatatgtcattattcaagtgtgcaggtaccaaggagaggagccatactacctatgttatatgccctgtgctatgtcaaaatgccttcttttcagcatggccctggaagaatgtatcatctcacatgtgactggcctaggaagatgtcactatcctgccatgtgtgcagggcccattttagagattagagttatgtcttcttctaagtcatggacccagtgatatatcactatgatgtctgtgagaatgggcaggcaggaatgtaatgtcacttgcattctagatccagtgatgtcacaattcttactgagggcagagcccagtcagaagagtcatatcttttacaggttggcccaagtagatgtcaaaaacccctatggattagatttacaataccacacatctcttgttttcatgtaggagagttgcctgcattcatctgtgatgatgaaagtccttactgtcagccaagtgtgcatatgagactcacaatttcctctgtttgctaaccactattatgacactctctattcaacccaacggttttataaaacatttgtcattgttataaactttggt

SEQ ID NO: 249625 - DNA, 703 bp, Homo sapiens
catttcccacaccttctcacagttacatcaacaaaaaccccaggaggacgctgctggcgcgaacacgcacacacgcgcgcgcacacacgtacacgcacacacgaactctctctctcacacacacacacacacctctttcacctttgccccagcccctcaggcacctcgggccactcggcttcagcctcgcccctctgcgccaacagctagggatgcttccctcaagctgcgtcgctcccggtccgctgagttcctcattttagtgtttttcctttagaagacgccaactatgagaaaccctcaccctccaaagaggccgagtgcgtgttgagtgactctacgcatttgccgccacgcctcgggttccccccacggcctggagcatggggccggggcgctggtgtcaaccttcggtggaagtttgggaggctggctggatccttcttccacccgagaagcttctgggaaccgctgaggcgaaaccaccatcgcccggccagaccgctgcggcagggaacgagatgcggcgcccctgggccccgtagcggctgcagcccccgggacccccgctgcccgcctcgccccaacttcttcgcccggcgcccggcgcgcccagcctcggccgcagctcccagccccgggcgcccggccgagcgctgggacccggctcccgccgccggcacgtcccccggcagccactcgc

SEQ ID NO: 249626 - DNA, 405 bp, Homo sapiens
taacaatcttcaggcgggaaaagtttccaagaagttgtcttaaccaactaaaacctcatcttcctggtcttcatctgttcagcagttgcctatccaaagcctctgatttatctgactgttctactgatcaagggagcttaagaggcccatatgaataccatgttttagcagtttttttctcattaagtcatctggggagattcagctggtcacctcccaccacgagaaactttctaccatagcgcctcactcatctgtttctaacaagtgatgctcttgcgaacagtctctgagttttctaggcttagagggattgcgctggaaactaaattgggaactctcccaataacgctctctggataccacgacttagcttcagagggaggttctaggaaaagcaaaaaa

SEQ ID NO: 249627 - DNA, 932 bp, Homo sapiens
ggtgggttttttttccctccatttagatgtaggtgcctattctgcttatgtgcccagatgggttttcaaagcagtgatatccagacttcttttcatctgaaaaacaccgaaggccagatgtctacatggccttgcaggaagaagctgagcttcttctggaaagctgtagaaacaaaaaaaggcggtggagactgcaacacctgtgccatcctcctgggtccctgatagcccttaatgttttgtcattgggggggttgggatggcttttattttttggtgttccccaaaagttaatcctcagtctgttctctttttaatttacaatctttccctgggattccatcttctactgtcaccagttagagaaagcgaaggagtgagggggaatctaactctgcctctcttgcttcggaaactgaatgtatttattcatccaataaatatttatggagcattccttctgttctaggttttgttctgtatgccgaggaggtagagataactaagacattgaagtccttgttgtcatggagcttgacgtgtagtgagtggggaagcatttcagtaaacaagtaaacaaatcaatagatgagatcaagatagtgctgtgagctcggaaggatataatggtgatgtaaaagagagagtaacagggacctgagaggttagagaaggcctctgagaatgacgtttgaactgtgagctcaaggatgagaagaagccgttaatgtgcagatttggggaaagttcctttctggaaaagggaacagctgtcaaagctcctgaggtaggaaagagcttgacatgcagaaaggacacctaggaagtcatcattgttagaatgtagggagcaagggggtgtcggggtggaggatggtggcacaacttgggataaggtatggaaatttgagagggagagagaggaacattga

SEQ ID NO: 249628 - DNA, 337 bp, Homo sapiens
gtttttcttagcaaaggaaaccagcatagtgagagtaaaattatagttttcaacaggaaagggaaaagctctaatgttgcctgctgctcagtcatcacttctggaggaaggcctttcttgatcacctgtgtggtataggactatcattctgtatcctattaccctgcttgattgactgcgcgaggcttagtatttaaagatgtattattattttgtttattcatttattgtttgcctttctaactagaatgtaagctccatgagggtaagatcttttctgtatggtttactgctgtttggcacatggcaaaggctcaataaatattgattgattgaa

SEQ ID NO: 249629 - DNA, 652 bp, Homo sapiens
cagactttgagggaagctcactcaggatctgctctccggcaaagtagtaagtgaggtgctgagagcagaatgagctactttgtggattctgctgggagcagccccgtcccttactcagcgcctcgtcctgcagtggtgaggcaaggacctagcaacacttatgaagatcctcgaatgaactgtggtttccagtccaattatcaccagcaaagaccttgctaccccttttgggatgagggcaactcaggaagttcctactggtcttgaacactgtgtctcagaattacaaggccagcttagcctgaagtcattgcttaaataacctgctaactggaatgtattgacatgaactgtcaacacggctgctcccttcaaccaattccaagctctttctcctcctaatgagaggcttcttgtgtgtcttgatttgtctgttatgcctcttaacattgctcacagtctcaattggatcagaaaacagctttttctagaccacagaatgtatgctattctctgaaatcctaagctcttaagatctctacagtctgtttacccaatgtattgaattcttgtacccaatatctcatgataatgttcatttatgatacatatttcttctcttcttactatttgaataaattatattgactat

SEQ ID NO: 249630 - DNA, 654 bp, Homo sapiens
cagactttgagggaagctcactcaggatctgctctccggcaaagtagtaagtgaggtgctgagagcagaatgagctactttgtggattctgctgggagcagccccgtcccttactcagcgcctcgtcctgcagtggtgtgaaatacggacagataagtttattttatttatttttttctttttcttttttttttttctgtcactcaggctggagtgcagtggcacaatcttggctcactccaacctctatcttctgggttcaagcaattctcctgccttagcctcccaagtagctgggattacagacctgcaccaccacgcctggctaatttttgtatttttagtagagaaggggtttcaccatgttggccaggctggtctcgaactcatgacctcaagtgatctttctttgagatggtctcgctctgttgcccaggctggagtgcagtggtttgatctctgctcactgcaacctgtgcctcccgtgttcaagcgattctcctgcctcagcctcccgagtggctgggattacaggtgcccaccaccacgcccaaatgatgaaacccagtctctgctaaaaatacaaaaaaaattagccaggtgtggtggcacatgccttgtaatcccagctactcaggaggctgtggcatgaga

SEQ ID NO: 249631 - DNA, 348 bp, Homo sapiens
gtagaatcaactggacttggtgaataattataggaggtaaaaactgtgatttccagggttcttatttgtagaacactaaaaacagaagagggaatacataagaataattttaaaaagggaagggtgattagttcattattggttatgctgagtttgtggtatttgctgtatatttaaatggagcaacataggcacatagtgctcaggaaaatgatctgtgcttgacatataaaattaggaacattactattttggtaaccattgaaaccacagaacacataactaaaggaaaaaggtttagaatataagtcccagagtccccaacacttaaaggtacaaaataaataa

SEQ ID NO: 249632 - DNA, 466 bp, Homo sapiens
tctggtggccttaagtgaggcagggaaggcttacccgaatccctgaggtgagcactccatctcgccctgatgtctgcctggtctgtgatggcgtcctggccttcccgcaagccttggtcgggggctgacctttcaccagatgaaatggaccccttcagtggttgaggaagagagagacttacccctgccttctgtagcctgtcattagggggcagtcagcagcctagggacatgcaaaggtttctagccctttaactcttgattctcaactccttccttccccggctctcccccaggtatcttatgagcaggggaggcttctagtgtgaagctagctcctccacagctttaagataaagtttcatcactggttggcactctccttccagttgtttgttaccatattctcatctgtaagagatatattttaaagccccagcaaggaaagaattgttgggccttgctc

SEQ ID NO: 249633 - DNA, 348 bp, Homo sapiens
gaggtcaggagctctagaccagcctggcccacatggtgaaatcccatctctactaaaagtacaaaaaattagctgggcatggtggcaggtgcctataatcccagctacttgggaggctgaggcaggagaatcacttgaacccgggaggcagaggttgcagtgagcggagatcacaccactgcactccagcctgggcaacaagagcaaaactccgtctcaaaaaaaacaaaaaaacaaaaaaattttgggttattttaggggacagaaggacaggaagggggttcattccttaaaaatctatttgtgtctccaacagaaatatggtgcaaggcatgtagatagccttac

SEQ ID NO: 249634 - DNA, 357 bp, Homo sapiens
cagagaacaagacagagatcttggagaacaagaatatgaccatcaatagaaggatgggaagataacggccaaacggtagacgaacacaacatgggattccattcttgtcctgagaaactccctaggcattggaatatagaagatgagctagcctatcctgactgaaacagcatctcttggaattcagggactttcttcatccctgactacatgcatcagacttaattagatgcacaaaatctggatgactttcacaacactaaagtaattttactttctaattcataatatttgctgattcatattattacttttgttataatagaaataaattgaatactgcatcctgtaaaataa

SEQ ID NO: 249635 - DNA, 473 bp, Homo sapiens
cggggggaggggggttgaggtcggcatattttagcaatcagaccaaagcagctcggcagatgtttcaaatttgtcgacattttcaggctcatgtggaaagccagccagagtggtcaagaggtcctttctccttccttcaacctgagaacttggcagtgatcaaaaggaggtgattagtagctacagagaaaaaacaccagcaggcaaggagttaacagagactgagccgttcacctccaggattgggatttggcggggagggggggcggtcacaaaggcaagaggaatcctggctaaacaggcgcaagtcgtggaagccaactctgaagaacaaagtggagggtccgttaaaagttaattcagtaaataaacttcattggtgataaaacaaataagaaagatggaaactccaacttaaaatagccaaaagataagaaaaataaatcgcttttatgtggcctgaacatgtgcat

SEQ ID NO: 249636 - DNA, 322 bp, Homo sapiens
gaattaagtggcaattcaatttcagggctgggtgtacttcagaggctgcttcacactattaggattcataacctgagcgcctcctgctcagcatctccagccagagtgcaggaatgtcccttagccgagggggaggcctgcatgagacaggctggacatggacttggttattgttgcagctgggtaatgagcacatgaggacttatcctattctgtttacttttgtgtgtgttagaaattttccatggcgaaaagataaaatatacaaatatcccaggtcagttccatttttactttgggctgagcactaagggaggattta

SEQ ID NO: 249637 - DNA, 89 bp, Homo sapiens
aaaccaggctaagaagccctaggagcccttgtggctctgcagtcatgctctggtttttaagtaaatgtcttttggaaacttaggagcca

SEQ ID NO: 249638 - DNA, 460 bp, Homo sapiens
cagcctagtcaccaacagaaggaggaatgctgtctaggctatagtgactctcttggaggtaatagctgcaagaactctcccaacagggacttctgtgcaaaaggctgagtaaattgcccttatgagagccttgcatctgtccaaaggccctggagaaatgcagagatgcaggtttaaccaggtccatcagggtgtccagtttcaatcactaactgctggaactgatcctcagacaagccaggactcaagtacaagcccacctacaaccagatgagcccttagggccactggggccatttctgactttgtgctcttcacatacttccttacattagaataatgtaattgttcagtatgttgtgctttaattttttaagaaaatgtcaaaggctagccatgacacggttatgtgtatttcttttaacttttccataaatattaaataatgtaattgttcaga

SEQ ID NO: 249639 - DNA, 468 bp, Homo sapiens
atatatatatatatatatatatatatatattttatgaatctgtgttgtatgatttacattgtctttttttggggagcaggggcaagagctagttagaaaactgagctcgccctgtctctaatgtctggtgagctgctctcctctctctacaatatatcacgggtagtttcatgtcaacaaacattcttaaaaacatgattgaggccaggtgcggtggctcacatctataatcctagcactttgggaggccgaggtatgaggatcacttgaggccaggagttcaagacccccattgctacaaaaaaataagaaattagccaggcatggtggtgtgtgcctgtagtcccagctacttaggaggtcaaggctggaggattgcttgagccagcaagttcaaggctgcagtgagctatgatcacaccactgcactccagcctgggtgacagagcaagaacctatcttgaaaaa

SEQ ID NO: 249640 - DNA, 362 bp, Homo sapiens
agcaagaggaaaaagtcatatgagtgattattgcaccttgatgacaagcccagacttctgttgtttgatcagaaattaggctgtccgtttgcagcaacatggatgcagctggaagccataatcctaagcaaattaatgcaggaatagaaaaccaacttctgcatcttttcacttataagtgggagctaaacattgagcacccatggacataaacatgagaaaaatagacactggagactactagaagggggagggtgaaaaaactacctattggatactatgctcgctacctgggtgatgggatcctgtattagtccattttcatactgctgtgaagaaatacccgagactgggtactttat

SEQ ID NO: 249641 - DNA, 568 bp, Homo sapiens
tgcggtgaactgtaaaatacgatcgtgacaagctccaaaacgaacatgggttgaactgtaaaatatgatatatgtgtatacttatacactttttttttttttttgagatgggagtctcgccctgtcgcccaggatggaggtgtgatctcagctcactgcaacctccgcctcctgggttcaagtgattctcctgcctcagcctcctgagtagctgagattacaggtgcctgccaccacacccggctaatttttgtattttcggtagagacgggttttcaccaggttggccaggctggtctcgaacacccaacctgaggtgatccgcccgcctctgcctcccaaagtgttgtgattacaggcgtgagccactgcacctggccccaagtaagtttgatgattcaaattctgtctttaaagcaggagaaaaggtgtatttgaggggtctttaccccatctcagaccgaattcttaactcctgtctccttgttgtacttgagcttttcttgttcctagtcacaagggaacggtcgcgacagacagccctctcctacttccgtgataaccgtag

SEQ ID NO: 249642 - DNA, 477 bp, Homo sapiens
catggctgatgagtgtgggtcgcaataactgatgcgtggccaaaggtgtttcccacaacagttggctttgattcaccgtgtatcttctgcactggctaccgtgtagttatgccttgcccttcatgggtcctgggattacttgactgctgccgaggctaacagcctcttttttattctgattgtgacccattatattagtctgttggccactgactcactagtacttggaagcaacccacagctatgttgtcacatccacgtattcccctcaacacgcagcaaattggggtgagaccaaggaaaggcccatgcacaaaggaacctgacagctgtcagcagtagcacctgaggccaattgtaaggcggtaatagcacacactcagaaaaccatacgccagcagtgtgtgtgcatcacaatgccgggagtgcacatattgtgggctcctcatcaacagggaactcatcctgcattgcttt

SEQ ID NO: 249643 - DNA, 136 bp, Homo sapiens
atgggagacagacaacatcacattctaatgcaaagtttgtaccagttaaatagtaagctaacatttgatcctctaatactcatgcggagggagaccaatacacaccaaacacttggtgcacctacatttttggaga

SEQ ID NO: 249644 - DNA, 412 bp, Homo sapiens
ctgcatgcatgcccagaaaagagctaagaaggcctgaatcactcacttctgactgaccttaaggatctgcacaaccaggaattgaaagctaagacagagctataaactgccaaaatagtaaaggcatgcccaacacttatagagccactcaacaaaggatggaaaacttactggttcagggcacttaaggaaatctctaatcatcagctgactgctaagctaactaagcagagacttcagtggccacacacaacaaagaatacaaattttacaaaatttttccagagaagtcattaaacaaagaataacaaacagcaacagaaaacccaggttggacgggtggtacaagaatataactttcaaagttactacattataattatttaaagtgtttaattttcagcaaaaaaaa

SEQ ID NO: 249645 - DNA, 683 bp, Homo sapiens
aatatcttcacacaggacatatcttccttggatggttcacccttgttaattgtggcaacttatttttgaaataacactctaccctcaaaaagaaagcagaatacccccatcataccccagaatgatctaagtgtacactacatgaatttctctgagtctgtttttaaaaattcactttaaaaaaagactggattagcccctgaatatggtgctttctaaagacagtacgggaacaaaaaatagcaagaccccagatagtaaaacaaacagctcaagattaaaattcctagagcaaacagttaagccaggatgccattatacacactgagcctggatgatgtctcctccaccgtggggccaagaggctgtcatttttcccccagcaagatcagatttccttccctcccgaccgcctctctgagcatcatggccaacatctctagtgtgctattaatatcaatgaagagacgattcgatttccacagaagaaaacctttcctattccggcacagaccttcggggaggaccctggcccgggtatagacaatacagcggcagagtttctgttttcttacagttcagtcttagacactgtttgaaggcttttagcaaacaatggcagcattatctgcaggatagttacaaaacaggatttgttaggacaaagaataataaagctgctc

SEQ ID NO: 249646 - DNA, 666 bp, Homo sapiens
atgttttagctccattagtctaataggtcagatattaaaaaattgttcatatcaaaattaccttatatggattattgccatgttttttgagagttaattatttactgttttctaattcttgccagtatttatgaacagctgtagcttgatatttacctactgaattttaggagaactaatggtcacagtttgggttcttttatgtgtatgtttttaaaacagctattttgtgaatctaggtggttggtttttagaagatttcaggagatgcagtccagcacaattagagctggaacattgttacagcaggctttttgttgctcatgggcagatagagggaaagaatcagttgttagccccaaatttccacatttcagtgttgtaaactctgaatgtgataggtagatgtgggctaagaataatttcctccagtgaagacacgggagaagagcttctattatgaggttatagataaggccttagttatatcatggaaatggactccatgtagttctagaactgcatttcccaaagtatatcctgtgagatgctccacagaaaaaatgattgcatggactaagtttgaaaaatgttgcatgctactcttcccctcgaagatgacagtggatgtcagcattaaagactttgacaggtctttctgtgaaa

SEQ ID NO: 249647 - DNA, 588 bp, Homo sapiens
gttgcctcaaaattaacagtaattagcctgaggtattgtaaatgtggcactacagtctgaaatttaatggcatcttttgtcaaaaatagtcttatctctactttaatctcatgactacaatactatgtgctatccctgtagtatttactactatgcagtcatacagaaaaaaattgttggaccttgtgaaatagtgcatccatctacttctataaaaataggagccacattggccaggcgcagtggctcacgcctgtaatcccagcactttgggaggctgaggcaggcagattacgaggtcgagagatcaagaccatcctggccaatatggtgaaaccccatctctactaaaaatacaaaaattagctgggcgtggtggcacgtgcctgtaatcccagctacttaggaggctgaggcaggagaatcgcttgaacccaggtggtggaggttgcagtgagctgagatcgcaccactgcactccagcctgggcaacagagagagactctatctccaaaaaaaaaatatttaatatatatataaaaaataataatatatataataatatatatagaagccacacaaagatca

SEQ ID NO: 249648 - DNA, 1817 bp, Homo sapiens
  misc_feature (726)..(726): n is a, c, g, or t
gtctctgattctctgacaccacctaggtgtcccctaatttggttcagttctgacactagcttttcagggttcgtgccggcctcacaagttttgagggctaagtcccacaagaccatccccatttccgtcaccagttgcatgtcctaagccacctgtacttctgatcaactggctgtaaattggggttcccatgacctcacttcaggttccataatttgccaggacaactcacagaactcagaaaggcactttgcttattgttagtggttcctataaagctaggttgtccaacccgcggtccaggatggctttgaatacggcccaacacaaatacttaaactttcttaaaacatgatgagttttttttgaaattttctttttctcatcagctgcagttaatgttagtgtattttatgtatggcccaagatgattcttacagtgtgtgtggcccagggaagccaaaagattggacacccctgttttaaaggatgcaacttaggaacagcccaaaggaagtgacacacgggacgaggggtgggagtccccatgccccctgggggagacacctcctagtgcaccatcccaatgagttcatgacgtggaggctccccacatcccatttttcaagagtttttgcagcccagtctcctggccccccacccctcccagaggttggggtgtagggggtgcagaaagttcccactctctaatcacacgttttgtcnttctggcaatgaccagctcccctccaggctatctaggggcaccccccaaccccactggtcacctcattagcataagctcaggtgtggtgcactggggctctctatgaatcactaagggcactcttgttgctcagtaaataccaagggctttaggagctctatgccagaaaccagggaccaagaccagagatcttttttattatccacctgggcagccctgtcagcctgctgccccgccccacccctcccctccccatccccagctggctgcgccctatttaaagccctcctctcagtaaaacagctgatgcgtgcctattttacattcttttctaccctgggtctgacgaatcatgactctcactgtgctggtaactcccccgttcttgcttctcaggaagcaaatgtaggaaaaatatagtaacatttctaaggaagcttagagatacaaaatgtttaaatgtagcacaaaaattgtgactctacttataataacgtacagaagaataactccacagtagaagttaggcatccatggctgcaggttttctaagaaatgggacgtgtgggtgacctactgcactgcccactgccctctggagggaaccatggggtaattagagtcattggccaagaagggccaggggtccacgcagcttccgccctgaggagttgcactgtgcagtacagccaggcggccacaggagccactgtggcagggaatgcatgtgtcagtgtgtcaggcgtggtcagtaaaaggagttgtagaaggtaaaccggagaaaaactcagattttaatccctcggagtaatctttggcctctcctccttccgtgtgtgatgtttctttgtttttaattttttgaccttctgctttttgattcgggattttggagccagaatgccttggccccgccatgaggtctgacttgtgctggctactttacccttggtgcctccatttccttcactggaaaatgggtgattgtgcagagtacagtgagtcaaaccattgagagtggtgcctggcacacagcattatttaagtatttttgcacttaatttcatgtaacataaagcactaataagta

SEQ ID NO: 249649 - DNA, 438 bp, Homo sapiens
ctcaacaaactagatatcaaaagaatatacctcagtaagagccacctatgacaaatccacccaccaccaacatcttactgaataggcaaaaactgggagcattccccttgagaagagaactggaataagacaaggatgcccactcgcattacacctattcaacatagtactggaatactttgccagagcaatcaggcaagaaaaagaaataaaaggcatctaaataggaaaagaaaaagtcaaattatctctcttcactgatgatacaattctacacctagaaaactctaaagactaaaccaaaaggctcctggaactaataaaagacttcagtaaagtttcaggatacaaaatcaatgtacaaaaatcagtaggattcaataacattcaagttgagagccaaatcaagaatgcaattccatttacaatggccacaaa

SEQ ID NO: 249650 - DNA, 1531 bp, Homo sapiens
gggaacccccggccggcctgcgcgcccctcctccgggggtctccccgccttcttcccgccaccatccaatcaaatcgggcgaggggcgcgaagcccgggagacgcgtaggccgcggccccaggcccggtgtttgacgtcggcggctgcccgcgttccgcgccgagtaacggtcttcggaattcagagccttcgccttagggaaggtgggacggtcgccagtttctccagcactttcttcgtccagggacgtcaacctcccttgcatgctgtcctcagggactgacagcggggcctgctcagaagttctcgtcgggactctctacaggcctttgtgattaagtgctaggggtgaggagagacgtggcttatttatgtgtttttcagtttgttatgattttttttttttaattttacttctccctgccctagaattgagctccttgagagtaaaaacccgcctgggtcgccatcaccctaggcttggtgcagggcctgccaggcgctcgaatttgttgaagaggtgggtgttcagtatcgaaagagccgcggattgtacattagaaagcctggctttgcgccgcgtccttgccacttgctgaccaggcccctccacgtggtccccgccggggcagcagctctcctcacccgtccaaaggcacggggaggcgcgtggcggccccgccagagctgagccccctgggatgtgaggccgtctcgctctgagcttcagagcagggttgcaggagacacctcagaaggtcgttttgaggacgggaggagatgaactgctcaaagcctgcttaactagataaatggtatcgattaacttttctttgactccctttccacacctataaaatgaagatgacgggaaacttgtcatactttttttgtggtgggtgggaaaggtctttatgaactgtgaagtcctatgcaaacgtgagatgtttcctttcgcaatctgattagcgaagcaaaaacacgcgagtcaaaaacatacacagaaagcaaaaaaaaaaaattcacaaaatggtttatcaactgcagaatattcaggatggtggaactgaatggtaactactgacaacatagctcagaaaggacgtgctaaaacatgctggatgaagctaactttgatccaggtcttaaatggaatggactatagtttatagcttcaacctaatcattaacttatgaaatcagagaattaaggccacttaagccactgtgctcagactgtcaagatatttagtttctcaaagcagaaagaggaaattaaatactcttgtcaattcaacatatgggttggatgattagcaggatccgtggattgttgtttatccagtatgtgaagaaacggatatcctctgttttctcgttattacacaaacttctatccttaatatgtgacctttcaaggttgaactctaggtaaaattatgaagtgcacaattacgtcttgtttcttcttccctttgcacgtcgttttacaagagaatctaattattattaaagtacaaatgactgaca

SEQ ID NO: 249651 - DNA, 431 bp, Homo sapiens
atacttttgttccatgttttggcttttacgacggtccccaaattaagcaaaggcatttttcttagctgagctaacaatgattctctagatacttgcttatctaacttgtaaatcccctgccactcatttgttatttgtcagcaatcccctatcagatgaaatttcatcccactcgtgctgttgagcacattgatgtgcccagttgggaatcaagcccagtcgcggaactgtaggtgcttttttggttggcccatttatctctttcctcgttgtccaccagccacttaattcactgtccttgttccagcacaccatatggaatgaccttgcccatccccatttgccacaccaccatgaaataaactggaggaaaaagcagtaatcttctcatctttcgagaggaagctttctatctgggaacatttgaggct

SEQ ID NO: 249652 - DNA, 682 bp, Homo sapiens
aagcatccttcctgatcacctgactgtagaaacatccttatcgcaccctcccgggcaaaggcccaacagcctgactgcaggaacatccttgccatatcctgccgggcagcaagctctaccgcccacacccctccttcccagtcccatgatcaccccagcctgtgagaggcagttggtgctggcagtaagctggtttcctcctctgcagggttttgctagtaataaaggtgttgctgttgaagccgtcaactgtctttctctgtctttctttaacccttgccttgccttcaaaatctaacaatagctctacctctccattttaccaaggaggatatgagactcaaggagagcaagagacttacccagaattacagagccagtgagtcacagaacttgaacttgagctcagttcagctgaatccagaactcatgtcttcctgagagtccagggaaggaaaggtggaactgcagccagtgggtgcccacaggcttgtcctaggagaccacatgcagcctcctgggaattgtgtcctcttgggcacaaaagaagaactgttcacctgtgctgcatcagctaagtgtccccattgtcccaaattgttgtattttttcaaagtttcattttagtaactagatttctcacagctcagtgttgaaaacaaagcacagaggcatatagaaa

SEQ ID NO: 249653 - DNA, 550 bp, Homo sapiens
ggtggggcgatctcacattttaagcaagacgcccgctgccttaccaaaatagccctctccgccaaaggaggggcagcctttcacgctcagcttctttcatgtcagcccgagcctttgcagcaagacgtgcctttcctacatgttacattttaatgatctgagaaaaccgttatcagcgttaacatctctaattttactctaaacagacaaaagcaaaatatctcattaggcatcatctccgccaaggttcccactaggcaggaaaggatttttatctaaagtaattaccctttttagttaaatacactcaacagatgaaatttacagagagtgagagactgcagcactagacagcgaaggtgaaaaccaggaacgccgcgtctcgccgcccgcgggcccgccgggagactgcgggtccgtctcgcgggtggggcgccccggtccctctcgtttcctggaggccacaggtcacggcgacggcggtgaccgggagagcaggctgcgaggcgcgcctcatcgggccacagacaaaccaccccggcagcggccg

SEQ ID NO: 249654 - DNA, 439 bp, Homo sapiens
tgtggctctgaccctcttctgcttatccattcctggtagtatctgcgaggttgcctcgtttgttccacttgtttcctggaagcttgttgtgtaattttatttcccaggatctttgggattctattctcactagaccagtcactgtccactggccctgtacttatcttgcgggagcccccatgttcatcctttccagtggagctaggaagaattctagttacttctaaatcttctaattctgatgctgttgggccatttattaagctgggaattttgtctttgggctcatggacattattccaaaggttgtcttgtctttgggctcatgaacattattccaaaggttgcagtgagccgagatcacaccattgcactccagcctggggtacaagagcgagacttcatctcaaaaaaaataaataaataaataaataaaaaa

SEQ ID NO: 249655 - DNA, 339 bp, Homo sapiens
atgcatgacaattaagccagagctttaagggatgggaagtggccagtggctttcttctgtgctgattaatggaaatcaaatagacctagtgggctgagagcctgactgtaaagttagatgcttattttcaagtactgttcattgtctctttgaagccgtttgagtttagggcgagtttagggcaagaaatgatttcaagcccctgaggatagttgtctcccttacctagccggtccatactggctcatctgtagggccaaaacagggtacaaaaatatctatggaatttgccagtttaagtcccaaagtatcagcacactaagatctgaaacaacgtca

SEQ ID NO: 249656 - DNA, 954 bp, Homo sapiens
agtatacagattataagtattcagcttgatgaattgtcacaaagtgaacacatccatgtagtcaccatctgccacaataaatagatattatcagcagctccctctgatggttcacagggaatacatatgttcaactgtggtagatactgcctgtattagcttcctaggactcttgaaacaaagcaccagaaacactgtgggttacaacagaaacttattctccccggttctggaggttagaagtctgaaatcaaggtgttggcagggctaaaattcctccgaaggctctaggggagaatctcttctttttctcttccagcttctggtgactgttggcattccttgtggctgcacaactcctatctctgactctgtcttcacatggccttctcctctgtatccaccttctcctcttctgtgtcttctaaggacttgtcctacaagtgtgggtgagatttaaggcccacccacataatctaagatgatttcatctcaagatccttacagcaaagaccctcttgataaataagattgcattcacaagttctggggttagggcatagacatacctttctcagagtcactattcagcccaatgacactgccaaacagtttaaacattggaagagttggcactcccaccaacagtgtgtatgtgttctatttgatccataccttagacagcgtagatcagcttttaaatttcagacattcaggtgggtgtatagtagcatatcattgtggtgtgaatttgtttttccctaattaaaatcagattgagtactttgccatgggaaatatttttgaagtgcttatttaattctatgtcagttttctgttgatctgccctttttattattaatatagaggaattctttataaatcagtgatgcacgtccgttgttaagttcactgttttcaaataacttctgctgctccatgactttttcacta

SEQ ID NO: 249657 - DNA, 1069 bp, Homo sapiens
gctcatcctagtaaatagaaaagccaggattcaactccaggggctgggtgcagaactgctattcttcactgcttcaccaatcagcagctacccaaggcagaaaactttttcatccttggctccttcattctccctgtcaccccagatcccctctacatctagtcagagaataggtcctgtcaattccaacttctctatatggctcctctcaggcatgtgcccttaattggcctaattctctaatacaccttccctctacatgctcactccctcagatcattgctttatcacgtgttacctgggttgctattacataaagagcaatctttctaaaatgaggatcttatcacttcacttccacactaaaatgtttttcctggggaaccacactccttagcaatctgacccatcagaccttccaggctgtctcctgcctgctccctaaggctccagccacacagaattatcatgggcccacacacccaccaaatcctcccatgcctttgcccatgttgtctgggatgcccttctctcccttctgtctacatcaagcatcagactgaatatccctcttgtgcggccttctaaaacctcccgtccaaagcgaaatatattgccctctatttatacttttacagcatttggcacacaagtacagagtagtagctttttatcacattctctgataattatatagatatggtatttcttagctctctctccaactggctaataagttgctttttgtctgagtgcctaattttgtgttttgtgtctgagtgcctcagttcctcaaaaaaaggttttttgattagttcattattcatttgaacatggaaattatgctcactagtggcaaatgccactaaccgtattccagaagctaggtgtcatgtttgcaataagatatattatcccttctacaagtcaccttttatttcaggcatttgtaaatgcccattaataaagtatggttcataaattttaccttgtaagtgcctaagaaatgagactacaagctccatttcagcaggacacaataaatattattttataatgcaaaaaaaaa

SEQ ID NO: 249658 - DNA, 335 bp, Homo sapiens
agagaaaaagagttacaattcagcttgtggtgtgtgatctgacatcaatgccaagcaatgctatttggttcctcctaaagattaggctgtggccaggcaaagaggctcatgcctgtaatctcaacactttgggaggccaaggtgcaaggatatttgaggccagaagttcaagaccagaatgtgcattttaatgtcattttgtatagaatgctactaacaatctatcattttgtatagattgtaccaatgatgtacatttttatactctgtctctaagataatggttcctttttaaaaaataaataaataaataatggttcttatcaagttattac

SEQ ID NO: 249659 - DNA, 345 bp, Homo sapiens
gtctacaaatatatgcaagccatttatgtagatatttataaaactaaaaaaattatgtgaatggagagatacagtatgttgatggataggatggcaatataataatgatcttagttgtcctgatattgctctgtagattaaatgtagttctagtcagaatcccaaaaggtggatcttggttttgcttttggtagaatataaaaggcaccaacgtggctgaatctcagaaatacaatgttgagcaaaataaatcacgaaaattgtgaaagaatgtgtacattgtgatttcatttttgtaacattctaaaatggtaaaactaagcaattggtaaaaaatatgaagaa

SEQ ID NO: 249660 - DNA, 369 bp, Homo sapiens
attatactttggctaccatttatggtttttcagcatttgggttgttatatttgaaaaatacttttagttgtttaatccttataaaaaccttttctaaataagaggctgggccgggcgcagtggctcatgccaggcgggtagatcacctgagatcaggagttcgagaccagcctggtcaacatgatgaaaccccatctctactaaaaatacaaaaaattagctgggtgtggtggcgggtgcctgtgattccagctactggggaggctgaggcaggagaagcgcttgaacctgggagttggaggttgcagtgagccaggatcgtgccactgcactccagtctgggcaacaattgcaaaactcttgtctcaa

SEQ ID NO: 249661 - DNA, 405 bp, Homo sapiens
gattctccagaatcatctggagaaatgttaagagctctacactggatggagagaaaaagtgcttggagagtgggagataagttgggggaaatgctgagatctttgtgtagtcatgatgaagcccacagacatgaaggtgtcagggagttctaatgaaggctgttggagccaaggatattaagaaatagtgagctctgattcttttgcttatccacatgattcagggactcctggataacgacagagttgttggtgaatgaggggacttaggtctttagatagccatgtttatgttttatctcttaagtgcttgaaaagtttaaaatgtaggtttaatagccaataaatatttcatacacagttagaattacactttaaccctgaagttcatttactttaagaaac

SEQ ID NO: 249662 - DNA, 503 bp, Homo sapiens
tcaaaaaaaaaagaaaaaaaaaaaaaagccttactggccgggcgcagtgactcaagcctgtaatccaagcagtttgggaggccgaggcaagcctcaggccagacctgaggtcaggagtttgagaccagcctggccaacatggtgaaaccccatctctactaaaaatacaaaattagctgggcatcgtggcctgtgcctgtaatcccagctacctgggaggctgaggcaaggcaggaggtggaagttgcagtcagcgagatcatgaacactgcactccatcctgggcaaaaagagcgaaattccatctcaataaataaataaataaataaataagtcttttccttttagacatccacactgaaatatttacaggtaaaatgacatgatatctggactttttagtaatgtggagatgagtgagtggcagtaatcttttttcatgactataaggtgatgttaatttttgaagcattctcctcaaaagcaagattaaaaaaaaaatt

SEQ ID NO: 249663 - DNA, 610 bp, Homo sapiens
tcttgctgctcagcagaccatgacctgtagttcacctataaaacagggaaattgaatgaccatctaccccattagtcagcattttcttgagatacatttctttgaaaagcaattcattctctctctagtaattgtaattaatccccccaaaatgcaagtttacttttataaccttttggtgaacctgctatttcggatgacattgggcattttagttctatattttttgtgcctcttttatttttgaataaagaaaatcagaagagttgtaaaaaaaaagcagaggaggggagatgggcacccccagtctttccatcctcctcattcgtctaggggcacccgaatcccctattccttatttcccctatcactcaggcactggcagggtcctttgcccactcctgttggccgctgcggctccaaagcgagctgggcagatgtgcctgagacaggtttgaccaggcaactgaaaagacatccctaagagaagacaaagcaaaggtatgaaaggaacacacgtccctgactgactaggaggaacagagctgcctgctatctggaacaacttcctcccagactaagtgagaaataaacttctgttttctatatg

SEQ ID NO: 249664 - DNA, 721 bp, Homo sapiens
gaactcctgaaccttaggtgatccgcccaccttggcctcccaaaatgctgggattacaggcgtgagccactgcacctggccttggaacaatttttgaggcccatgaatgcttctggtgaattgcagagcctgagagcagtcttacagaccactgatacacttaaaaaactatgtatacacttactttttaatttagcaatcccactttgggaatttatcccgaagacacacttccaacagtaagaaaatacatgtgtacaaggttattcacactgcagcattgattgtatcacaaaatattgggaaaaaacctaaatatccatatacataggaggctggttgaataaacagtgttatagccactcagtgcaatactagaactggtgcagtgcctcacacctgtaatcccagcactttgggaagctgaggcaggaggattgcttgagcccaggaattcaacaacagcctggccaacaaaataagacccatctctacaaaatataaaataattaaccaggtgtagtgatgcatgctgttagtcccagctacttgggaggctaaagcaagagagtcacttgagcccaggagattgaagctgccatgagctatgaatgctccactgccctccagcctaggcgatagggtgagactatctcaaaaataaaaagtgacattatgcagctgtaaaaaagaatgaggaaaatgtctattcattgatatg

SEQ ID NO: 249665 - DNA, 273 bp, Homo sapiens
gcgggctacaaatattgtctcccaatttgtggcttgtcttcactttgggatgccatttgtcataaagaagttgccaatttatttttaaattttatttgtatacctttaagggatacaactgttttgttaggtgcatacaatgcatagtggtaaattctgggcttttagtataaccatcatccaaataatgtacattgtactcattaagtaatttctcatccttttccccacaaccgaccttaccacccttctgagtcttctatgtctattaat

SEQ ID NO: 249666 - DNA, 400 bp, Homo sapiens
ctagctggtgtggtggtgtctggtcctatgaccagcacttgaggtgccagtggatgcttcagttgctgcagggctggccggccctccctgcgtcactcagctgccacctgtgggcattcaccctgtgccaggtggagctgcgctgtcacgatctgaggaagttcatgttcccccatttcacagagggagagtccgagactgaggactgccgaaataacaaaggtggtagaagcagatgcaaaccaggccgtccaactccagcgtgctttccatcaggttactaatccaaagcacacactaagaggaaaaaacggtagatccccccaaccccacccttagactgcagctgtactcagggctgagagacccacattaaaggttaaatgctgtcactccaaac

SEQ ID NO: 249667 - DNA, 405 bp, Homo sapiens
gatgaagccagctttttctgcatgtgcagaggttatttctgcttttagaatctgagcactagattataaaataattcagatcttgtttgttttctaaataatctagtgtgaaaatcctgagaatttgtgtcttcctgtgaggcttaggtggaagtctgacttagtatctggaacatgaggtatttaagggctaatataaatgtaaaatattgaattgatgatctttacttagtataaccaaccatgtgtgaaacaccaaactggaaaaattttacctttctcctccaaaataaaacttttttttagagtaacaaatcaaagattttaaaggctgatagatgataaaatacctgaattcacgggtgactgtctcaaaccagtctggaaaatattacttgttataat

SEQ ID NO: 249668 - DNA, 382 bp, Homo sapiens
caccaccaccacaatcaaaatatacaaccattccatcatcccctaaaattccctcatggcattttgtagcaatccattctcaccaaccccagactttggcaaatgctgacctattttctgtccctatagttttgctttttctagaatgttgtataaatggaataacagagtatgtagcctttcaaatgtggcttctttcatttagcataatgcttttgagcttcctccatgttgctgagtagatcaacagttcattcccttttgttgctgagtatgctgtggatataccacaatttgttttccatctactagttgaaggatatttgggttatttaccaatattcgaattttgaacaaagctgccataaacatttgcatagag

SEQ ID NO: 249669 - DNA, 470 bp, Homo sapiens
ctcaagccatacctgggaagataaaaaaagcactccttgtagatggcatttgagcaaagtagtcagaaagcacaggctgcagagttggagcagggttggaatcctagttgtgcaacttactagctgtgatataccctcagcctcactgtgtacatctgtgaaatgggagtactatatccttcaaagaattataaggcatacatgaataatgtctaaaactgcatctagcataatatctagcaaataataaatgcagaataaaagttagttattctttgtatttgatgccttagtgttaaaatgacattaaagattatgggcttgagatctgaaacaatgagtttcaattttaggaagataattattaaaacatggtaagcaaacttgtataaaaactaggctctgctaaaaatgtttctttctttcttatttaaaaaaaaatgtttttaatagaattgatgaagcagtca

SEQ ID NO: 249670 - DNA, 295 bp, Homo sapiens
aaaggacagggtttagaacacaaatataaaaaaatgctaggatgtcattgaacattaagaacaacagctgtatgtttgagcccaggagttcaaggctgcagcgagctattattgcaccactgttcttctgcctgggtgacagagcaagactccatctctaaaaaaaaagaaagaacagattagatatcaaatatcctgttttatttttaaaaggaattattacaagaactgcttcaatgaaatctttattattcacaaagagcagaattccttcccttccctcaaactaaaaaaa

SEQ ID NO: 249671 - DNA, 316 bp, Homo sapiens
aatctggccaacctgcccaggctcacagcatacagagctgtgcggtaataagtgagtattgcattaagacactatgtttgtagtaattagttactcagcaatagacaacacattatgcctgtgggaaaacgttgagttcttattcagaggcagcctctaaaccaccatgtatccaagacctagaaaattctatcctatcagtgagttctcaggctagaggaattcacaaagcatgcaccagacactcacttcagttcccaaactccaaaggcaaactatttgtaaagtacagtacaataaactagaaaagaccaag

SEQ ID NO: 249672 - DNA, 1198 bp, Homo sapiens
gtgaggaaaatgtcactttattgaaagagaaggaaacatttttctgcaaagctttgtataccagacagattttgctgagttttacttacgcttaattccactgaaggtatttaattgttttggattttccctctgaaaataccctggcgtagaaattaaacatgtaaaaatagagtccacatgagtcataagttgtgatggggacagttgttaggcttaattaattaaggggttaatcaggttggttaatcaagggaaagatatttgataattttatgtttgtaatattttaactcacacactgaaaagggaagaatgcatatagtgaaatatattttgaaaagtctcaccctagttttaaaaatgctgtggtgagtgctagtctccccaaaagttagaaatcttaaaatgagtttatctaaaatttataaacatatttctatctaaaagtaactgatgttatttccttgctcttttgagctctgattaatagtgctgatgaaattagaagtgggaaaaggattccgagacagctttggccaattttattttctaatcacgaatcccatctggattgtagaatagcatagggcgggggctcggcctgccccattcggtcttgcatatgtaacactccttccattcaacagataacagagagttagtcaccttgtgaatcctttaaaaataacaacacccataattgtaaataagccgtggggatgggaaaccggcacctctaccaacaaaaaaaacaaaacaactcctgcgtgagtgaattcaaacagggctctgaatttagccaagggaatctattaaacgctactgagatactgagattcaatgaatccgtttctttttctttatttgtggcttccagtcttgctagcgtaaatgaaatctgctttcagacgggtacagtcaaaataaatggaaacttgaaaggtactagtattggaaactaatttcaccacccggggctggaaggagttaggctgcgcacgcgcgcacgcacacaccagcgacctccaagcaggtgtagcccagcccgggccgtggatcgcagccgccttctgcgtgattttctcagaacctgtgcacccgcatgcatggggacatcgggtcgagatatttgtcttcgcctgggaagagcaaagcgccatcacagtgcgcccccgacgccggccttggcgcacgc

SEQ ID NO: 249673 - DNA, 487 bp, Homo sapiens
ccctcttgctccagccccgggaagcctgttgataaagccatgagtgaatctggcccagttcacctggatctgagcctttcaggttgcccttccctccagccccctccaggagtctctacagaagatacatcaggcataaatatggcctggaagggccagaatcatctggtgacttggggctgttgtgtgagttagagaatgaaggcttgggtggaaagacagacagaggcaacctctgtccactgtcctacccctggatggtcatatggtggggacagggcaagtccttagaccaactgtctggatcaggccccagaactactgcccagttctgctgaggtcctggcccccaggctgtgtggcagcctgtgattcccaacagagcaaaccagaggaatggacactgtgaagtctgcccagatcccctcctcaatgtgacccacctggcactgctgagaagcccagcagctcagagctgtgccctcac

SEQ ID NO: 249674 - DNA, 624 bp, Homo sapiens
ctacttgtggtgaaaagccttagactagagcaatagctacccctcaaaaaggaactcattttttttaattgtttgctgattgattgattgactgagacagggtctcattatgttggccaggctggtcttgaactcctgacctcaagtgattctcctgcctcaggtcccctaccagagtagctagaattaatagcacaagcctctacacccaggaactcactattgaatacataaatggaatttattcagccttaaaaagtttggaaggaaattctgacatatgctaaaacatggatgaaccttgaagactttatgataagtaaaagaagccagtcataaaaggaaaaatattgcatgattccacttatatgaggtacctagagtagtcaatttcatagaaacacaaaatagaatggtgtttgccagggcttttgaggaaaagggaatgacaagttaggggacagagtttcagttttgaaagatgaaaaagttctagagatgaatggtgatgacagttcattaagtgaattacttaatgccacagaactgtatgcttaaaaacggttaaaatagtaaatatatgttatatatatttaccacaataaaaatttattgactatatat

SEQ ID NO: 249675 - DNA, 499 bp, Homo sapiens
cattccatctgccccctgcaagttccggtaattggtcactatttataattatataaataatagaaaaacaagcttaagctgccctccccaaaaacccagtctcctcctatttttaggcagccagcctgccctcctgtagggcagcgtccctctgaggtctgggccactcagctccagccatgggctgaagcaatgatgctggtgacagcagtgattctgccacccaggaaggggccaggggtgattttctaactcaaggttgagtttaaagctctcagagaatgaagagaaggaactattctaaagcccccttgctgcgatcattctcccaagaccaaatctgattctgtaagaactgggagctggacagagattcgagtctgaatttcattgatgtgtctcactgggagtcacgggaccgggagagacgagaggctagaagagacaggagagtcaggctggctataaagtccttgatgtccaactaccacccccctgc

SEQ ID NO: 249676 - DNA, 315 bp, Homo sapiens
acacaatgagcacctatttctacaaaaaataacaaaaaataaaaataattaatgtgagagacgtgacttttccttttgcttgagcatttagatgccattgtggggttattgatcagtccacttcccatataattgtgtctcagggattagagaggcccaaggagagagggagagagactggaaatggccagttggtggagcagtcagagcatagtccataagttcactgtcttacataggcatggttcatggcattgcaaaacaattccaatagtaacatcaaagatcactgatcacagatcaccataacagata

SEQ ID NO: 249677 - DNA, 529 bp, Homo sapiens
ccttccccgccaaaggtgaggagggctttcaggatgcaggagactgttttccccacaccttaatgagaaaaattgacctgtttattcaccagctgtcttctttgtttctaatccaagcaattgctgcaaaatctttttcacttcttccatgttgaaattgagcagaaagcccctcgagtggcttatctttggcagacaacaaggaatcaggttggaggagtcacacagactcgctgggagacacatggaatgggagaccagcaaatatttacacactgtgttcaagatccattcttagaagtgtgagcataatttatgtgacatttcgagcactgtgccagtgagcgccttctctatgtacaaaatgtgctactttcgttgtggctgtatcacttttggtggagtgcagcctttgtgagtttcaatggtatggcggccttttctctggggcttgagtaaacaccaccacggaaagctattgttttactgtgtgagctagtgttttctctataaaactcgtaaaagtgtg

SEQ ID NO: 249678 - DNA, 911 bp, Homo sapiens
ttatgctacttggggattcagcagaacttatctgactgatggaagtgaccaatttgaaccactgaccccagaatatcccagcaggggcaataatcagcagagaccctgctacttttgtggctgtcttggcatcctcacagaggcctggttcaaccctgagctgtacacaggctggtttaaatgtttccccgcagattttggaagcaacgtgctgggtcactcgtaatataaccacatgcttcagtgtagccctcctacattgcttgcctacatctgaaaacacgaatcaagaaagagaatatagctcctttccacttgactaaagaacagtcaatcctgccagtagactaaaggctggggcatggaacaatttcccaacacactgacttgattttgtgtaaactgctgaaagagaagctttagaagctgtggctgggctcagaatcagtgcctccaaaggagcaccgaatgacagattgatggagctcatcagagaggcacagagaccacaggccattggaatggggccttatttggatggactcatggcccaaaaaggaaagggacactgccaacagcttcccctttagcctgtgggttccattaggaagccggaacatgtcactgggagaaagtgctatgaccacccaatatgtgcacaggtgcctctaggtggaagaaagggaaagggcgtgtttacaagaagaagagcacaagtcaacaatgagctatggatgcatgatgtcatcctctaggactaagcatccttagtacttttaaagcacttaaaaaaaaaaaaaactctagttgctatagcaacttgatgcagctcttaaaaggggattttttttgagggggtcattttatatcttctatcaccataacaacatgatatagctttttaaagggta

SEQ ID NO: 249679 - DNA, 452 bp, Homo sapiens
gaccctgaaaacgggctcggacccccgctgcagcgtggactccggtgtggccgcggggcgtgcaacccggaccctggccagctccgtgtcctccagacctttactcatggccccgcatcgccaggccgagctgcaccttcggtccccgcccgcggcagccgaggagaggagagcaaggcccagaccggggaggaacccacacagcctctgtgctccagcctgcttgaaagacaaggtctacctacaacgcagagatgcacacattaaggacaatgaaacacccaagtgttaggaaccagaataatcagccctaatagaggggaggctgatcagggagggcctcctggaggaggaggcacaacatcagggtgcactgtgatttctggagacccaaggagttctggtaaatgacaggtgagaaaaagaaaatgtaataaaatataattgaaaac

SEQ ID NO: 249680 - DNA, 413 bp, Homo sapiens
gagaatagctctctctcctgcagagagagaggggtgcccgagtgggtcttccggccagcggcggaatgcactggatttgtatagccaggcttgaggaggcggtgtctgatttacataaggcccacagattgtttggaccaggtgtgaggtctacacagcacgcatggaagctggctgccctatcctaatctttattatgcaaatggagtctttgcctggcgggggccatgttcactgcttcttactgtacgcatggctgacaaagagaagagaggatggagccgccattttgaacatgcttagtcccagctagcttttcccgattcacactgccggcactcaccggtgtaagcttccagcttgcttgtctgtgtgtgcagcttgattttacaggctgctttttgttacaaaaa

SEQ ID NO: 249681 - DNA, 202 bp, Homo sapiens
ggattacaggggtaagccactgcgcccggccccatttcttcttataattctggcttaacaatatgtgtatacacagtactttttaagagcacaaaaagacaatttctacaggttcttctctgccttacataagtcttatagttcactaaatgttagattaactaatttcatttacccaaggtatatcaatgaaatccttaag

SEQ ID NO: 249682 - DNA, 440 bp, Homo sapiens
ggtcgtgcctttttcttgataccccacgattccttgcacagcgtttctaccaggcgccgacatgccctccttggatgaatgagtaacatgggttctaggaagcccgcatgaatgcagatgtgacgtcctcagcctttcatagactatgtttcatgtgagaggtgggaagaacagctgaacagaaggctgagcactgtccaggtccagagtcaccaggagctcgttgtcaggttttcacttgctattagtagagatttttttttaaggtactatttttagtgttaaaagtgaattcaggccgggtgcagtggctcacccctgtaatcccagcacttcgggaggctgaggtgggcagatcacgaggtcaaggagatcgagaccatcctgaccaacatggtgaaaccccatctctactaaaaatacaaaaattagctgggtgt

SEQ ID NO: 249683 - DNA, 497 bp, Homo sapiens
tatattcacaattatttaacattgtatcttattttctacctcaaatgatttaatcttttccatattggtatggtcctggccgataactctttgtgtggcagcctgagagaatatggaagacactgtcagtgttggaagatggtggttttatcacttttcattgcactgtctttaaaacatgggcaaattgactaaaagaagactacagaagaaataatggtgattgtgaatttggtatgaagcatggatgttaattaatcacacatgttctctgaggtccattgtaaaaggagacctagtcttcagggagagagccactaatggggagatcttattcctagaattttgtggttatattattattcatgaaccaatgaataataaatgaatgatataaaggaagaaaaacgtgcttggaccaatgatgagtaccatggggtatctgaaacaggatttttgattaaacccatatgcaattctgaggtccattaaaaaga

SEQ ID NO: 249684 - DNA, 703 bp, Homo sapiens
ctgcctcaggctccccagtagctgggactacaagcgcccaccagagttgtaaattttgcaactctgtgaaaagtcagtgaaattatcactagttttgattttcacttcacaaaaccatactagttttctttagggagaaaaacatatgtattagaaagttttgtattgctctgatgcaaataaacagattagagcacagtttagaaaaccttcactttgacaaaataaagattctgaagtatttcaaagattatatttatattccttataaaccattatctatgtttgcatttgagatactgggggaaggaaaacagaaactcaactctcttttagagtttgacaaatgaagtatagaaaaatataagtaaggatttatataagacaaacccttatcaataaagaactttacaaagacagtacttccattacactcccagaacaaaaaccaagtatatacatcattttaaagaaaacaacaataaatcctaccaagtagaaattgtacagatcatagtctctgttgtaattcaataaaagtagaaattcaaccattcaaagatagccataaataacctgaccatatggacatcttaaaacacttttctaaattaaagataaattacatagtatttaaagatgagcaaaaatgagaaaagtttatctacaaatatgtagttagcattttattattaattaaaat

SEQ ID NO: 249685 - DNA, 664 bp, Homo sapiens
ctggccagatgtgttgactgaacacttaagatgcagtaagtgtgaccaagaaactgggtttgtcattttatttcattttagttaatttaaatttaagtttaattagctacatgaggctatcagctgtggtataggacagcagagctccggaagcttttggcctggtgagaagaatcaggacaagcgcctccctggcctctcgcccactctgcacagccgctaaccattgctctcatgacattctttcccagccccagaacttttagccatgtgacatcatctattgattagagtccaaacttcttgtgctaactctctatgggttgccacaattagccattgtatgtcgttaacctaaatttcattcatctgctatgtcctgaccttaggggcttagaatatagttagaaaacagtatttcagaataaaaaaccattcttgtattacctctcgcactattccccctgttctccatgcttcgcattctctgttctatccccagctatagcactgtccccataaagcctactgtggttctcggctcatggtgtccttcctcccatctgcctcccgacgtcatgcctgtcttccagtgtttatgccttctccaggaagctttctcttgtggccctcgctgtgagctatagctcctccctttcaacat

SEQ ID NO: 249686 - DNA, 403 bp, Homo sapiens
acacaaacgcacctggattcaacagaggacaagtagacacatctatgtcccaggctgcactaatgaggaaagtccaccaggtgggaagtaggtaccactgagagtttataaggctaaaaaccccagtcttgggatgcggagaaggagggaaggaagtgagaatgaacaggaatggcatattctgttcacttcactgacagctttgcactgtgcattcccagctgggcatgtcccagacatgatctcttgcatgggctgtactaacgaacatcaaatattcaggctggcaagcgcgagtgggcagtgaagcgtggtgtgcaggggaggtcgcatctatctaattcagcgcactcatagatctcagcggcacgggcctgggcataactacgtgccctctgcgcta

SEQ ID NO: 249687 - DNA, 437 bp, Homo sapiens
agtgggtgcagcgcaccagcatggcacatgtatacatatgtaactaacctgcacaatgtgcacatgtaccctataacttaaagtataataataataaattttttaaaaaagcatttaatctggaacaaaaaaaaaatctatggactacttcatccaacttttgcagaaaacattttcttctccagttcacatggaacatttagcaagatagaccacattctgggccataaaacacaccttagcaaatttaaaacaacatctgctctcaaaccacaatagaattaaactaaaaatttaataacggaaacacaaccggacaattccaaaatacatggagattaaacaacacacttcaaaataacacatgggtcacaagagaaatctcagagaaatttaaaattatttttaactaaatgaaaataaaagcatgacttttc

SEQ ID NO: 249688 - DNA, 409 bp, Homo sapiens
catcagctatcatctgggaacttgttagaaatgtagattcttggggtccaccttgaatcagaaatcctgggggtgaggcccagcaaccttttcagcaaggcctctgggtgattgctgtgcgcactgaagtttccgaacctcggagctagagggatggatcgactgcatgtcaagctagagaagaccagtctatccttaaggaactgcaagcctggccaggcaaagctgctttttaagtggaggaaagggggaggataatatgcccggcagttccgggaagaggcacttcacgcctccacgggaagctcactagtaagtgcaggcatacctcaggaacgtcgcaggttcagttccagaccaccacagtaaagcgaactttgcaataaaatgagtcatacacgttttagtg

SEQ ID NO: 249689 - DNA, 492 bp, Homo sapiens
attattatactttaagttttagggtacatgtgcacaatgtgcaggttagttacatatgtatacgtgtgccatgctggtgtgctgcacccattaactcgtcatttagcgttaggtatatctcctaacgctatccctcccccatccccccaccccacaacagtccccagaatgtgatgttccccttcctgtgtccatgtgttccagagaacattttcacaaacaacagaggtgttgccagctcagtactggcatttctgtgtcctctgagctttctagtttggtttggtttgaggttgtatctgttcattttgctaaactgtctcaactcttagaaatatttctgagctcattctccaggatttttaggtaagtactgatgataaactgtttacaaacagtaatagttttgtttctccttcctgatggttgaatattttcattttagccagaaattttagagcaatattaaatattattaaatatcagttatga

SEQ ID NO: 249690 - DNA, 129 bp, Homo sapiens
aataacagtctccaaatcctaactcacgaaagtccagaaaacatttgaccaacattctctccttatttttgctactacatatgccacatttaatagggaaagattaactgcacaaatgcattcaccaga

SEQ ID NO: 249691 - DNA, 717 bp, Homo sapiens
atagatcaagagaacagaatagaaagcccagaaattaatctacatatctatagctatattagtacattctcacattgatacaaataaatacccaatacttggtaattcataagaaaaaaggtttaattggctcacagttctgcaggctgtacaggaagcatagtagcatctgtttctggggaggcctaagggagcttttactcatgaagccaacacttcacatggtgaaagcaggagtatgagaccaagaggggaggtgccacacacttttaaacaaccagattgtgaggacagcaccaagaggtgctaaaccattcatgataaatctgcccccatgatctaatcacttcccagcaggccccacctccaacattggggattacagtttgacatgagatttggtggggacataaacccaaaccataacacagtgaactgatttttgacaaaaatgctgagaaccttcattgggaggacagtcttttcaataaatggtgctgaaaaaactgaaaatccacatgcagaagaatgaaagtagacccttatctttcacccaacacaaaaatccactcaaaatgatcaaagacctaaatgtaagaccccaaatgttaaaactattagaagaaaacaaaggaaaaacacttcaggacattggtctgggaaatgattttataaataagacctcaaaagaacaggcaaaagaagcaaaaaaaaaaa

SEQ ID NO: 249692 - DNA, 384 bp, Homo sapiens
gagggctgcctgtcgagatgtgtaagatggccccagtgttactaggcactagatggcacttgcaaagcccattcggaggatttagacaaatacctcgagtgagtgaatctgaagcatgctagttgtgttgccttttaaataggctctggcttaaaacagtcacagcgaaacatgcctttgaattggaaagccagaactttttgcaaaataatttgaaaagtttgttgaaccttaaacctttcctgatgactccttccttctgaacttaactcgttaaagttgctccaatcccagcccagtgccagaccagcttcctggaaactctcgccaactgctggcctttggaaaggcttgtcaccctaatagctgttttttaaaaaaaaa

SEQ ID NO: 249693 - DNA, 449 bp, Homo sapiens
aacaaataatttttaaaatacaacgatgtctcatgcaatatttgggacatacttatactaaaatttactttgtcatatcattggaattaaatttaactaggtggcctacatttttatttgctaaatctagcaaatttatgaaatgctcatgccaaagagtgctcacgccaggctcttgctaagccatggagaatgcacaaccttaacgctttaggtattgtcaaatgttctttttttaatttaggttttttgcttgtttggtggtaaatgctttcacagtaagttgtttgctcattaatttacttacttttaattatttttaaaaaattagacttagtgggtacacatgcaggttattacaggagtaaattgtgtgatgctgggatctgggcttcaattaaacccatcactcaaatagtgaacagagtacccaaggaggtttttaactc

SEQ ID NO: 249694 - DNA, 612 bp, Homo sapiens
ccagagagactaaacagtggactcatgggtttggactctattgcaattcaagtgaggtcagaggaattccacagaaaacttaaaaggcatgaagtagctattatagtaaaattaatattttaggggaaaaatcattaatgagagaaaagagcattctggaaaactgtgttccatttaaggcacctcattaccagattctttaaggaaaactggagggagttctgagacacaaagaatgattaagaggctgtagggattaacttagaaacaacgattttaaaagactaaatatgtatagcttagctgaacagtaactaaacagagatgtaactattgtcaaatttctgaaatcaagagaagtaatgggcttctctgattaaaatcttaaacaacttatatgcaatatttagactgtgcgctgcagtgtaaactatcagagttgaattcaaatcccaactcctttattttccacctggggaatttcaggcaactccttccaccttttaaactttgtcatatgtagagtgggaattacaccacctacctttagggttactatgaagattaaatgagatgacataagtaaacagtctagttccatgcctagcacag

SEQ ID NO: 249695 - DNA, 331 bp, Homo sapiens
aaaaaacaccgccataccttataaaataatttttataccttctaatatgcaatcagtgttcagatttcctgactgactcagaattagttttgttagaattcaggatcttgaaaatatattgatatattcctttcattttttctttgcgtaagtatagatgtatatgtttaataaaaggagcaaataattactagagttttatatgtactggggcaatagtataagaattttacatagccgggcatggtggtgtgtgcctatagtcccagctacttgggaggctgaggtgggacgatcacttgaacctgggaggtggaggttacagtaagcc

SEQ ID NO: 249696 - DNA, 438 bp, Homo sapiens
gtacgaatacatgctgaggatttcatcccttggcacctagtacaaaatgccttggttttgcttgtcaccaacccaaatccccatgttttctcgctgttttctttgtgcctgcatgggtcttcctcgggttctagagctccacatcatgctgggtgtggagtggtgaatgagcccactgctcacacaagcacagaggggttttgaaacgcccctttccattccatcttttctcttggccctaccttctccaccctcacaaccggctccttgtacacacactcagacattctcctaggactcattgtcttctcggttttatttctttctctttctgccagtatccaccctgttttggtaaccacggcaactggtgaaatacaatcccaatatttgctagctgcctctgtcacccagcccagcacgcgcattgctgggtct

SEQ ID NO: 249697 - DNA, 641 bp, Homo sapiens
tgtgacacaacttaaacatcctttttgggtgtgtgggagcaagaaaaattgaggaatgttgatatcagggtagggggttgaaagtggatggagggaaatggaacattttgagatacattcttgaggcgggacagatcctttacttgttgaatttgttgtggagtgtgagggaaagagaaatcatggagagagagcatctagattttggcttaaatgtctggagagatggtgatgactgtgctgggaaaggatttagtgggagggaatcaggaactgtgttcggctgcctcctgggaatctcagacttgatatgacacgtctacagggagatggcaggtagagttgataccactctggagctcggaggccagggctgcagacccaggtgtgggtgtgtgcagcccatagagagctgtgttgcacgtgcctttgtatttgttttcttttgtagatgcagttctcttcattcttattattcagcactagtttctttttgccagttttttcaaaaatcaaactttaagatattcgtagattttgtccttattggtcttttcacatagcatcagattatcagaatgaaagatgtgggaatgagggagaacagtgtcctttttgacgatgacttatataaaaaaaaa

SEQ ID NO: 249698 - DNA, 453 bp, Homo sapiens
cctcataggcctcctgtctccatatcagttctgcctcctcatcatccctgtgtagttgttgcataactttggatagatctgtagtcagtgtttatattgttgtcactaaaaaattgttacttatgactgagctatgtaggattcgtcctggtatttcccttatccagagattctctgttactaccctttttggagagtaaaccttaaagtcttctcctggggtagagaaaaggcacttggccaactgtgaaaagtaagagagggcatctgagtgtctgtctgctttttctatagacattataccagtcttcatgtttttagttgtttcttcacccctccttacagagatatctggtcctgtttttccattgctaaccaagagttggctgttattttctcatctctctacttttctttttgtccatgtggtttattccttttaagaaaaaaatt

SEQ ID NO: 249699 - DNA, 1155 bp, Homo sapiens
acctcctgcagttcctctcgtgcctggagaatgggctgctcccacatgggcagttggacccgccactgtggtcccagaggggtaagggcaaagtgtttcctaaactgcgcaagcgaagccctcagggttctgccgagtccacatcttcagacaaagatgatgatgaggccacggattatgtgttcaggatcatctaccctggcatgcagtcggaattcgtgccccaggatctgatggacgtctctgtaagcaacctcccatccctgtggcagcccagtccccggaagtcctcctgttcatcctgttcacagagtggctcggctgatggtagctcgaccaatggctgcaaccatgagagggctcccctgaaacttctctgtgacaatatgaagtaccagatcctctccagagccttctatggatggctggcctactgcagacacctgtccaccgtgagaacccacctatcagccctggtcaatcacatgatcgtgtctccagacttgccctgcgatgctggacagggactgacagccaggatctgggagcagtaccttcacgacagcacaagttacgaggagcaggagctgctgcgcctcatctactacgggggcatccagcctgagatccgcaaggccgtgtggcccttcctcctgggccactaccagttcgggatgacggaaacagaaaggaaagaggtggacgagcagattcatgcctgctatgcacagaccatggctgagtggctgggctgcgaggcgatcgtgcggcagagggagcgggagtcccatgcggccgccctggccaaatgctcatccggggccagcttggacagccacctgcaccggatgttgcacagggactcaaccatcagcaatgagtcctcccagagctgcagttcgggccgccagaacatccgcctgcacagcgactccagcagcagcacacaggtgtttgagtctgtggatgaggtggagcaggtggaggctgaaggcagattggaggagaaacagcccaagatccccaatgggaacctagtgaacggcacttgttccccagactcgggtcatccttcctcccataacttctcctcgggcctctcagagcactcagagcccagtctgagcacagaagacagtgtcttggacgcccagc

SEQ ID NO: 249700 - DNA, 319 bp, Homo sapiens
ttctgttgaccaaactctttgctcctctccacccaccacagagttacgaggagcaggagctgctgcgcctcatctactacgggggcatccagcctgagatccgcaaggccgtgtggcccttcctcctgggccactaccagttcgggatgacggaaacagaaaggaaagaggtcggttacctgccatgggcactgggatctttggcaacaaaaggagccagatactgtggggctggggagtgctggttccacgctggaccaaggaaggggagggagatacggggaagatgggaacctgaaggcggcgctgtccaatagaa

SEQ ID NO: 249701 - DNA, 486 bp, Homo sapiens
gcggccgccctggccaaatgctcatccggggccagcttggacagccacctgcaccggatgttgcacagggactcaaccatcagcaatgaggtgatgggcggctggcctcggggagcgcgggggctggggaaggtcagggtctgcttcattgggctgttctaagagtggtgaagactgggtgtctggggcctggtgacagtctcacccctggctttttctttaagagtgtgcggtgactttggaatcagacctgaattcaaactctagtcccaccatttagtagttctggggttccctaccagtaccttttcttctgggcctcagttttctgcatctgtaaaatgggaataatcaggtgtagaggaggttcgtgtacagtccaaacaagacaatgtatataaagtgcctggcgcactgcctgactttcattgattcaacaaatgcttattgagtatctactatgtgcaggtactatcaggaatatcc

SEQ ID NO: 249702 - DNA, 316 bp, Homo sapiens
gctaaaaacttggatccttgtagctcttggccttagattcaggtcttgatttgaacatgtattagctccgtgatgatgggcaagttactatatttcttggtgccccacccagtttgttcatctatactaataatatttagagtctttaatacaaggttgagtatttaatacctttaatacaaggtagagtcaataatacaaggttgttgtgagtgataataggagaatgcacataaagccctcagcaagtacctggcactaattaggtgctaaataaagggttttctttgttttgttttttgagacggcatcttgc

SEQ ID NO: 249703 - DNA, 743 bp, Homo sapiens
tttttttcttgttgtgaggatgggagtgacaacttccaagctctttacatgttgaacaggaaactgaaagccccttggtgttcctttgtaaattcatcttaaaaatatttatcataattgaaaagtgctaatatcaaattttcagtctgtttatattccccctaaactcagataaatatacattttattttgtgtgtctgtgtgtgtgggttttgttgttgtttgttttttgtgtttttttttaagatatagggtcttgctctgtcaaggctggagtgcagtggcacaatcgtacatctctgcagcctcgaactcctgggagaaagtgatcctcccgctttagccttcagagtagctacgactacaggcactaaccaccaagcccagctaatttttaaaattttttgtagagatgggagtttcactttgttgcccaggctggtctcaaactcttggcctcaagtgatcctcctgcctcagcctcccaaaatgttggaatcacagatactttgtgtcttgattcttgaaaggaaaaaacaaagatttttaatgcctcttatcttgtacgcactttccttccaaacaatacccttttgctgccattgttctcgttatgaatagcttaaagaaaaagaaacaactaagggtagtaataggccaggaatcacttactgaatactaggtcttcttgtatagtttgataccctataaattgtgtgcatctgatgcatttcaccttcaaa

SEQ ID NO: 249704 - DNA, 687 bp, Homo sapiens
ggtttcctgtctttttagcctctttagataataaaaagatgagtgagacatgaactctgcctctccagagtccactatagcctagcagaagaaacattatacatactgaaagacagccccatttttagcatttttatttgaaatgtaataaaaggattttccgaattacccccttcatagctggatagcagaagggaactgtgagggtagaccctgaaaatgcagacacagtggaggtgtttcgtgtctacttacatttttaataactttttttatgacaaaggtagtacacacaaggtctgaaaaggatatacatctggccaggtgcggtggcttacacctgtaatccagcactttgggaggctgggtggatcacctgaggtcaggagttcaagaacagcctggccaacatggcaaaaccccaactctactaaaaatacaaaaattagccgggcatggtggtgcgtgcctgtaatcccagctactgaggaggctgaggcaggagaattgcttgagcctgggagatggaggttgcagtgagcccagattgcaccactgcgctccagcctgggcgacagagtgagactctgtctcaccaaaaaaagaaaaaagaagaagaaaaatcagatcaatgaaaaatcaagtcattgttttctagctgtcccaggataaaatcgaactcagcaa

SEQ ID NO: 249705 - DNA, 306 bp, Homo sapiens
ctagttctggaaataacttcttataataagactaagatataaaactaaaggtcaaaactgtgtaagtaaaagaagctactgccctttaagggaaaaataatacatgttaatttttgcagcaatttcaattgaatgggtttccagggaaacaggtatctgtaatgggttcatcccacttaatatttaagacaaaacatagggaatttctttcttgttatcttttccttgttatcttacacacgacatgctcattcttaaatttcctttgaagcgatcattctatgcttgagtcttatttgttctccc

SEQ ID NO: 249706 - DNA, 502 bp, Homo sapiens
tctattgctcctgttccttaagccctagcagtccctccacccagtaggccctgaaactgtaatgcagtcctctcaggctgaggacctgctctgtgcaaaggcctgagagggaggtggagagaagccaggcagaggccagatatattagcagttttcctagaacagttgctaaaatagagcagacaggggctatgggagttgatcaatagatattcattgaacatctactttgtgctgcgaatgatttcagtcatgagggacatagcagaccataaaacagaacaggggaagccttctttagaagtggtcctggtatatttctgtcaatcgacatatattcacaaattcacgcatccacttaataggtatttattgagctccttctgtatacgaggcactgttcttgttgctgaaaatacaaaactgaacaaaacagaaaagctcctgcccttgggagcttatgttctagtaaggaaatgaaataaacaacaaacagcgaaaa

SEQ ID NO: 249707 - DNA, 200 bp, Homo sapiens
gtgccgagtatttcgatgcacttgtggtgtgagccactgcacctggcccccttccttcaccttagtcaatcctatcccacctcttcttcctccagtcccctcacctgatggtcccgacacttcatcatccaccacctcctggagggggtaccctgaggtgctcagctgggggctctgctcctcatcctgggggtgcggtt

SEQ ID NO: 249708 - DNA, 525 bp, Homo sapiens
tacgcagtcattgatctaatttctgtctctatgtatttgtcattctggacatgtcatgtaaatggaaacatacaatacgtagtcttttgaggctggcttgctggcctaatgtttttgagactcatccatgttgtcgaatgtagagtgttgtggactatgtcagcactttgttcttgtggccgtgggccccttttcactgagccttctttgcctttatcttcacttgaatttgtgggctatgtgctgaatgacttccctgttactttcagtgttgttttagaggaaaacacagttgttgttttgtctttgttttaatgaactgatatctcctgtgtgtccatgctgattcttaagttgtttaaggaaatatttccttaatagaagaaccttctttcaggatcctcctattcttcctcccaatattgaaaatcattttttaaaatttgccattaaacaaatttttttgtttttcctgaagaaactccccttcatttaaaaatctatagtttcttgcttttagaaaag

SEQ ID NO: 249709 - DNA, 399 bp, Homo sapiens
aggggggtcggagcccggccacggggttgcatgacgcagagagaggtccgaacccggccgtggggttgcatgacgcagagggggtccgaacccgaccatggggttgcatggtgcagagtgggtcggagcccggccactgcagggaccttgctttattgagcttcacttgaccgcacttcgcagatgctgtgtctttacagattgaaggtttgtggcagccctgcaccaagcaaatctgttggcacaattttgccaacagcatgttctcacttcctttctgtgtgtcatgtttgggtaattcttgcaatatttcaaagtttctcattattaaatctgttatggtgatctgtggtcagtgatctctgatgttactgttgtaattgttttcgggctccatga

SEQ ID NO: 249710 - DNA, 481 bp, Homo sapiens
gcctcaacttcccaggctcaggtgatcctcccaggtagctggaactacagatgtgcaccaccacacctggctaattttttttgtaaaaacagagttttgccatgttgccaagatgaacttcttgaacttctgagctcaagcaattggcccacacccacagaactaggattacagatgtcagccaccatgcctggctcaaaatgctttttataaaatatgattaggttcttgggaggccgagatgggcggatcacctgaggtcaggagttcgagatcagcctaaccaacatgaagaaaccctatctctactaaaaatacaggattagccgggcgtggtggtgcatgcttgtaattccagctactcgggaggctgaggcaagagaatcgcttgaacccgggaggcggaggttgtggtgagccaagattgctccatagcacccagcctgggcaacaagagcgaaaactctgtctcaaaaaaaaa

SEQ ID NO: 249711 - DNA, 777 bp, Homo sapiens
  misc_feature (390)..(390): n is a, c, g, or t
ctccacacagcagtgggcgtggtcagcccttgcttcaggcagccccgagacgcagtaataacaatccccaaggatcttaatacgtaaacagtgattctctgcggccagcttgtcaaagcgggcgaagagctcgttgagggtcatgaccagttcctgtgcagtgcactgggacgccaggctggtgaagccctcgatgtcagcaaacaggatgctcacgttgtcatgtttctggacgtaaatcttatggaacatcatatcctcctgcttggcgttgatgtctgctttcatctccatggcaacatgacggggaaggacagacagcaggagccgttcctgctgctggttctcccgctgcgagtggagccgcgcctggatgcactctcgggtctnctggaaagcctgtctctgggagacctcagccggatagtgggtgcagacacccacgatgttggtgcaggagaaaatgagaacattggagacaagctgcttcagcaggaactggtcctgggcgttggtgcgcagggcgatggccaggtggagggcggacaggagcaccccgctgagcactgcggcccgcatgcgcacgggcagcagcgtgtagatggtgtagatgaagaacacggtccaccagatgccctcagaggcgctgcgtggctgcggcagcagcaggcccaccacctggacggccagcaccacggcgatgagcgcatagcaggccaggcccatgtggtcctggtggaaggcggcgcggttgcaaagcacagccatgatgaggat

SEQ ID NO: 249712 - DNA, 857 bp, Homo sapiens
tagctaaaccccccagttctatcaatcagacaagacttctgctagaaagaaaatcagcatttgctcccacaactctccgtccttggagagcacagtgtgctcagaagagcagcactgcttgcaaagggagcccgtagctctgggaggcaggctgactccacacccaagtcttcatctgtcactgttggccatttggcatgtagcactcagacctcagtttctttgtgtgcaaaatgggggtgatggcatggagaacatacacattttttaaaattcttaccgattttctgtgggtaacattaaaaaaagttattttatttttaaattttcatttgtttaaagtttaaatttttgtatctttttttagtatttaatttttgccttcagcttcgcagacatacacattttgaatgggactgatacatctattactcatttcccttcccttcctgcacagggtactgggaacatgaaataacagtctacgattgagtcagcattgctcaccggaatgttagtcatggcatatgccctgaaagtggtgccttccaggaccgttgagatgaggatggccagcccctaacagccatctgcatccggggcctgggagagccgaacctgagactgccaggaatggtgtcacattaaaagtgcctcattcttttggggctgatcaggcccttgactcgatatttggtaatactaagaaattatagagtgatgatttgttttcacctcataggtgtgtcttccttaaaccttgttaagatgttgacacattacccatttaaagggggaaagaaaagggaaaaaaaaaggaaaaaactgaagttcattgttctaggtgtgacaattgt

SEQ ID NO: 249713 - DNA, 461 bp, Homo sapiens
atgcacaaaatgatacgtgtgtgtgtgtatgtatgtgtgccaaagaaagagggagattaggccagtcgcggtggctcatgcctgtaatcccagcactttgggaggcggaggcaggtggatcacaaggtcaggagttcaaaaccagcctggccaagatggtgaaaccctgtctccactaaaaatacaaaaattacctgggcgcagtggcaggcgcctataatcccagctactcaggaggctgaggcaggagaattgcttgaactcgggcttcagaggttgcagtgagccaagatcgtgccactgcactccatccagcctgtgcgacagagtgagactccatctcgaaaaaagaaagagattaagggagagggaggtggtattgctaaatcttatccagatgtactgcagggcggggtttggtgagaattaataggttgtctgaaataacagcaagcatagaa

SEQ ID NO: 249714 - DNA, 840 bp, Homo sapiens
ccggcgtatattcttcttaatacttctgctaatttctgaattttcctatagtagatataatatgtattttcaaatatttacctgaaatatatatttgtgttattttaagaaggaagaaaagctgaaaataaaaatgtttatggatgaaattagaacaacagaaaacttgaagatgcattatgattgcattatgtgaaggtgcacacgcatttagtaataactagaagatgtcaaaacacatgattttgttagagtggattggtaactttttaagaactaagtcctttaaacttttaactaattaatttttacaataaaataaagggaaactcatgccatgtattcccttcataaacttaagagacccccattatcttttactttaaaattcctataggatgtcattatgcttctttctattgtaatggcttggtttcagatcactaataaagaatctggattacatttattgacagttagttttcctgatcatgtataaggaattaaccatttgagttactgattattctttaaagaactgtacattttggaagcctcaatataagttacaagtgatcgcatatctctgcaaacattatacagtgtttaaattcagttacttgacgcagcaaattctgggattaaaaacaaacttttctcatggtctgctctggcatatgaattaactaaaaccagaaattgtaattactgtctgaatgccttcctacaagataaaatgagatgttaaaatgatttgacattacagagtttaatgtttttatgtgaccttattataccaaatgcgctctgaaattttaaatagaatgtaatgacagagaa

SEQ ID NO: 249715 - DNA, 599 bp, Homo sapiens
agggacaggaaaggttcccagaaaggcatggactgacggccagaaataatgcagctgaccgcggtggacaggagcacctcacccgcagccccacctgctggacccagatgggcccttccccagcagccagacctgctctaccaggaagcagagcctgagaggagggtgcaaggccctcacccaggcaccggaggcacggtgtcacctcaccttccgtgtgatgcactccagtctgcagtcctgcactgagccagtcctgggccgacagctgggagcccctcttgtaccagacctgggctgatggcatgcagttctcagagacagtccctgaatgcattggtgcaggcagccaagttcaacagccccagacagcacaggggaccccatggggagccaggtcctcccaccaccagactgggaagccgcagccgctctcggccttcggacttggctcatacctgtgagtcaagcctttatcaccaagtgattcccaagtacattgagttgaagggtgtcctccccaaaattcacgtccctcctgaaacctcggaatgtaaccttatttggaaataaagtttttgcggttgtaattaaactaa

SEQ ID NO: 249716 - DNA, 476 bp, Homo sapiens
ggctattttagttgagtgattttaatgactggaggcagataattttatttgagaatatcttcatggaacaagtgagtcttgaaggaagcaactgtgagtgaagtttaagacaagggattagtgtgataacctttgcatatttgaaaatgtctaagcacctgaatgctgaaattattagctagatacgtgatgtttggagtaagaaaaatgaaagtgagtgcagactcgggacacatctttctttggttattcaaagaagccaatgacattttgaaatattttaatcacaaattaatgcgtggtttattggataacattttttgttgttgttcacgacagctgttgtttgggactaaaagtaacaaggtgctggatatttttcctatctaatgtctttcattatcttgacaaggacttggagtgcagtatagaaaaacctcaaactctttactactgtggagacgactgttgttgga

SEQ ID NO: 249717 - DNA, 209 bp, Homo sapiens
gtgggagtgagggaaaaaaaaaacctaacatattttaatttcttcttcggttttattaaaagcccagcaatagttttagatgtatatgaaggatactttcaaatataaaagtgtaggattttttgttgtatcattcatatatttgtaatgataaatttttgtcatcattttcagatactttttaaataaatctgcatgtgcatcttcaa

SEQ ID NO: 249718 - DNA, 594 bp, Homo sapiens
taatgaaaaatgcactgggcttatttaaaaatggttacatttcctcttctgtttttaaacatatgaagtgatttttcttggctctttactatgaaaagctgataaggttcctggaggtgaaacctatggaattgtggggtctctctaagactgcagctctgaagagtttatcactctcaagctgattcacatgaagcctctggcagtccatcaaaattatcattgatatgtccctaccattttataacaccagtgactttcattccgagtaagctgatctcagtgcctttctattcacgtctctgctgatttcagggttgtagttttccctgtgcctttaattctctgaagagtctaataaagaccattgattttcagtttgttcagcttttttcttgtgttaggatgagatgatgaattccaagctctttgtatgttaaaactgaaactggacatcttatctattttggaatattgaccttgaatccaggttcttgctgaattgacttgttaattgtaataatttctctgtaaatttttctaattctttaagtacaaaatcatgtcacctggaaataaagactgatttaatgc

SEQ ID NO: 249719 - DNA, 656 bp, Homo sapiens
tctggaaagggagtaagtgacagctgcagggccctggtattgagacttagatgaccttggacatttcagggggatttcatgatgggatagtatggatccttccatgccaggcccccagcttagatgcctatttatccatgtgctggtttctcctctcagttggggagcttgggaagagaatgggcatggggtaaagatgtgggggtatgcattgtgggtccttgggataggggctcttggtggtttcatctgttcccattgtggcagggcactgtgacctttgaagatgtggccgtacacttctcctgggaggaatggggtctccttgatgaggctcaaagatgcctgtaccgtgatgtgatgctggagaacttggctcttttaacctctctaggtaaggttcttttaccctttcctgtgccctgagctagtctgtgcccttcctcttttctctataggcaggtctgtccttctcatgacaagactatgggctctgcttctttctcagttccctgcatagttctgtcattggtaagactaaggtgtgcatactgtcttctcctctccttgaggagccccagtacctgtttcctcacagcctcacagggaaggattcagagtctgcagtcttgcagtcaccctagtggatcccacct

SEQ ID NO: 249720 - DNA, 587 bp, Homo sapiens
ccacgaaggcgtgaggggagtcgtcgtccctcctgcacgaaagcgtctaagccttggcgacgccgccctgggggacccacgtcaggcctgggatagggaccgctgtccccgggtccctaccaatgtcgcccgtcgctcccggcccagctctacccgcagagtctgatggcagcggccactctgaggacgccaactcagggcactgtgacctttgaagatgtggccgtacacttctcctgggaggaatggggtctccttgatgaggctcaaagatgcctgtaccgtgatgtgatgctggagaacttggctcttttaacctctctaggtaaggttcttttaccctttcctgtgccctgagctagtctgtgcccttcctcttttctctataggcaggtctgtccttctcatgacaagactatgggctctgcttctttctcagttccctgcatagttctgtcattggtaagactaaggtgtgcatactgtcttctcctctccttgaggagccccagtacctgtttcctcacagcctcacagggaaggattcagagtctgcagtcttgcagtcaccctagtggatcccacct

SEQ ID NO: 249721 - DNA, 305 bp, Homo sapiens
gagcgccgttggttccgtcatagcagctgtcggagtgggggttcctccccagcgtccaggcggcctggtggtcctgagaagccccgggctcgccgtgccctgcccccacgctcccgccccgaggccgcccgccgccgcccgggctgtcctccagccacggatggggacgtccagaaaggcccggaatgcccggcactgcggctcgttttcttcctttctggtgcttgtttctgtgtgttactaagacagttcatgtgtgtcatttgtgaaacttgatcataaaaatgtgtcgttgttgccatacc

SEQ ID NO: 249722 - DNA, 362 bp, Homo sapiens
gctagtttttgtattttgtatttttggtagggttttgccatgttggtcagggtgatcttgaactcctgacctcaggtgatccacctgccttggcctcccaaagtactgggattacaggtatgagccaccacgcccagccagctctgctcttataaatatgacctaaagtgttgaagtctcatttccaacttatgcaaaatttagattccttcaaagcctgattttctgtaattctaataatttcatcacaattaggactttgaaaccaatgcatcagatacgttgaatattgtgtttttctttcctaaaatatattcagctgtttatggataaatacgtagaaaattgcaggtaaaaaaaat

SEQ ID NO: 249723 - DNA, 725 bp, Homo sapiens
gattttggagtttctatgattgctccttttagggatttcccatcttgacttctaaccactctgacagcccaaactccattctctgactcctcagataggtaagactatgacattctgcctgagtcctacctgcccagtgccatggacaggggagtgcactcaggtaaagttgtataaacatgcatatctcctttacagcattgaatcccttacagttgctatcacggaaagtaatcattaggtgacatccccctatttaccctgaagttactgaaccatcttccctggatttgtgcagggtgtctcctaatttacgaagattccaattagattgggagtatgacttaactcatttaagtcacccaaatgctatttgatcataatttagtgtcttgttaacctaatggcttgaaataaattgacgcacttctgaaaatagggtaaaaatccctgatttttcaaggaggctaatcttccgtaaatgctaagcactatagaatcaattatgttattaatttgctcttggttgcaagctacaaagcttgatcaggctaattacagattatgctctgaggaaaatatttttatatgcactatttttttcttgcaggcactttaatatgaggttttaaaaaaccttacttaagacaaataaaaaagaaaaccttcatgtaattactttacctgcaggctaatttttaaatacttcaacaccgtaacaatta

SEQ ID NO: 249724 - DNA, 1182 bp, Homo sapiens
atctcccaagattgggtgcattagaccctttgtcatcacacccagtactccccacgtttattgagcgctcacgatgcgtcaggccctagtggaagcctttatgcacattatcttctttctcatttaattatcaagtagagcccacaaggtaggtactaccttttttttaacttttgagacagggtctcactgtatctcccagactggaatacagtggcgcaaacacagctcactgcagtctcatcctgggctcaagcaatcctcccatctcagcctcctgagtagctgggaccacaggcagatgcctgttgcccaggctggtctccaactcctgggctcaagccgttctaccttagcctcctaaagtgcagggattacaggtgtgcaactgtgcccggcctgggtagttactaatattatcccattttacagatgaagaaacaaggacatataggggttacttgcccaaacccagacaataagctagatctgaaagtcatcagcctgacctcagagttgtacttttaaccattatcagggtctcaggccagtacccactgatgaaacacataagtaacttagtgggtcattaccaacatttcattaaagaaatagaaaatggcagagaacatcaaacttagtaaggctcttgtttcgtgaaacttgtcagattctctaatatgataaatactaaatcttacaaacattgaaaatacaaaattaaacaaaatattaccaaggttaacacaaaagtatgaatactgcagatctgatttattttactatcctcatctttaatgcagaaccttcttaggattaaatgacatttaccattccgagcaaactgaggttactgccccaaacggactgggcttacctttgcaggagaacaggggaggctgtgttttggctggagatttttggctaagagtcaagacacagagattcttctgctaccactgtgaacacatcgagtccctttcacatagatgctgtttccacaagggtctccccacacccttccctacagattagattcccgtgatgccttatttaattcttgttggatctgttgatttggttatgaagtaggtgaaattctggtaacctcacccaggttccttcccctcttgattagatccagccagtctgttcgctggatgattaaatttggcattcatt

SEQ ID NO: 249725 - DNA, 525 bp, Homo sapiens
cattgaaattgggaagaagaaacattggagagcatgtcaagacacaaggggctcagggtacagcataattttgctttaattctacagcatgttttcaccaagggtggtaggagatagagatgaagtatagattttacagacattacatcgtgttcctaaaaacagacggaaaagtgatcataataacccataaacactgtagaacaagaactaacgagaccgctgatgtagaaattactttcctcaaggaagagggattgtcaggcagaaaggagggaaaataagaagttatttaggtaattttgttgtttcttctgaggaaacgtgagttcagatgcatattcaaatattttcctaaaagaagatttgattttggctgctttaggaaccaatggaagcaggaaggactcctagaattgggataaaccacagtgactcattactcctctttgttactcttgggcatcagagatatatgttttgttgatattagttattcaagtgaaataaacatgaatatacata

SEQ ID NO: 249726 - DNA, 364 bp, Homo sapiens
tcccaagtagctcggattacaggagtccaccatcacgcccagctaatttttgtatttttagtagagacagggtttcaccatgttggccaggctgggcttcaactcctgacctcaggtaatccacccacctcagcctctcaaattgctgggattacagccatgagccactgcgcccggccagcaatttttaaaataataaaagtctccctcaaattagaaattcaacaagaatcaacttcaaagctgaaaaatgaattgtacacataatatatgctattgccatatggcagttagtgtttccctagtaaacaaacacacccttgccaaggtgaggctggaacagtgagcggcaggaccttatccc

SEQ ID NO: 249727 - DNA, 362 bp, Homo sapiens
tgagatgaaatatgtaaatatgtcaagagaaattataaatgaaactgccaacagtgactacatctggagggtggaactagggggaatcagggactttaactcatgtttatttaaaattattttgaatagagattatatttatctgatataaagttattaagatataaaatagtataccatggaaagtgtcccttcttgctctgtcccccagatactcagtttctctccccagaggcaaccgtgattaactgtttctggcataactcccaagatattggatgcaggtaaaaacaaatgcctattttttcctgtttttctacacaaaaggtaatgcatcatgtcacttttaaaacaaaaaaaaa

SEQ ID NO: 249728 - DNA, 280 bp, Homo sapiens
ccctactttctaactttttccccctcatgatgtgtgtaaatcagttatccttcggtttaacattcacgaaatctatttgactgtaaacagtcagaaaaaggaaacaaaacagttcaaaaaaagtaaatggagttggttgtgtatgttttactaggatgtctattttaaatgtaattgactttgcaattttgttattgtgtcaccaagtgtctcatagttcttaacatgtaagtgcaaaacaatgagtaattgctgttttgctgaataatacatctgagtt

SEQ ID NO: 249729 - DNA, 483 bp, Homo sapiens
ttcattaaaaagaattccgttgctatatttataatttatttgtctaataagtaatgttacagtgacatttaaatggaaaaatacagtcttttttccctttctgtcatttatacttttaggaaatcttggctttttgaatcttgagcccataatcaaggcaccaagaactgtttgggggtaacaactctgagtgcaggcaaaagatccaagaaggataaaagggactcttgagtgctgttcacacagatgttaaaagtacaaatgactttgcccagctctgctttcccatcctgtactaatacgggggtggtggcagtggtggcgttccccgagtaggaggcccacagaacatggaaagagcctgtcgacagcacataaaagacacacactgaaaacactgctcgcaggaggagtgaagcttgtcaaagtactgcagaggctgggaaagtgaagagaagagaaggagcaattatagcccgcacc

SEQ ID NO: 249730 - DNA, 515 bp, Homo sapiens
gggcccttacaaataatactgccacagatattcttacagctcctgtgaatgtgtgcaggaatttttctagaagatatacttagaaggggaaaaaatgcaaattatagggaatgcaaattcataagaaaatgccaacttgttttccaaagtggtcataccactatgattatccatttcattctctctgctcatccatttcctcccttgtactgtaaaactttgagtgatcagtttaaaggattgttgcaatacttactttgaaaaccaaatgagttaacatatgtaagatgcttagcataagacctgacacatacatgctaaaaagtactagttctttctataataaataccttctcccttccctgcattctcttttgcctggaatcactaatgttacatgctagttggcttagccttgtttcacaatggagttcagttacattgttcatattttagaggcaaaaaaaaaaacaaaacaaaactgaggctcataaaggagatgaaatgtgattata

SEQ ID NO: 249731 - DNA, 598 bp, Homo sapiens
aggtcaaggtggaaggaacacttgagcccaggagttcgagactagcctgggcaacatagtgagaccccatttttacaaaaaatagaattagctgggtgtggtggcacacacctgtagtcccagcaacttaggaggctgaagtgagaggattgcatggctccaggaagttgaaactgcagtgaactgtggtcacgctattacactccagcctgggtgacagactgaatccctgtctcaaaaaggaaaaggtaagaaaattaccttgggctcaggtagaagtcatgcttgcatttttcatcaggaattacatcttttgagcagagttgagtagttgattttggaattgtgccatttgtatatgccacagcatttttgccaacacatatattttggccctaaaaatagacagtgaaaaagagatgggattgcttctctttcgattgttggcagacctattgggtaacatttaatcattttgggctggacacggtggctcctgcctgtactcgcagcactttgggagaccatggcaggcggatcacttgaggtcaggagtttgagagcagtgtggccaacatggcgaaaccctgtctctacc

SEQ ID NO: 249732 - DNA, 492 bp, Homo sapiens
ttctgacagtcttctatttcttgtctaaaattaaaatcctttatgatttttcaaactttagtagcaatttgtctagccctagaaatccaaccctctccatttgaatgttatacttctactttaatgcgattagcataacaaaattaagtcctaaagaggccaaaatttgtactttgtcgttagtagtgattatccttccaaataaaaccttaaggtgtcaacaaggaataccccaaagataggagaacaaattacactgatttaagtggtggggctcttcaactaacaagataaagtggtcaagcaactttcccctcttaaaatgttactagaaactggtgaaatgctttgaaaggtctggatgttttcaatgggctctgttctactggttcatgaatgccttttttttgttgttgttaaagctaatacaacgacttgggctttttaaaaatcttctttcctattcacgattaaaaatgtgataaatcaggt

SEQ ID NO: 249733 - DNA, 137 bp, Homo sapiens
ctgactaattttatatggtctatggaccaagtgccaggcaatgtgcaagccattggtggtaagtagtgatcaagcagacgtgtcgcttctcctcgtggactttgtagtctttgtggtaggctgaagaatgccccccc

SEQ ID NO: 249734 - DNA, 466 bp, Homo sapiens
atcacatcacacgaagtgccatcagtttccaaattttatgttaaaagtatataagtagattctgcttaaagacaaccaatcttggtgtagaagaagggaaatggaattcagatttattgagcacaatctatggtattttacatgcatgatagcaaaacctcatacagtgtactcctgaagggtacagtggttaagagtgggtgcctgagctgtgttgcctagggtctgaattccctcttggctacttactagccatgtatcttggtgcagattatgtaaactctctctgctatcactttcatcattataaatagtaaaatagggttattgtaaatataaaatgggttaatttctacaatgcatttgcagcagtgcctggcatatagttcgaattaaatgttatcatttccactttactgatgtgtaaacagaagctcaaatataaagacaattgccttaatttata

SEQ ID NO: 249735 - DNA, 383 bp, Homo sapiens
agctttgctgtcgttgaacttggctttttgggaattatgaaatagcatcatagagctttagggtacaaaattgcattcaaagtttattcgttttggctgggcacggtggctcatgcctgtaatcccaacactttgggaggccgaggcaggcagatcacttgaggtcaggagttcgagaccagcgtggccagcatgacgaaacccagtctctactaaaatacaaaacattagccggacgtggtggtatgtgcctgtaatcccagctactcaggaggctgaaacatgaaaatcgcttgaacttgggaggtagaggttgcagtgagctgagatcctgccatcacactccagcctggatgacagaatgagactctgtctcaaaaaaa

SEQ ID NO: 249736 - DNA, 631 bp, Homo sapiens
cgccttgatcatggactcctgggctccggaactgtaagaaaatttgtgttgtggaagccacccagcccatggtatttcgttatggcagcctgagcagaggtggtagctatgtggacagtttttggacttctctattgtaacacaggaggcaacacagattcttcaagtctcacagctactccctagggatcactggggaacttggaaaaaatctattggctcagctagtgagcgatcacttcctgtaccactgttctgagggcggacttccagctcaggatcatgcgagggcattttgttgcccttcatcactcagcagtgaagaatgaaaatcaacagagctttccccagcctgctgcttaagcagctgctagcaggctgaggctgcccagcctcattaacccattagatgctgcgttcgcccgggagtcattcttaatgaggctgctgcagatgagaaaacagaagcaaaggcagaaagatgctacattgccagctttgaagatggagggaagaggtcacaaaccaaggaagcaagacggccctcaccagatgccagcacctcctgtgatattggactttccagcctccagattcatgagaaataaatttctattgtttataaattaaa

SEQ ID NO: 249737 - DNA, 367 bp, Homo sapiens
attcacagcgatgggagacctggtccagccctgtccattgtgacccacacctcctcaggactgagcagaaagagctgctgcaataaacagtttgactatcattcctgaagtgccagagtttgagcaaacatcacataagtgtgctgcagaaatgagagagtgcacaacgtgccaaatgtactaacattctaaaagcagaattgggaacacatttaatgaaaaaaatcattcagacttcagcactatacctcagcaagtaatttgagtaaaaactgaatactgaaggtgtttatttcaacttgattattctttattacattgcattactgttttatactgattaaaatgctgactttctatgttaata

SEQ ID NO: 249738 - DNA, 368 bp, Homo sapiens
tattatgcctgtgtcaaaattacatgggctgcttgttaaaaaaaatacaggttcctgggactcatccaaggttaatgaattacgctctcttggggcgggatttgggactctacatttttgaactgcctcaagtgctttttaagtgtgccttaaaatttgagatccactgacataaagggaaagcagaagaagaggaatctgtgacagaggcagagagggacttgcctgagttaagaggaacccagaggccggcgcggtggctcacacctgtaatcccagcactttgggaggccgaggtgggtggatctcttgagctcatgagtttgataccagcatgggcaacatgacataaccccatctctacaaaa

SEQ ID NO: 249739 - DNA, 537 bp, Homo sapiens
gatttgaaagctgatgaacgtagctatgaagagctttatgatgaaaagggttattactggcctcccatctactggcttatctttttttattctttaagtcatgtgacaaatgagggttctgataggattgtctttggtgtggtttcatgagttgacataattaagagccatttccatttggcaatgctgcaagaaaaacatttccagtcagaagaacaaggaaataacttaattagcaactcaggtgagcgctggctctttagaaagatgttaagattggagggaagacaggagacccacagaggcagcgtgccacagttgggtgtttagccaaagacacgttcttctgtctctttcctcctgcatgagtcttttctgactgttcacctgaaattggatatggaagggctctgctgctgctgctgccagcctggtagacagaaaacgtcagtgtcaaagaaaaatgattgtgtgtttggttccctccagttttcacgaaataaacatcacttggcaattccttggaaaaaaaaaagc

SEQ ID NO: 249740 - DNA, 569 bp, Homo sapiens
ttttttaactgatgtacttatatgtgaccatgaaagtcagtgcttgcttcctttaaagattctttggcttttaaggcacatgaatctatttatattattgtgtctctcaattatttgggcagagcattaacctgcaaggttcttatatgtatactcttaaacacatactctctctctctctaaataaaggaaaaaagtccttgttatatcataatctctaacattgacttttaatacattcagagtagtacttagaagactgccatgacaggccgggcacggtggctcacacctgtaatcccccagcactttgggaggcggaggcagacggatcacttcaggccaggagttcaagaccagcccggtaaacatggtgaagccccatctctactaaaaataataataataaaaatagctgggcatggaggcacaggcctgtaatcccagctactcgggaggctgaggcgagaggatcgcttgaacctaggaggaagaagctgtagtgagctgagattatgccaccgcactccagcctgggagtgataagtgagactctgtctcaatttaaa

SEQ ID NO: 249741 - DNA, 501 bp, Homo sapiens
tgggcggatcacctgaggtcaggagtttgagaccagcctggccaacacagtgaaaccctgccgctactaaaaatacaaaaattagctgggtgtggtggcaggtgtctgtagtcccagccactcaggaggccgaggcaggataatcgctttaacctgagtggcagaggttgcagtgagccaagatcatgccactgcactccagcctgggcgacagagcaagactccgtctaaaaacaaaaacagaacaaacaaaaaaacttctcaactttttagctgctgctttctacttagctttatagccttttggtagctgcttccaaattggcaaatatctggagtccctgaagatgcttttggacaatggtctgaggttgggacagtggcaggagataccattcacccaggatctccaggacaagagatcagcctggcagttacatgtgttatttatcaaactggttgccaggttggcatgaacgatgacatcagagattccgagct

SEQ ID NO: 249742 - DNA, 477 bp, Homo sapiens
ctggttgggtaaaaacgccagctaatacaaagatgagtattaggaaaacccatagatattacagtatctataatatggaaacagttcagtgatggagaagcttcttccctggaaaattaaaggcattaagaatctggctggggcttctgcgaccagttctagcgagctctttggatcctctgcctgtaagatcctcagcatgccaacatctccagcactcacagcacttgctccatctcgctgcgaaaaggctgagcatgggtctgcatgattaccagctgctggtccagccactgtgtagcctggtcttggtaccaacatcatttgtctgagtttctggccttgcccaccacttctggaatttttgttgggttatgtcttacttaataatttttagtgtttttttttaaacatgtattttctggataagagtcctttgttggttatatgtattaccaaatagcttctacttctatt

SEQ ID NO: 249743 - DNA, 489 bp, Homo sapiens
caggaccatggcctgcataccttgttgttgttgttgttgttgagtattccctaaaaggagttttgaaattgtgtactcccttgtacttgtcaagtcgacatctaacgttttatcataaatttaaatagttgcagaggatgtcatttccatcatattgtaaatagtgacattttaaaataaaattacaccgctctttcaaaaatatccaaaagaatgcaaaaccagacggacatgacacccattaaaatctatctgatagtatgtgaacaggttcttaagagttgtgccatgattttactttgttcttttttcccttttgtttctactcttttttctacttcctctatggaattttattctaatttaatatacgtttatgtttagaaacttctatcaatcattatagctttaaaaatttcctgataccgtaagcctcatgtgtaaaaatttctttctggtaagttaccattaaaatatatctggtgtgca

SEQ ID NO: 249744 - DNA, 197 bp, Homo sapiens
ttattgtacttactaattttgaatatagatgtcttgcttttattgctccactgggggaaaatatttgtaacatatttttaaaaatattttcaagggacattttgtagtattttttagtaaactgaaatacagatgcctgacaatttcacttctagaagtttatcatacagaaatatatctatttgtcatatagaatt

SEQ ID NO: 249745 - DNA, 368 bp, Homo sapiens
aatgatgaaattggtgggaggagactagagaagtcattgcaatttggcaattggtctgaaaacgtggcctgactcttagatataaatgataataaaatctcctaagattatgtaggccacatgtctctgccttcccgatcttcatttctattatcctaagacccagaggcctgactacggagggaaatgagtcctcattagtggtaagaatattgtatttgtgtgttacatgtcttttaaatgtctttttcccctttccatatgaacattttgatgcccatacttagtattttcatttcggtatcttcagcgtcccttagaacataatgcctaggtctgcattaaataaatgcatgcgaatgaatgaa

SEQ ID NO: 249746 - DNA, 347 bp, Homo sapiens
cgcttcctccacggagtgggactttggacaagtcgccgcccctgtctgagcctcgggttcgtgctccgtcatctacacgatggcacccacatcaacaagtatttatggagcgcctaccgtttgctcgtaggtgcggtttggcggttcaggtcccactgtgggaggaacacgagaattcattacagatactggagcagggacagggcctcgctgaaaagaaccattccggctttaacagataaaattttgtatataaagttagtaaggacaacacagtgagactgcctctctacaaaaaaatacaaaaatttgtgtacacacggacataaaagaataaaaagtacaaa

SEQ ID NO: 249747 - DNA, 467 bp, Homo sapiens
agatgaagaaatggaagctccagagttgaagaaatgtgtcttcactcccacaagtaatcttgaagttccgagccaccatgagagttttcctgacactgaggtaatttcctaccatgttgacaccaccttgcgccagtgttcaagaccatcacagctatgaaccttgttggcttgtatcagatgcctgctgggaccttggctgcccatagtgctctctaaagactccagctttccataactcctacagttttaagttcaaggaatgatgaagaggacgccaatgtacggatttgatttaccaaatcaggcctgtacagcagctgaatcaacctatgggaaaattttggctctctttaacattctaatttttgagaacaccattgcaaatacatgatttccaaaataataacaatgcacttaattaatcacattatagatcatcatataaaaataaatacctaaataga

SEQ ID NO: 249748 - DNA, 456 bp, Homo sapiens
caaaaagtagtgtctcatctcattttctaaagctaaaatgcttccaaataccttattctattccctgtaattcatatattatattttactttcttccccaaatactacagaattgaaaagagaacatttaaaaatacaatgacacttaggaaagtaaagaaagctaattttatattgaacaatcatcagattaaaaattacttattgaggctggacatggtggctcatgcctgtaatcccagcactttgggaggccgaggcgaggcggactgcttgagcccgggagttcgaggccagcctgggcaacaaagtgagacctcttctctacaaaagaaaaatttaaaagtgaggcaggaggattgtttgagcccaggaggtcacgactgcaataagctgtcatcgtgccactgcactcccacctgaacgacaggagtgagaccctgtctcaaaaaaaaa

SEQ ID NO: 249749 - DNA, 214 bp, Homo sapiens
ttgaagcaatattaaatccctaggagtttagctagaacagtgtgacagcttttttttcccttaatgttgctgttttatgcagactactttaaataaatcatattcttttggaataatcctccagagtcacccttttaaagttttgtagtcttttaaaactactcagaatgtgattgactcagtggcttatcttccattctactaatatttacca

SEQ ID NO: 249750 - DNA, 317 bp, Homo sapiens
ttaaagctccccatggaggtctaaagtgcagagccactgccctagttgagaaactttagctctcttccagtgctagaattttagaacaaactgaatttcctattgttgcatatgaaagtcttcatatcttttataattcctataaagtttaaaattatgtttatgcctttcttgatatagtaaattgttttgttactgtccttgcatgtttctttttatgtattatcttatacttttgcagtcatgtgcattttagtgaatttttgtttttgcagcagcctcaaatattgcatgtaactcttaacaatataattaaa

SEQ ID NO: 249751 - DNA, 404 bp, Homo sapiens
gtgatgagtatgtcagattgcttactggtagtaatcatttcactatggatatgtatatcaaaacatcatgtcatacatgttaaagttatgccataaaaatagctatatgtgggccaggccaggcatggtggcttatgcctgtaataccagcattttgggaggctgaggcaggaggattgcttgaggccaggagtttaagaccagcctgggcaacgtagtgagaaacctgtctctccaaaaatgtttttaaaagttatctgcgtgtggtagtgcatgcctgtgatcccagctacttgggaggctgaggcaagaggattgcttgagcccgaaaggtagaggctgcagtgacctgcgattgcaccactgcactccagcctgcgtgacagagtgagaccctgtctctt

SEQ ID NO: 249752 - DNA, 344 bp, Homo sapiens
caaaaaaaaaaaaatgttcaggagaggcctgtccacaagggcagaaagcggactcgcgggtgctggaaactggaagaggggaaaatggaaagcgattgctaaattgggaaccaggtttttttggggtgagtggtaatggaatgttctggaattagagattccagaaatttatgatggtcacataactttctggttataaattgtacactttaaaacaatgattggccaggtgcggtggctcataactgtaatcccagcagtttgggaggcagagggaggaggatcaattgaggccaggagttcaagactagcctggccaacatagtgagacccggactcaactg

SEQ ID NO: 249753 - DNA, 372 bp, Homo sapiens
acactgggttgttctgcagggagtcagtttgttatagttttcttcctctactttttttcatcagctatactttgttcagtaataattcacatgactttatacaaaacagcacagatttagaaagaccaaggtaattttttttttgtataaatttatgggagccaggtgcagtggcccaccccagtaatcctaggctggggcagtagggtctcttgagcccaggagtttgagaccagcctggcaaaatagcaagaccctatttctacaaacaattttaaaaattcgctgggagtggtggcatgtgcctgtagtcctagctactcaggaggctaaggggagagaatcacttgtgcccaggagttccaggcttta

SEQ ID NO: 249754 - DNA, 473 bp, Homo sapiens
aattaacttctgctatttctatgtatactagaaaatttttcagcatgaatggaaaacctgttatataaaatgaattccatctattttagacatattgtggacattattatagctaaataaactaaaatgtattttaaattgtgttattataaatatgttattttaaaaggctataaaagttattaagtgttgctcggtgccatggctcatgcctataatcccagcactttgtgaggccgaggcggtggatcacctgaggtcaggagtttgagaccagcctggctaacatgataaaaccccgtctctactaaaaattcaaaattagccaggtgtggtggcgagtgcctgtagtcccagctatttgggaggctgagacaggagaatcacttgaacccgggaggtggaggctgcagtgagccaacttcataccactgtactccagcctgggcaagacagagcgagactctgcctca

SEQ ID NO: 249755 - DNA, 480 bp, Homo sapiens
agcgaattggattagagcccatcctaatgacctcattttaacttgattaccactgtaaaaatactgtctccaaataaggttacattctgaagtgctaggggttaggtcttcaagatgatatattttttgagggatcctattcagctcacatcaggtgccaccatcccagaggcatcgtaaatagtgagagactggggataggaaagatcttacctgattagtaaaagtgcaagatgaggaaacaggttcaccccatgctccccattttgtttttactattatctctttgtctgaagcagggccgagctgggggaggagagtcacttttcttttaaatggaattcagagttgtgactgttacacagaatcagacgttttaggtcctgaagtgagaatgttttctgtgattagaagtgacaacacaactttttaatttttatgttttaaataagagagtaatgagaaaatacaaaaaccaaa

SEQ ID NO: 249756 - DNA, 378 bp, Homo sapiens
caagtcaagcctgactgtcaggatccccagcctttctctctcctggctgagtgaacttgggaaaatccattaatctctccaacgttcagcttccttgtctacaaaatgggcgtaataatagtgcctacctcacatgggcaaagggattcattaggtaaagcccttagtctattgcctggcacatatcactcaatgaatgtttgtttttcttgttattagttgtaaagatgattttaagggagattttctctttgctgtaagacaaactctctgtgtactcttcacagagggttagtgctattatgataaatcactcctgtctctttcttagaggcacctggacttgcagatactgtaatgaagtagtaaatcaataat

SEQ ID NO: 249757 - DNA, 1000 bp, Homo sapiens
ggaaccatggggcacagccccgggcgaccctcgggccggcgggggccttccgcttcctggcgtctttcttccccgccccgccggctgctggggaagcggcgggcgcccagtgcctggaggtcgctccctcgcctcctctggctgcgggaacggagaggcggcggcggccggagcagggtgggcggcctgagccgagagcccggccggcccccgcgaggaatatggcgacctgcggcgaccggagcagcagcggcgtcagttgctgcaccgccgacttcttggagcagcgaaagcgactcgcgagaagacgccgccaagtggaacccgggccctgcggccctgggagggggcagcaccgacacagccatgaagccccgggcgcggcgctgggcgccaacgagagccacggcaacctccagacggcgccacagcaacctctaggcagtgcccacaccagcctacaggtggcgcccctcgcactgcacctgccgcggccgccccgggtgtgaactgcgctgtcagcagggccgcgctgacacgggtggcccaggcccgcagcagccgaggagcccaggggcactgcccggggtgacgagaaggagaagacggtgccccagaaaaaggcaagagctcagagctcgggtccccgtgccaggaatggccaggagcagaagatggagaggtggagatggagaaggagaagcagcaggtgggaaggagcggcgctccaccggtggggtcaacatgcgctggctgagcttagagtatgaagaggatgaagcaagtcagaaagagcggaaacgagaaggtgcaatgacacagcagagcacaatgcagaatccagccctaggactccaataaaggctgggtttaattccaactcacaccctcccacccctaatcagagaggatcacaggagagagaggacccaaggaacactggaacctgaaggacaggaatctgaggccaagactgattgctggaaattgtgggaatcag

SEQ ID NO: 249758 - DNA, 312 bp, Homo sapiens
tccctataaaccgtgaaattttagaagaagtgacaaaacatacctatattgacagtgagttatttgcattgagatatatatgtccatatatatgtgcatatatttatacatttttttccggatatcaattttgtgatctgtcctttgcttctccttttttctcttgattcttaccttttgccattgacactgtttactggtgtctatagtaagaaatagtctagaaaaattaaatgagaggtttctaaaattgttatagtttggtatgtttggttaaagaataaaatgaattttaaaaaattcagccttaca

SEQ ID NO: 249759 - DNA, 464 bp, Homo sapiens
gatttgtttcattgattttacatatattaatagtgcaaagcactgtacaaatgccaaagagagattcctgccaaagatcctgccctagcagggtttgcaaccaaacagaacagaaaaacttaattaaacaagcaattacacaaattacttgtgcaattattaatcctgaactttatattatctcccttctgtgtggaacattcttccctcagctattcccacagcagggtaaatctcatcctcccagtcatcaatattgggcatgaggagcttccatggcctgtgattggacagcaattggtcttagctcaaagactgtttgctttttgtagaaaaaccaggcattatcttcctgcactcaaaataaggcttaattttttcttgactataatggtagtaaatgtcaattgcagtaaatctaacgcaagctggaaattataaaagaatatatataaatcatatgt

SEQ ID NO: 249760 - DNA, 370 bp, Homo sapiens
caggcatatatgcatgtgttcacaaagtgacatcaaggacatagaaacatgtttgtgatgtaatgttgagggaaacaagcaggtcacagaatgttacaggattttataaagatgtaaaggaattttactaaattatgggcaatcatactatggcatccttttttctgcacctttataactttctcttccttaaaagtatttaactgtgagatgtattttgtcaggaaaaaaagaaagaaagaacacagtgctagcattaaacattaaacattttttaaaaaacatttttacacttttaaattctaatggatatctactttgggccagtagagtaagagggaccagagttactttcccatctgaaacaaat

SEQ ID NO: 249761 - DNA, 755 bp, Homo sapiens
taggtaaaattattaatcataaagctatatgaatttattttattccatgttattttattattccatgttattatttatgtattgttaggaacatttgcttagaaatcatatttggacatagtatcagatactttacatcctttgaatcagttattttataacagtatatactaaacatcattactccttttcaaacataaataatgcaatacaaattggacaaaaaattcaggaaagatctgggatcaaaaaggaggtattgaaacatcacatgtactccataattatatacaaatattttgtacccataatatttaaaatacagaaaattaaaaggtacattttcctcaaagtgcatgctgcttttgctatgcaaaactgcaggatatggaaagaagtgtattaaaacactaaatcactttatgtggaagataaaagggatggtatccaatgtacgacttcatgtagtgcactgatacattcaatacaaatgatgtattaacttcaagataacatgagaaagttaaattatctaacttatttcaaactaggggatagtatgttctcattattagaagccagaattctgcttatccatttctattattagaaaaaaacataatttttattcttgtcttaaaaatagacaccttgatataattctctgtaaatgtagcatgatagtctgtttacagagtttatatcattccaagactgcacttctaaagtgagaaaatattaaaggatataaactc

SEQ ID NO: 249762 - DNA, 356 bp, Homo sapiens
aactaaacaaaaaatcatagtagatattagaaagtatatgaaatagaattgaactttaacatacattctatatatagtttgtgggatgtccttaaagccacgcatatagagagatttattgctctgaatgcatattaaaaacagaggtaaaaatcactgagccttagctcacttagatcctcacttacgatctatctcaagaagtcggaaaaagaacagcaaattaagcccaaaggaaatagaagcggctgggcatggtggctcatgcctggaatcccagcactttggagactgaggtgggtggatcatctgaggtcaggagttcaagaccagcttggccaacatggcaaaaccct

SEQ ID NO: 249763 - DNA, 551 bp, Homo sapiens
cccatggacttagaagccagtgctctgaaattgttccagtgttatacatgctaaattataaggatggataaagtaatctgactgaaaaatcaccaaggtgatcagagcaagacatccaaaggaaactatagaaatctatcatctgagtggccagtttggggttagatgtggcaaatttaagactgtcgccattagtgtaaattgacctttgttaaagattcctgcgccagggccttctgaatctgaaggactggaaataggtaccaagagtgtgtatttattgtaaagctcccaaggtgattcttatgcagccaatcctacaattgtccttggattaaagtttgggaatgatattatctaaaattaatataatcaactcaaggtggcagaggggaaatcaatcaaaccaattatttaaagttaatatataaagagatacactggttttggatgaatttcttttttaaaaaatattagctttgttggtattatttatacaaaaagggcctttcttcttccttaaataaaaacaatcaaaaagacaaatttgg

SEQ ID NO: 249764 - DNA, 664 bp, Homo sapiens
cattagcacattgaaatttatgattaggttaatgctagaaagagaatccaatattctcattgttgtgccttcttatagtacattcagaaaaatttaaattcccaataataagtaaaattgaatcaatatttttaggcagatacatggggaaatcaataataaaagattgcttactatatgtctggtactctactgattaaatactttaatggcatttaacttattgaattagtttttaaataaatatttaaattaaatagttaatagtatttaaatagtttaatgacttttactcaaagataagaagctgaattcattgactaattaatgactaacttgtcacacagctagtgggtggcagtcagtagttgaatttggatttctgtgactcaaagacctgtattcttaactgctgttttattatactgtggtttttgtgagattttaataacagacctctagattttaatgatagatctctttcattgtctgactcttatgtttatattcaaataaacttatattgttaaaaatgtcatcagtgccggctgggcatggtggctcacacctgtaatcccagcattttgggaggctgagatgggcagatcatgaagtcaagagatcaagaccagcctggcaacatggtgaaaccccgtctctacta

SEQ ID NO: 249765 - DNA, 618 bp, Homo sapiens
tcattgcagatggagccaagatggccgaataggaacagctccagtctacagctcccagcgtgagtgaggcagaagacgggtgatttctgcatttccaactgaggatctcactctgttacccagggtggagtgcaggggcatgaacacggatcactgcagcttcgacttcctggctcaagcaatccttccacttcctggctcaagcaatccttccacctcagcctcctaggtactggtaactgcatcctgggcaatatccccagctgaaagattacgcttcccagccttccttgcagctagacgtagccatatgacaaaatgacgcccaatgaagcatacatagaaaagtcatgtgagacttctggaaaagcttctgtaaaagtgaggagcagacacccttttctttttcttctcctttctcttgctgttggcctggaatgtggacctgatggatggagctctggcaatcatcttggagtatgaagtgaccttaaggatgaacagaaaagaaaatgagcctgggcctttaatgacacagtggagctgctcccagcttggctaccttcctcttagtctgcttttatacgaaaatatatatatatcttgtttaagcacaaa

SEQ ID NO: 249766 - DNA, 612 bp, Homo sapiens
cacagagagacagtccaccacctctaccctcttaactcttccttagaaatcctactgtctgcagctgggaatgaatggaatgaaggtcaaggatgaagatctcactctgttacccagggtggagtgcaggggcatgaacacggatcactgcagcttcgacttcctggctcaagcaatccttccacttcctggctcaagcaatccttccacctcagcctcctaggtactggtaactgcatcctgggcaatatccccagctgaaagattacgcttcccagccttccttgcagctagacgtagccatatgacaaaatgacgcccaatgaagcatacatagaaaagtcatgtgagacttctggaaaagcttctgtaaaagtgaggagcagacacccttttctttttcttctcctttctcttgctgttggcctggaatgtggacctgatggatggagctctggcaatcatcttggagtatgaagtgaccttaaggatgaacagaaaagaaaatgagcctgggcctttaatgacacagtggagctgctcccagcttggctaccttcctcttagtctgcttttatacgaaaatatatatatatcttgtttaagcacaaa

SEQ ID NO: 249767 - DNA, 662 bp, Homo sapiens
tcaacatctcatttctgtagatctccagttatatctattataatgtgacactgggattaggtcatctgccttgattactaccagtcccattagactagatgcctgtagaaggcagggtcctggcaaactatcaatgtattcaatttctttatatattattgagacagacttcccctgttccccaggctgaagtgcaaataaaagaataaaacaaaaggaaacataaactgctcctaaggggagaagaaaaggagcggaggagcggacacgacacttcccccagcaagcagacgtttctggttcttctctctctctccttcccacatcaaccacaaatgccatcgacctcctccgggttcccacgacagaggccacagttcaggtccccctcgcatcactcgaatccactgtcaaatgctccctgctggggtctcctggagtctctccccaagccagggggctccctagtgcagcctgaacatctttccacggcacgatgccctcactgcccacctgaacaacctccttagctgacatctttctaaatcgaggccagggtaacagtgccaattccaccctctctacaatctctacaaccacactggctcgccttcttggtgtttcctggcttggcttcactgctccttccaaatgtcctccac

SEQ ID NO: 249768 - DNA, 399 bp, Homo sapiens
tcagccagacatatgcctcacttgacagctaatctatttcttccaacacaaatgctgcagcattcatattatctataatgtaaagaaatggatgtcatagataagccttttgtctacagatatacaaagaaactttgcagtaagtctaaaattagacaagaatgttacactggtcaccttctgcaggtctttgatccacatcttcttccccataatcccagggtaggcacactgcagaccccttggaaaagtgcagccatccctacaggtccagtgctcacctggttatggaatttcctaggaataagaagtggagcccctgcacttctttttaagaaaaaacatgatctttggcacacctagatctgaaggataatacggcagtttaggccaagctac

SEQ ID NO: 249769 - DNA, 334 bp, Homo sapiens
ttgaaatgtaagaagttattttagttttgtttggaggtaaaataattagactagaaaataatggaaacttagcagtagaaatgttatctactaattttagtgtaattaaaatgttagccaggcgtggtggtgggcacctataatcccagctacttgggaggctgaggcaggagaattgcttgaacccgggaggcggaggttgcagtgagcccaagattgtgccactgcccttcagtctgggcgataaagcaagactctgtctcaaaaaacaaatgaacgaacaaataaataaagagcaaaaaatgtgtgtattttatagttgaataagaaaaaa

SEQ ID NO: 249770 - DNA, 881 bp, Homo sapiens
atggctaaaaacagattaagtcctcataataacagcttaccctgggtccagggtagaatgaacaacaaactcatacctagataaatgtagtcaaaacataaaatatagaaaaataattagtaaagtcttcagtaagaaaataacagattatctacaactggaagacaaaatagcagtatggaggaaactattgaaagatattattcagattcagtgttagacacaatgagtgcatgcagtaaaagtagaaagaaaattttgtttatcaaatagtatggaaaaaatggcagacagtgataagctaatatttatgaatttgggcttgatgcagagaattgtagaggaaatttaatgtcaaaatatgccagaaaacccatccttgaacaaggtatagataggggcaacaatttattagtggactggaaatgaacagattgaaaatgaattacctgtattttatccccaagtggaaaatttgtattctcccaatttgcttataattatgatttaaagattgcatctctttcacaatattttcttttgaatgtgacctcaaaatattaaaaattaaggatttggcaaaaataatggggcataaaacacattttctatataaaaggatgtgatttaagaaaattttaaaagtggataacatatatcaacaaaaatttgtaaatgggattgagtccctaaaacctggaaaaactgacatgggctagctatttattcactcatcgagttacttattccttcgtaaaaaaaaaaaaaaatcatttgagatgataaaaatggtagggtatagtttaagatgaactgaatgaaattgaacagtaaataaaataaccctgataggggttattttgaggacaagccccctagac

SEQ ID NO: 249771 - DNA, 658 bp, Homo sapiens
agaataaatacctaattcttcaatggccagacatcaataaacgtccacaagcatcaaaaccatccaggaaatcatgacttcaccaaatgaactaaataaggcaccagggaccaatcctggagagacagagacatgtgacctttcagacagagaatttagaatagctgttttgaggaaactcagtgaaaatcaagataacacagagaaggaattcagaattatatcagataaatttaacaaagagatttaaataactaaaaagaatcaaacagaaattctggaagtgaaaaatgcaattgatgtactgaagaatgcgtcagagtctgttagcagcagaattgatcaagcagaagaaagaattagtgagcttgaagatagactattcgaaaatacacagaggagacaaaagataagagttattggccccaatgaggaggtagagagatagaggtagaaagtttattcaaagggataataacagaacttcccaaagctagagaaagatatcaatattcaagtacaggaaggttatagaacacaaagaaggttaaacccaaataataatcaaactcccaaaaattaaagacatttaataatcaaactcccaaaagtcaagagtaaagaaaggatcctaaaagcaagagaaaagaaacaacat

SEQ ID NO: 249772 - DNA, 682 bp, Homo sapiens
cggtccctctatctgatcagatgtggtggggacagaaacgaataccagagccgaacaaacgggtcccaatgatcaatacaagttctactcagtgaatgtggattacagcaaatggaagaaagaaggttcagatttctacatgaaaggttttactataaagctcctttagaatgaaggtcttccagaagccatccgcacaattttccacttaacaggaaatatttctcctctaaatgcatgaaatcatgtcgaggtaatctactggagattacactgattaataaataactgaaagttgaaaaaaaaacccaaaaaacccagcatctggctatgttgcctaggctgttcttagacttctggcccctcgtgatccgcctgccttagcctcccaaagtgctgggattacaggtgtgagccaccacacctggccgattttccgattcttaaagaagcttgttaaaaatgttttgacggtcttttctagttctgagctggaaagtagtctgaatgccctagtctcacataactggaacagaattgaggagccaagatttgaattcaactgtatcttaacttcaaggtctatgcttttaaccatttattatatgtattaatccattttcacactgctgataaagacatacccaagactgggcaatttacacaacaaaaaagtttattg

SEQ ID NO: 249773 - DNA, 466 bp, Homo sapiens
tgcctcccaggttcacaccattctcctgcctcagtctccccagtagctgggactacaggcacccaccaccacgcccggctaattttttatatttttagtagagacagggtttcaccgtgttagccaggatggtctcgatctcctgacctcgtgatccgcctgccttagcctcccaaagtgctgggattacaggtgtgagccaccacacctggccgattttccgattcttaaagaagcttgttaaaaatgttttgacggtcttttctagttctgagctggaaagtagtctgaatgccctagtctcacataactggaacagaattgaggagccaagatttgaattcaactgtatcttaacttcaaggtctatgcttttaaccatttattatatgtattaatccattttcacactgctgataaagacatacccaagactgggcaatttacacaacaaaaaagtttattg

SEQ ID NO: 249774 - DNA, 421 bp, Homo sapiens
gtcaaggggagggtcaggtggaggcagccagctgtgagtgaggaacagcacaagactgctgagaagctgatattaagaaggcagagccagatggccagacagaagcttctaccaaacctcctcctcacaggagcaccagattggacaaccatccacacaaaaaagtaccttcatgagaaccacaattcaggttcttaccaagccagataagtggttgtcatggagacgatacgttgtgacaacaactgtgatgccaggtgttcagagcagcacactggcaccccactcccagagaggatgctgaagcagattgaatcacttcaggagaaaagcacacttaggcacgaagccctggcttttcttcttctttcttctgtgtctataatgtgttttatcttaaataaaacttcataaatgccat

SEQ ID NO: 249775 - DNA, 473 bp, Homo sapiens
tacatatgagtgcataatagtttttaattttaggatttagtgtaaatttagttttcataaataagatagtcatatccacatttaatatttttttctaataattcagtatctcttttaatgatttcttcactggtttgggttttcctaccctgtttaagaatgataatctacaagacttccctactgactactctgggtttgttactctttggagattatgttttttaaatcatttaaacagctaagagttaacagatttcagaccttgcttactatgcatttatagcagatattttatttaagaagtatttcataactagaaatactacaagaacactaagaatatagtttcagccaggtgaggtggctcatgctttgtaatcccagtgctttgcaaagctgaggcaggaaggtcacttgaggctaggagttcaagaccagcctgggcaacatagtgagacccgtctgtacca

SEQ ID NO: 249776 - DNA, 388 bp, Homo sapiens
caatgagtcaagctaacgactacatttcccagagtagcaagatttgcagcaagacgtgcaatgtgactaagttctggtcaaagtaatgtattcaggaatgtgtgttacttgctggaagtctttttaagaaaggagggagcagaactttcttcttcttgctatttggaatgcagtggaatgcctagaactgaagaagccatcttcaaccataagtcaacacaccaagtcaacatgtgtgttgcaagaaaaaaagtatgctggttttctaatgatcctggagccatgaaattagttctagactgcctacttctggatatcttccctgtgagaggaaataaaactcttttcttgtttataacactgctactctgctgtttggtcacttgca

SEQ ID NO: 249777 - DNA, 526 bp, Homo sapiens
actatatgatcctcatcaggccaatccacgtcacagaatggtctaggcattggatgagtgcctcaatctgagccaatgaaggtcattgctgagacattttactggttgccaggctgcaggcatcccaggcttcctgctgccctcatgtctacaacctgtcgtctggaacattccaggagccacttttatcacttgcagcaatcttcttcagtgagttccccaggacttgatttcatcttacaatctgattccatgtgtctcccatattttaaggattctttattatttctggcttacagagaacaaacattattttttgctttcctggtctgttctagattttcaaaaataactctgtcacttctgttatatggtatcattgcttgtaattatctatttacttatctgtctctggactggactctttacagacaggcaataactaattatctgtctgtctggcatttggtagtcactcataaatcgtttattgcattactaactaaataaaaaagttgaccttgca

SEQ ID NO: 249778 - DNA, 289 bp, Homo sapiens
cttgaattaggaatcacataaggataaattcttatgacatttactcaacactctattggaggtctaagttaatgcagtaaagcaagtaaaagacctaaaagacacaaaggctggaaaagatgaaacaactgtcattattcatagttatgagtgcatatgtgattaatccaaaaaaaccacagatacatacttaaaaatcaatcatgaagattaacaaagttgttggatacaaggtcaatatataaaaattaattatatttctagatactggcagcataaagttagaaaa

SEQ ID NO: 249779 - DNA, 426 bp, Homo sapiens
caatgtaaaagccctgtaacgacatcctgagtcatctatcttctttgttcagagctgactcctaaaatggaaggcaacacttgagaaatacctgtaatttgaagaacttctggtggtatatctgaaaaacagtgtggtataagttggaatggaccgatcaatggtttttcttttgtctatttttatatgcagttggcaataaaaaaaaaattactgttgggtgtgaaaaatgggcctggtagctgcaatgcttatattaatagtagtatcataggagagtaatcaaatgacttcagagtaataagaaaaataccccttagtgttatcaatggcctatttgaaattattttaataaatgaatcatctttcaaaatttgccctatatatgtatgtgcatttatgctctatataggtttaaaaaaaaaa

SEQ ID NO: 249780 - DNA, 488 bp, Homo sapiens
ggagtggatgacccggcccagaagtcggtagaaaagcacagggtcggaaagcactggaagaggcagaagcgacgccccgggagccccacagggggtcctttcagaaggagctcacctccgcagcactgacagggcccggccacccctcggcagtctgggtcaagcaccaggtcacctgaggatgggaggagtttgggattggaggaggcgagtaagggctgaagcaggaggtaaactgagccccggtcaggaggaccacgccaggtatcccaagggtctgaactacttcctgtgggaagtgggaattcgcttggggttctcgaggcgagggaaggacctgggtgtgacattctgttgccccacaaggctggctcataggggtcacttcctcggggtggcccacaggctctggcgtacagctgcctgtgtccttagcaagggttcccattttcgggtccctcacttccaagtctcctctatctggcctc

SEQ ID NO: 249781 - DNA, 302 bp, Homo sapiens
gcggatcaaagatggatttgagctctggatctgaaccaacgaacacacaatgacctatgaattttttggacaggaacattgaagatggcatgagctatccagtggagacacacatccatatgcatgtgcatttttatatatttttatgaaatgcatgacatgtcttaaaaagccatttatgtagtgtgtaggtgtgagtctatgaaagaattggaaatgaatgtatgcctcctttcactttgttgtttagtattccttaggaagaagcaatattgaataaaattttaactaattatccaaga

SEQ ID NO: 249782 - DNA, 246 bp, Homo sapiens
caatcttaacagtctctcttttttttttaattagttagaaactggaaatatttctaaagtttatttggatggaagtttagaagtgaatattgatttctcttatcttttccacagaaatactcatgggccaggcgtggtggctcacgcctgtaatcccagcactttgggaggccgaggcgggtggatcagttgaggccaggagtttgagaccagcctggccaacacggtgaaaccccgtctccacta

SEQ ID NO: 249783 - DNA, 373 bp, Homo sapiens
gacccggcttccctgggccgtgctcccttgagtcccagtctccctgggtccctcgtccccagccctggcgccttcttctgcagcgccgtcccgcaggcccctggacccggtggacgggctccctcggcacccccgcaggtcccgcgccctcttccctccttgcctcctcgtcccctcacgctgtcccttccttggggccccagcactccgtccctcccttgcaggaaatcgggcctatggcggggctgggtcggcggcagggcggaggtgagccgcatctgagtaaccgagtgatcggggaggctggggcgcggtcctccggggcccgattgctgcatggcgtgaagataggtgggtggacggctgtggggaa

SEQ ID NO: 249784 - DNA, 492 bp, Homo sapiens
ccatatggagctgtaactatatgagatgactgagggaagccagcgagagaaagacttggcagtgaggacggaatctcgtttacttggaagagtctggctgggtaggaattacgttcattgtccttttcagcaccttagcgctaagccagcccctcatgggagccaggccactggctgcttttaggccgccagggactagtgaggagtctggggtttctgcaggtacaacaccagtgccatgaaggtgagacatggtgacagaggaaggtgtctgacttcagagcagggagtggtttcaacttgaggattctggttgagtgaatattgaataacaaggcaatgctcccactctgtcttgctcttttcttccacgggcttggaaaatattcacaagggggaaaacttggcccgaggtgtgtatctgaaggttggtaatgacacgcttgcaaaattagatcatccttgtgcatgggctctggaggttcctgccaa

SEQ ID NO: 249785 - DNA, 451 bp, Homo sapiens
cactcatacagaacacaaacacacacatctatacacaccccataaatttctcccatgacactctcagtgcacacactatacacacactccccttcccccatgcccctggcaggtacagattgtaactttcccctacacccatcggcacacatctcactcctgtgctgctgtcacacacacacacacacacacacacacatctctgcccccgccattcagacagaacccagacttcaaaggccatagacccaaaggacggggtggggtagaggggagagcttcccagagcttatccctgccaagtgtggaaacccttcccaggaaggcaccttccatcagattactgttcaatgtgattaagcaggctggagccacttcaactacaagtgggaactgtgaaagctaccccatggtctaactaaagggttttcaagcttttgtgaccatgacc

SEQ ID NO: 249786 - DNA, 294 bp, Homo sapiens
tattgtttcattaaagactcgtagatgcttctgtccatgggagattgcattttggaggatttgctttagctttatattggatatgaggaggaatccacattttctttttcttcttcttttttttttatttcttaagactgggtcttgctctgtcacccaggctagggagcgcagtggtgtgatcatggttccctgcagccttgacatccctggctcaaatcatcctcccatctcagcctcctgagtagctgggactacaacaggcacatgtcaccatgcccagctaattttaaa

SEQ ID NO: 249787 - DNA, 415 bp, Homo sapiens
caagggaagtgatttttaattataccttctgtaagtacctgatattgtgcttaaaacatagaaaattaatcaaacaattcaactaaatggtaaattaccttagtgcttgtggaaatggaatttcatagaaaatgctaagtaaaatacaggaattgcttatcagagttttctttgcctgaagttgtaacttgcttgaattttctttgtcttttcatatacccttaggatttaggaggaaaaaaagaagatgcaacaaaattttagagtagaaagtgatttagaataaatatcactctagcttaaatattttgttctatagttttgatggtttatctccaatctaaaaatactgcaagggcatatgaaaaagttatcatatgtgtatgctaatattttatatatatattcaactatt

SEQ ID NO: 249788 - DNA, 255 bp, Homo sapiens
gggtcaatgaaggcctttttgtgggtccataaagatatagtcaagaaggtatatgaggtacacttccttcttgcatgttataaatgagggtgggttgatcccttccaaagcctctacatggaaatgatttagaaaatgacaggcgtggctgttgagtatttgcctttataagccagagggcactgaatgcaaattgaaaaagcataaattgattaaagtagagctagtatttctagaggaattttaaaggtgttt

SEQ ID NO: 249789 - DNA, 398 bp, Homo sapiens
agttaaattggtttttaacaaaaccaattttatcataggcttgtgaaagttagagataccaggaagaaatcacttttctcagacccaggcaaagtaggaccaggaaggtctgaaggagaggaggctcatgcttgcatatctgaaataagaactgtttccaaggactttctaaaaatcctttcatatccttcacaaatctcctgctttgataaggtttatcactagacattctttaggatttcagtaattcggttaagatgttcttgaaagaacacttgcatctccaccaaggaactgacaactctggctttgaacctctggaagtgatgaactctgtttccaagcagcttatgtaatctctttttgctaataaaagctcccctcacccttccctcact

SEQ ID NO: 249790 - DNA, 355 bp, Homo sapiens
gacgagaaaggcttttgaaaatgtgctccgatatgattatagcatgtaaaaatacatgtatttatttcacataaaaaatgtaagttgaactttgtaagagtacaaccactttgatttacctctgtattttttaaacactccagcctgggcaacagagcaagactccatctcaaaaaaaaagagcagctgcagatgaatgattccatttgaagtgactgctggcaggaaaactgggcaggagcctgttaaaatggctgtgtgtgatagctttagaagacttcgggtaaacaatgcacatagtacacagagcctaacacaaaataggagctcgttaaatatatgcagaaagaagaaa

SEQ ID NO: 249791 - DNA, 327 bp, Homo sapiens
attgagtcatgctatataaacatcacttgttttttaccttttatatgtactacatcactttgaaaatgtgatgacattgacccttttccccagaaaaatgaacattctcactaaattctgtagataatttctcggcattcatgaactacatgaagccattcatgggcaaggactccaggctaagaaccctggtagcttttttcaaaattttcaaaaatttaactcctgggctccttccatcttatccccagcatctgaacacctctccgtgccaataactgtttccaacaccatattcttctaatggctgtgttatgttctgcttta

SEQ ID NO: 249792 - DNA, 340 bp, Homo sapiens
atacatctgaagagttatgtgtgcatgtttgtgggggatgcaaggacctaattggccctagaaatctgaaacagggagaatcactgaagccaatgtccttaggcccagagctaacagttggctatgaaaacttgtactgacatttccctacctctgggaaggagattatacagttagttaatacgtattttgagtacagagataaattattcaattcagaaccattttttgagaacttactaggagtctgcttctagactaggcaccaggataataaagattagtacaatacaatcctttctctggaataactaccagtagcaagtgaaaaggtagaggc

SEQ ID NO: 249793 - DNA, 460 bp, Homo sapiens
tgcccagttcatggtattctgcaacagcagcctggcagactaatacaccagcattctcttcactagtgttcaagagttcaacaagtagaggagcatcacctctgtccacacagtttggatatctgtcctcacccaaatctcatgttgaattgtgatccccagtgctagaggtggggcctggcagaaggtgtgtggatcatgaggcggatccctcacggctcagagctgtctttgtgatagtgggttcccgcgagatctggtcatttagaagcgtgtggcacctctggcctctctctcgcctgctcctgctctcactatgtgactcgcctgctccctcttcacctgctgccatgagtaaaagctctctgaggcctccccagaagctgagtgatgtgggtgctatgcttcctgtaacccctgcagaactgtgagccaattaaatctctttttcttttttaga

SEQ ID NO: 249794 - DNA, 471 bp, Homo sapiens
cccagggaaaacagtgtctgtccccacggaaagaagaagggcagctggcagggccacttctgctgcaaaggtgattttactatgcagccactattaaaaaccacagatgttcattgatgatgatgatgatgatgatgatgatgatgatgatgatcatgatcatgatgatggtgatcatgatgatggtgatgaagacggcaatgactgcagaatttggggaagaggaagcctgaaggagtccacaaaacaatgtccttcaaatcagagtttattcaatgctgatttttcatttttctatggttctgtttggggacaagtcagtcaaataacttgaacctcagcgtcctcatctgcagaatgggaataataacagtttgtaaagttatcgtgaagatgacacaaaatgctggagacgttggacgtgctctatagaaaataatttctaaacaataaagaatattataataaaca

SEQ ID NO: 249795 - DNA, 361 bp, Homo sapiens
catctcttatgctgtttattgaatgactagccatgtgttttcctggggtgggaacagctgtggttaagagcatgagggtggccaggcgcagtggctcatgcctgtaatcctagaactttgggagacagaggcaggtagataatttgagctcaggggttcaaggccagcctgggcaacatggtaaaaccccatctctacaaaaaatacaaaaattagccaggtgaggtggcgcacgtctgtagtcccagctattctggaggctgaggtgggaggattgcctgagcccaggaggttgaggctgcagtgagctgtgattgtaccactgcactccagtgtgggcaagagagtgagaccctatctc

SEQ ID NO: 249796 - DNA, 534 bp, Homo sapiens
gcagaggaaggcggagaactgttcctgattaaaagagactggaaaaatgcaactgctaaaggcaatgtatggctctctattggatcttgggatcagggaagaaattgctacaaagaacatcattgggacaattgacaaaactggaatatggactgtagattagttgatagtatcagatcactgttaggttttatgaagtggataactgtgtgtggttctgtaagagaatgtccttgttcttaggaaataagaatactgggattgcaggcatgaggcaccgtgcccagccccattcactctgttcctgcttctgtttctgagacttcccagatgcatccaccctgggcctttgcacttgctgtttgctttacctggaggaaaccctctgcatctgccatactgcaggcctctccaccagccctcatctgcagttccttcctagccagacacttgcagttgtctggttcatttattggctcactcacttattttttgagagtctccagcctgggcgacagagacagactccatctc

SEQ ID NO: 249797 - DNA, 553 bp, Homo sapiens
agagtaagacatctctactcttccgtactcatttttttaagcaaatgaatgtattacttttgcgataaccattttagtacaaatattggcatattatggagtagaatactgagtagtaagcattggcaccgacaaagctgagaagccccagtggaagtgccatgtatttctggtgaacagtgtgcacttgcacctgtgtcagtgtcttctcccatcacccagacgcctctgctgtcatcacaagccacctggtacgggagtggctattgtggtaagtcataacccacagatagatcaacctaagaatcctggcctttctccactctccaccatgcaggacaaacatcttctcaagcagtcaacgtagaatgcttgggaaatagtcataattacccacatatagtaattaatagatggtaattaattgatccttgatgtgatgttcttttgcatatttccttcattctaaagttgttccctggccgggagcgttggctttcgcctgtaatcccaacactttggcaggccaggacagatcacttgaggtcaggag

SEQ ID NO: 249798 - DNA, 452 bp, Homo sapiens
acactgcgttcctgtctgacctcctggggttcctcatttacgtggtcggtgagctgttgagaggcttcaggaagtcaggagtgaggaggtctgcctagctctgtgaatgcagctttcctaagtttctctggccatggaaccactttcccagaatgcctgttgacatcttcgtgctccaccaagatgttgggaagtgcggctctttccctggttcccacttggactttctccttaaatctttgcagccctgggatttccagctggttccatgcccatccatagcccacatagcctctcagtctgccttggccccttctcctacctcggccctcaacccattcaaacaacagacctggtcacctctgaaatttggtgttaactccagggattgattgctcactttgaacacgatagattcagcccacaatgtgcccaacatccgggatcctcta

SEQ ID NO: 249799 - DNA, 585 bp, Homo sapiens
acactgcgttcctgtctgacctcctggggttcctcatttacgtggtcggtgagctgttgagaggcttcaggaagtcaggagtgaggaggtctgcctagctctgtgaatgcagctttcctaagtttctctggccatggaaccactttcccagaatgcctgttgacatcttcgtgctccaccaagatgttgggaagtgcggctctttccctggttcccacttggactttctccttaaatctttgcagccctgggatttccagctggttccatgcccatccatagcccacatagcctctcagtctgccttggccccttctcctacctcggccctcaacccattcaaacaacagacctggtcacctctgaaatttggtgttaactccagggattgattgctcactggggagcaggggctagatccagcccacagtggtgcttgacggggtcacccatgtttaaaaacacaacttgagccaatattgggctcttggaagatacttagagatctggtttcttattccataatccatgtgcctgtgaaaatgggaaaaagaaactttgacagggatagccatatgtttcagg

SEQ ID NO: 249800 - DNA, 314 bp, Homo sapiens
ccagaacatacagctgggagccagacaccctgacggggcaccagaacatacagctaagagtaaaatggctgtgcattgctggtgaatttttaaaagaacccaccagcatccacacagtgggacaagagtagtgggaataaagaatggactgtggctcacacagaatgccctctcaaaggtcccattgaaagaggtcctttaggaagcacccatagaagtagaaacattgtaaggaatagatattgaatattcttcatgtatttcgttacttacagaatggcacacctaaaaatgaaaagctctgaatttaaaaa

SEQ ID NO: 249801 - DNA, 389 bp, Homo sapiens
ctttcagagccatcactggatctttactcatgaaggaaaataatctggtgaggctctcctgaactagcaaacacttcgaatatgacggactactgcgtctgccacatcctgccagacagctctgactgcagttgattgccatactccttcaccttaataagaaaactactgaaaagagcagaaaatggcccagctcctgcatctctcatgcaaaacatctgtcagcacctctgggtatctttcccactcctgctcctgtaaattttgctagtcattctatagagtagatgaataccacctggctggtggcaaggacaaatagaatggtatggactgaaggccctcgggcagtccctccataaataaaaactaggctcagttattcaaac

SEQ ID NO: 249802 - DNA, 578 bp, Homo sapiens
gtaaagttgggtgacaacgtggatcgctttctagtgtaaggtcccggggaatggcaaaactcaaatgtagcctcactgatgagctcaaggaactctgcttggagttgtcacccctacgactgacctcagacccaggacccaagggcggggccctcttgcatctggaatccagcctcggccttgacccctttcgcttgttcggagtgctttcgcccagcttctggcggaggttcacgcagggaggggactcaggtggaaaaggctggcccctttgatctctttgcaggaacttagtagacaggggccccgggctggagatttgcttcgagtaggctagaggcgcccttggcgcaccgaagctggctgccttgctggaacctgccgcgggggtggaggttgaaaggactctgagctcttcttccccaagccgaactccctcctacaggagcgtggaaaccaactctcccacaccgtctatcccactcttcccccctaaacctctagcgcagctttttaaaggcatcctgtgcagcctccaactttggggaaagagaatgcccaactcccgctctccaact

SEQ ID NO: 249803 - DNA, 577 bp, Homo sapiens
cctaggccagtaaagatttgttcacaccttcacagtaattggcatgtaatagacatttgatcagtagttggtatatgaaggaatagagtcctcagatgtataactcccctgaaagtgaacacaaaattgcatgtaggtgcacaatgcattttttgggcagagagggctttttatttatttatttgtttttaaattgtaagaggaatttatgatgaaaaaagtccaagaaccctgcactagtctatgctgccctagggctatctggaataattaattttcaaatattgaggcacttaagagacaaagaactaccttgtttccttggacagtaaaatgaaatgggtagaaacaaggaaggccttcttgatgaagacgtttgctgaataaaaatacttcgtattttatgtgaattgataatcatttgcatttgcctgttccaaatgcacaagttacaaagtgaaagctagttttcttcactccagctcttctcagtgtggccttagtcctttgtaaatgtggtttctctctccagtattgctgagctattagagttttctaccgcatcttaaagaaaaaa

SEQ ID NO: 249804 - DNA, 192 bp, Homo sapiens
attgttctcagcaaggaggaagaatggaaaggtttgtttcagagtcacaactttattttttttaaaaggcacccaagttgtttcaacaagctgctacaaaacttgggcttcctgagtggaggctgttttgcacagtgcatgtactgtacaaaaatccaggcagggaggggtcagagagttcgtcattaaaga

SEQ ID NO: 249805 - DNA, 503 bp, Homo sapiens
aggatcagggcttgattcctggctgggtgaccttagtacatcaactgctttctgtaggccatagctgatggggaaagccctggatagagctttaaaaaatagccatgtttgtgtttgtggttctcaaactacccttcagggaacagaagtgcttcagatgtggctgtgctcacccccatgcccagccttcattaaaaatagatttgtggctgaacacagtggctcctgtctgtcatctcagcactttgggaggctgaagtaaaagggttgcttgaggccacaagttctagatcagcttgggcagtgtagtgagatcacatctctacaaaaataggttaaaaattaaccagggatggtggcgcatgtctgtagtctcagctactcaaaaggcaaaaacaagaagatcatttgggctcaggaatttgaggctgcaatgagctatggtcgtaccactgcactccagcctgggtgacagagcgagacctcatctctaaaaaattaga

SEQ ID NO: 249806 - DNA, 506 bp, Homo sapiens
tattttaaaggctgaatgtggcatgaagataatagcatactaaccctcacctacttagtaatatatttgaagacagagatttttgtctttcgccttcatctctgcatctgtctgaggtttaaatgtagcagataaagctataaagtactttctggctgcttcaaactgctctttcttccaagctaggctagaggatataatagtttaccaacatatttgggtcctagaatcccgaaatagaagctttgattattaattttagatgcttcttcctaatatatgcatttaataattttcatttcagtactgctttcatagcatccaactaattttaatacatttgattttgttcttcatttatatgtgtatgtgtgtatgtatttctcttaagacttctttttaacccttgaattatttagaaatgtgtttatttcttaatgttggggacttttccaactacctcttcttggttcctttctaataaacttctgttttaaaaaatacat

SEQ ID NO: 249807 - DNA, 1324 bp, Homo sapiens
  misc_feature (69)..(69): n is a, c, g, or t
  misc_feature (344)..(344): n is a, c, g, or t
  misc_feature (578)..(578): n is a, c, g, or t
ccactcgtctgtgatttattttgtaattctttgcacagtatctggccagaggaggtgctgtagtgctanttcctcaatgaactcttaggcagaatcctgatgtattaaccaaataaaaacagagctgttctgataggagtggagtgggaatgtccagagccctgaaccttcacggaagcccccgagacacctattattagtgacttcctctgaaatattcagtttaacatatagaaatatggtttatctaggagatgaaaaatatatttagatcctcaaggagcacttggtttgggtcagccttgaagacccagctgcattctcactcttgggttctgtgaaanaaccttacgcccatataacaaatgtttttgttgttgttgtttggcttaaagctgtctgaaatgggtttctgtttcttgcaactgaagagtcttagctgaagaggcttaactagggcaacgatgcttcagtgtggttatgaggattaaataacataaagtatttcaagcacttcagttagcacctccagaaatgtttctcccctcttccaactgttaacagtatcgcatgtaccnagaccatcagacttacctgtgttttgtacatgctcaaaataagagcccattttgcggtcagttttcttttctttttatttatttatgtatttatgtatttatttattttttgagtcggagacggagtttcgctcttgttgcccaggctggagtgcaatggtaagatctcggctcaccacaacctccgcgtccctggttcaagagattctcctgcctcagcctcccaagtagctgggattacaggcatgcgtcaccactcccggctaattttgtatttttagtagagacggggtttctccatgttggtcagggtggtctcgaactcccgacctcagattatccgcccccccccccaccccggcctcccaaagtgctgggattacaggcgtgagccacctcgcccagccagttttcttttttgcaagtttttcctcattccagccttcatctttcaggtggtgttatgatttatgtttttttttttgctatgttttaaagttttgtttgttcctgaaaggattgagttagtcatactcctcagttcatggcatactatcatcagaccatgacagtgaggccctcttgttttatttatttatttatttatttatacccttcaagtcccattttctcactacaataggcaattttctaatgtgcttaatgtggatatttccatttatgtgttttctaaacatagttattatttcgtgagcatgcattattaaatgtacttcaaacctact

SEQ ID NO: 249808 - DNA, 392 bp, Homo sapiens
ggttttgtttttttcagacggagtttcgcttttgttgcccaggctggagtgcaatggcgcgttctcagctcactgcaacctccgcctccctggctgaggcaggaaaattgcttggaggcggaggctgcagtgagccgagatcgcgccactgcactcaggcctgggagacagagtgagactctgtctcaaaaaaacaaaacaaaaaacaaacagaaaaaatggggggtagggggtttgaggagcacaaggcttggacctactagacctggagatttggggaacgagggatgccagccatgttccttgtactgtatgcaaaagggaagtaacaagtattgaatgttcacttacctctttcattccccaatatgaaatagatattcccatttgca

SEQ ID NO: 249809 - DNA, 180 bp, Homo sapiens
ttttttttttccccccccccccccccccttttttttggggggaaaaatttaaaaaaaaaaaaaattggggaaggagttggattagatgatctctgggtttttttgtttgtttttgcactagtaataaaataattttcacaaattgcttggagaccctgaacatcccccaatttagacaaa

SEQ ID NO: 249810 - DNA, 407 bp, Homo sapiens
tctcagcagaaactgtgtactgcagaccatattaacaacctaggaccacctgctcagctgggaattatgggcccaaagcatagcaaaatcctcaatcccagattgcagtgttaaatctttctatggagagtatgttcatagaaaaatctttctctctgggggattgcccagattgtttttcatagagatccttcatttgaattatactatactgtcctgctctcagtttttaaaaatatacatttatttgctccttttatgtgcttctaactcagctatatgtgcactgtgccacagcactttaaaaatagttccaagtaaattctcaatatttataccagctcagaaggtagaacaaaacagattgaatgtctttatattttccaactaagttgagagtttgatat

SEQ ID NO: 249811 - DNA, 429 bp, Homo sapiens
ttttcttttactttttctgtatttttccgattttatataaccatgcatgtattagaaaacaaacaacaaacaaaacgataatgtacacaatctaatctgactttctcacaggaggtaggagagtcagggaggcctgggaggctcagggcctccccagcagcctctcaggacatctccaaagccacaggatcatcaccagtaatcagcctttctcggggtcaggagggcgagagctcatctgaggatcactgggggtgtccctgggacccctccaggctccacctcctgctgaccccacagcaactcatgtcagggtccgaggcaaagtcctggttctcacccacgaccccacagagcctctctgcagcgaagaggggctgacacctgctccctcaacccccgagtccatataaacacagaggcggccgc

SEQ ID NO: 249812 - DNA, 471 bp, Homo sapiens
ttagaaggttgtgtgcatgttcaaggctgcatgcatgttcaggaaataccaacaggggccaagttacttattcatctcttactgaccttggagctcagtgtaagcaggcaatgaaacctaaggcaaatttataaactgcctgaactttgaaggcatgtggaaactcataaacagcttctctcagccagttgcggaagatttacttattcaagtcatttaagaaaaccttctaaccaatcattgtctgacccctgaagtatgtaaacacaggggaacccttaggaagttaggcttaaaaatagaaacaagaatttttaaaaaagtgagcatagatttctgtggcagcatactgcagggactctatagaactagcctatgtaaattgctaaacagacaacaacaaaccctggtgtgggtggggtaataaaatttcagagtcattaaaatactctggtgtttagcaaaaaaaaa

SEQ ID NO: 249813 - DNA, 306 bp, Homo sapiens
cctgggcaacaggacaatagtctatatttttttaaaaaaagcatcatcaacttataatattaccaacttatgatgggtttattggaacataatcctatcataagttgaagtgtatctttatatagtagaatatagtaacatactacagacttattttctcaaagcataaaaataaaccacactaatgatcatccatgggagagggacacctagacaatgtcctgcaaaacgagaaatactggtaagacatactttacattccagactgagtctctttcaccatgaaataaaatcattaagaaattt

SEQ ID NO: 249814 - DNA, 731 bp, Homo sapiens
catctagcaccttcctctttgatgatctaaagggcaattagccttcacatcttccgagaaagaagaagcacgcttctgctgagataatacaaacacttagagattgtgctcattttgtaactaactctcttaagttctttacttagagcaaacttctgtccaccttccttttcttatcctgattttctaagcaccttggtttcctcatctatttttattttatttgcagtttttgtcagcagcctcaaatggtcttctgaatgaggcagaatataaaaataaattatctcacttatatatagaatctaaaaaagtggatctcatagaaacagagtagaaaggtggttatagcaggggctgtggggagagggagaaggtgttggtcaaaggccacaaagtctcaggcgggaggaatacgttttagtgacctatcgcactgcacagtgaccagagttaataataatgtgttacatatttcaaaactgctttaaaaaaggatttttaatgttctcatcacacacacacaaaaggtaagttggtgaggtgatagatatgttaattagcttgatttaatctttctacaatgtatgcatagatcaaaacattacttgatttaatctttatacgatgtatacatagaacaaaacatgacactgtaccccatagatgttcacaattactacttgtcaattaaaaaataaattaataaagtatgaataatgtgagcaata

SEQ ID NO: 249815 - DNA, 785 bp, Homo sapiens
catctagcaccttcctctttgatgatctaaagggcaattagccttcacatcttccgagaaagaagaagcacgcttctgctgagataatacaaacacttagagattgtgctcattttgtaactaactctcttaagttctttacttagagcaaacttctgtccaccttcaccaaatgtggcaacttaatgattggggtcctgaatttactccagctttcttttcttttcttatcctgattttctaagcaccttggtttcctcatctatttttattttatttgcagtttttgtcagcagcctcaaatggtcttctgaatgaggcagaatataaaaataaattatctcacttatatatagaatctaaaaaagtggatctcatagaaacagagtagaaaggtggttatagcaggggctgtggggagagggagaaggtgttggtcaaaggccacaaagtctcaggcgggaggaatacgttttagtgacctatcgcactgcacagtgaccagagttaataataatgtgttacatatttcaaaactgctttaaaaaaggatttttaatgttctcatcacacacacacaaaaggtaagttggtgaggtgatagatatgttaattagcttgatttaatctttctacaatgtatgcatagatcaaaacattacttgatttaatctttatacgatgtatacatagaacaaaacatgacactgtaccccatagatgttcacaattactacttgtcaattaaaaaataaattaataaagtatgaataatgtgagcaata

SEQ ID NO: 249816 - DNA, 190 bp, Homo sapiens
gaataatacttccctgaagagctgcactaatttattgaggcactgagctggatgcttcacacacatgatctcattgaatgtccacagcaccctaggaggttgatctcattattaacttcatgaagtgactgaggcttagagatattaaatagcttccagcctgggaaacatagtgaaaccccatctctgc

SEQ ID NO: 249817 - DNA, 663 bp, Homo sapiens
tggtcacctctgctcaggtctcgccagcacgtttcccgggggacacagcagccagagagcccgaaggtggccggtgccgaggtggccgtcagctggccggaggtggaagaggccctggtactcctgcagctctgggcaaacctggacgtgctactggtggcctcttggcaggagctgagtcggcacgtgtgcgccgttaccaaggctctcgcccagtatcccctcaagcagtaccgggaatcccaggccttctccttctgcacagcagggcgctgggcagccggcgagccagtggcaagagacggcgcagggctgcaggcggcctggcggaggcagatcaggcagttcagtcgggtcagcccagccgtggctgatgcagttgtcacagccttcccctccccccgccttctgcagcaggcgctggaggcctgcagcacggagcgggagcgcatgggcctcctggccgaccttcctgtgccgcccagtgaaggcgggcgtccccgcagggtggggcctgacctctcccgccgcatctgcctcttcctgaccacagccaaccctgatctcctgctggacctgggctcctgaccacacgtgggaccaccaggacagcatgcagccttggggacagaccagacaccctgggcggttggggaggacccc

SEQ ID NO: 249818 - DNA, 631 bp, Homo sapiens
tggtcacctctgctcaggtctcgccagcacgtttcccgggggacacagcagccagagagcccgaaggtggccggtgccgaggtggccgtcagctggccggaggtggaagaggccctggtactcctgcagctctgggcaaacctggacgtgctactggtggcctcttggcaggagctgagtcggcacgtgtgcgccgttaccaaggctctcgcccagtatcccctcaagcagtaccgggaatcccaggccttctccttctgcacagcagggcgctgggcagccggcgagccagtggcaagagacggcgcagggctgcaggcggcctggcggaggcagatcaggcagttcagtcgggtcagcccagccgtggctgatgcagttgtcacagccttcccctccccccgccttctgcagcaggcgctggaggcctgcagcacggagcgggagcgcatgggcctcctggccgaccttcctgtgccgcccagtgaaggcgggcgtccccgcagggtggggcctgacctctcccgccgcatctgcctcttcccttcctggacaaggccccctgcctttgcctcacataaactgtacagtattttcattaaaagcctctttcataacttccaaaaaaaaa

SEQ ID NO: 249819 - DNA, 625 bp, Homo sapiens
cagcattaacggtcaggccagtacccaagaaattagacagacatgtgctgctgagaatagggtgaatggaagcagagtctagatcctcaggttaaataaacgatggtcacaggaggaacatggcatagcctggaaggaggggcacacacgatgaggaggtgaggacaggcaaggggaaggcgtaggtgaatatttctgacacctatgatgggtcaccttactgcccctgccacctggtatgaattaaattgggggtgatgaacattcatccatggatataccctaccattttgcgttgacttattaccaagggacactccccataagagtttactgcacacaaagaacacccaaataaacacccttcttgaatttacaactcattatctgcgacaggttttctttaaatccaagacacatgatgggaaatgggtgttcccaccatgtactcagagggctgcatgaagtgactcccgggcaaggcagacttcagtaatctcttgagcgtgagcatgtggactgcaaggctgagtgcggactggtggatgtccttggagctccagaaccttggcgttctcatggaattccctcccaagttttactatgctcttttgtggggggggct

SEQ ID NO: 249820 - DNA, 680 bp, Homo sapiens
tccaaagagagacagaggtccgtgcaggatgcctcatcactgggtttgagcttttcagcaaaattggtggggaagacatctgcacagaattagaaaaataataaatgcagacatggtaccttagagtgctggaaaaggcaccccaccctcggggaagctgatctgagaggcatgcagggcgtcctggtgtggggagctgtgtggagagtgcgtctggaggcagtgagtcttacttcctgactttgtagccatgcagctcagcagcctcaggaagactcagctccctgcaatttgctttacaggtactgctctcgggcgtttagacttccacaatggggaagataaaagaaatacattttaatttctaggaaaatgaagcatgtaaaaataaaatcacttgctctatccagtgtatcatttgcttttccagactattttagcagttacagtggacaactgctaagcacacttgactcattcatttgtagatttcattataagcaccacaattaacccatcttaaaaaaaaatcttgacagaaaagtatttaagttcttgactaaattcagctttcagaaggcatcagtgattctgctgatggtgattgagaagattaaatatgtagatgttttcttcttggtgtatgagagacatgtttgtgttggtgggagcaccaggtg

SEQ ID NO: 249821 - DNA, 765 bp, Homo sapiens
cgtctcctgacactttatatatgccagccatactaaacttttctcagaattcccaaattcgcccctttctctttcaattcttgctgtcagattcttcccacttctcactgtgcctggttatctccacgtcatttttcacatgtctgctccgacactgctgccttttcaggagcttggcaggctggttagtgctctagcttctgagttcccatccgtgtgaacttttgcctgccttcttgcctgtgtactgcactggggctgtgagctccttgagggtgagggctgtgttttgatcactgttagttcactgcctagttttatgactggctctgctactttcttgtgactctgagcaagttacttattactttgcctctccgttcatcattggtaaaatggatatagtaattgttcccacctcataagataaaaatcagttaatataaaacacccagaacagagtctgacacatgggaactacttaattcttgtccttatagccatagcatcaagcagtgagcatctactttgtgttggcaataactcagatgactgaataaatagcaatcctgtagaagaactgtttgtaccttacttagcatcaacactgtggattagttcaaacaattagtattaacaaagaaatgactaaaagatgtgtgtttagacaccaagaatagcatgtctggttatatgcctataacattgtcaccttggtagtacggtcagtatataaaggattatctttagagaaaaagatggtta

SEQ ID NO: 249822 - DNA, 528 bp, Homo sapiens
actgggtcacctatctagtccatatgtctgcaggaattatactgataaatggacaactcaccatgcaatcaatctcccgctctatcctgttccctgaccggcatggtttctacttcctgtcagcacaactaggacgtctggtttctgctgggctgccctctcatgggaagcctttaatcactctatctcaatatatcctctggggaccatcaacatttcctattaaagataactacacctggccgagcgcggtggctaacgcctgtaatcccagaactttgggaagccaaggcgggtggatcacaaagtcgggagatcaagaccatcctggctaacacagtgaaacccctcctctactaaaaatacaaaaaattagccaggcgtggtggtgggtgcctgtaatcccagctacttgggaggctgaggcaagagaatggcgaacctaggaggcagagtttgcagtgagctgagatggtgccactgcactccagcctgggggacagagctacactccatcccaaaaaaaaa

SEQ ID NO: 249823 - DNA, 675 bp, Homo sapiens
aagaaaaatctaagttgtacagcttagggttttgatctaaatatatcttgagtaatgattcctacagtcaagctaattaacatatccatcacttgaatggttaccattttcttgtgtgtgagataagaacatttcagatctactctcagcaaatttcaagtattcagtaatacattattatttataatagttaccatggtgtacattgaatctctagaaattattcatcttataactaaaagtttgtatcctttgaccaacatatccccatttcccccacccccagcccctggcaaacactactctactgtatgtttctctaagtttgacttttttagattccacctataagtgacgggatcagtattactgatgttttttttcctcagcctccaacatggctcaatatagtactgggcagcagagagaaagtaacccacatgtaagcggcttaagcccagatactcatacttcctacgtatatgtgggagagagtagtaagattcaaagtaacctgctggctgatcaccaatgtgatataccaatggcatatactcaggtccttgtcaggactaatttcataaagtataattatgcacatattttgttgaacttagtttacagcagtgatctgtgtataatctgttgtataaaatgaaagaatgaaaacatttc

SEQ ID NO: 249824 - DNA, 477 bp, Homo sapiens
caacagagactggatggttgtcaaagactgaaatctttaccaccagcctctgcatagacagttgtttcctgacccctgttttaaggtatttcagtcaacctactaaatgccaattagagatcctccagctccatttcatgatgtcttgtttttagactttagtctcaaaattacagttacaatacaataaaataatcttaatttatgaatgcacagaaaaataaaaatattaattcacagcccaacactggtaaattgtgaaaggtgaaataagattttatctggtacgtggtggttgatacactgaaactggaaggagttcctttgtttattaccagggtttattattatgggagtctgggtatgactctggacttttaattaccacctgtcctgtgtctcaaaaaaattaacctcatataatataaactagttcattttaaagagagtgctagtcctattctctaatacaagctt

SEQ ID NO: 249825 - DNA, 467 bp, Homo sapiens
cagagcgagactctgtctcaaaaaaaaaaataaaataaagagggcttgggtaattggcaaaatgctgcatattagtggtagtgggaggcagttgagtgttttgttttaatgggcctcttactccttgcaaactagccagaccattgtactttcagagtgtaaatctttggctcaccaaatttcagctatctctcaaattcagcttttgcttttcttcccacttgctcaaatatgtctatattctttgtgcatgcaagtatcccacgtaggagggattgatgaagcagatactatttcagtttttatagggagaaactattccaggaagggtggggattacagcgcaagtagatagtagagcctgaagctgagccctagtttcttcacccctttgccttcagcttttgcattttctgccagatgattctgtggttcttacactttggttcgtaactacaggtgcaaaa

SEQ ID NO: 249826 - DNA, 440 bp, Homo sapiens
ggcctccattcctatttttcttcaagagaaccatgaagctcctttgcaaaataggtgagttcttttctttgagacagagtctccttccatcacacaggctggagtgcagtggtgcgatcttggcttactgcaacctctgcctcccaggctcaagtgattctcatgcctcagcctcctgagtagctggaactacaggtgtgcaccacaccacacctggctaatttttgtatttttagtagaaacggggtttcgctatgttggccagggctggtctcaaactcctggcctcaagtgatctgcccatctcggtctcctcaagtgctaggattacagatgtgagccccggggcgggtgagccacacacttggatctcactgcagttgtggcctctgggaagaaggctttgaatgcagattttaaacaggtactcaactcatact

SEQ ID NO: 249827 - DNA, 1912 bp, Homo sapiens
ctttattcccggtcctgggtcccccgtttggaggccccctagtggccctcggcctccccttgagtgtgttcacacaccgccggtgtgtcgccccggcgtttttattttggtgggaagccccaccgcctggtgtctggccccgggggttccctctggggccctgtcttagtccacgtgttgccctcttaccacactggggcgccggggccccccaccagagttggttttgaaaagcttttttccgggtggcgcgggcccgccgcacacacagtgtcgtttttttttttgttttttttttttttttgtatttagtagagacgcggcttcaccatgttggccaggctggtctcgaactcctgacctcaggtgatctacctgccttggccttccaaagtgctgggattacaggcgtgagccactgcacctggccaaagttttttttttcttcttttttttagtattaacaactttgaccaggaaaaacaaaccctgcttttcctttacagtctctcgtcaggtcttcgccacaaatctctgtccagaggatcgtggctgaggcaccatggaatgctgctgttctactggagatgcaatttcatccaaaagaaaaagggaaaagtatccaaaagtctttctagtctccaggcatttagaaaagctttagaacaagatctgcactggcacaagaatttgagtggaaatcaccctgcccagctgtgagccccggggcgggtgagccacacacttggatctcactgcagttgtggcctctgggaagaaggctttgaatgcagattttaaacaggtactcaactcatactgagccacggctactttcaacttaacaatatgtgagaaacccatctgatcactgcagacctgctgaaatctgttacaactaatccttcaatcctcaccagaatgctggctgtcctgcctctgccgtcccgagagaagatgaaagctactgggtggccacagggcagttatgtccccttctctaggttctgtgattctggcagttagaatgggtttccagacttttacaagcagaaacccttatacatgtgattatatgctgtccgtcaacatgtaaaacaggccaagcgtggtggctcacacctgtaatctcagcgttttgggaggccaaggtgggaggaccacttgaggccaggcgtttgagaccagtctgggcaacatagcaagaccctatctcttaaaaaaaaaaaaagaaaagaaagaaagaaaagaaaaagaaaaagaaaaagaaaaaaaaaagtagtcctggcctcaagtgatctgcccatctcggtctcctcaagtgctaggattacagatgtgagccactgcacctgactgcaaaatgggagagttctgagaagtgtggactggaaaccagtgagaggaggtaacttctagaacctcttcccagctctgattccactaacatggtctaaactttccaaactcaacccacaccaccgttaaagtccttattttctaagccgtttctctttcgggcactttccaggaggcctgggcctgaaactccacaccccaccagctgacacactgtgcgtgacctggaactagaaatgaccttctcacagggcagatggccacccacgggggatgtcttgttagaaagcctctccaaagacctgggagagtcaaatcctgacacaaacatatcaaagaaatgttctactttactagaaattttgtttaaaacatacaagttaaaatcagcggctgagcatggtggctcacacctataatcttagctactcgggaggtggagggaagaggattgcttgaggccaggaggtcaagaccagcctgggcaacacagagagacccccatctctatttattaaaaaaaacggaaaagaaaacaatttggtaatatatg

SEQ ID NO: 249828 - DNA, 1497 bp, Homo sapiens
gcaccggctgttggagtgccggtccagggtccaacatttagtaaccaacatcaaatgtacttgtctctcctaagctgcacagactgccaagtctctcgtcaggtcttcgccacaaatctctgtccagaggatcgtggctgaggcaccatggaatgctgctgttctactggagatgcaatttcatccaaaagaaaaagggaaaagtatccaaaagtctttctagtctccaggcatttagaaaagctttagaacaagatctgcactggcacaagaatttgagtggaaatcaccctgcccagctgtgagccccggggcgggtgagccacacacttggatctcactgcagttgtggcctctgggaagaaggctttgaatgcagattttaaacaggtactcaactcatactgagccacggctactttcaacttaacaatatgtgagaaacccatctgatcactgcagacctgctgaaatctgttacaactaatccttcaatcctcaccagaatgctggctgtcctgcctctgccgtcccgagagaagatgaaagctactgggtggccacagggcagttatgtccccttctctaggttctgtgattctggcagttagaatgggtttccagacttttacaagcagaaacccttatacatgtgattatatgctgtccgtcaacatgtaaaacaggccaagcgtggtggctcacacctgtaatctcagcgttttgggaggccaaggtgggaggaccacttgaggccaggcgtttgagaccagtctgggcaacatagcaagaccctatctcttaaaaaaaaaaaaagaaaagaaagaaagaaaagaaaaagaaaaagaaaaagaaaaaaaaaagtagtcctggcctcaagtgatctgcccatctcggtctcctcaagtgctaggattacagatgtgagccactgcacctgactgcaaaatgggagagttctgagaagtgtggactggaaaccagtgagaggaggtaacttctagaacctcttcccagctctgattccactaacatggtctaaactttccaaactcaacccacaccaccgttaaagtccttattttctaagccgtttctctttcgggcactttccaggaggcctgggcctgaaactccacaccccaccagctgacacactgtgcgtgacctggaactagaaatgaccttctcacagggcagatggccacccacgggggatgtcttgttagaaagcctctccaaagacctgggagagtcaaatcctgacacaaacatatcaaagaaatgttctactttactagaaattttgtttaaaacatacaagttaaaatcagcggctgagcatggtggctcacacctataatcttagctactcgggaggtggagggaagaggattgcttgaggccaggaggtcaagaccagcctgggcaacacagagagacccccatctctatttattaaaaaaaacggaaaagaaaacaatttggtaatatatg

SEQ ID NO: 249829 - DNA, 715 bp, Homo sapiens
gaataggtgaatttctataatcaatataatttaatttgataattagattgctggatatttcccttttatcttttcttaaagtaaaaatttgttctttaacaaatgtcttttaataaatgaacgtacagacacatatgtttgagaatctctaaatatccaacctaaaaacttgggtttgtttctgtgttttcccttaacttgtactttccccaaaccaagatcacctggtctcttctctgctacatcatttctttatgacaaagtagttatgactctctttaaaaagccaggcatttcagcactctggttactttgatcagattatctattcgtatctacttttatattttttgtaactttcataggttatttgtggagtccttggtttctgtgaggtctcttttccctgtatttaaagattcccatctcattgtaccgatgtgggtgccagatcatatgaacataagaaatctgtttacaccattctccattcttttctctgggagtactgccaattatgggatggtgtgatgaagtcataaaatacaaccttaggtaggataggcatttaaaccaagtccactctctttcctttttctaagggatcataatcaaaggtaaatgtgaatctacttgtattttatacaggtgaagactcagtaaatctagcttttctttctcactagtctgagtggtatacctggcactagaatta

SEQ ID NO: 249830 - DNA, 428 bp, Homo sapiens
actgcccttcagcctgggtgacagagggaggccctgaaaaaaaaaagaaagaaaaggaaaaagaaagaaagaagaaggcaggcaggcaggcaggcacgaaagaaaagaaaagaaagagaagagaagagaagaaagaaagaaggaaagaaagaaaggaagaaagaaaaaaagttttcaggccacagagtatggtgcaacaaaaagtgacagggtatatgtgattagagaaggatcagtcagggtctgaactttaccctgagggctatggagaactactgaaggattttgagtatggcactgacatgcttagatgtgtgctttaagaaagtttggttttccagtggcaaggaagtaaagtgacattggggaccaggaaactggggcaatatcagaggaagcagagcctttgtggaatatgccaaccaaga

SEQ ID NO: 249831 - DNA, 263 bp, Homo sapiens
gggggcgggatttattctttttcttaatttttgtataccctcaaatatctaagggtttgttctgaaatatacttcattaacttggaaaatagtcaaacctttttcatcttcagagtcctcttagagtgctggtgattttgtctgggagcttttgcagatcagccagctctgccttttcgtttttgatggtcactgagtcctttttttttcttttcccccagaggagtgattttctgtgtgtttttgtttttggagtgtgtgtg

SEQ ID NO: 249832 - DNA, 430 bp, Homo sapiens
cgttaatacttgaagagttttgtcagtctgaaagcatcatgcatggaaggacatgagcagagaggcaccttgaggacaccggaccacacacagtgccagtcacagaagcgcaaaggcccagagcagcgaaatccaccgtcgcagggaagcggacagcggggccgagggagaggggatctgtggacatggggaggacggatccacggttgcggagagcaggatggcggggccggggagagggagtgggatttcatgggtgcagaatttcagtttgggagagaagttttggggtggatggtggtgacggttgcacaaccatgtaaatgtacctattgccactgggccgtgacctgacacagagttaagacagtaaattgtgtgttatgtgtattttatcacaataaaaaaaaaactttttttaaagcaaaca

SEQ ID NO: 249833 - DNA, 340 bp, Homo sapiens
gtatattgaggagcatgaattttttacacttttaagctcagtaattccacttctggaaatctatcctaaagaaccaattccaggccaggcacagtggctcatgcctgtaattccaatgctttcagaggtggaggcaggaggatcacttgaggccaggaatcaagacaagcctgggcaacacagtgagaccctgtctctatcaataataaaaacattagccaggcatggtggcgcacgcctgtagccctaagctactcaggaagctgaggcccaggagtttagggatgcagtgagctatgatggtgccactgtactatagcctgagtgacagggtgagggc

SEQ ID NO: 249834 - DNA, 397 bp, Homo sapiens
gaccatgaagtgtcccattcacctggtgggtgggtcctgggcctgtgcgtcccccaggatgtccctctctcatgttttgtttggacagagggttcagtagccaagaagaccagttggagacccctggcctagtccatgttgttcagagcaggccaggcgcagagaggggcagggccggctgtcacatagcctggggtgcggagctggaatggggagttgggtctccctcggccggcactctcctcctcacccagctgtcctgcctctgctggtccctgaggcaggggttgcactgtgtgtgcagatgaggaaactgagggtcccacaggagacactgtcacccagcagctcaagtgggaccgtaagaagaagcggtttgtgggacagtcaggacagg

SEQ ID NO: 249835 - DNA, 520 bp, Homo sapiens
tttcactttgctctcttggctcgctcttcctgtttggagccaagaacccacatgacttcctgggctgaaccccaattttggggttcaccctgtgacatcttgacaagcagtggctttatcagccgtgtggctgctgggtctccttaggggttatctggcaggggctatgttaaggacggtgagagctatttatggttctgtcacttaaccagctcagggtccctaactaagtttcccttcttctcagggcctcagtttctccctccatagaatggaggaattggactagacacctcaagggtaccttacagccttgtgaggaacagtagttctaacggaattgaactgaacacataccggtgtgggcagtatcctgcataaggaggaggttacaagaaatacacatgacacagtcctcccgtattattgggaagtagatttatacctttctgacaatttttacaagtatttattgcttttgcaagtaaaaaaaaggcagggagagggaacaaataaactg

SEQ ID NO: 249836 - DNA, 420 bp, Homo sapiens
cggttctaagcgtgagccccagctctgcaacctaccagcctatttgggactctccatttctcatctgaaaatgcgtaggccggaaatagctgctgccctgcctgctgtcatcatctcagtcactgaacaagtgtatggggatcatcagtctgtatcaggtacccttgtagacatgggactggcattgtgtgttcagacacgggccctgactgcacgtctcacatcccagtggtgaggagacagacagcaaacaggtaggtaattaaataaatacgatcatttaatcttctttatgtgtgtggtgatgctggcataaacagacatactgctctgccagtcctataaaagtctagcacacacaattatattctgtacataataagtgataatgataataaaaggtttactgatttacatatt

SEQ ID NO: 249837 - DNA, 463 bp, Homo sapiens
tttttatttgcatcagggactggttttgtggaagacaaaacccagggtggggttggggggtggctggggatggtttcaggatgattcaagcatattacattttattgtgtactttatttccattattattacattgtaatatataatgaaataattacacaactcttgcttatggtagactgccagtttctgagtggtaaatgtaaaagggagtgacagtttgaaaattatcattgtgtttatttaggaattcccattataaagaatattttaaattagaaaactgcacattttaaatgttttgattaataatgctatgtaatagcttcctaattggtatttctaccacactttctcttcattctaatgcatcctggtaaatttttcaaagataccactttgactatcactagccttgttccaaagtttttagttttccttttgtctatagatatgcttctct

SEQ ID NO: 249838 - DNA, 562 bp, Homo sapiens
gtgatgcttgagtgcacagagaccaactccctgggcttcatactggccttcctctacaatggcctcctctccatcagtgcctttgcctgcagctacctgggtaaggacttgccagagaactacaacgaggccaaatgtgtcaccttcagcctgctcttcaacttcgtgtcctggatcgccttcttcaccacggccagcgtctacgacggcaagtacctgcctgcggccaacatgatggctgggctgagcagcctgagcagcggcttcggtgggtattttctgcctaagtgctacgtgatcctctgccgcccagacctcaacagcacagagcacttccaggcctccattcaggactacacgaggcgctgcggctccacctgaccagtgggtcagcaggcacggctggcagccttctctgccctgagggtcgaaggtcgagcaggccgggggtgtccgggaggtctttgggcatcgcggtctggggttgggacgtgtaagcgcctgggagagcctagaccaggctccgggctgccaataaagaagtgaaatgcgtaaaaagtct

SEQ ID NO: 249839 - DNA, 235 bp, Homo sapiens
aaaaaaaaaaaaaaaaaagaatggtcttcagcaataatataattcaatgggtattttggcgtaaaacgacaagtgagataaacagagtattattaaagagagattcacaccaactgcaaacagtggtaacatcctggaaatttaattggggaaggggtggggtcaaggataagacaccttattttacgcatgattagattcctgggatttacaataaatatgatgacttacatca

SEQ ID NO: 249840 - DNA, 728 bp, Homo sapiens
caggcagggtgtagcccctgcctattctttgctggcttgttttaacaagcaatagggaggaaggggggacagaggtggctcagtgagctggcacaggaggaacacttagtgcctttagccggcccgtgtccccgcaccatagcccactcagtcagagcctcctggggcagcggacaccgccacccacactggaggctctgaggggagaactcctccagcggccaggcaggcacttggtgggctgtcatgactactctgcctcctctccagttggtattccttcctttccctcccactgagaccccagataagacaacactcccctgctcaccccagggccctctaatgccaacaccaggaagacacccaatcctgccacctcgtcctgctgccatttcctcggctgaacgtgggcttcctgccacttaggtctccttccctgccaccaggtacattcctcttctggccctcccggcctccatccctgcccattatcaggcctgaagtggctgccaaggtcagcgccgcctgggctgcagacaggagcccggcctctcttctgtcttggcctgtagcatggctctgcccccgtggccaccactgctgtacccttcaccaccaatctctgacgagtgggggccaccgtggggtaatttggctatgggccagactgggacagggagagggggaattctttgaggtggggagtagggctggcctggtgtgtg

SEQ ID NO: 249841 - DNA, 552 bp, Homo sapiens
gccaaagtgctgggattccaggtgtgagccaccacgcctggccaacaaaaaagattttttttaacatgagaagattgtcagctttccctggtggtcagagaggaagggctttagagaggtcttggggctgcagggacaaagggtgcaggagaagaagccttagagctgagcaggaggaaactgacactacatggctgcaggcccagcatggaaatgaacttctagaatgctgtagtcgaagagccagcttaattttttaactcttgtgttgtgtgatttttccatccttcctcatttctaggggtattagttaggctatgggcttggaaattaatttgaagaacccaaataaatgtggtttaaatttgatgaaagtttatttctctctcatgtatcatcagaaagtaagccatctggggctgatatagcagctctgtgcctcctccttttagttgctctgtcatccccagcagccacacccttattcacatggtccaagatgctctgatgctctcccttgtcaacattccacctggtcgatgaaggtttggg

SEQ ID NO: 249842 - DNA, 692 bp, Homo sapiens
agaagtagatatgactgtgaggaatatgaatacataaattttgtacctttaagttcctttttaatcagaaacatactctgcatctgctgtatgatgacctagaagggagtgaaaccacaggcacatcaagatgcctttgaaacaggcaagaggcatcaaaatgtcaaaaccatagatttttgtgtggggttttttttttttgagacagtttttgccctgttgcccaggctggagtgcaatggcgttgtatcggctcactgcaacttccgcctcctgggttcaagcaattctccttcttcagcctcccgagtagtatgtgggtcctggctcccattgctcatgcctaggtaattgtctgaatgattggtcaacgtaatgtcttccacgttgactagtcttgcttacaacttttgacttgcagctatctaccctcgtatgcctctaatagtcctgagattaaccggccttggccccatcatgcttagattctattcctattcgtttacgttagaacgttcctcatcttttgctctaccttatgcttaggatagattttctctagaacacctcctttcttcttgtctcaaccacaatgctccgctttttttgtctcatctgtgcaccttacacgatctgcactaatgactccaatgctttcccttctaacatatcttttcgctgcctcttgtctc

SEQ ID NO: 249843 - DNA, 798 bp, Homo sapiens
ttaaaattacatttaaaaacgagtgatattcagggtcatgactttctgaacccatcagagagctgaattgcagggcaattaaatagtttaaaatgaaggaaagagaggtgcctcctacaataacagagatgggctgcaaacattggatgacctgtggcagagcacggaaagaaggcaaggatgacagctacatgcagacaaggtctccagatttgccacccatgctgagtgccgtggtgtgatcatggcttatttcaacctcaacctcccccactcaagcgatcctcctgcctcagcctctggagtagctgggactacaggcacgcaccaccacacccagccataatttgcctcttgctgtaactaaaaggtcacaaaaacaaagaattctaaaaaatcttcttcttaagtggtatgtttagtatttatcatgatgacaatgttctaaattgcacctgcctccactagcagaatgccaggattactgccagacagagaattcggactgctggtccagggacatagctatgaaatgcaccaaggacagcagagtgtgttttggagaaagccaggtagctcttgatagggcctatatgagtacttattcctgctgataggaaaaaaatgattagaaaaatctcatttctttattcatttctactctgagagctttttacttctagaaacacggtcttagttttctgtgttattatgttttttttttgaaactgacaaaatttcacaattaatttatgttcattcaaatgtttaataattataccttgaatttgtcttata

SEQ ID NO: 249844 - DNA, 759 bp, Homo sapiens
agggtgggaacaacagagaagaacctattattgggccacctatcaagcaaaaagaaaatacagcaatagagatcacactggatgcatggtgaactgtggcagatggagaaatggttggaagccatgggacgaatgcctagagttttgaaggaatgtagacaaggtctccagatttgccacccatgctgagtgccgtggtgtgatcatggcttatttcaacctcaacctcccccactcaagcgatcctcctgcctcagcctctggagtagctgggactacaggcacgcaccaccacacccagccataatttgcctcttgctgtaactaaaaggtcacaaaaacaaagaattctaaaaaatcttcttcttaagtggtatgtttagtatttatcatgatgacaatgttctaaattgcacctgcctccactagcagaatgccaggattactgccagacagagaattcggactgctggtccagggacatagctatgaaatgcaccaaggacagcagagtgtgttttggagaaagccaggtagctcttgatagggcctatatgagtacttattcctgctgataggaaaaaaatgattagaaaaatctcatttctttattcatttctactctgagagctttttacttctagaaacacggtcttagttttctgtgttattatgttttttttttgaaactgacaaaatttcacaattaatttatgttcattcaaatgtttaataattataccttgaatttgtcttata

SEQ ID NO: 249845 - DNA, 435 bp, Homo sapiens
agtagtaaaaattctttatccagaacctttgtgccaagggtgcctagaaatttgaattgaaaaaaaaaattgaagcgtgatatggtacatagtatagatatcatatataacatcttgaagtggggtcctcatggtaagttagagcaagtttttccactaaacaaatttgccagaaacttacaagaaaactattggttttcagattagcttttaagattttggaatcacaactacaaagagctttggaactaagttgtttttttttgtttttttgtttttttgttttttgagacgaagtctcactctgttgcccagattactcgggaggctgaggcactataatcacttgaagaacccgggaaatggaaattgcagtgagccaagattgcaccactgcactccagcctgggcaacagagtgagaccctatctccaa

SEQ ID NO: 249846 - DNA, 581 bp, Homo sapiens
tagaagacacaagactcctgggtcagagatgaaggacagtttattactcacagcaatggcagtagccaggctatcagcctgtttgtgcatacttgagccctagttccacagggagacatgaaaagggccaaatgacactggcagatgcaagggatgcactatagaagaaccctgagcttagggaacccacatcttttatcgagggcagcaagcagcagtccatttactaagacagggaagactggagggatagcgggaggaggtgggctttgcacatggatttaggagttcttttgggggctaattaggtttgagatgcctgttaaacattcaagatgtcaagtaagtggcaggatccatgaattagatcccaagagagaggtcaggacttgccacgtatgaaagatggtactgttgagacagtttataaagtattttcattatactcagaactcccaagaatcttcattatacttagtgggaaaacacgagaattatttctcttaaaaacaagaacaaaaaagaatacttgcttactttagtacttcttgccctcaaatgtgggataaggaaaaaagaaa

SEQ ID NO: 249847 - DNA, 674 bp, Homo sapiens
atatattaatgcttctgaagcaaagtgtgggcaggcagattactttataaaaagaaataaaagtcatctcaattagaaggaaagaagtaaaactagctctatttgcacttgaaattatctttcacatataagatcctaaagcaaccagaaagaagccattagaatgaagagctggtaagtttagcaagggtttggtatactcagtcaatatacaaaaatcaatctgcctttatgcactagaaatgaaacaatccaaaatttaaatgaaaacaattccatttacaacaatagcatccaaaatgaaatgcttaagaacacatttagcaaaagaagtgcaagacttctacactgaaaactaaaaaacatcgttatgtgtgaaggggagggaagaaaggaggctagaggataacttaagaattaagggcatcttattttgggttgataatgttgaggatgcttatgactgaaagggagttattcattcttcagtgatttcttaatttgaaatatggaaccaatgtttctgcataacataaacatacaaatgaattaaagtgaaaattctaaggttcccattattgctatgcttatgtttatgagagtattttaagattttatcaagttcccaaagtactcagaaaaagaaaaaaaaatcatggtgggtattatatagc

SEQ ID NO: 249848 - DNA, 856 bp, Homo sapiens
  misc_feature (516)..(516): n is a, c, g, or t
gttcattgttcattggtcctttaagagagagctttagcttttacttgagggttgtaagcacattagaggaataattccctttggatactatacagaaggagccacctgcaaaatgttgatgctgttattgaagtctcaagtggaatcagctttcaaaaaattagatattagatacatccgatataatttgcaatgtgtaattatactaatgtgcatatagttgtctgttgctttacatgttgcctacttgagtttttttcttttcttgtgcatttctcatcattgaaatggttcctgagtagaatctttttaaaataagcttattttaaaaaaattctttgttaattaatatagggatacgaggactctacgatctgtgttcttatgcaagaataaatatgtgcgacctagatgttggaaattaattatctctgaaagggttatcattgtggacacttgcttaatttgtaaaatatttgctactcttgattgatttagtctttttttcttgacttnttagaaccaactttgaaggtacatttgaggaaataattacgtttccctatatggatgtgaattaacccaaaaatatgtaattgccccgtgggaaaaatgtaaccctttaaggccagcaggaattaataaattttttaacattttaaaccccaaagggttaaattcacaaaactcattttaacccattaaatttcaagcccaatttaccttttttaaaatgggtttttttcacacttggttattgggcaattgggcaacacatgggtttggaaattacttggaaaacttttctgggccctttaaggggtttttggtggcacactttcccttcctttttcct

SEQ ID NO: 249849 - DNA, 357 bp, Homo sapiens
gacaaactgcctttaaatgtgttaggtgttgagctgggaatttgatactgggtggtggtgttatcaagagagatcaggccgggcgcggtggctcacgcctgtaatcccagcactttgggaggccgaggcgggcggatcacgaggtcaggagatcgagaccatcccggctaaaacggtgaaaccccgtctctactaaaaatacaaaaaattagccgggcgtagtggcgggcgcctgtagtcccagctacttgggaggctgaggcaggagaatggcgtgaacctgggaggcggagcttgcagtgagccgagatcccgccactgcactccagcctgggcgacagagcgagactccgtctc

SEQ ID NO: 249850 - DNA, 421 bp, Homo sapiens
agatgtaattgggttcctgtagcaaatggggtaagggctctgcgtgtcttaatacatcattgccaccagaaggcccatttacaacttgcttagattttgttgagaagaagaggaaggctgacatccgaagtgcattacagatgctgagttgatcgttaacttctgtagctgggatctgagggacaaccaagacaggtctgcttcaacacatcacgaccatgttcttgaactgcatggaccctggagcatctcagcgtggcatcacagtgctgctcatggaaaacatgaactggcagacccattgagacattttcaaaacataaacattgtttttcttatttccatcgtttacccattgtagaaaatgtaagaaaacatgaaaagggtgaaaatctaacttaaactcccttatacaggtaat

SEQ ID NO: 249851 - DNA, 497 bp, Homo sapiens
agtttacagccttccgggaggggggaaaaatagtctccagaggagctgccctgcagaatttgctactgggtgggataatttatggtacgcatagatattgtcactttgccacagcattaaccattgtggtggttaacactgaagtgtcaacttgaaggaggcaaactattgttcctgagtatatctgtgagggtgttgccagataaaaatttgagtcagtgggctgcgaaaaccagacccaacccttctcatctgttgggcacaatctaatcagctgccagcaaatataaagcaggcaggaaaaatgaaacggtgagactgacctagacccccagcctacatctttgtcccatgctggatgcttcctaacctctcaaacatcggactaagttcttcagttgagacttggactggctctgctcctcaagcttgcagacagcctattggggatcttatggttgtgtaagttaataaactcccctttatatgtgtgtatc

SEQ ID NO: 249852 - DNA, 415 bp, Homo sapiens
gactgtatcttttcttagaaggagctacaaagttgtatctcaaaaaggtatgaatagatacaggaaagagtaaaagattttaatgatttttgtaagatttctcatacctgaaaggagaattagtaaaataagatagatctaaagaaataactcagtatgaaatatagacagagagatggaaagtgttaggacaggttatgagacatgaagataatattggaaactgttagctatgtctaattagagttccagggagaagaaaatatagaatgagcaaaaggcaatataagagataatggcttatacttttgcattttgaaggtagttcaacaaatccaaagcacaatacagggagtatatacttcatgtgaacattttagaactccctaagtacataagagatttaaaaatcagt

SEQ ID NO: 249853 - DNA, 178 bp, Homo sapiens
ttccgcttctgcctcaaagtgctaggattacaggcatgagccactgcgtgcagctgatactatctcttaataacagacttttgacagaatggtttcctatttgtgcttttgtttttactcagaagtcagacttctgctggccatttttatggagggccattgttgatttcttgagttt

SEQ ID NO: 249854 - DNA, 428 bp, Homo sapiens
tccttacttatatatttgaatccttgtgaatgaactgtaacctagcttaatagtcagatgagactgaaaacctaacttaagagtatgcactggtaacaatagctaagtttggccaatgccagcagccatacttcaaccattcatatactgatgagtgttcaaactatgttcaaataaggcataaggcgagctgaattatgtctgaactatggttcattggattcttgagaagttataaaatattttggattaaaagattttctggtataattttgagagtttttctagatttgctgaacacacacacatatttttggaagtctttttaaaaatttattttattattttattttattttttattttgagacagtctcgccctgtcacccaggctggactgcagtggcgcaatctcggctcactgcaaac

SEQ ID NO: 249855 - DNA, 436 bp, Homo sapiens
cgtgtgcatgcttgtgtgtaccgtttacatgtagtgtgtgtgtgcacctgcatgtgtgggttggtgtgcatttctagacggcaagaaattccagtagaacttttgactttcgtactattctacagacattcttttccatccgtcccctgtaatgatgacttcaatgggtcagatactcttgagccttttcatgaacgatctttgctccaagtcttccctcagcttctcactgcctgcatccttccgcgattagactgggatctcagtctattcccagaggtctgagactctcggcagcccagcagtcgtcagagagaccatggcgggagggcatcttagccttcactccttctactgcaggtttgaaactcaggctcccttaaaggtaaaccaggatatcacacagataataatagtatgataataaactcacatt

SEQ ID NO: 249856 - DNA, 427 bp, Homo sapiens
gacctcgccaagccccatacgcccttgtctctcttccctctgcacagctctcctctccctccccaactctcccgggagccctgtccctctccatgtccccacccccacccctgtgcacagtgccactgtctgctgctgagccagaccccatgagagaccctgccggctgggggcagggctgggcgccctccaggaggggccagactctttcattccccgtcctagcctgggagctgcctctgggaatcccttcctcggctactgacttcgtgggtactgggtggggggtggggagcaggctgcatcaggaacctggggagagagttgaaacccctatcctggaatagggagacactcctgacacccacagtgggtatggaaacaccactctaccttgcaatttttgcaggaggaagaaagaggagtt

SEQ ID NO: 249857 - DNA, 683 bp, Homo sapiens
tctgttcttgttccttactcactcattattctcattattctaaaatgctcttacttaaaaatatttcattaaagtactcttactattctaaaatattcttactatcctaagataatgtcactctctcaattaatatttcacttttccagttcatttttcatttatttttgttcaaagagacattggcattcttttacccatgtaaatgtatagacactgggctataagataccaaagagtaggcccctggagagtttgaggcatcatgctatcaaagacagcaatggtggctgtttccttcaagatatactatgactttatctaaatctttctaaatcaaaaattttatgagaagaagacataattaacttgatagttatcaagttctctttatacaaagaaattaaaaagcagaggtagaataagagtaattaatattaatagtataagtaaaagagtcaatgacaaacccaaatagaaagacatgggaaatagttttgtgagaaagctaggacagaaatgttttacttgaaaggaaattaaggtcccatgaggtaataaagggattgtggttaggagcttaccaacctgggggtcttagatatcattagattcccagttagatatcatttttgttttaaggggctggattccattttttgtcccttcaggggaaggatcta

SEQ ID NO: 249858 - DNA, 431 bp, Homo sapiens
tttttaacaaattttaaaggaatccgtaagccaaaatactaagaatctttgatttgggagactttttttcttccctaacagaaaaattccaggtctaataactcacacaaagatatcaaatttctgaaaatcaataaggccaggcgcggtgactcacatctgtaatcccatcactttgggaggctgaggcaggcagatcatttgaggtcaggggttccagaccagcctgaccaaactggtgaaacgccatctctactaaaattacaaaaaaaattagctgggcatggtggcacacgcctgtaatgccagctacttctcggaaagctgaggcaggagaattgcttgaacctgagatgcagaggtggcagtgagccgagatcgcaccactgcactccagcctggatgacagagcaagactccgtctcaaaaaa

SEQ ID NO: 249859 - DNA, 523 bp, Homo sapiens
aaccacctaataacatttctttaggcgacagagtctctatggaacacaaatgggaaacattgctatatttttaatggggatagaaaatacatacagaaaagtgcacaggtcataggtatacagctgaatgaattcttacaaagtgtgcaaccagcacataaatcaagaaacaaaatattaccagcatcccagatgcctctttgtaattccttccagtcgctactctcctatgaagataactagtattttttagtgttttattcatggattacatatgctcttttgtgtctggcttcgtttgctccatattatattcatgagggtcattcatgtttggtatatagtcatagttttcatttgccttgctgtaactcattgtatacttgtttctggttgttgaccagagctgctgttatctttcatatatatctttattactatgagctgttttctagcctctttgtacagctgactttttacaggagtatgcctcccatctctaaataaacatgtaaggtagaac

SEQ ID NO: 249860 - DNA, 269 bp, Homo sapiens
gctcaggtcggagagcgagaccccgcagatcggctacttccggaagaagttcggctcctgtcgggcaaccgctcggctatttccgtcgcagctcggccccacccccttttccgagggcgggagaggagtcgggcttaactctgtcctcgctggagccctgcagctcctcctcgcgccccaaagactcgcgcgccttagcgcttcgccaggttatttgcaagcggctttgcctgtcatttgcataaatggtctacgctcccttacccttt

SEQ ID NO: 249861 - DNA, 531 bp, Homo sapiens
ttttatgatttgatattgaacaaaatatcagacgtttaaacaaagacgagatccgaccagtcatttgcacgaccttgcctcaatcacctcaccctaattccatccctgtttccaataaactttatttacaaaagcgggcatattatttacctcatgagctgtagattattgatttaattttttaaaaaatattgcattaatgttattcattttgattactgaattttttgagacctcaccccaccctgttactggccctgccctttgacgttgctgcaaattgcctagaagataatcgtcattcaaagcagccctattccttgagctgtctggttacctaaattcggtttccacactcacaaacagaagtaatagttttactgctttggattgttgagaggatcatcagtgcatacatattaattctcagcaatcccagcacttcgggaggctaaggccggcagattgcttgagctcaagagttcgaaaccagcctgcatagaaaacatggcaaaaccccgcctctacaaa

SEQ ID NO: 249862 - DNA, 353 bp, Homo sapiens
tactaatgctcatattagtagtctttgtccaaatctctgattctttccttaggaaaaattcctaaaagaacaattaatggttcgagtcagtaatttatgtaattgtcaaaatggttttagtaaatgatgtaacaatttacatttttactaagagtgaagaaaggatacaaacctaatcacacattagccaactattaaaaagtaatgttcatttaaaaatacaaaatttaggctgggtgcagtggctcacccctgtaatcccagctgggagctgaggcaagaggattacttgagcccaaaacttcaagacttgcctgggcaacatagtgagaccccatcctcacaaaaagtta

SEQ ID NO: 249863 - DNA, 556 bp, Homo sapiens
gtttcattcatcccatctgtcattgctttccattggccaaacccagctgaaagctagagggcaagggagcctaagtgataaagtctacagagctcagccttcagggacacagggaagaggggagaatggtggatacacagaataaccagaacattcacccacaacctcctttttataaaagtcagtgttttgcttggtattgttgaccactgcctccttgaaataatcttttcctgtggcatgtgtggcagcatatttggccacttttccctctacaggatgctcctgctcagtttcttttgctggttcctcttcctctgtcctttcctttgtattggtgtttttttgttttggttttttttgtttgtttgtttgtttgttttacaaactcccaaagctccatctataagttgaaaattcacaaaggtatacctctatttcagatttctttcctgaactttagacttcagggtatgtaactagagcacatctctgtatatctgatgatcttgaagcacctcatattcaatgtgtcttcagttgaactcacctccca

SEQ ID NO: 249864 - DNA, 431 bp, Homo sapiens
agtagctgggactacaggtgtgcaccaccacacccagctaatattttgtattttagtagagacggggtttcaccatgttggccaggatggtctcgatctcctgacctcgtgatccacccgccttggcctcccaaagtgctgggattacaggcgtgagccacggtgcctggccttgttggtctttttaaggaaccaacttcgggatttgttaatggtttctatggcttttctttattactttattgatttctgctctttagttccttagacttactttggttgtaccttgtgcttttgctagaacagtcattgattttaggcctttctttctttttaaatataagcatttaaagttgcacctttcacattttgttttactttcattataacttggcttgaagtgtattctaatttcccttctgacttctttg

SEQ ID NO: 249865 - DNA, 138 bp, Homo sapiens
gagaaaggaaaagagcccacacaatggagtaaattacattgacacttactgggagatataatcaatagtcactctgacaattacatcatcttttagcaattctgatgtcatcttgaaataaaatcacttggcaattta

SEQ ID NO: 249866 - DNA, 564 bp, Homo sapiens
gttttcttttatctgaaattttctgttaggatctctgaattctgtttgatgtatttattaattctgggataaaactatccatgtgttgaattatctttgtcatctgtgttcatacttttgtctctactctttattattatcattattattattttttgagatggaggtctcactatgttggccaggctggtcttgaactgctgggcttaagtgatcttctggctttagcctcctgagtagctggaattataggtgcatgccaccatgtccagtttttgtctctaattattgttttgagttttcttttttccctcatttactgattgtcagtgtttttatcctccttgtgttcatctttataaatttttagttcatatattgtataatggtttttgtttgatctcagtctgttttttttctagaatcacgcttttcatctggttctaattgttttatgatcttatgtttaagcttttataggatttatattttaatttaattatgaagcatctttggttaatttgcctttgttcttaatttgtctttgtccaaatttgcggctgc

SEQ ID NO: 249867 - DNA, 761 bp, Homo sapiens
  misc_feature (720)..(720): n is a, c, g, or t
  misc_feature (739)..(739): n is a, c, g, or t
  misc_feature (761)..(761): n is a, c, g, or t
ctgcctcagcttcccgagtagctggaactgcaggcacgcaccaccacccttggctaatttttgcacttttttggtagagatggggttttgccttgttggtcttgaactcctaggctcaagcgatccacccaactcggtctcccaaagtgctgggattacaagcatgagccagcacgatcggcctgaatttcttaatgttttccttcactgggcatttaggaccttgttaaagaaggcctttcatctccagagcccatgaagatgctctcccatagcatcttctaggctttaaaacattcagagcttatttgctgtgtggtgttggtgagggctctaatttttctccccgcaacccagataaccagggtcacccagttaacagagctttagagtccacgttgctttccgttgctcacgtcttcactgactgctctgttcatctgcctatctcagaatcacaccctttctccaggaccactctccttctgctggaagtacgttcttcagtgagttccttgagtctcactctcctgagtttcgtgttgtgataaattctgtttcccatctggaaatgccctttaccgtgagcagattcttgaacaaccatcaatttcaactcctgattctaatttgatggtgaagagtcccaggccaggcgacctttctctcaagaaggagatgtcagaggcccctcgtgacagcgagcttccggggacaggnctccttgtgttgtcaagtnaataatgagtaatatcccgccn

SEQ ID NO: 249868 - DNA, 438 bp, Homo sapiens
ttcttacgactgttttcccgtaaatttgctatcatttggagatggctgatggtattgttttaaaaatacagtgtcagcttggtggattaaaaattccaagatgatttgtgcataattaaatgtttccctggagcaaagaaatcctctttttctgcggtgggtgcggtgtggggtccaggtctgtggtgcggtgtgcggttgtgggtgctaggcgttgaggcagacgctggcaaaacgcctgtttatcaccaatagctttgtctaaaaaggtgtgtttgtcctgcgcttggacctcctctcatgacctcttctgcttggaaatcctttcatccaatttgttctaagtgtcttaagtgaagtcaagacccctccatgtctcccctaatacgataatgactaattcttacaggcaaggcagtccggaattcgcaccaaaaa

SEQ ID NO: 249869 - DNA, 420 bp, Homo sapiens
ctgtcatggtctgctcctttaaacactgatgactttatgagtacctaaagatagcaagcttgacacaaacataagatatctcaagagagacaacgtttatagtgtcagtggagaaagtctttctaccagctccaagaataaggacttttgacccaagggaactgaatcaggagagaaataatatgtttgatggtatttggtaactattttaaatgacttatttgcacatatactgagttactcctttggtatagcagaaatatttgagcaacaattttcagttatgaaaaaagttaccaaaagccaacaattgtgccaatgagtagcaatgcaagaaacatttcacttctactgcaggatggtaaaaattgtatgtaaatttttttgtatcaaatacatttttattagaattctaatata

SEQ ID NO: 249870 - DNA, 805 bp, Homo sapiens
aggggatggcttggatttgaataataccatattgacagtttcaccatttagaactgctgttttttgttttaatgttcggctttagattcatggaccacaaattgaactgagtgccaaggaaagtttgaggtagtgctatgttctctggtttggctgcagccccacttctctgtctttccttctatttaagtgattcaaacatttgtttcctgcctgccttttgagaaaatttggagtttgtgaaccctgctacatgagaattcctagcccaaataccttggatattgttagtaccttcgatagaggtagaaaaaattcaatttaatgtgataagtttggttttacatgtgttcagttagaaatgacaaacagtgtcttgaaaaggggatctggtccttgaaaattagagtgcatgaatgtgaaagcaggtcatgtaatggaattcaagattagaccttagatgtaaaaaatgaatatgtatttatatttgaaaattatcaataatgagatagtagctaaatccacaagagtggaattattcattcaacagtaatgtattaataatatgttgagcatctattatgagctagacatggacgtgctgaagatatagtggagaacaagacaggtaagccctcagctctcatgaagttgaccatctgaatggctgaatacagagtatactctcccagaaatagtggaaagcataataataagcatccgtgacttgagatttgggaaacattgtcagttaagaaggtcgaaaagtttcacatgtgttttaaagataaaacagtgtgaaagt

SEQ ID NO: 249871 - DNA, 473 bp, Homo sapiens
gagatgaggactaggtacaggctttagaggagagccaccgccccggacttctccctctgtcaccccgctttccatgaccctccttgcctgactttgtgactccttgcctcgctatcaaaacaagtgctgcaatctcagtgctttccaagagccctgcattgttagaaacttcccagcacgcagcaaaggctgctgcaatactcgctctgcctgcctttgccctgcgcttcctacttaccctccttttgtttctcccaaacatctgtccctgactatgctcatctcatgtttgtcctcagctgctgaaagggccacgtttgttttcattacaaataagaccaccgagtgggctcctggcgtgggggcgggaccagccgcgcgcagtcttcagaggcagccccccaggctgtctctggagggtgtgtctctgcttccctttccccgtgtttattttcagacgaagccaagtggcc

SEQ ID NO: 249872 - DNA, 474 bp, Homo sapiens
acggcgggctgaaggggctcctcaagtgcgccaaagcgggagcccaggcagaggagacgcccagagccagcgagggctgtgaggactgccagcacactgtcacctctcagtaacatggtcccagataataattaggaaaacaaatcaggaccgaaactccagagagtctgaaattggctgaccatggaacacctaacccgaaaatatgcatatccctttcagagggcaaaagacagatactgcagttcctaggacagccatctctccatctcatctgcttagctgagaaaaacaagctcaccatattgtacatatctctggtgggaagatataaaagtgagaatagcaacatggaaagaaaccttgctggagaaccattttcccaatgcaactatatttcctgcttatcccagggccacatcaccaaaaatatacattgtgagatggatcatataaaagtattataaaataaaa

SEQ ID NO: 249873 - DNA, 551 bp, Homo sapiens
acggcgggctgaaggggctcctcaagtgcgccaaagcgggagcccaggcagaggagacgcccagagccagcgagggctgtgaggactgccagcacactgtcacctctcagtaacatggtcccagataataattaggaaaacaaatcaggaccgaaactccagagagtcagaaaaggataagggaccgatggctgaaagcttgggaatccttgcatcatccacaactggcttacgacaagaaatcaaacaagcgcagtttaatatgtcttcccagtcaattcacagatattgctgagtggatggggttgagtctgaaattggctgaccatggaacacctaacccgaaaatatgcatatccctttcagagggcaaaaaggaggaagcaagaacacagaggcacacagggaagaccaggtgaaggcacaaggagaagatgagcatcttcaagccaagacaagagatctcagaagaaaactgccctgccaactccttgatctcagatttacaatgcccagagctgggagaaaataaatttctgttgtttatgtca

SEQ ID NO: 249874 - DNA, 682 bp, Homo sapiens
ctgggaaagccacaccctgaatctcactcaggactgtcagaatgcccatcagggtaagtggaacacactgggctataacaagcgctgaaggtttggaccccgcaaccaggctcatgtgcaagacagatgtggtatgagataaaatcccttggcctcctctcccagtgccttgtagcccttcccagggtagccctggcctccaggcacacagttcctgtaaagctaggcctatcctactctggaaaaaaatgttatccctatttccttctgggagatgcaagcttttcttctgcagagggagggcatagttgtttggtgagtgacagtcctgaaatggctcctgaacattattttcttcctgggagaggctgatggagaactgtcctctcctcttgagtgataactttctccaagccacatagttcaagaggtagctacactgtgcagcagtagcctggagcaggagcatcaggatgaccccagggatacctagatgagttcttgggctgttgcttatgctcatcctaagagttacctgagttaccgttccacaactttttattacataaacagggacttaatgtaccagcagcatgggcattataggaaaaaaaaaccatacagctctcattcataaggaacttatagccaaatggggcaacaaaaataactacttgtggac

SEQ ID NO: 249875 - DNA, 770 bp, Homo sapiens
acccgggctgcaggaaaatttaaaaagtctaattacaagatgaaaggaatggctgttctagaagaaaaatgtatcttttaagttgatatggaattcattattgaagcaattgtttattgcctaaaaggtggattttggtaattttttttcccttcctaacatttaggctgatttgagaaattctgtgtttcagaaagaatctgctaagggcaatgctgtagtttgtttcatcttgtaggagaataaaacctctatttagtatggggggaaagcacaaaacaacccttgattttctatcatgactgatatatgcattgaaatggaccaggtcattaaaaacttctctgtttgtagtggttcctatatagtctagcaatacctgaattagggaaatttgagtagagatccttagaagcattgttaagttacaaattatggttaataataagctcagtaaacactttagaatagtgttataattggtatatatgtgccaggaatgatacgaggaactttatgtgtcatgatccctgatttacagatcaggaaaccacggctcaaagaggtgaagttcttttcccaaggtcacatagcatgtaagatcaactccaagccctgtagttgtccagctgtaatatgttacgttgtaacaaattgctggacttttccttcaggctgctggatgaagcatctgtgtttctatgagctagtgctccctgtaaaacccttttggacaatgttgaacctttgccataaagcatttgagaggt

SEQ ID NO: 249876 - DNA, 643 bp, Homo sapiens
ggtggacagtgaggcgctgcaggtatacatgaaacccccagcattctgagtcctttatgaatgcattttcctacaaaatgttcaacttaggttcttaaccatgccgtattgaaaattaacctcaagcaaaaacttagagcctgaaacacatctttttttacaaagctgtactggttttcaaactccctggcctttgggcacccacacaccgttgcccaacacttgcttctcttccttctctcttcctactcactgtagcctacttctaaccctttctccacactacagccaacacagtattacacacactgacatgacagtctctccttcagaagccttcactggctcctcgaagctgccaggacaaaggtcaggcttcagtgtgccctgtgcatgtcccttgtctttctcactcaaccctctcccatttgataaaacaggatctgctttagccactcactgcgaacactgtgcccgtcacactgccctgatctccctgcagcctccccttctcatccccctaactcacactctattttttttttttttttgagacagagtcacgctctgtcacccaggctggagtgcagtggcgccatctcgggtcactgtaagctctgcctcccgggttcacgccattctc

SEQ ID NO: 249877 - DNA, 542 bp, Homo sapiens
ggtggacagtgaggcgctgcaggtatacatgaaacccccagcattctgagtcctttatgaatgcattttcctacaaaatgttcaacttaggttcttaaccatgccgtattgaaaattaacctcaagcaaaaacttagagcctgaaacacatctttttttacaaagctgtactggttttcaaactccctggcctttgggcacccacacaccgttgcccaacacttgcttctcttccttctctcttcctactcactgtagcctacttctaaccctttctccacactacagccaacacagtattacacacactgacatgacagtctctccttcagaagccttcactggctcctcgaagctgccaggacaaaggtcaggcttcagtgtgccctgtgcatgtcccttgtctttctcactcgtcccactgcctaaaaaatcccaatcatataactgaactcctcacacccaattggagcaatctatccccctatagaagaactgatgttagcataagtaacatgaaaacattgggcgttgcagatcat

SEQ ID NO: 249878 - DNA, 919 bp, Homo sapiens
tctggaaggtttcatacgggaagtgacatgttaagatctggatcttaaagaacttggggaacctcagaggatccagaacggcagctggtccttgctggactgttcctgtccatgtgcctggtcatggtgctggggaacctgctcatcatccggccatgagccctgactcccacctccacacctccatgtacttcttcctctccaacctgtccttgcctgacatcggtttcacctccaccacggtcccccagatgactgtggacatccagtctcgcagcagagtcatctcctatgcaggctgcctgactcagaagtctctctttgccatttttggaggcacggaagagagacatgctcctgagtgtgatggcctatgaccggtttgtagccatctgtcaccctctatatcattcagccatcatgaacctgtgtttctgtggcttcctagttttgctgtcttttttttttctcagtcttttagactcccagctgtacaacttgattgccttactaatgacctgcttcaaggaggtggacattcctaatttcttctgtgacctttctcaactcccccatcttgccgttgtgacaccttcatcaataacataatcatgtatttccctactgccatatttggttttcttcccatctcggggacccttttctcttactataaaattgtttcctccattctgagggtttcatcatcaggtgggaagtataaagccttctccacctgtgggtctcacctgtcagttgtttgctgattttatggaagaggtgttggagggtacctcagttcagatgtgtcatcttcccccagaaagggtgcagtggctgcagtgatgtacacggtggtcacctccatgctcaacccctttatctacagcctgggaaacagggatattaaaagtgtctt

SEQ ID NO: 249879 - DNA, 356 bp, Homo sapiens
  misc_feature (203)..(203): n is a, c, g, or t
cagagctacaacgccatgctgggaaaaccactgctctctttagagctgtcagacagggatgtttcttctttgcatatttttaaattgagttgtttccttgctattgagctgtctgaatcccttatatattatgaatagtagcactttttcagatgtatggtttgcaaatatatactcccatcccataggagcatatatttgcnaaccatacatctcaaagagttaataggaaaagaaaggaaggacgtgggctatatcacaaaggaaacagtcatgtgcagaagctttttagtttgatgcaatcctgtttgtctatttttgcttttattgtctgtactttccaggtcatataaaaa

SEQ ID NO: 249880 - DNA, 527 bp, Homo sapiens
gcctaatgaaattactgaagtcaaccacatatttattaaatgaacagttaaatgaatgagagattacttttcattcaaatgggagacctggattacttggtgtggtagacagggtaattgttccccacagatgtctatgtcttaatcttctaaatttgggaatatgttaccttacatggcaagagggactttgaagatgtaattagattaagaaccttatgattgggagatttttttctggattatttggttaggctcattctcatcaaaatatgaaaaagagaggcaggaggtctgaaccagagaacaagatgtgaccatagaaacagagataagagagggaaagttagtgcagttgatgatgctatcctcctgacattggagaaatgtcttattttaagccacaagtttctagtaatttgttatagcttcaataggaaattaatacgtttgggatgtactgctgttcatctacctttctaataccttctcacagagcctgaatggaaaaactgttgtttacagtc

SEQ ID NO: 249881 - DNA, 470 bp, Homo sapiens
cctgccctgcttgggtatttggccccagggccagggctgtccctcccacagctattgaacaccaggtccttgctgcgtctggctgggctgcagaatacccttgacctttcagcatcctcagtacctctgtggagtgctgccatgaccaaactagagactgttattattacgcacattttaagacagcatcggccggacgtggggggctcccaccagcactttgggaggctgaggcaggcggatcacttgaggtcaggagttcaacaccagcctggccaacatggggaaaccctgtctctactaaaaatacaaaaaaactagctgggcatgatggtgcatgcctataatcccagctactcaggaggcggaggcaagagaatcacttgaacctaggaggcagaggttgtagtgagccaagatcatgccattgcactccagcctgggcggcagagtgagactccatctcaaaa

SEQ ID NO: 249882 - DNA, 179 bp, Homo sapiens
aatattctttgtgtcccagctattttaaatggattcagaaatccatttaagatgaagaaggacccttttcccatatttctggctatatacaaggatatccagacactgaaatgaataatgttccctttttgtaatcttttatgcaaaaattaaaaccattatggtaattgaacaacatg

SEQ ID NO: 249883 - DNA, 416 bp, Homo sapiens
aatgaaatgctaactactcaaggcattatatgcagattcatcacaatccctaccatgattccaactgtctttttcacagataaagaagtcgatcgtcaaattcacacggaattgcagtctcaaaaagccaaaacagccaggcgtggtggctcacacgtgtaatgccagcactttgggaggccaaggcgggaggattacaaggtcaggagttcgagaccagcctggccaatatggtgaaacactgtctctactaaaaatacaaaaatttagctgggcgtggtggcgtgcgcctgcagtctcagctactcgggaggctgaggcaggagaatcgcttggacccaggaggcagaggttgcagtgagctgagatcacgccactgcactccagcctgggcgacacggacagtctccagctca

SEQ ID NO: 249884 - DNA, 278 bp, Homo sapiens
gaagaaagctaacctcatttcatgctgattatttaaccttggtcataactcccaattaaatgcatttcttgaacccgtaacaaagcaaaatatggcacttactggtcagaaattcaaagcaggagagagaaaaaatggcttaatagctggaaataaaaacatcagtgaatttttcttatggattccttcatgtcaaattcatatcatgagtgactcgcagttttccctttagatcatcttggcatcatcgaggagcaaaaataaaaatgatttctagt

SEQ ID NO: 249885 - DNA, 275 bp, Homo sapiens
tttttatttgtggatttgctttagcagtcagtgttaaaactgtgacatgtgatagatcactgtttctaaatgtatgctttgaacattaatattacagaagtcctaaatttctgtgcatcttaaattatttttaaactttgtgaatagataatacactcatatggttcaaaagtaaagtataagaggatatacaataaatgtctacccccttcacgtgattcaaaaataaagtataagaggatatacaaaaaagtctaccccccctaaaaaaaaaa

SEQ ID NO: 249886 - DNA, 428 bp, Homo sapiens
ctgagatgatggggggactggtgccatggagggaggaggagtgaggtggagatcgggaattccagccaaagagaaatggggtccctgggagaaaattcccactctagcagtcctggagttgtgctcatggagacttgcttacgcgagtacaaggacagcgttgtattgacaaaatttcagccctcagtctagtcttgtaaacgatagatcaggagtgtacttaaccgtcgttactttgatccagccctaggtttcccttttctcatttgtaaaattgttatagtaatacctttttcatccatttgtggtaacatttaaatgaggtaatttgtgtgaagcccttagcaaacacagcgcttcttagtcgtgggttccgcgtggggtggattcaaccaacctcaaatcaaaaatattcttcaaaaaagaaa

SEQ ID NO: 249887 - DNA, 473 bp, Homo sapiens
tgcaatagtaggctatagagagataaaaaacaaaatctcactaactgtgggccattaattggcatacctcaaactgccctatattgttacctaccttttttggtgtctgatttttgaattccataaggacagcgaccatatgttaaacctccatgtgtgcctgctcttttcagtcatctaataaatgattctgccattattgttactcttgtgcaagcacgggcaaataccacaagcaagacttgaaaacaaatcctcagttccctgtctttaacaatgaattttgtgaggatgaatataataaaatataacagagtaatgtgataatggtcacatttaaatatatgtatgtatctacatacatatatgtatacacatcataaaacacatgtagacatgctttatatatcttactttctaccaagctcttttcatatttataagggaaattaaagtataatatatgtggttca

SEQ ID NO: 249888 - DNA, 512 bp, Homo sapiens
gtaattatgttaggagagattctcagttcaatctaatcctgtctaaacaggctgaaagaaattagtcactcagaattatataaaaggctctattgagtgcttgcaatggtaaacaacagaccctggagtttgaggacaacaccaaggtactgccatacttgaggtggagatggcgtttctcagccagtatcgtactgaataggcaaaagctggaagcagtccctttgaaaaccagcacaagacaacgatgacctctctcaccactcctattcaacatagtattggaagctctggccagagcattcagccaatcttggcagattgaggtactgcaaaaatcatgagcagaagactttatgccattgaatgccattgagacggtcaatgtaacaaaggacagctgtttgtttttcttctgcttttcatgggccagtatcaactaaagattgtcagtttttaagaccttacttaaggatgcaatgattagtaaagaaaattcaacaataaaatgt

SEQ ID NO: 249889 - DNA, 380 bp, Homo sapiens
gtaattatgttaggagagattctcagttcaatctaatcctgtctaaacaggctgaaagaaattagtcactcagaattatataaaaggctctattgaggacacagaaagaagaggcccatctgtaaaccaggaaaaggaccctcatcaaactgagtctgccaacacactgatcttggacttcccagcctccagaattgcttgcaatggtaaacaacagaccctggagtttgaggacaacaccaaggtactgccatacttgaggtggagatggcgtttctcagaggttgcagtgagccgagattgtaccactgcaatccagcctggtgaaggaacgagactaaagtctaaaagacaaaaaataaaacaaacaaacaaaataa

SEQ ID NO: 249890 - DNA, 618 bp, Homo sapiens
ttagaatgctaggatagaatttctgtctccattgtagtgtagggggtgcagatgggaaacctggaacagataccacgaaagaagcttgtctcaagaaggctgacacaatgggagacatagcagggagatggaaagaaactgctgttgtgatagccattagttcctgaattaaatcaactctaccctctgttcttcctctggattttcagttacacacatttttcttacataatcaagcttttctgttacctgcaaccatatttcagctaatactcagtatttttcaggtttttaacaaatatacattacttttatgctaacaaaataattattatattcattgattctaagacaaacttttttttaccttttaaaatccttgaaattggcatgtattatacaatccatggcatgtcataatttaatagaactttctttcataggatacattaaaaagtaatgttgcgaggcacagaaagataaatattacatgttctcactcatatatagaagaaaaaaagtagatctcatgaagatagagaatagattggtggttaccagaggccaggaagagtaggggagaggaggaaatgaaaagaagttgattgatgggtacag

SEQ ID NO: 249891 - DNA, 652 bp, Homo sapiens
gctttgccatagggtaggcacagagccagcttttaaaaagattggtcattttccaaagtgattgcatgaccttaatttctatgcaccaaataaaatagcaaattgtaaaaagttacattgtactaaaattatagccactttttgttacatataatcttcaaaatatatggaacatcctaaaaaatcagttcttggccaatagggaggatttttaatttcaggtgttgaactgagattttgagcaaagaactataaatctaacaatgatcactactgttattactgctactaccacaactacaactaattacaatgactgcaacaaaataacaaatacagtagccctgccttatacacagcttccaagacccccaatggatgcctgaaacttcggatagtactgaatcctttatatgctttgtttttttctatacatccacacctgtgacaaagtttaatttataaaattagacatagtaagatattaacaacaataaataataataaaatagaacaattaaaacaatatactgtattctgagttatgtgaatttggtctctctctctctaaacatcttactgtactgcactcatgtattttcagaccatggttgatcaaggaaaactcaaactgcagaaagtggagctgcag

SEQ ID NO: 249892 - DNA, 212 bp, Homo sapiens
gtatccatattggtacatgtagctttggttctttcatttttctatcagagtatttcattgtatgaatggcctgtgttgtatttatccaggtcctcttggtcctcttgatgggcatttaggctgttgcccatttctcactattattaagcacactgagtgaatgtctagtctgtgcttccttgagtggaattgctgggttgtagcatacatgc

SEQ ID NO: 249893 - DNA, 570 bp, Homo sapiens
gaaagatttctaaagccaccacactgagttttctaggacaagaaattcacagccgggatcagcagtttctatagagaccccagagaccgaaagagatgcagagacacaaaggccacatgtgggagagacaccaggttacagggcagacagaggggcacaagccagtcctacagcaagcccagagacatggcggagaggtggcggccccggggatctgagaagggagaggggttcccaccccacgcagggtggcctcggccagccctccctgcatgggtcccccctttgcaattacgcagaaagctgctggatactccactgtttggtcgtttccatagtaaccctgtccctggcaagatgcccaaatattattacaaccatccagaggagagaacaatccaagtggctgtctctctgagcgtgtgtaatatccatcctgtgtacgtgccatctgggcctccaaaggtacttcctgtgactgcctgtcagtcatatgtgtgtccagatgcatctatgtgtgtgtgcagagccaccaacaaacatgctgatgctgagctctgataatgcctg

SEQ ID NO: 249894 - DNA, 289 bp, Homo sapiens
gtccctccggcaccactcccatacttgcatttttctttgcatttttgtttgctaacatttaaagtgtggaatttcgcataaacgtctgtatttcctctgcttgaaaaagggctttgactccaacctctgaaaatgcttcaattcaatgaaactaatggcactttggtctctggaattagatcctgttatcaatgacttccacatggaaagatcattccaaaatgtgtaattaaccaagaaaatgcaaataaaccaatttgtacctgctatttagaggtaagacacagaa

SEQ ID NO: 249895 - DNA, 259 bp, Homo sapiens
tgttttcccagcatgtaatgggcaaacaaggcccttcaaaaaacagatctgaccctgttgacttctgcagacacatctagcatctctttcaacttgaaaaatcatgtctatattcctgcattcctaagctaccagctaaattttttataagtttaaatttatatttggatgtaattatatatttataaattacatatatattttatatttttaagatatttacttgtgtaaaataaataaataaatgggtaaaattttc

SEQ ID NO: 249896 - DNA, 447 bp, Homo sapiens
ttttttttttgaagcagagtcttgttctgtcgcccaggctgaagtgggatgatctcagctcactgcaacttctgcctcccgggttcaaacgattctcctgcctcagcctcctgagtacttgggattacaggcacctgctaccacacctggctaatttttcgtatttttgtagagatgggttttgccatgggacctggacaagtgaaaacttttctgagcctctagtttctctctgtttctcttttttatgtgaagcattttctcatctgtaacttgggcctaacatataaaggacttggcatcacacctaactataaggaagtagtcaacaaactggcctggcacagtggctcacgcctgtaatcccatcactttggacttttaaggtggtgctagaaaaacttaaggcttttgtcgacgcggccgcgaatttagtagtagtagtag

SEQ ID NO: 249897 - DNA, 432 bp, Homo sapiens
ttccaatgagacagggcacaccaaactccatctgtgctacaactcagttgcttattgaaatgaagagggagtttgcaagctgaaaagtggatatgagctaccctggaggaattttttcttggtagggaaacagctttgtccctataggagttgttgaacaccctggcttttggagggtgttcagaatttatttggggagatagtggagatcactgccagccacagcagtcttggcatttcacctttccttccagatctctttcagtcccattctctccccactgcactatagcatttgcccccatacctaagtcttactcttctgcttccctctctccttctgtcagttctctgcctgaggccctgctttatttcccattcctttgtaggagaaaagggaagataatccctaagccaggggcttaagttctc

SEQ ID NO: 249898 - DNA, 569 bp, Homo sapiens
tgagtagtattccttaacatgtcgaggctataccatgtatgtttgtactttcacttgttattggacatttctatcattccgcgtttgggctattatgaagaaactatcatgagcatccatacgtggcaggccaggtctcactaacacaggcctccgtaacaactgtttcagtaccgactgagtggttcaattaaatattaagaggaaaaaaaaaaaaggaagccagtgcccttatacaaaggctggaatgtaccaaaagcccaccaagagttttgcctaggttttcccggggccttaaagcatgacgaaataacgaaggcattcttaacaggagccatttagtattaaataagttttacggggggtctgaagaaactccccaggcctccacaaacaagtttattggagatctgaagggactctccaaacctctgtgatttagcaggagacaagataagggcccccagcacctagacccatttagattaactgaatttaactgaggttccagaggaaggtcttcaggactcagacttagttatagattaaaagaagttaatcacttatgt

SEQ ID NO: 249899 - DNA, 398 bp, Homo sapiens
gctcttttggtcattgaatgacagcgtatcccagagtgacttttgggagctatttttgagcttacccatatttgtagttccccaactcaccgggaatggaggctgggtgagtagcagaggaacgtgcctagatgtgacaaaagagtggggtagatgtattaaatgaatattcaatgagaacccactgtacgccaagcccttttctagtccaggaaactcagcaatgagcaaagtcataaaaatcccttctctcatagaatttacaatttgggatgtgtgtgtgtgtgtgtgtgtgtgtgtgtgtgtgtgtatgtgtgtgtatgacacatacacacattagggacagggtgggtaagatataatgactaaaatgtgtggaaaacttcatatggtatatt

SEQ ID NO: 249900 - DNA, 558 bp, Homo sapiens
gttcccaaataagcactcaagatactctcaacaagcttttaaaaattctacatttccagtttcctgtcagccaaattgatttatttcctacaatgttcctaagtacatctcaaacacatcttaactataatctttccaaaaatggtcctgtattagtctatcatgcaaaattggtacacaatacatagatttatacatagttatttaaagaaacaaaacactccttagctaccaaccatctgtactggaatatatttaaatactataagcttttcactttaccttttatcaatatttctaaactttaaacaacatcagaagattctgaagcacacagcacttcagatttacttttcaaacaagtatgtgttggatacaaatattttaaaaaccagaatctcttagtcacagtatataaacagaaatacaacatactgaattaggaccactgcaaatctatattcacaacaatgagtatagtctttccagtcctgctaccaatgcaatatggccattttattatatctcattattcttcatcactcaaaaaacaaacta

SEQ ID NO: 249901 - DNA, 376 bp, Homo sapiens
caagcagcctcacctccccaagccctgtgcctcattcacaccaggggttagccaaaggacacagcaggtgccatagctgctccttgtgaagtgcctgtgagccctgatcaatgtgaatgaatgttgtcatggtcacaggcatttcaggcatgagtgtctgtcctacatattggatctgtattagtttattttcatactcatactgctatgaagaaataacccaagacttgccgggcgtggtggcgcatgcctgtggtcccagctacttgggaggctgaggcagaagaattgcttgaacccaggatgcagaggttgcagtgagctgaaatcatgccattgcactccagcctgggaaacagagtgagactctgtctca

SEQ ID NO: 249902 - DNA, 486 bp, Homo sapiens
ccttcccccagcacttcttgaattgcccagacctcccacaattaccctcttaaaaccacacacacacacacttactcactctctcctttatatatggcagaaattaatgcctgtagaagtgaagggggtgaggttctgagagctcttcaagatttgagtcaaaaggtgattttctgtttatgagggcagcgagtttaagcagttcactcccagggcagtaatgtcaaaaagcgtttggatgacgaccaagtggaataaatatcttgtaaaatggcatgtttaatagtaaaaatagattaatggagctgtcaagtggttgaatgggactaccataaaggtttaagtttaaagggaaagttatgtaaagctgtatacacagcttcttttaaggccagaagggaaaaaatctacaagtaaggctgaaatgtgtcactgacaataattggactggtgatgtgtggaaatatcatcgctgtttaaatgctc

SEQ ID NO: 249903 - DNA, 687 bp, Homo sapiens
gccctctcctcaggcgccagtggagcatgagctgtgctgtggatgaagtccgttggcacagtgagtccctgggatggaacctgcactcgctgcttgacccatggctgggtgagtggtgaagcggtcagcacaagcttctagcccaggcttccctcttagcagcatgtggccttgggcatgtcacagagtctcccttccctctcccccattttctcttctgtcaaccgagcataactgacgctacaatctcactgacagatggtgagcgaggatggagtgagcgggcatgtgcggctcttagctccatgcatggctcaccgacgttggccgctcttgttatcattacagtgatgattattagcctttctacatgacagattctcaaacctggctgctacccatgagaatcatgtggacagcccttaaacaaagattcctgggctcccccttgaacttctgcaccagaactgccaagatggagtccgggaatgtgttagctacgtgcttttaagacgactctggtgcccagcctgggaacccacaaggggcatactcctggcatgggcaatgtctgtgtttagtggggccaaatactgccccattgaatcaagaagtgcactctatactgggctgaatagtgtcccctcccaaaattcctgtccacctggaatccatgaatgtaacctt

SEQ ID NO: 249904 - DNA, 919 bp, Homo sapiens
ttcctttcttctcttagtatattaggacctgcagagcaaggcataatagtagtagtaaagataggcaacttcatcttgttcctcagtctaatagaaaggtgtctagtattttcctactaactactacaatgatttagtttgtcatcagatacaaccttatggcattaagggcaatccattctaaggtggcgatgagtcccccacttttataaggaatgaggactggcttttatcaaatactttttgttcatctatagagatcaaatggttttctccttaaaatggtgcctggcaattaggcaactgcttgtttttacaattattacaatatcttaataacgatcttttcaaaaagttttcctatgctgacctttctttgtattctagggataaatcctttttgaacacagtgcattattctttcaatacactactgaatatgacttgctaatattgagatttatgctttcagtgtattagaatctaaggagcaaggcagaatgatgaataaccttaagctttctttctcttttgtattttccttgctcagttttagcaaaaaaattatgctagcctcagatatttcctgagagcagtatgtctattttgccttctgagttcaaagttcgctaaacagccttcaattttaacttgctaattgtgttattcaaatttcctatatcccccttttcaactcaggttagtcaataaatttgtaaggaatttccatgattctcgagttgtctactttcccttgtactttcattttcctttctatattgtgaagttatgtccctaatgattgctataaattattgatgaatatcaaatactactgttaagttttctatttaaattctgacattaatagtgctattgtctgtagtttttaaatttcagactcattctcataaaatta

SEQ ID NO: 249905 - DNA, 703 bp, Homo sapiens
tcatataattgtttcatatatactgttttaatattccaaaaataaaaataataaaagaatagttacatatttttggttgatctcctgggggaaggtaatagggtcattaatgtgatcacttgcttggcaaagactgactgagaccctgctttgtgccaggctatacagaaagaacactaacatgaggaacatggtccctaccctcagaaatcttacagtctagggaaaaagacattaaataaatcatcttgtaaccacatacataaatgcaaactgtgttaagtgctacaaaaaaacaacagggtacccaagttagactggggtagtggtttcagttatttaattgtggaagcgatatttgggctgggccctgacaggtggagaactgagccctaggggtggaggcacattccaggaagaaggactagcatatgcaaaggccacagtctgaggaaggagaagcgagtggataccagttatgtgtccactggtctggtccaggtgtgggtgaaggggcgcagactggagtggtaacaaaggggatggagacaagcgagcagatgagaatggatctgacacaagtgacaagctgtggagtcaggactgagagagagcatacaacaacataaaacaattgggagaatatgacctttcacttaaaaaccaggacaccaaacaatatacaattcaactaagtcaaaaa

SEQ ID NO: 249906 - DNA, 331 bp, Homo sapiens
agtgtgtgttcatagtttcccaaagtggctttgccatttgcatttgaaccaggacttttgtgtgtgagaattctagctccttcttgtccttacagagcagctggatgctgcgtgtgtggagccgatcacattgggttttgtgtgagccattagcagggttaaggattttagggacttcacagaaggaggctggagagcatcagcagaggcagcctagaccttggatctgtaaaaagaagacactgtttgaaactgcacaaatgagttggggtttccaacagggcaggtgggggcctgtgggtggatgggtgtggcagccacagaggctggg

SEQ ID NO: 249907 - DNA, 757 bp, Homo sapiens
tccctggggcagatgaatgctcagccacgtcagtcattcccatctgctgtgccacggaggttcaggtgcctgttagagtgaaagaaagagtgtatcaggtgtaccttcttcttagccttcctacttcagtccttcaaagagatttgatttctctaaggtgtctcttgtttatacagaatggattgagttttgtcacattcaattctgattatgtgagattcctgctgagtgaagccaaagctagttactttaatgcctattagaataggttccttacaatgtaattctgagaaaaagaaggacccattctgactcgtacacatacctgaacttgaattttgatgttggtcacaagagttctttctgatgtggagggaacaaacatgactggatgaaaagtgaccaggcttgttattaatactaatgaataaattaattagtaccaggtacagagcagaaagaatagagacaggggcatccctagttcaatttctgggataaataaaagaaaaacattagaagtatatgtgtccatgatgcatgtggtgtgtgtgtgtgtgtgtgtgtgtgtgtgtgtgtgtgtgtgtgttttacaagagagagagtccaggaatgaaaaaagatatatttatcccaactcattaccttgttcaaccaaaagatgactgtcttagaaatagcctaaaattaggttgcagtgagtcgagatcgtgccactgcactccagcctggcaacagagcgagactccgtctcaaa

SEQ ID NO: 249908 - DNA, 942 bp, Homo sapiens
gatacaggagacgaaactcagcgagtgagggacgggcagcctggggtgaggcgagtccaagacgggatccgtgcaattgagacgaaacccagcgagtgagggacaggcagcctggggtgaggcgagtccaagacgggatccgtgcaattgagacgaaactcagcgagtgagggacgggcagcctggggtgaggtgagtccaacacaggatccatgcgattcaggagtaaggacagctgctgttaatgcgagcaggtgcccccattgctgtcatgctcgggaaaccaaccgctgtcgggaggacaggcctgcaggggctcaaaggctgctcctggagcaagaatctggtaaaaccctgggaacccagtgcaccctgaatgcgggacatgcacccgcagacccctgcccaggaacgttcatagcctccccggaccaggaaaacacgtgcacccctcagccacgcactggatagagtgtggtagatccacagctgaagatgggcaacctgctgccgtgttcaacaaagagaaatcaagatataatgcccagtaaaaaaaaagaaaaagataaatgtagtcatgttccatgtgcatgaaggtcaaagacagtcccgtgcatcggagggagagatgggaggatgccggggaggcccctgaggacggggcagagcaagtgtgtgaagcgctttcttcctccttgttcctccacccgggtgggggctgcaccgtgttcattttggagcagtttgtctacctgtgcccgtgcggaatgtcctctacccgcgcccgtgtggaatgtgcgtcttgaagtgcagtattgcatttcataaaaagcccttaaaacggcattagaagcagggccggaggcacccactgaatccagctacacccatctctccagaaatcgcctcacatggccgcctgtgcatgcagccatcttttga

SEQ ID NO: 249909 - DNA, 549 bp, Homo sapiens
gaataatagtaatacagtgattaaaaatatagttttgagaattaaatacattaatacctatagaggacttagaacagtacctggcatattataaatgtctaataaatatcaatattacctctaacccatgggtctctactgggggctgtttttcctctcaaaggacatttgccaatgtctgcagacagttttcattgtcatgagtggggagcaggggtagaggcctgggatgctgctcagcatcctaggatgcatgagacagcccttgaaaatgaagaatgaggcatcgcaaaatgtcagcattgctgaggctgaaaagctcggctccacttatgccaccattttctcaagcctcaatcaagcgtccattctgttttttctccgtcctccactcccttgaatgctcattttctcacctggtttcagttacaaactggttttgatcattctgcaatctacagttccatcatcctgaataataatatctccagtggtggatagaaaaatctctcctggcatgttctcccaatattggaaatggtgaagacc

SEQ ID NO: 249910 - DNA, 462 bp, Homo sapiens
cttattgcattgctgtccacgcagcaggtgctcagaacatgcagtgagtgaaccggtgacgttccttcagcttccctctcccatcacattcaagcaggggatgcagcggcctccttttccccacccccacttccatacattcacagtcccatcttgattcaaaggcaacttcaattataacttttagtctgggcacagtggctcacgcctgtaatcccagcacttgggaggccgagtctggtggatcacttgaggtcaggagtttgagacaagcctggccaacatggtgaaaccctgcatctactaaaaatataaaaattagcctggtgtggtggcacgtgcctgtaatcccagctacttgggaggctgaggcaggagaatcacttgaacctgagataggtattagtaagccgagatcatgccactgcactccagcctgggcaacagagcaagactgtctca

SEQ ID NO: 249911 - DNA, 426 bp, Homo sapiens
tagcaaataatagtgaaatcataatagagctgtgattcaggctgtctccatcctctaatgtcagcctctaaaactcagccaaagagcttaaaagtcctggaacttgacttaactatggaagcttccagatctttagttagaatttccttacacattgtcttacagaatgaacttccgtcttctagaaagccaaacaaccaaaacaaaccaaaaggcagaattaggtgggaaatctcagtttaagaatttgactgatgattttctaactctgaaaccctaactcaggtcagaagtatacaagtcaggttacagaagatttaatgtcgtattcagaacccatgtgatttgttataaggctggatgaagaagagaaaaaacaaaaataagataaaggaagtgagactgtaaacaaaaaataaaaaacaa

SEQ ID NO: 249912 - DNA, 438 bp, Homo sapiens
tctggaccacatatctgataattcttacagccctttaaagataatcataactagaatattatcttattttgtagctcatagatgtcaaaagactagctcataattttattgcggatacatagcagaaccaagatttgaactcagacctgtctcattccacaactcattttccttgaagtcaatagatgccactgatctctaaatacctacaaaaggggctcggaggtggagaggggatgtctgaggagccttaggactaccacccaatgttctgtctttagatagagatgctatcaccaatctctctttcacacatactcctcctcttctcatttctgttcgtgtacttggttctcagtgtaagattttgttagaagaaagaggcatgttggtaaaataagaaataatatatcaaaaataaaataaaattgtttgaaa

SEQ ID NO: 249913 - DNA, 461 bp, Homo sapiens
gctgccaactcccatctggctgcctgttgtcagcagccttgagtacatgcatcttgtctcatttctcctgtctcctcattagcactaagcctcatgacctcagctgtctggtaagtgttgtggaagcccttgcaatctagcttagacataaaaagggagtacatctgggcaccgtgagggacagaaaccaggaactggaaccaaaaaccggagactttattggagggaaggattgggaggtgggagaaggggggacacttgatcttctgtaaaggaagagtcccaaacccctcagcctggcactcaaagcctgccctggccgtgtggtttcctaccttaccaacagcacctcttgaacgtttctcctcaaaaacaccatgaacattcatgcttctttttcctcatatcattcaaaaaatatgattttaaattataaggggccttatgaaataaaaatgtct

SEQ ID NO: 249914 - DNA, 391 bp, Homo sapiens
gaataactggggttacagatgcccaccaccatgcccagctaatttatttttttttgtatttttagtagagacagggtttcaccatgttggccaggctgacctcgaactcctgacctcaagtgatccgtccgcctcagcctcccaaagttctaggattacaggcatgagccaccgtgtgcagccgtctcctactatccctttaaatgccactggatacaaacaaaggcagtcccttgacttttctggtcactttaagacacaaacacagtctcaattcagagataattagaacatacggtcctagattaatcccagctttattcagaggagcagcccctcacacagccaccgcttgctgcagagcgacgcctaggacagtgaagaggatttg

SEQ ID NO: 249915 - DNA, 529 bp, Homo sapiens
caaagagagtgggggtggggaggtgccacacccttttaaatgaccaagaactcacacactatcacgaagacagcaccaagccatgagagatccacccccaggatccaaacgctttcaaccatcccctgccttcagcactggggattgtaatccaacatgagatttgggtggagacaaataccaaaactgtatcaaactgagaactttggagccagggaaaggagagagcttaccattgctgagagacagaaagatatctatctatctatcgatagatagaaagatatctatctatcgatagagagatagatagatagacagatagatacatagatacaaactatatatatgtcaaccatatatatatcaactatatatatatctttatatatatatagagggagagagagaagaaacataaatatttgagcaagtttttctcatagatgtgtcattactaaacttttattccttggttaggaaatggagctgatccataatgcacagttgagattctaaatttcatgtt

SEQ ID NO: 249916 - DNA, 710 bp, Homo sapiens
tgtggcccaggctggtgtaccgtggggaattatagatcacagcagcctcaaacacctaggctcaaacaatcctctccactattttttttttaatctttcgtagagacagggtctcactatgttgcccaggctggtctgaaattcctgagctcaagtgatccttctacttcggcctccccaagtgctgggattacaggaatgaaacatcgtgcccagcctgtaatttgcctattgattatagcatttcaagtggttgtttctgcttttcttttatactattctgttgatttttttttctataataattatgtttcatcttaatgatcaggagaaataaaataagccgatggaaaacgcaagagaaaataataggaagggaaaccattaatgtaatgaggaagaaaaggatgtttcccctgctccatggaactggggatggggtaggtggttacagggaaggattgaaaccagagacttacaggattcagaggatgggcaaatgcatgctgccagagtagcattcggtgacaatgcctgacccaaatttcctccctcttttcaagattagctggatttactgttaggtttccgtctccctgacaactcttaaaaaatcttgacctgagtccatggaattttaagtctgatttggttccatcatattcagcctccaattgaatcctacctggtcctagaaacttcatacactg

SEQ ID NO: 249917 - DNA, 568 bp, Homo sapiens
tgtggcccaggctggtgtaccgtggggaattatagatcacagcagcctcaaacacctaggctcaaacaatcctctccactattttttttttaatctttcgtagagacagggtctcactatgttgcccaggctggtctgaaattcctgagctcaagtgatccttctacttcggcctccccaagtgctgggattacaggaatgaaacatcgtgcccagcctgtaatttgcctattgattatagcatttcaagtggttgtttctgcttttcttttatactattctgttgatttttttttctataataattatgtttcatcttaatgatcaggagaaataaaataagccgatggaaaacgcaagagaaaataataggaagggaaaccattaatgtaatgaggaagaaaaggatgtttcccctgctccatggaactggggatggggtaggtggttacagggaaggattgaaaccagagacttacaggattcagaggatgggcaaatgcatgctgccagagtagcattcggtgacatggcacaccttactggacgtgagactcctctagaacgc

SEQ ID NO: 249918 - DNA, 763 bp, Homo sapiens
ggccgtcgctaagacagtgacggacgggaaattagataagccaacacagcaattacaagaatgatgtcatgatcagaaaagaggcttatgtacataaaagtatgatggaggaactgaagagtataattgatgacagtgaaattaccaaagaggatgatgcgttatggcctcctcccaaccgagagggccggcaggagcttgaaatcattattggagatgaacacatttcttttacaacatcaaaaattggttcccttattgatgtcagtcaatccaaggatccagaaggcttatgagtattttattatcctgtccaggaccctgaagtgtttggtcttcagtcttactggattacacttcaagattaaaccaatctaaactgaatattgatgtggacatgggggggtgggagtagtttttaattaccattatcaagaacattttgtgtcagggcagtatatttttataaactatatatgattatctttaataaatatgtgataaaatttaaaaaaagcaaaacaaaacttctagagaataccttcaaaaccttggtgagggaaattcttaaacagcacaaaaatcattaggcaaagatcaactttaacattgtcaaattaatcaatgacttctcttcctcaaaagacatcaaatgggacaaggtatttgtaacacatataaacaaggatttatatttagcatatatataaataatttctataaatcaatgttatatttcaataaaacaactgagatgagaaca

SEQ ID NO: 249919 - DNA, 1181 bp, Homo sapiens
ttatctgtcccagggatccgttgattgccaggtatggctttgtggtaattctagcatttgcaacccagcaatttgagccttctgtctgcctaaatgatgattttacattgtaatggttgtactaaatcctttcgcttttgctccatagccgctgttgtgacaagaaaagctgtggcaaccgaaatgagactcctcagatccagtgataattgacaggtagggaccactcttctttcactggattcttattcctcattataatgaaacacctgcccttgtgttgctcatgggcgagggttaggaatgcatgtggctgaaatttgcctgttggtcatgacttacgctgtgctgagcgattttgattcctgggaaagccatatggaatgttcttttagaggcctgttccttggattgctccggtttttgtctgattcatgctcctaaaggaatatattttttctttcctgactttctgtggctcaatcctcatgctgtgccaggaagcttcagaaataaaataataatagtttgtgatttatgaaatgtggttgggtgcttataaatatttaacttttatttgaaaaatgtttgaatcattatcacttttagctacagtagttctgttggacgtaatccatctacactttaaggttttatttatgcataaaagcagtttaaagagatctgtgaaccaagattttctactgttatttgccggatttgattgcagtatgagaccatattgtaagttgattaatttatcctgcttgtcttaatttttgtgtttttaaacagatccatattactaatctgacatgaccaagtaaatcaccgtagaacaataaatctgttttagttgttcggtgtaattttgagtcagtgtgcacgcattatgcaaagtcgcattccaaatattcattttacattttaattattgaaattcattgtatggaaacatgtatgataaaccatttgttacatagcattactcattgagagttaaatggcctggaaggtttatagatactgtcaattgtcagctaggaaaagagctagcatcttgtactagctggaaaaagagtcttgccaataagactgaccgatccctcattgaggaaaccaatggttgaacacaagtccctttttgggtttcagcaatattgatttttgacaacaacaac

SEQ ID NO: 249920 - DNA, 424 bp, Homo sapiens
agtattatatttctttgacatgtgaagcataaaatgtgaccattaactcttctcaaatgtgagctccatgtggtgaaggaccacatatcatatgtaagcaggaaccctattctgtcaacagacctggattctgatatcaatgaaatagtgcacatcttgaaaacatttccactaatgtaaacaagaaagatgaaagtcaacagagtaagaagttggcacaaggagttgattccgtctgctttggaggttttgctttttggcttaactgttacatggtgctattgtttttgttctgggaggtgggacagtgctgctttatttattttaagaaggcagcaagccaggaacacataattgaaaggaaatttctgtactggcgtattattttttcaactaagatggcaataaataacttgcaacttca

SEQ ID NO: 249921 - DNA, 705 bp, Homo sapiens
cctagctgtcacagaatgatagcacgcctggcagaggcccctgttgctggtagagagctgtctcccttctttccttctcctctcctcccttctccccttttttcctgcctcttctttgtggagtgttcaatgtagtctgcggggagtgggtgtgaataacgtccaaggtattgtccagagatcagcgttcttgtccacgtcctggtgaaccagtggatgcctgctgttggtgtatatgtaagggtagaattgctgggacataggatatgtgtaatatttagctttggtagttactagaaaacagtttccaaagtggttgtgctgttttgcggtcccactagtagtgtatgagagttccagttgctccacatccttgccaacactgggtattttctgtcttttcaaattttagccatttttgtgagtatggagtaataacttgttctaagtttactttgcatttctctgataagcagtgacgttgaatgccttgttataagtgtatcacccattttaatgtgctcatttgtgatgtgctaggttagttatccattgctacatattacattaccacaaacagcagcttaagaacaaacattaggaatttggcacagttaagctgggtgcctctggctcaaggactctcaggagtatgcagttcagctgtcaatagggtttgcccaggtctatcctggatttagcagt

SEQ ID NO: 249922 - DNA, 501 bp, Homo sapiens
tggtgactatcagtcctaaacatttagtccaggtgtgtgaaagcgaaactgtgccccaaacagttaaagacaccaatgactaacagaaattcttgagtttgcaggatggtaggtaagcaaagaaacaacttgctgagatgctgaaagtccctccacttgtaagacaacaaagctggctaaaataggttggaaccaatgtggccaactagagtctgtgcagtacctgcttgctgacatcacagcctgaatttccactgcgtgtttcatactcactccccccgtacctgcccatgtgatctatgaggtgtcatgaagagaactgcgcatgctggaggactttccaggcctcctctttccttccactaatcacctgctaatctcagaatcccgacaccttttctaataaaaacactgccttagcaccagcccagggagacagattcaagctggactcctgtctccgtgtcggccggcctataattacaagcttttcttttctca

SEQ ID NO: 249923 - DNA, 335 bp, Homo sapiens
ggctggtgggtgcgagcaccacagtgggagaggccacgcaattgccactcgagctgtttttaagttggctcacatgggctggggggtgcgggctgagctgcttctcattgtctttttccaatctgctgggggagaggagcctcatgtttcctgcctgccatggggtgtgtggtcctttgagttctcagtcaccgccccattgtcaccaagaaccaagctcagccagggacagtaatcccagcactctggaagcccgaggtgggaagactgcttgagtccagcagtttgatgtcagcctggacaacctagggagccctccatctctaccaaaaaaa

SEQ ID NO: 249924 - DNA, 463 bp, Homo sapiens
aatgtaagctcgctggtctcaggggccatgttttttgtttcctgctctatccctagcccctaacaacagtgcctttcacataaagagcgtttaaaatacttattgaatgaatacataaataatctcttacctggactacttcaatggcctcctgattctgcctttttctcatgcctccccatgagacacagactcagggaaatttgaatgctcttccagttgacatgtcaagaacaaaatcaaggactcgtgagaagagtgggacctccaaggccacctgtggagccaaaagaattgggactgtctgctgtagtgaccagatatggtcaggggatctggcttctagtgccagctctgctgcctgctgtgtgatctggaacaactcacttcacatctctgggaggctgctgcttctgtaaagtggtgacattaacatctcaatgacataggaaatttctaagaa

SEQ ID NO: 249925 - DNA, 333 bp, Homo sapiens
tttttttttgagggggggctcatcagctattgctagtattagtatatttcatgtgtggcccaagacaattcttcttccaatgtggcccagggaagccaaaagattggacagctctgatctagatccaccaaagaagaaaacaattacttctggtgccttctgtaagttttcattaactgaactcctactgcaggaagaaagactgcagtatgtcaacacacctagacagacttttgtcacaaaccactgtctgccctgcagatccaacagactttatctcaggccactgtatgttcttcaagtccattgaattcccctaaaaatcatttccat

SEQ ID NO: 249926 - DNA, 452 bp, Homo sapiens
atatatcttcattgagtttttaagttcacttcttaaccccaaaacataaaaaaaaaacctgaaacccagtacattggtcaataaatatttattattgaataaatattgctaccatcagattctcctctctccatatttattccaaattgattcctttgaatccttaaggaaactatgtggataaaggattgcacacactaagctgtcaggtttttctaagggctgtgctgtcctatacccacttcatagtcaaaagataaggtcgccttagaagtctgaggggaaaaaaatgtggattcagggtgaaaccctgaggcacagtaggtccagatggccttaactttgaagagaacaaagttacaccaaactgcctcttcttgctttctcccctctccccacaaaaaaaggtagaaattgctgcctccctatgaactgagacactgatctttaaa

SEQ ID NO: 249927 - DNA, 462 bp, Homo sapiens
gacaaatcaggtccccattactccaaattggccagaagcagaagtctccattccatctttgtggtcagaaagaacagtatgacagaaggcagcttgttagaatgggaagacccatgggctaagaatcagcattacctaggctctagtctcagcactgtatttactaactttgtgcaagtgattgatccttcttgaatttctgtttccccatttgtaaagtgggtcaaatcataattccaaggctgctgtacagatcagttgaagtagtatcttaatgttcatgagtgtatttctctttcagggttatttatttttttatttttgggtcccaataaaccgtccaaatcttttggggttagttcaggcactgtatatagtagaagctggtgttagaaaagttgatttatactggaatatttttcacagaatcaaccccaatgctcactaacaaactgagaagaa

SEQ ID NO: 249928 - DNA, 297 bp, Homo sapiens
ccctccctgcaatcaaggacaacagccagtcaaattccctatcatacagggaagaatttaccagaggaaaactagctggtcatcgagcacttttcaaagattgcagttttatggactggcagcaagtgttaacacggtcagaggagccacgtgtcatctagcatcagaagaacctttattttcactgtcgccttgacaacatgtagtatacagcctgagtcaataaaatctaccattttgttatcacttatccacctttaaccggaaaataaaccaatccgtggtaactagaaatat

SEQ ID NO: 249929 - DNA, 462 bp, Homo sapiens
cagactgcagttactatgatgtaactgcatgtaacttggataggaacttgcagtcttactgtttgaggaatgagagaactgagatcagggtgaatagcaactgaaaaatgaaggaggttatcccagaaaagagagaaccacagagaagatgccctgattctgtatataaaccctactgaaatctctggctgactatgcatgcacagaatggactcttaagcacctcaactaaggctaaaataactgaatggagaattcagctgttgcccaatgcaagggagatagaatttggtattttggttttagacgagttaattgcctgctaaaatgaaaaatcagtactctttagaggaatgaaacagaattcggaatctctacaatatatcatttgtcacgtttagaattcaatcctaagctattagacatgaaaaaaaacaaacaggaaaatgtgactcataactc

SEQ ID NO: 249930 - DNA, 295 bp, Homo sapiens
gccatgtgccaccaggcctggctaatttttaaatttttttgtacagacaggctctattctttatatctacttataattacacacattgctaatacatgaatttatttacactgaaacaaattcaaatgtaaaataaggtcaaatccttcctgaccacaacccaatcctatggccctccctggaggtaactcctgttatcagttgggtgtatccccattcagcccacataaatgcatttctgtacaaatatgcatgtcatatgtgtgtggatagaataaatggaagagaaccaact

SEQ ID NO: 249931 - DNA, 714 bp, Homo sapiens
ggctgcccgggcggtcgcggacatcatctttaggctgtggatgccttggccggggtctccagacgctgaccctccagggttggaaactactgcctgcttgccacgtcgtgccgccaattgtgctgcccgaagtagcagcctgagagcccttgaaagttgcagttatcttgtgaacagcatatttacggtctcttgggcttggtggtggttgggggagggctgttaatgctttaatttgttcaatgaaacatttaaaatgccccacaatttttataaccctgtttgcctctttttgtttttatttttattgtattttggaaaaattcactgggatccttgagtgatgatcctagcgtctcctgacccttaggtgtttcacctgaaaagcctgggtcttcaagctgaggcatttctgttctagcctggaggcgcctaggagccctgggagactttttaagcagagagatttggcatttagatctctgggttttagaggagtgggaacgcacctaaaagtggggttgccagttacaaagctgttgcagtcctgaagagacccagagtttaggtccaaaattttatttattcaacaaacactttataaagcacttactgtgtgccaggcactgttcttagcgttttgcaaaccttaactcatttaattctcctaacaaccctatgaggttggaacaattaacctaatttacagtgaag

SEQ ID NO: 249932 - DNA, 1848 bp, Homo sapiens
ggcagaaagaattcagaccagttattagttgctaaacaatttgttgttgaatgaaaagcaaaatcctggaaaaaaacaacttagagtattagggtctaacagcctgaaagtcattgtaaacttgacttgtttttctgcccctgaaattaagttagatgaattaaaacaaaaggcaaaggcagttatttaaaaaacttgtttttgctattgcatatttatttcatataacctcagatttattttgatttccatttcttggtgcctggcaccagaatttgtgcagatctatttcaaaaccacacattgtaaaatcaacactattgacagttatgggtaattgaatggcaaatggggtttccaactgggtgctccaactgggactcttaaacaaggcttgacaaattctgctttgtcaggtgtcataaaatatggttcagaacgcatctgtagtgtcaagggaaaatcacttatgccattccctgtattaccacttctgactcttgtccgtcctgaagtaggaattcacatggcttatgatggagtctttgttttaggaaacacgacacaaacgctaagactcttcagatatcatcactgaatctttaagttcaatccagttgctagatttggcctgtaacatttggctcagggattcctggtggccaaaggaaaacatcacaagagtcacattatctgtaagataggaacagactagttgttttaaagaaaacttctcttaaaactcaaagcagaaagatgtcagaatgggatttaagtaatttctgccttcagcctagggaattggcttgtatggcagttttttccgctccttttgtggtatctatatagagataggatatatgactcacttggcaaaggtcaggagtctgaacatttgggtaatgagtaccttgtcctaggaagataaactgagcacagtgtccctaggacttgcacgatcgaagaatccccttggttggggcttggacctttgccagctcatctgcaaaatcttttaagttgtcctgatcagccaaagctgctatcacctgaatcttggttgtttttactattaataatatagaaatattttgccaagaaaatcttttgtctttttgtgggacaggtttcagaaatggtccacagtctctgtagatacctctagtaattggtcgcagaactcattgcctttaatcagccctggggatcagtgggtgacagatcagtgcctttatgaaatggagttactaggaatggtgtgtcattgcctgacgtgcctccttatctgccataatggagttccttatatatttcctgcttgtcttgtatgcctttggatctagtaaggaaataaggagaggttgagaaaatacagagtaaagctttagcaggtatcttcccgttaagtgacaggcagtgatttgtgcttctttggtttttatcatcggtctaatgtgagtcattcttgtgcgtcagggttggatctttttgcctttcccttctcttctcctgttgacttgacctggtttctttagtctgagaaattggacgtatttttctttctttgaggaaagggctagtggataaagccctcccatagagagtgtaacgtgggtaatatttgggtgccctttcagggttaggtcccactttgttcaaggaatgctgtatgcatgggtagattattaataagatggtggccccagtaaatgttggtgtatgtgtgagacttggtgggaagagctgcttgctgtaaatagtggctcctctgctcagcagttttgtgaagtcagttgacttattctttaatttcatcccaccacccaacataaattttttggttcattc

SEQ ID NO: 249933 - DNA, 301 bp, Homo sapiens
cgtacgtgtttctgagcgcttggtggaaagatttaaatggggggaagagaagatgaaaagcaggaaagagttggcaaatactaaccaaccgataaaggaagagaaaggaggactgtacataacagaaattatcatcagctggtgaggaaagtggactctaccatatttaatccccaagtcgacgggcacttattcaaggcccggatgtttaatcgtttttaattttctctacaacttgtgagataaatcttaacattctcatttggctcagacattaaattcggaactggttagctctctt

SEQ ID NO: 249934 - DNA, 86 bp, Homo sapiens
acacacacacacacacacactcacactcacacatacccacacaggagagctgtgttttcataaaaattcatggcaatgtgtttaga

SEQ ID NO: 249935 - DNA, 321 bp, Homo sapiens
cattgaaaaatgaataaaatataaagaagaaaatgaatggctgtgtgctcacgtagaatattgcctagcacacagcgaaataatagttgttagtgttatttattttaagtatctgtttacttttctcatatatgtgttttttccaaaactggaatcatactttaagtagagttctattatctctgtttttgtatatatttatttgttttacatacatatgtatttatatatatataaaatgttaaattttaaaaacagatacatgtatctgtttttacagattttttaaacaaatttaacattttcttggcatatttacat

SEQ ID NO: 249936 - DNA, 623 bp, Homo sapiens
caataaaatgaaatgctacgtaacttttacaaataatattagttatctattattgcataacaaattatttaatacttaaaacagcaaacattatctcacccagtttctgagggtgaggaatctggaagaagctaagctgtctcaaggtgtctcatgaagttgcagtgaagctgtcagcagggactgtagtcatctgaaagctgcaccgtggttggaggatccacttctaagatagtttactcacatggctgttggcaagatgtctcatttctcaacgaaagcagaaggtcccagttcctcaccacagggctgcctaggttttctcatgacatgacatatagcttttcccagagctagtgatcccagagagagagcaagaaagaagctgcagtgacttttatgaccccgcctccaaagttgcatgccactacttccttatccactttatttcctattcatcagaagttactcaccaagttcagcctatattcaaggggtggggaattaggcttcacttcttgaatggaaaggatcaaataatttgtgggcatgtttcaaaattatcacaaataagacaggtctacctgtactgaagtgggaagttgtacactatgtattaaatg

SEQ ID NO: 249937 - DNA, 737 bp, Homo sapiens
tgtgtgtttgtgtgtgtttccatatatgtgtgtgtgtgtgtgtgtatatatatatatatgctggaactttgagcaatatttataaaaatattgtctgtaaaacaagtttgagaaattaattttttatatttataatgggcactgtaatggattgatttttttcttaatcttgaaatagtgaccaagatatttatatcatttttgaatttattttttaattctttaagaaaatttagaacttttcactttcatttgctaaagtcactgtagtcacattcggaaggaatatgtggctttctgttctttatggactacgtttatcagaagtccatatttattaaacatcctatttgatgtcagataacgtaaactcaagcagcttcaaagagttcagcatgttacatattattgagagagcaagtgactgaattttagttgtataagcaatattataggtaggtcagggagtcctctggatggcccctctacctctttatgtttgtatgtttatgtctttatttgttatgtcgtatgtgtttatgagcctagaaaataagtgtcccatatgtaaagtttaataattttgtaatacatttaccacgctgtctgccctattaaaattttccacaaatttgggaactaagaatgccaaattctcaagattttttggtgaatcactctcaatataatagccacttaagaaaaataaataaataaatattggaaggccattggaa

SEQ ID NO: 249938 - DNA, 684 bp, Homo sapiens
cgggggaaaaaagaagaagctgaactgtgagccatataaaaataaggtcggtaaaccacgaagagaatttttatatttataatgggcactgtaatggattgatttttttcttaatcttgaaatagtgaccaagatatttatatcatttttgaatttattttttaattctttaagaaaatttagaacttttcactttcatttgctaaagtcactgtagtcacattcggaaggaatatgtggctttctgttctttatggactacgtttatcagaagtccatatttattaaacatcctatttgatgtcagataacgtaaactcaagcagcttcaaagagttcagcatgttacatattattgagagagcaagtgactgaattttagttgtataagcaatattataggtaggtcagggagtcctctggatggcccctctacctctttatgtttgtatgtttatgtctttatttgttatgtcgtatgtgtttatgagcctagaaaataagtgtcccatatgtaaagtttaataattttgtaatacatttaccacgctgtctgccctattaaaattttccacaaatttgggaactaagaatgccaaattctcaagattttttggtgaatcactctcaatataatagccacttaagaaaaataaataaataaatattggaaggccattggaa

SEQ ID NO: 249939 - DNA, 259 bp, Homo sapiens
ccttccttcctttttctttctctttcttctctctttctcttttttctttctccttccttgcttttcttctttttcttccttttttccttccttcctttcttctttctttctttttccttttctttctcctttccttacctttcccctttcctttcccatgccctacctggtttcatactcacatcagcccaatcaggcgggtggtgccatgtcctcccccttcccctcccccgcctcctttccccctccctctcccctc

SEQ ID NO: 249940 - DNA, 471 bp, Homo sapiens
ggggagacctcataatcatggtggaaggcaaaggagaagcaaaggcatgtcttggcgggaggcaagagagcttgtgcaggggaactcccatttataaaaccatcacatctcctgagacttattcactacacgagaacagtatgggggaaccacccccgtgattcagttatctccacctggccctgccctagacacatagggattattacaattcaaggtgagatttgggtggggacacagccaaaccatatcaggtatattgacatcatgtaactctttatacaaagcacaacgtaacttttgtggaagtattgtcaaaaaattccacattagattgtataacctcaatctaatctagagaaaacaccaaacaagcccaaattaagaggtattctacagaataactgtgtcagggtcagaagagacaaagaaagaatgaggaatggaggagactaagggttggaggagacc

SEQ ID NO: 249941 - DNA, 144 bp, Homo sapiens
gagaatggtggtcgtatggagcacaggggaggagtccctgcgggtgctggctttcctggtcctcagcagagtctgccggcacaagaaggacactttccttggccccgtcctcaagcaaatgtacatcatgtatgtgaggaactg

SEQ ID NO: 249942 - DNA, 437 bp, Homo sapiens
agaagttgatagttactccagttgctttcgtgggtgatttcacattgaggctaagtgctgaatgagagaatacaagctgagagaattaaaatctgggtatcagtgcttttaagacaaaccttgttctttttatggcacttactttgtctgaaattttaaatgtctttctagaccgtgctgacacacatggaaatatccataataacattatcaaattattttattttgagattttattagaaacttctaattgtctagagaactttctactccacagacaaattaatatgctcaacatttctgaaaagacagggcaacagtgccgttctaatttttacaagaaggaatctgaggccaggttcccttagaagccaatttacattgacagtttaaagaagtggacatacaaacatatataggaccagaattaggaaaaa

SEQ ID NO: 249943 - DNA, 753 bp, Homo sapiens
gccagtttgattattttttacaaaaatcagtaataagcagccatcattagtgttaagggtgtcagaatatgaaatggaggacctgcgttcaagttgtaattttttcattaactagatgcgtgatttggaaaagttgcttaaattatctgaaatgtaatttccttatctgcaaagtgaatatgaccagaaagactgcgaggagagaatgagataatactaaggctttgaaggtataggtatcatatattaataataaggtgctaaaaacataatttaagactaaaggaaaatgtacatacaggtcccttaaccacagccatgttgtattaatattctctgctactaattagacattgcacccctcaaaggaatggtttatttctcgctgttcaatcacatcaagtgttgccatgattcttgtctcagaccccaggccccaggtattctgaactgtcacttggatttatcgaggcagcccactattattgttggatttcagtagtcatggaaattaaaagttgtcctgtttattgtggcagctggtaaacagatagcaccttttacatcatagctcttggtacttgggaattgccagagaataaaataaaagttaaaaaattcaataacatagttctctgcactatcttaacagcaagccaccagtgaagggtccaggaagccacttacatcacaacagacatccctgagcgaattggtataaaagtagctacagtcttgatagctcagctgctg

SEQ ID NO: 249944 - DNA, 476 bp, Homo sapiens
ccctattcttcatttttgtctagcaatatttgaaagcctatgacattctctgcagtatattaaatagccagtgaaaagcaaggatgaatggaatgttccaaagttatccagcaaattcatcctaagaaaataaacagtttaaataattcaagtaaagaaacattccattgccactcttttttctcattaacaagtttattttgactgcattattctaacacctattgtatcagggtcagaatatatgaaaatatactgtactgatttatatttttactataaataataaaatgtaatataaagtttgttttcctgtgttgggaaactcattttgggagttattttaatgaatgatgtactcttacatcctcttaatttagaaaccaaacaagtacaatcacctcagaagttgtgtcaatatgtttgttttaaagttaaaaaaacaaaaactttgttaagctatgcttgttttaaaa

SEQ ID NO: 249945 - DNA, 742 bp, Homo sapiens
tctgaatatgatgtcttgtttattgccagccaggcacccatggtatatcaatgctgaccagagtccactgagccttagaagtaacgatattttaattaataatgatattatggcaataatacttctatcgttcatacactgaaggtgataatattccaaatatgacaacttttcaaagacagaaggttataaccagatctggaatttccatagattttttttaagtttttttttttaaacatctacagatttaagatgacttgaattaatcaaatataattctgggcttcattgcaatgccactgtcaagaaacccattaccctaataattgtaaaaacggaagaatttcttacaaagaaattctttctctttaacataaattcttccagccttgataactcaaacttcttggggaagatgataaattggatagtcattctaaacaactgctgcaacaggatattgtggcaaaaagaaaagacaaagtatagttatcctcttttgatgatgtttactttcctgagagcctgtaatcagaagggtccagtggtctcaatggtgactagatttaaatgttcacttcttcactgttgtgataagaacttggagaacttgaaaggtatttcatatttttgttatttctcctcctggttatatattcctttcaatgaaatgtggaaattacagatgataaatttgtagaattagatgaagtagagaaaaaggtagaaagttagtcct

SEQ ID NO: 249946 - DNA, 1578 bp, Homo sapiens
  misc_feature (94)..(94): n is a, c, g, or t
  misc_feature (99)..(99): n is a, c, g, or t
  misc_feature (108)..(108): n is a, c, g, or t
  misc_feature (259)..(259): n is a, c, g, or t
  misc_feature (1123)..(1123): n is a, c, g, or t
ttctcctatctttggtgtctctcatcctatgttccttgctatgtgaatagattctctgtttcttattttaatgctcagtgtgtattcttttatnattanaaactctanaaggctaatccttccctccttaaaactggaagaattatagaaggagctatgggcacactgacacagaggcatgatggtgaggtgtctttgggaactcagactgaagggacctcagttctctccactggccactgagggaaaagtttctcanacaataccttgaagttttgactcttcatatcagctgagcatttatctgcaatggcttccctcttctttgagccaccttaacacattactctccacacattcacggctatctccttttcttcaatggggaaatcacatctggcttagagataaaaggtcctgtatataggaaaagaaattggacttaggcctgttgtggtgatgtcaattcagggagaggaaaatatgagacagaggaagataaagtcactttaggtgtcaagaaaatgaagcctgtctctactaaaaatacaaaaaattagctgggcgtggtggagggcacctgtagtcccagctactcgggaggctgagggaggagaatggcgtgaacccgggaggtggagcttgcagtgagccaagatggtgccgctgctccccagcttgggcggcagagtgagactccgtctcaaaaaaaaaaaataataataataataataataaaataataaaaaaaaaacccatgcaaccgccattacagacatagaaactttccaacatcccagaaggctccctcatatctcttcccaatcattatacctcaaagttaaccattagtttgacctctataatagaatagtttggtttggttttgaacttcatataggtggaatcatatagtatgtactcttgtgtctgacctcctttgctcaacattatttctaagtatatagatacatatagataacattatatccatgttgctgtacatagtagtagcttgtaatttaaccttttttttttttttttttgagacggggtctcattctgtactccaggctggagtgacagtgacactatcatagctcactgccacctcaaactcctngactcaaacaatcctcccacctcagcctcagctccccaagtagctaggactacaggtgcataccaccaccacacccagacaatttaaaaaatttatagagatggggtctcactatgttccccgggctgatcttgaattcctggcctcaagtgatccccctgtctctcagcctctgaaagtgctgggatgacaagtgtgagccatagcacccaccctttatcatgtaattattttgttacttccctcttgttcactctctctacatatatctggttgtatgtcttaagtcttatactactagaaattaggagttaggttgatcagtatatacaaagtttcagttatatgagaggaataagttttggtgttctgttgtgtaacatgatgactatagttaataatattaaacatatgaactgggggggaacaaatcagtctataacaattcccaatta

SEQ ID NO: 249947 - DNA, 1443 bp, Homo sapiens
  misc_feature (988)..(988): n is a, c, g, or t
atccagtagaaattatatttatttaaatgaattacccatgcacaggtttcattcagtgtaataaaatatgggcttcagaaacaaaaaccagaactgaaagaaaattggttttgtaggtagaaaaatgtgatttaaaaatgcagatatgccatttattttgagggtgtatagctcacccctgtaatcccagcactttcggaggctgagacgggtggaacacttgagcccaggagtttgagaccagcctgggcaatatggtgaaaccccgtatctactaaaaatacaaaaaattagctgggtgtggtggtgcacctgtaatcccagcactttgggaggctgacatgggcggatcacgaggtcaggagattgagaccatcctggctaacatggtgaaacctgtctctactaaaaatacaaaaaattagctgggcgtggtggagggcacctgtagtcccagctactcgggaggctgagggaggagaatggcgtgaacccgggaggtggagcttgcagtgagccaagatggtgccgctgctccccagcttgggcggcagagtgagactccgtctcaaaaaaaaaaaataataataataataataataaaataataaaaaaaaaacccatgcaaccgccattacagacatagaaactttccaacatcccagaaggctccctcatatctcttcccaatcattatacctcaaagttaaccattagtttgacctctataatagaatagtttggtttggttttgaacttcatataggtggaatcatatagtatgtactcttgtgtctgacctcctttgctcaacattatttctaagtatatagatacatatagataacattatatccatgttgctgtacatagtagtagcttgtaatttaaccttttttttttttttttttgagacggggtctcattctgtactccaggctggagtgacagtgacactatcatagctcactgccacctcaaactcctngactcaaacaatcctcccacctcagcctcagctccccaagtagctaggactacaggtgcataccaccaccacacccagacaatttaaaaaatttatagagatggggtctcactatgttccccgggctgatcttgaattcctggcctcaagtgatccccctgtctctcagcctctgaaagtgctgggatgacaagtgtgagccatagcacccaccctttatcatgtaattattttgttacttccctcttgttcactctctctacatatatctggttgtatgtcttaagtcttatactactagaaattaggagttaggttgatcagtatatacaaagtttcagttatatgagaggaataagttttggtgttctgttgtgtaacatgatgactatagttaataatattaaacatatgaactgggggggaacaaatcagtctataacaattcccaatta

SEQ ID NO: 249948 - DNA, 882 bp, Homo sapiens
  misc_feature (211)..(211): n is a, c, g, or t
cgggtttccgaaaaccaacgtggagagaaccgcagagcttaaataaaaccgtgtatgcacccaaaaaatctccggccaattacccttaaacgaagctcaggaaatccaaataaaagaggtgtaaaatctaagggaaaaaaataggggggacccgaatttccggagcacgattgtgccacgaaagactggaattaggccacgcgcggtggcntcaaccgtgcggggccactgtgggaggctgaggttggcggaactcaataggtcacgaggattgagaccatcccgctaatatgcgaaccccatctctactaaaaaacaagaaattagctgggcatggtggcaagtgcgccgtagtcccactgctcgggaggctgaggcaggagaatcgtttgaacctggagtggaggttgcagtgaactgagattgtggccccgcactctagcctgggcgacagagcgagactccttctccaaaaatagaaaaaaaaaaaagaacttgacatttaatctttgtagcactctgaaaaaaattgttgtggtatatttttaataaagatgctgatttgctgattgtcagtattcacttcccacacattggctagtaagtagtaatgctgaaaaagtctttctaacttaaaagctctaccttatctacagttagtgggtgagtaatacttaagtatacattaaaaatatttctttctgtatgtgggtaaacctggtaatttcatttaaatattcagtatatggagattccctttaaattactcacttcactgagataatgtgggtagtttgaaatgtaaggataaaatttttcctgtttcaatgcatgagtctgtaatgtcccatcataatttgtattggtttatttttaggtaaa

SEQ ID NO: 249949 - DNA, 431 bp, Homo sapiens
tgaatgctggtatcactgtggtgtataaaaatggtcctcattttccagtcctttcttttaaagatgtccttatgtagcagagctttatgtggtgagagtagtgtttgctcccctggaaggttactatttcacaatttttgtctttctttggtatttttgcttcaaaatatcaacataactcaatagtgttgatgacaataagctgttgattttaagaagatatgaattattggatttccacttttgattgatttttccatttgtgtgtattttgtaacgtcacagctccttttatccaaggaacgttgtttcaggcaacataaggaagaaataatttccctttagaactgaggggaggtgactgctgcctctaacatatacttaggaactcctatttttcatctccactagccctggtttgagattttttt

SEQ ID NO: 249950 - DNA, 449 bp, Homo sapiens
ggtagcatacacttttgatctttcacagtcaaagtggctttcggggcatctgctcttttgatgggaccctttaggtaaattctcagtacccgggcctgctttctgcagaaggaagcgttgccaggattattctagcataaagaaggtggtgagctccctgtgtttagggctgtgcaaggagaggctagggctccagcctggccccaaagagcagttaaattcggttgacaaaggggctgcctgctaggggtgggagagctgcactaaatgattttctctcggtgtggcctagttaagagggagccatgaggccacaatgctcagagctgtcccagggacaccagggacacctggtgctgggtctcagggtcaccaggagctctggggattgtgaagaggagagaggcagacccaggagcccagctgggcgctaataaataagggcactg

SEQ ID NO: 249951 - DNA, 337 bp, Homo sapiens
acactgtgtctgatattctcatctgccttggaggaaggcgagcacgtggcaatccgcaggaagtcctgcgcattatccatccctggacctctcatctacttcctgatagggattccagaaggttctgcatttggaaaagggcgggagagcagcatggctccgagccagggactgtgatggctctgactaaagaggcttgaggaagatcctggggcttcaaccccccagttccatgcagagaccacaccaatgaagcattcattactcccagcttttccagacacaagccattcttgtactgctattaaatcccaggttggggagtgaccttgacgtt

SEQ ID NO: 249952 - DNA, 280 bp, Homo sapiens
ctgcgctgtccgaagaaaccttggtccctgaagtcttattgattggtgcaggtcactgatttttttaatgaactcctgttcaatacagaatatgagtggccatctattgattcaagttcaatttcaagggatcccgtctttgcagagaaaggcccttctaaatgtttcctgttttcctttttttagtttggctttttttttttttttttttgcttttgcttcattctgtgctgtttgcttgtagttgaataaaaatagaaacctgaatgaaaaaaaaaaa

SEQ ID NO: 249953 - DNA, 622 bp, Homo sapiens
cgtgaagcacctgcaagctgagcaatctcaatgaccgtcagcagccactagacaaggagagacgcatgggacggtttctccctcagagcctccagaagggactgatcagccacaaccccttgacttcagacctctcgtctagagaataaatttatgttgctttaagccatctggtttgtggcaatgtgttagggctgccctggttatcaaatccattaggaaaggaagtttatgccatgctaaggtgtttggacttcaggccttaggtgatgcggagctgctgaacgttttgatgcaggcagataccacaatcaggtatgtttcagaaaaagaagtctggtgacagtgtaaagtagggctttcccttcagtgtgccaggaaaaaaaaagttatgagtgtctcaagtatgagccagtgtatgggatcaagttacatcttagaaacgtggttactctcagctggccgcttccagccccaagcagccacagccatttgccccggtgtactgtacaaatactatctttttactgtgtgggtcctgacatggaaaacactggaaagcattggtataggacaaatggaaagatcctggagatcacagaacagggaatttcattagtcc

SEQ ID NO: 249954 - DNA, 507 bp, Homo sapiens
aatgcaaaatagcaaggagtaattaggaagtcttattattgaccttttttttttcagaaaaaaaatgtactaaagaattgataaaaataaatattttaaagttttaattacattgacaatatgtgcctttaaaaaaaaaagggactttattattcctacttcaagaacaatattgaagcatcttcatttttggaaggactgtggatgattatgaatgacaggcttactgaatatcctcttgtaattaatacagtaaaacgcttccatctttatccagaggtgagtcataatttgagacaaataatatttgtagagtgatcctttttatcagatataaatagtaagcacaatcttgttaaaaagaaagggaggggacctttcaggtttattaattgtgtgtatccttataggtgagcagaatatcataagttcttctcttaaaatttaaagaccccagaaactgttctcgcatgaactcaaagaatgaaccttagtgtgtaaataatg

SEQ ID NO: 249955 - DNA, 363 bp, Homo sapiens
tccctgagctgaggaggtggagctggcagtctgggaaagccaagacacctagaggtagcagggcacaataccagagaggatagcactacacagagaattgtaggatatgcagagggtcccattcaagtcttcagctgagagctgatgcgcgcacgcgggcatgcgtgtttgtgtgtacaaatcaaggccagagaaaaccacctgaaaagataagagggaaccatcttcaaagttcatacagggccagttcctcttcctaccagccagagtagaaaacctcataattcagggggtatcaagtagaacactcagagatggtttgcctcggtagtggggcaaaataagccctaaactctgctcttg

SEQ ID NO: 249956 - DNA, 1567 bp, Homo sapiens
gtgaaacatgcctgtttcccctttgctttctgccatgattataagtttcctgaggccttcccagccatgcttcccgtacagccttcggaactatggaacgttagcagctggggacctttctgccaccacaaaagcctagattatcctgatggacgatggaagacacatggctgttgttccagctgacatcaagccaaccactggacaagataggaaagctctcctagaacacgaaggcccgaatgaactggcccagagcagagaaactgctcagccaaactgccaagctgtgattaacaaaggcttcatcttaatccaccagattttggggtggtttgttacacagcgaatgctaactgatacagtcattatcattaggtctttcttgagctgatcatacttcccagcatagaatacgccaatgtcctgctccttattcctggctgccagcattgtaagagctgagtggaaggctggggttttcagcactcaatatgcactagacaatccaaaagatctacaaaaactttacatctacaagccaaggcactgaatctcagccccagaaagagactgtgaccttccttcctcatcaggatcccaagaagccgtagaacaagaggctaagaggttcgaaggacactggaaaggcttcatgctgctgtaggttgtggatggacaagctttgtgtctggagctgctgtagtgggccactcagttagttcacccaggctcccacattctccatgctctgtttcaggaaacaaccagaactgtggacagtcttaccaaagacactaacatcatcaccagagaattaaagaaatccagtgagtggcccacaacaattggctggcataggacatgatcctagcttcccacagggcacttgggattgtgcagtcagaagtgattgatgtgcatatgtttccacagacctctctgatgtctatgccgtcaccaaaaatattcagactgcaaaccaggaaatgcattgaattgccaccattgtccttatacttccgtttaaggacactccaggcccaacgtctcaaggccttttaggctagcttccttcaaacctcaaatcttggttgctgtctaatttaacctttaacccttttaccatttgccctgagaacacttgccggcagcacttccagctgcagcgtttacccaaagatacctctgccaggaaagaccttgcttttattattacttttgcatttctctagcatattgacattggaaacaaaagacatcattctatatatagcattctggttttagtggtggtagttccatttacaaaatatagtaattcttgatcactgaaaatgtcagagcctagaaaacggagcattcctatgcgtgatgttaacatcattaaacagttgttggccaaagactcatgtgatgaatccaatttttctaaaataaatagctcagatgattcagatgattctgatattaggtctgtttagaaataaaacttcaaaaacagtttttatattttacttccacattgaaaatcagtcagatttgctttggcctcaaagaatgtgtt

SEQ ID NO: 249957 - DNA, 1594 bp, Homo sapiens
gtgaaacatgcctgtttcccctttgctttctgccatgattataagtttcctgaggccttcccagccatgcttcccgtacagccttcggaactgtttgaccacatgatttgctttggcagatggaacgttagcagctggggacctttctgccaccacaaaagcctagattatcctgatggacgatggaagacacatggctgttgttccagctgacatcaagccaaccactggacaagataggaaagctctcctagaacacgaaggcccgaatgaactggcccagagcagagaaactgctcagccaaactgccaagctgtgattaacaaaggcttcatcttaatccaccagattttggggtggtttgttacacagcgaatgctaactgatacagtcattatcattaggtctttcttgagctgatcatacttcccagcatagaatacgccaatgtcctgctccttattcctggctgccagcattgtaagagctgagtggaaggctggggttttcagcactcaatatgcactagacaatccaaaagatctacaaaaactttacatctacaagccaaggcactgaatctcagccccagaaagagactgtgaccttccttcctcatcaggatcccaagaagccgtagaacaagaggctaagaggttcgaaggacactggaaaggcttcatgctgctgtaggttgtggatggacaagctttgtgtctggagctgctgtagtgggccactcagttagttcacccaggctcccacattctccatgctctgtttcaggaaacaaccagaactgtggacagtcttaccaaagacactaacatcatcaccagagaattaaagaaatccagtgagtggcccacaacaattggctggcataggacatgatcctagcttcccacagggcacttgggattgtgcagtcagaagtgattgatgtgcatatgtttccacagacctctctgatgtctatgccgtcaccaaaaatattcagactgcaaaccaggaaatgcattgaattgccaccattgtccttatacttccgtttaaggacactccaggcccaacgtctcaaggccttttaggctagcttccttcaaacctcaaatcttggttgctgtctaatttaacctttaacccttttaccatttgccctgagaacacttgccggcagcacttccagctgcagcgtttacccaaagatacctctgccaggaaagaccttgcttttattattacttttgcatttctctagcatattgacattggaaacaaaagacatcattctatatatagcattctggttttagtggtggtagttccatttacaaaatatagtaattcttgatcactgaaaatgtcagagcctagaaaacggagcattcctatgcgtgatgttaacatcattaaacagttgttggccaaagactcatgtgatgaatccaatttttctaaaataaatagctcagatgattcagatgattctgatattaggtctgtttagaaataaaacttcaaaaacagtttttatattttacttccacattgaaaatcagtcagatttgctttggcctcaaagaatgtgtt

SEQ ID NO: 249958 - DNA, 529 bp, Homo sapiens
ccaggagattcaggagctcattgaggcacagacacgtgctcctggtccatgtgcagaagtaagagcactgccagcaccagcggcggagccagagccagcatgggaagaggcccctccagagagagcactggagctggagggagctccagccaaggaccagaccaacgaggagctgcctgaaatcacggaggtgccggagagcattaaaagaaggctgggaagaagagttccagcagctacgcctgctcccagaggcaacctcctcctccaggcatggatgcgggtccacagctgggcatccaggctgtttgcccctaatgtgctgcccgggacaggcccttaacaggcgggcagtgggtgaggggaccaggaggtggctccaaagggtaaagcaaacaaagcttttaacgacagccgttgtgccccaggctctccatgccaccacctgccctaccatttattaatagtgttagaattacaagttgatgaaacgagattacaataaagtttgatttctgaaacttcaaaa

SEQ ID NO: 249959 - DNA, 336 bp, Homo sapiens
gtgatggtgggcacctgtaatcccagctactcaggagctgaggcagaagaatctcttgaacctgggaggtggaggttgcagtgtgccaagatcgcgccattgcattccagcctgggcaacagagcaagtctccatttcaaacaaacaaacaaacaaacaaacaaacaaacaaaaaaaggaatgcaccaatatgggttccttagttgtaacaaatgttccatccaaagtgagatgctagcgataggggaaactgagggcagggtacacaggaactctctctactatctttgagcttttctgtagacctaaagctaatctaaaatgaaaggtttattt

SEQ ID NO: 249960 - DNA, 116 bp, Homo sapiens
cccagtaggtggaagctgtagtgagccaagatcacgccactgcactgcagcctcggtggtggtgtgggagggggtggttaaggaagccctgactgataggtgcctggcagctagat

SEQ ID NO: 249961 - DNA, 617 bp, Homo sapiens
gaaaaactggttcatgctgggagtctgtgtggttaatgatagaagatctttttagttggacaatctgcattctgatccaggctcctcctcttcttagctgaatggttttgggcacattctttaatgtctcttagcctcactaaggtcattaataaaatatgggtactcatacatgaccccattctaggaaaatggcaaccattgtcattatgtacacattcagtctctggtgacatctaccatcttctccacctcatcgaatagcactatcgtccccccaagtgcttcacccaaaactagaagccttccaggattcctttgactccttcatccctcataaccaatatgacaggaaatcatattgactctgcctcctgaaaatatctaacatttttccatttctctatatcagatgctgccatcaccctagtctaaaccaccactatcatcttcttgcctgggtttctgtgatgacttctaaacagttcttcctgatccactttatttccttcagtctattcttcacacagtatctagtcatcttttaaaaatgtaatttagatcacatctcttcctgcttgaaaccacccaatggtttcacatcatccacagaataa

SEQ ID NO: 249962 - DNA, 347 bp, Homo sapiens
cagtgcagtactagtgtaaagacagacatacagactgatggaatacaatagaaatcccagaagtaaatccttgcataaatgattaaatgatattcagtaagtatgtcaataccattcagtgaggaaagggcagtcttttcaacaaatgatattgttaaaatctgggtatccacatgcaaaaaattgaagttggagccttaccttacatagtacagaaaatgaactcctggcctcaagcaatcctcctgactcatcttcccaaatgctgggattacacacatgagccactgagcccagccagaatccaggttttcatgtgagatctcatttctaactgttggaattaa

SEQ ID NO: 249963 - DNA, 454 bp, Homo sapiens
cactcccactcgggttcatctcctttaatgttgtttacagaagtggggcaggtgtcataatttatttcctcttaagaacttgtcagagacgtaagaagctaacccactagttctgctgtttaatcttgcagatttttatgtgtttcgaatttttattatgaacagtccccccagtgctgtacccctttggcaggaagagcaagagtaagagatgttcccctatttccatcaatcagccaaatatttataagttaattagtaatgcaaggcagcatgtcagtattaggtgaaaaaaacatgtaattgtaaagaactataaaatctaagggctggctggctacggtggctcacacctgtaattccagcactttgggagcccgaggtgggtggatcacttgaggtcaggagtttgagaccagcctggccaacatggtgaaacctcttctctactaaa

SEQ ID NO: 249964 - DNA, 523 bp, Homo sapiens
gtcatcattttatgcctccctccaagatacacacatagagctgatcactccatgcaccccaaatttagcagaatgcacagactctgaagccagacacctgggttcaaatctctgaacatccactaccatctaagagaacttgaacacatcttgagccctctctgtgcctcggcgtccttagcagggaatcagggacaataataatattgcctacttcatatattaagtgaacacgtatgtataaagtgctttggtcaggtgcgatggctcacatctgtaatcccagcactttgggagaccaaggcgggtggatcacttgaggccagactggccagcatggtgaaatcccatctctacaaaaaatgcaaaacttagacgggcgtggtggcacacgcctgtaatcccagctactcaggaggcttaggcatgagaatcacttgaactgggaggcagaggttgccgtgatctgagatcgcaccgctgcactccagcctgggcgacagaatgagactcttgtctcagg

SEQ ID NO: 249965 - DNA, 430 bp, Homo sapiens
acttgcctctaagacacctaataaagatgaggaaggctccagcctgaagcgtgggtgaggtgtccagctgcccaaaggcgacagtttattctccattccatgcaaatcttgaattgagatgcaagtttatcctaaattattaggagaactgataatgggctaccaagaaaaaatacatacatgcaatatccaatttccaaactggctttgatggagtctcgctctgtcatccaggctggagtgcaatggcgccatctctgcttactgcaacctctgcttcccgggttcaagcgaatctgcttcccgagttcaagcgattctcctgcctcagcctcgtgaatattttaacacgttaatatttaagaatgtttcctcctggttgattcccactaaaatgcatgtgtccttccattaaaagagcccaagcact

SEQ ID NO: 249966 - DNA, 295 bp, Homo sapiens
acttgcctctaagacacctaataaagatgaggaaggctccagcctgaagcgtgggtgaggtgtccagctgcccaaaggcgacaggtcttacggataccaagtcccatgcctgccagcttgcacctgttaagtcatgtgatacttaggaaatgtacacatcaccccagtgcagaggcctttatccacttcccttcattttgcctggattgttgctgtgagtgagaaataaatgacatgaaatgatcatgtatatcactgtcttcagaggatggttagttccttgctctggattgtt

SEQ ID NO: 249967 - DNA, 242 bp, Homo sapiens
gtcaacaatgaatccttatttttggtggactttaaggaattatacaaatattgcctcattgatgctttcagaccatttgtgaagtgaatgagaataggtattattattattaaacccattttacagatgaggaagcggatggaagcacattcttcggggccttctttgttctctagtcctagtctgcacaaaggaagcactggatagacgctgtgtgcacattgaccgttctggcaacttgg

SEQ ID NO: 249968 - DNA, 382 bp, Homo sapiens
ttcagatggagtctcactgtgtcgcccaggctggagtgcagtggcatgatctcggctcactgcaaccgccacctcctgagttcaagcgattcttctgcctcagcctcccgagcagctgggactacaggcgcgccaccacaccaggctaatttttgtagttttcgtagagaggggtgtcaccatattggccaggctggtctcgaactcctgatgtcgtgatctgcccgcctcggcctcccaaagtgctgggattacaggtgcagccaccgtgtctggctgctccattgtaatcttacgggaccaccatgtatatgcaatccttggttgactgaaatgtccttaaggggtgcatgattgtgtaataaaataatgtgactcctta

SEQ ID NO: 249969 - DNA, 463 bp, Homo sapiens
ctctaggacccgggcgcagaaagctccagctgagccgggagcgttttgtaggccagaagcttgaggtgctcaaaaaactgaaggaccgggcgtccaagggcgcagggatctacccagagagcttccgggggccgcgcctgggacaatttgagcagcaatataaagtacattgcattaagttataacctaaagtataaaacagcccagagcccgtgctgctataaatacgtgattaaataaatgagggagaagggataatcttccttgcagaggaattctaataatacctcatccagaggggtgtggtaatccgtccacacccaccctgagtgtggcctatgcctggggacgacctttccaagagtacagtgtggaaagagggctgtagagccactccacgtgaaaatcaaagtgattagtcactgcacttgcccttgacatgtgattaaaaaaaaaaccgtga

SEQ ID NO: 249970 - DNA, 462 bp, Homo sapiens
ccaaaaatgatatctaattttgtttcctttctatgaaaattggtattcagacatattccaatgtttgtagctatttacaatgcattcttgctgtattggccattcatatcttttttattattaattgttttctttttaaaatcagttcataaggcttttcaaaaattcttacagaggctggggatggtggcttgcacctgtaatcccagtgctttgggaggccaaggtgggagaattgcttgagcacaggaattcgattgtagcctgggcaagatggcaagacccctgtctttacaaaacattaaaaaatcagcatggcatcatggtgtgtgtctttagtcccagctacttcagaggctgaggccacagtatcccttgagtccagtaattcgaagtggcagtgagctatgatcctgccactgcacttcagcctaggtgacaaaatgagaccctgtctctaaa

SEQ ID NO: 249971 - DNA, 437 bp, Homo sapiens
  misc_feature (48)..(48): n is a, c, g, or t
gtctacacagagaaactgaaatctggttagtcaagaaggaaaaaacanccaagtgcctggcattaagaggattttttttttaagctcagcctatggacaacaaaagcatggactgtatttctcagcatcttttgcagcttattgttgaaagtccagtgagctacctcaggcttttctctgtggaatgactgttgcagagaactgcacctcagaagaatggagtttaaaactgtgatgacattctacctcattgaagaaatcctccagtgccaagggtggatctctaaagaaggattcaatccaggatcacatcttatatttacaataacatgccttttttctccttcagtctggaaccgtgtctcagtctatctttgttctttatgacattgacatattttaaagaataaaagccaattcttttatgcaccatctct

SEQ ID NO: 249972 - DNA, 407 bp, Homo sapiens
  misc_feature (48)..(48): n is a, c, g, or t
gtctacacagagaaactgaaatctggttagtcaagaaggaaaaaacanccaagtgcctggcattaagaggattttttttttaagctcagcctatggacaacaaaagcatggactgtatttctcagcatcttttgcaggatgaggaaactggagcccaggtagccattttggacctgaaggtggaagtcaagctagggagagcaaacaacacgtgtgtggatccctgatgatcaggtcatcctaatcctgaactgctttcctctggtctctttaacaggagagaccagaggaaaaccatgagagagaggtaattttctatcccacttaagccactattgtactttggactttcttgtcatgtacagccaagcctaattataactaataaaacatgcaattgaaagaca

SEQ ID NO: 249973 - DNA, 1664 bp, Homo sapiens
ctgaggcgggtggtacagcctggagcatccagccgctggagctgcgagggaccctggacccctcccacgccgaggtttatgcagagcctgaggccagaaaacctagggactttctgccccaagaagctgaggcacctcctactcccatctgaacaagagggggatctggaagaagccatacagcagctcatcaggacactatagaaagaagcagctcaaagcaattggctgacagccaattcccccttctttcagaaggaaagaaggaagaagcaaacccccccctaccaaagatgacactcaacaccgagcaggaagcaaagacccctctgcaccggcgagccagcaccccactgcccctgtccccacggggccaccagcctggccgcctgagcacagtgccttccactcaatcccagcatccccggctgggccaatcagcctccctcaaccctcccacccagaaaccttcacctgccccagatgattggtcttctgaatccagcgactctgaaggctcctgggaggctctctaccgtgtggtgctacttggagatcctggagtggggaagaccagcttggccagcctctttgcagggaagcaagagagggacctccatgaacagctgggagaagatgtatatgagaggaccctcacggtggatggagaagacaccacactggtggtcgtggacacctgggaggccgagaaactggataaaagctggagccaggagtcatgcctgcaggggggcagtgcctatgtcatcgtatactccatcgcagaccgaggcagctttgagagtgcctctgagctccgcatccagctgcggcgcacacatcaggcagaccatgtgcccatcatcctcgtgggcaacaaggcagacttggcccgctgccgagaagtctctgtggaagagggccgcgcctgcgctgtggtgttcgactgtaaattcatcgagacatccgccacgctgcagcacaatgtggccgagctcttcgagggcgtggtgcgccaactgcgcttgcgccgccgggacagtgcggccaaggaacccccagcaccccgacggccggccagcctagcccagcgcgctcgtcgcttcctggcacgcctgacagcccgcagcgcacgccgccgggcactcaaggcccgctccaagtcctgccacaatctggccgtgctctgaagccccccgcccttctgagagttggcgggtcactgaggtgcattctgggctccagggacgccactgcggggcaaaggcgccgttacctggagtctgcatcatgggtcttgcttgcctgctgccctgatggcctgagcatcccccagatccaagcctgggggatcccgggaaagcgatggacagacagacgatggggccgaagccccaagctgggcacaaagtagttttttacgtggtgggtgtctttttgtaaaaaaatcttccttgtccctgggctctggccaaccctcagaaaccctcacaataaaccagaccagaaggatgtcccatctgaatgcccagacctctccatctcggctcttccaggcgtctccacctactgccctcccatctacacttgactgtagactggtctggcctgctggcctgggcgtcagggcgcatcaataaagtacttggaccagttttgtgctc

SEQ ID NO: 249974 - DNA, 400 bp, Homo sapiens
aaattactgttggccacctggccttcatacagaggtgaaattaactgttggctaagtaatttgattcccctgtatgccatgtcaaaccagtggagatgtatttgtttaggttatacattgttctttcaaactttaaaaaaaatgaaagcactcttgagagggctgttatttcaagtctgaatctttgtgtgtgtgaattagttgatcacatcttttcttttggggcagtcaacaaaggacaaatgaagataagcaatcacaattctgctctggactgtggaaagctggactaggccagaaacagtggagggatagtgacctctggtggttactggtatggaggtaggggctgcaaattggtatggctcaaacatgagcagttggggacacacctaagggt

SEQ ID NO: 249975 - DNA, 437 bp, Homo sapiens
tcccccagtctccacctctatcttcctgccctgggaatcactccacattcacccagaagaattgttgcctgtgggacagccttgaccaatgggagattgaagctgatgagtaaatatttccccctttggcccctgagggacagttctgagatgcttgacacaggcccttcagcgctggtggccaactcagcagtgcatccttgatctggcttttgcttcttcctttgttccgcccctgcccctcactcctgctctctgggattgaattcctaagacagctccctgcttggggtctttgtctcaggctctgctttagggggaatccaggctaagacagtttccaagcacccatgattgcaaataatccactgttttgataaattcggccaattttttttttttggtgtgcaaataaagttctcattcccttgccttca

SEQ ID NO: 249976 - DNA, 422 bp, Homo sapiens
gaaaaggggctccaatgggaccggcaaggactgaccaaggtcaacggttaaagggctcatacctcaagggcaaccaccctggtggcccagagcctctgatcttccagacgcttcaagggatgatgcttcttcctcagagcagggctcaagctcgtgccgaattcggcacgagggagcaagagagacagggagaggaggacagcgagctgtcagacagggcagtgctattatgcagcagttggttgcttgggattggatttcgagagtactctgcagttttggatgccttgaggcacctcagagtgtaagggctggccaagtcatggcttgcaggtcccagggtgccttaggaggtggcatgagagagggtaaagcaaagtgggcattgcagcattctgggccaaaacgaaatgaactatagc

SEQ ID NO: 249977 - DNA, 617 bp, Homo sapiens
atcacgtgagttcattcatatatgtttatctctttggggatggggggacaacttcactgtggacttaattctactggagatgagtgaccccattttaagacaacaggatcacaaattattatcacatatcagcagggcagacaatagctacgacctggggctgaaagcaggtaactccatttatcctgtaaacattgtcttgattatggtgccagttgctgtgagggatttcctttccaccacctgtttttcacaaggtttgagtctgaactgctaacattctactgatttctgggtgaagggactgactgcaccatcctaccctgtcagagcacttgccccagtacttccactttaagagttttccaccttgtccagaactacagtccattaatcccctcattttctctcttaagagaataaacaggccaggcgcggtggctcacgcctgtaatcccagcactttgggaggctgaggcgggtggatcatctgaggtcaggagttcgagatcaacctgagcaacatggtgaaaccccatctctgctggaaatgcaaacattagctgagcgtgggggcgggatcctgtagtcccagctacttgggaggcttaggcact

SEQ ID NO: 249978 - DNA, 508 bp, Homo sapiens
aacaaaacaaaaaaaaaccgtgattgtttccattaagccatcagagcgtgtctcagatatcttgttatacagtgaagaagagaatacctattttttttgatgatgtttgatgtcatagtaatcagtgctggtttaactcctgtttagttcctgccaaatacattgcatgggctgaagtgtcagtagccatactgttctcatgtttcttggtcctaggatcagattcttctacattattttttagtttcccagagacatggtgatccctaaacttatgaaggtttcatcctaagccattcaggcttttctctttgtatagattaaaccgaaaaccgcatatgagcctgttcatctgctggtggattcccaccacagactcagactcaaacaaacaaacaaataatgtgaccgtttagttagtttccaaaaacattcacatacaatattgcatgaataagtaagtaagtgttacagaaagctgccaaaaaataaaaaggtttttaatatg

SEQ ID NO: 249979 - DNA, 322 bp, Homo sapiens
cacattaaaatatttttcagaacaaaaatcttgccattgtttacccatgttttgatctgaagtcataggattttagggttggatgggtttcagacccattcctctctctcgcccaaccccaccccaccagttttcagaacagagaccaacaacagagagatgagaggaatccccaaaatcacccagcctaggtcacggccaaattgggtctagaatccagatgtcccgatttctgcttgctgagagataaaggtttttttcagtcaagggcaatatcagtcattccgtgacatgtttggcttttgggagtttggccaggaaa

SEQ ID NO: 249980 - DNA, 365 bp, Homo sapiens
tacaaatgatttcatcttgctacacgtgtccacaccaaagctagaattatttggtgggtgtttccttattcctgctttttttgccctccgtcctttcttctttgactcttttatgaacccccagtaactcacagggaacacaggaaaaatggaaccttaaaagttttgttttagaaaaactaaacactattaaaaaattaattaaacattgaaacagttctctcttttggatacagttaactatccattttcttacttctttcacagaaataaaggaataaaagcattatccttggaagtctgctgaataaatctggtggaatcagttaaagtaaaatgtccacatgttacaagtgctgctatgc

SEQ ID NO: 249981 - DNA, 215 bp, Homo sapiens
gaaaataaagttaaacataaagaaaaaataacctgtaatctccagagatggcctctgttaatattttgatgtaagctcttccagaccttttagtgcctttttataaatacattcacttaaacattgatttaaaaaatactctcaaattgctgtcttataacctgcattttaaatttaacgatctagtgtgaactttttttgaccaataaatctaa

SEQ ID NO: 249982 - DNA, 1184 bp, Homo sapiens
tccctttaatgagttcttgttttcctgactgcagctctcttcattctgccaaccttttccaactccatgatgatcctgcaggtttcagggggcccctggacagtggctctgacagcattactgatggtgctgctcatatctgtggtccagagcagggccactccagagaattccgtctaccaggaacggcaggaatgctatgcgttcaatgggactcagcgcgttgtggacgggctcatctacaaccgggaggaatacgtgcattttgacagcgcagtgggggagttcctagcagtgatggagctggggcggcccataggcgagtacttcaatagccagaaggactttatggaacggaagcgagccgaggtggacaaggtgtgcagacacaagtacgagctgatggagccactcatccggcagcgccgaggagacgtaaccataactgctgttagggggtgttggacgacgattctttctggctacttcctgctgaaaaggggcgtcgtgtcggggggctgcagttggggctcctcctgaggttgatctaaggcttcttggaagaatggcatgtccatgtgtggctttgtttgcagcaccatttgaagtttgattgcttctaggcaaaaagagataaattttacaagaaggtttaaaatatagggttaccatatgagtattaagattaccacctatagactgtaactatggcagtagagtttgatacctgttacaccaatggattgtaatactggtttgtctccactagatgtcgctgtacattaccagaaacgttaatataaaagcatcatttcctttgagaaaacatgtttcccccttgacttgctattagggcataatttttggtttaggccattctttataacttatgatatgattgggagaaaaacgttattgggtggctaaaataactttggtgttaatcttggcaattcctttcctttaattattaaatttcttaattattaaattctttcatgactttcacagaccctcttacaatgtactcaactttctgacttgtcttaaacaaccagtcatttccttttaggacaagaatttactatacaagatcctttcttatataaaatccctttatttgtaaccttctttccatagcttagagtgcaccatttaccaatcttcaataaaaaagtcctatc

SEQ ID NO: 249983 - DNA, 418 bp, Homo sapiens
agagtttaaagccagagcacagttgtacttaaggcacgtcctgcaccggcagcttggggggatggtgcctcactgctccacctcctccagtgtggcttggcccaaagggctcttacctcctcccagccccatgcccattcatgtgtgtgcatgtaactgccatcctatccccagggcagtgcctcttctgtacacgatggttatatatggccatatgctgtgataggccctcttacaagaattttcgcagcatgtttaattaggccaggcctttcctgcaaccagcctgtgtcccaggatctcactattgattactgcctcatacagagcacctgggatttggagccagctggtgggaggaatctctggggtcctgtgcctctcccaaagtcaaaataaagagagggtgcccagagca

SEQ ID NO: 249984 - DNA, 474 bp, Homo sapiens
acaagaaggtagataggtttttgcttttgaaggatatggaggaaggggaaaggtaaagatatcactctgacctagagtaatcctcaacccatggtgtagcctctggtcatctcccatctaaagcagtatcaaagggcaagttcagttctaaggccaatgaggggaatcaagcttaagacagccaacgcaaagaagaatgtgcctggagcatggaccagtctcgtaactggcaccttaataccaagccacttgagtctgggctacctgtgtaagttggctttttctctctttgcagaaggaaatagattatacgtttggccccattttttttacccctctctgtccacatgctttgagtatattttgcagttcctttcacaaaaaacagagtgtactttcctttcccttgactttgagcttgaccaatgagatgtcgacgcggccgcgaatttagtagtagtagtaggcggccgc

SEQ ID NO: 249985 - DNA, 461 bp, Homo sapiens
agactctgtctcaagaaaaaaaaaaaaaaatcacatacctttttttcatgttatttgaaacttggtatgaatatcgtgatttaaagcatatcaaagcaattcatcaaagtcagtattgttttcagactatgccccctcttttcctgtttgctcttgagaatctctgatctagatcacctcattttacaggagaaaactgagaactagatgagacttactcatggccacatagcttgcgagtgcctaggctgagactcagtcctcatgctcagagtagcaggaaattcccctgcactctctgctgtcaggtaatcccagatcatggaattgggacaaatgagcattgtttctgagccgaagctcccctgccgctggagatttccatttgtctgtctggtactgaagaaacacagggaacaggaacaaggggtggtggggccagctggccctggcatccctct

SEQ ID NO: 249986 - DNA, 398 bp, Homo sapiens
ccatctctagaagatggaaaagacaaggaagcagagtcatccctagagggatccagagggaacatggccctgctgacaacttaatttcagtcgagtgaaacttatttgggacttctgacttcagaactgtaaaattataaatttgtcttgtcttaaaccactaaatagatttgttacagagaaaataggaaactaattcaccgtccaacagcacattttgttcaatctgatatcattttggttaaaaatgtttttcacaggaaaaaatactgggagaatatacattgaaggatgtataatatttattactgggtaagattttgctcatgtcgttttctagattatctataataaatgtatttttctacaacaaataaatttgtaaagaaggaagtgaa

SEQ ID NO: 249987 - DNA, 337 bp, Homo sapiens
gccaaatgacgaggaggaagacatagtagaagcagtgccagaactgatgttagataatctcacagaagcgttctgattattcaagactgtttttgatggcttttatgacatgcactggacccttctatgataggagcattgaaactaaagcaagtggggcaagggttggtacagtatagaaacatttttagagaaatgaaaaagcaaaaagatagaaattacaatgtatttacataaagttacactgagtgtgccagcctcccctgcctcttctttcatctcttctaccccaagactagaccactgcattttaaatgtattacatgctgattgtaaa

SEQ ID NO: 249988 - DNA, 375 bp, Homo sapiens
cacatataaggagtggaaagctgcgaggttctgctgttgcacaaatggcctccccacagagcacagactgccacatccccttctgttccaaggtgttaggtttttaaaacctagcggtgattgtgacattgttttttttcctccccctatgttgtttatcttgtcagacttaggcgcaagggctgaactccctgcgcagtaccatcccctgggcttggtaggtttggagaaggcaagtggggcaggtgaagttgtgagctggttgcttcaggaactgcagtcttcctggtggctcaggatcgacttgtgttttgttttgggggtactgaccttgttaagccatgtctttagatattgagagccaataggcggcat

SEQ ID NO: 249989 - DNA, 365 bp, Homo sapiens
cttggtcagacattattctgggtgtttctgtgagggtactttgggatgagattaacatcgaaatctgtagactgagtaaagcagattgccttccctagtgtcgatgggcctcattcaatcagctgaaggcctgaatggaacaaatactctgaccctcccctgagtctttctgaaggaagtcagaccctcctgcctgatttccttcaaactaggatagttgctttttcctgcctgcaagacttaaacagaaacattggctcttcctgggtctccagcttgccgactctccctgcagaccttgggacttaaccagcttctgtaattgcatgagccaagtccttataataaatctcttataatagaat

SEQ ID NO: 249990 - DNA, 875 bp, Homo sapiens
tgctccatggagttagacagatgttggtgcaaaattcttacaccgcctgcccattcctaaatgtgcgaacttaggcaagttacttattttgtctttattttggcacccccatgtgtgaactgagaataagaatacttagcaggattgttttgaaaaatagtaatatataatattataataagatgattaatattaaaaatagccctcatttggataactatttttggcaccaactcccaggcaacttttcacagcgtgaatagttagccctctttgaacaagttactaagtaccagccactttaaatacataatctcatttaatcctaacaaattactagtatcattcctattttgcagatgaaaaacaggccaagacaggttcagttgacaagaaattgcacagatctaaatgcagactggacttactgtgaatcccaaattttccctcaccatgttattttgtccaaaatgaaactaaaatgcttggcatagatctagacttttgtaggcactcagtaaatattatttccactctgaagaaaacgattcatgtttcatttcgcttctcatcagaggtaccacgaacagaatatcacccttttatgataaatcactcaaattgcagacttttgatccctaaagttcaagagtgaaaaggtataaatatgaagaaatttcatgttaggtcacgggatgggaaaagatgcttatgtcaggatttaccatttctagtgaccagcacctagcagattgctggtttattagatttatttattattttcattgtttccttcagatgactcctatttatctgattgtagagtaacctctgagctttattagctagaattttattttccacagtgtagtcca

SEQ ID NO: 249991 - DNA, 749 bp, Homo sapiens
ttctctatgtgctcaaatgaatctgacttactttataagaagaagggcttggcattctgatggagtcctggaaatagattcttggagacacagctatgtattggtcttcctacatttgtctctgtgattgtggattatgatgcaggtggactttgctcctttcccctgtgctatgcagcaaagtgaccttgaacaagctgccagccctactggatcatgattactcatattttgaggagaggactgaagtaacatgatctctgaagttcattttagccttaagatccagtgaaaagttagcattaatcctaggaaaatagttagagataaggatggtggagtgcagttattttaagtgctggaaaaattgtagctctctggaggaattgaatcttctgaaattattcactttgtaatacaggggagcttaaaaggtccacccttccatctttctacatatacttaaaggcagttaaattgctgctaaaaatgtgaaatggaggtgtgaacatttctagaggcaattaagtagttctgcattttactggtaaattctatcattcttaaaaaaagagagaggtttatataaaaatggagaaaaaggaaattgcatgtgcagatgtaaaataccatctgtgcttctggattctttccatgctccacaccttcgttgaaagaaattgttgattgaaagctcagattttgctggctagttataaaagcttcctgtgttgcttatcatgcatttt

SEQ ID NO: 249992 - DNA, 579 bp, Homo sapiens
gcgtggaactctgcgcgagctgaatctcctgctgcaggacgagccccgaccccgagcccgatcccctccgcggtcccagcctctttgtccgatcgcattttccatctcctctgccaggaatgctctcccaaccagagcaaatccagatgtcccctcggcgactgtgggcaccctccccagctgtggagccttcgcacgccttcctcagagtccgtggttgtaaaatttgttttgctctaaagtatttgactgtctccctcactagatcctgagggttttagtgagtgcctcagtgtgagcacatgcaggcactgctaggcgcctgtagttgattcttagttaatacaagtgaataatcacaactagaccttaaattgcagggactatgtgacaggcactttttaaaatgctttatacgtgttgatttaagtgtaatcgtcacaagaaccctgcgaggaagataggacagcaagtgccctgttcctgtttgtaaacgtgcccgacactctgcaacaacacctacaacagaaccgtgctagttttgggggttcgcaataaaagtttctgtttgaacggatc

SEQ ID NO: 249993 - DNA, 383 bp, Homo sapiens
cagactaaatatatgtaattcttgtatctctttccagatgattcctttttattcatctttttgtctatacatgtcaatatgactttttattactttagctttattgaatattttattctataaatatgttaaaggaaaatgtaaaagaattttttataatcttagggtgagatgaaaaggctttctttagcaagacatgaaacttagaagccataatggaacataataacatatttaactattaaaaatgtaaactcttctgaatggcaaaagacaccatgatcagagttaaaacacaagcaataaacaggaagaaaacgtatgacaaaggattaataccagataaagtgctcctgtagagtaggaaaaagcaatattaaaaa

SEQ ID NO: 249994 - DNA, 713 bp, Homo sapiens
gttgacaagttaggcctgatatatcttgctgtgccaaggaaataggaagattactgggatcatatcagaaagatacagtaaccaaattgaaggggctacctctgacctcagataaaaaaatttgagcattaaaaaatactaattcaatagatcaaattataccaagtatatataactccatgagttcataatgattttttaaaaataaaaatttattagtctccactggatattgttaatgaacccattcattacccttataattaattcattactcttattaatagaaagtgtcaaacacttatctcacctttcctgtatgagatatattccaagataacccaataactgatgatagaaagtttttgtagaactcagctaataaatatggaaggaataatagaaaactcagcattttactacctattccattggatttaggtaattgtcattaatggggaactttaaaatagagggatcgggatgacactgcttaaatttagtggtcaatgttagtatcaataaaagtggtcaaccagtcattatacacctcttgatgtgattcaacaagaagtatactgcacccaccacctgaaacctattcttgtcatccagacccccgaaaactgaacctaaacctagtcatctctaggtctaaactaatagtttaaggaaaatataggaaatgggggcaggagtaaagcaaaaaaaaa

SEQ ID NO: 249995 - DNA, 317 bp, Homo sapiens
tggtaacacagtaaaaatagaggacaggtaagatgcctctgtaaacacggactgctgtgattttggtgactagtagggggcagaaactcgaaagtagctccagggacgctcacctcttgtgctcctatcccactgtccatctcccatctgctctgggctctcagtgtggagtggagctgatagtggtctccaccaccaaggctctgcctcttgcttgagcccctgagcacctactcttggcactctgtgtgctttgcccacttaatcctcacgacagctctttgaggcaggtattattatccctattttatagatga

SEQ ID NO: 249996 - DNA, 178 bp, Homo sapiens
tctttggtggcctcccgaacaagcaggtgtggatggggagatggactgccttggagagagctacatgagttccagctccaccagcccccagagcctgagcaggtgacttcacctttctgaatctctgaacatccatttcctccactgtacaatttcattaagatacatacaagaatat

SEQ ID NO: 249997 - DNA, 678 bp, Homo sapiens
ggtattaataatagatttattttttgtaaattgaaacgtgtgttattgttagaaagtcagtttatgagataattgaggttgttttgatgactgcagcctctagtttatttctatatttttagttgggcagtatggagaaaatcctcattcatacctacattgcatatgataacagttaaaatctttattgtaatacatgcttgcattttacaaattcaaatattacaggagtatactgcataaaagataaagttctccataattcctactgccctctaaaataaccactaacaacctttttaacaacatgccttgcattcttctagcttgaaagaatagtaaatcaaagcagactcaccaacagatgaacattctgtagcataaatataatcaaagagctaaaattattagtaataatagataatacaataggatgtcatttattgttccaactgatttatgctatgaaaagggcaatctgagcaggaatgtcttagtctttcctgacatttaatttaccatcataacattcgtagacttgtacagctgtagcatcttttcaatgcagaaataattctttatgatgagtgacacatttcttagaagttaaaatttgtgtacggagatggcagaagaatctgtctaggcctgcctcaaactgggttactgtagcaaaaa

SEQ ID NO: 249998 - DNA, 555 bp, Homo sapiens
tccagcctgggcaacaagatcgaagctccgtctcaaaaaaaaaaattttaggcttttaatagtgacaaatagaaagttccatctgagaacaaaaatcagccaagggaagaaacacacagggcagagtctgggaaagataaccagaggcagagcttctgttgtcctttccatgtagagtcatggatgaattactttcctggcatagatgtgtaacaatacagagtatttctagccaaagaagctcaccagaaccctggtgcccagagtttttactggggttcaatcacatcctgctcccgtagtgacctctagttcccagctcttctggaagcagaactgacagcacatggcccaagcccctatcataagtcacattgtccagtggctaaagcgccaggcaaacaaagacactcctatcaggcatgatattgcacaggtctataggtcacctcctagtaacccagggcaatgccctctcttctggggtaaaattaattcctcacaacacaaggcaccgtccacaaatttagtaacatatttctgaagattctggtg

SEQ ID NO: 249999 - DNA, 328 bp, Homo sapiens
cctactgagaggcaggtggttgtccccttgttcaaaaaagtgctgcggccaggcacggtgtcttatgcccataaacccagcactttgggaggctgaggcgggctgaacacctgaggtcaggagttcaagacagcctggcgatcatggcgaaaccccgtctctactaaaaatacaaaaaattagccatgcatggtggtgggtacctgtaatcccagctacttgggaatctgaggcaggagaattgcttgaacccgggaggtggaggtcgcagtgagcagagatcgcaccattgcactccagcctgggccacagtgtgagacactctctc

SEQ ID NO: 250000 - DNA, 775 bp, Homo sapiens
tcttgattgcacccaccctgtagaagatggaatcatggatgctgccaattttgagcagtttttgcaagaaaggatcaaagtgaacggaaaagctgggaaccttggtggaggggtggtgaccatcgaaaggagcaagagcaagatcaccgtgacatccgaggtgcctttctccaaaaggtatttgaaatatctcaccaaaaaatatttgaagaagaataatctacgtgactggttgcgcgtagttgctaacagcaaagagagttacgaattacgttacttccagattaaccaggacgaagaagaggaggaagacgaggattaaatttcatttatctggaaaattttgtatgagttcttgaataaaacttgggaaccaaaatggtggtttatccttgtatctctgcagtgtggattgaacagaaaattggaaatcatagtcaaagggcttcccttggttcgccactcatttatttgtaacttgacttctttttttttctgcttaaaaatttcaattctcgtggtaataccagagtagaaggagagggtgactttaccgaactgacagccattggggaggcagatgcgggtgtggaggtgtgggctgaaggtagtgactgtttgattttaaaaagtgtgactgtcagttgtatctgttgcttttctcaatgattcagggatacaagtgggcttctctcattcattaaaagaaaatgcgacatctttctaagattctctgtgggaaaatgactgtcaataaaatgcgggtttctgggca

SEQ ID NO: 250001 - DNA, 376 bp, Homo sapiens
tcttgattgcacccaccctgtagaagatggaatcatggatgctgccaattttgagcagtttttgcaagaaaggatcaaagtgaacggaaaagctgggaaccttggtggaggggtggtgaccatcgaaaggagcaagagcaagatcaccgtgacatccgaggtgcctttctccaaaaggtatttgaaatatctcaccaaaaaatatttgaagaagaataatctacgtgactggttgcgcgtagttgctaacagcaaagagagttacgaattacgttacttccagattaaccaggacgaagaagaggaggaagacgaggattaaatttcatttatctggaaaattttgtatgagttcttgaataaaacttgggaacca

SEQ ID NO: 250002 - DNA, 512 bp, Homo sapiens
tcttgattgcacccaccctgtagaagatggaatcatggatgctgccaattttgagcagtttttgcaagaaaggatcaaagtgaacggaaaagctgggaaccttggtggaggggtggtgaccatcgaaaggagcaagagcaagatcaccgtgacatccgaggtgcctttctccaaaaggtatttgaaatatctcaccaaaaaatatttgaagaagaataatctacgtgactggttgcgcgtagttgctaacagcaaagagagttacgaattacgttacttccagattaaccaggacgaagaagaggaggaagacgaggattaaatttcatttatctggaaaattttgtatgagttcttgaataaaacttgggaaccaaaatggtggtttatccttgtatctctgcagtgtagaacttgagcgtccgatttctacacatgtagacctgttggattcaacagtgatcgcaattctggacagccaactggaattaccaggatgtccaaacgtatgc

SEQ ID NO: 250003 - DNA, 312 bp, Homo sapiens
ccacagtggtgtaggatgtggataatgaggaggctgtgcaggtgttggggacaggtggtatttaggaatgctctatattttctttctttctttttttaggacggagtctcaaaaaaaaaaaaccaaaaaaaaacccctccttttccaaaaaaaagggcattcagcaaatccggaacactacaaaacagagggttttttttaaaaataaaattccaacaatacaatctgctaagtttgggaaataggccctcctcaaagaaagacctgaggccggcgggtttaatcccatgctggtttctaaagggcagggag

SEQ ID NO: 250004 - DNA, 427 bp, Homo sapiens
tatgtaggcaaacaattgttgttgttatacaaacagaaatgtggttaaaaagagaaatctgaacgcccaaaaaattccagcataatacaaatcgagttgttttcaaatagagggggtgtttcttttttttaaatacaggtttaaattccagccctctattatcacataccccatttcatatttgttgctttttgatgaatacatagtatttcttcatatggacatactgtaatttttttaatgaattttctattcttaaataattttgagtttttactctattattttcataatcagaaaaaaggtaagaaatatccacctggaaatatgtgatagtttttcttatgttcttgacattgtgctcactagaaaacattgctttttgagttgaatgaggaagaaattggttaactcctaaattataggt

SEQ ID NO: 250005 - DNA, 1019 bp, Homo sapiens
attggcagtttttcttgttttcagacctggaataatgcctttggctcaatttaaaaatagaatctgtaatgttagtggaaattaaacatcctgaatagagtatggcatgtaagccacactaagccagggtttttaaaaacgagactaacaggctgggtgcagtggctcatgcctgtaatcccaacactttggcaggccaaggcaggaggaccaagctggacaatatagtgagatcccatctctaaaaacaattttaaaaaaaattaggtgtggtggcatgtgcctatagtcccagctactcaggaggctgaagtgggagaatcacttgagcctagaagttttagaccagcctgggcaacatagtgagaccttgtttcttacagaaaattaattagccagtcatggtggcatgctcctatagtcccagctactagggaagctgaggttgttgtaaccatgcgagttatagagaaacgccacactttgagacaaattaaagagtcctttattagccagcgacccagagacagctcacgcccaaaattctctcagccccgaggaaggggctagttttgtttttataccatggtctaaatagggaggggggattttagctgaagcaatttttacagaagcagaactggcagaaagttaaaaaaattaattggttacaaatgcagttacaaaaaaataaacagttccaggtaccggggcttaaactatcacaaagagataaatgtaggggttttgggtgccatgcactgcgcgtgcccccaggagctgctggtgcaactcgcctcagcatctcatcaacaggtgcattcctggacgtgctttgagtcagttttacactagctatgcctggagggaggtgaaagggtttacaagtgaagaagctaaaatggagtctgtccggctctctctctgctaggagagagtcactcgggttaaaacaaggtaggatatcacaaggtgggatgatcacttgagcccaggagttcaaggttgctgtgagctag

SEQ ID NO: 250006 - DNA, 222 bp, Homo sapiens
actgaggttgaaggttgtgagagcttcatttctttgcatgagcagctggaaacctggattttgaggaaaccccctgggatgtttaagatagttcaggccgggcatggtggttcatgcctgtaatcctagcactttgagaggaagaggtgggagaatccgttgagcccaggagtttgagatcagcctgggcaacatagtgataccctgtctctataaaaaaaa

SEQ ID NO: 250007 - DNA, 781 bp, Homo sapiens
ttagctactcactgtacaaccacacctcaatgaatcttccgtcagcacctcaaactcaacatgtcaaaactgattgtattaactttccatgtttggagaggcagcataacctcaaagttaggagcatggagtctcggatattggttttagtcacagctctagctagctgaatgacctggagaaagtctctaaactgttctttctttgtgtgaggaaatataggtttactcttgggattcgatgagatagtggatacagcacattcaacacgatacctgcacacagtcagtaatcattaaatgttagctattatcatccataattgcccccaaaacttccaatttttcctgtctggtaatgataccattatccacttgaaccctcttcttcacgccatctcagctaaagagttagcaaaaactgtatattctacctttttttttttcctcaccctgtcacccaggctggagtgtggtggtgctatcactgcttaccgcagcctcaaactcctgggctctggtgatccacctacctcagcctcccaagtagctgggattacaggcatgtgccaccatgcccagctaattgttttattttttgtagagacacggttttgtcatgttgtccaggctggtctctaactcctagactcatgtgatccgctcccctaggcctcccaaagggctgggattggggtatgggccatggtgcccctcctattctacctttttattttctctcagattatgattcattcaacatacacttatgtgacatctac

SEQ ID NO: 250008 - DNA, 430 bp, Homo sapiens
aaaatttatgatctttcctgtttgcaggaaatctggaaagtattggcactgattaggaaagccttttttattataatacatccatcactgtatgggaaagcaggaaaggatctgccaatgaaacgaaatagttttctggaaataaataacatctacagacaattgaaactattgactatagaatgacgcagttgtttcaagattccataggtaatctggaatggaggcatggaggtggaagttctggactcttcttctcaatgtctagctaacctggtcagaggcttgccagaaggggccccgataaaaggaagctacacccaagatatgagacaagaatatgggacagttagctttgatctctgaatgtgttgtgtattggtttcagtgcccatctcatagaaataaaatactgctttattctgcaaaa

SEQ ID NO: 250009 - DNA, 536 bp, Homo sapiens
ttatccattgctgagtatacaatttatttttagtaagctcatgagataaatggccaaacattaaaaaacggagtgagggagtcagggacagacaggagacagttgaaagaaagaaaaatacatttcagtctcctagagttagaaggaattctagaaggttttgtttaagataacaaaagtgtaggaattccttatgctgtggctgggggcatcctggagagatgctgctgcctggaggcccaggccccttcctgtcctggctcatcatcaggctcagaggaactcgagaccttagggaaagaggagcaatagaggggaaatattagcataggttccaaaaatgaaaaggaactaaataatcatgaaactacatatagatattttatataaatgtaattattataaaattataatagtatatttctaatataattatgacagtattataattatttatataattataacagtattataattatttatataattatatatcactttggtatatataatgtatatatataactaaattt

SEQ ID NO: 250010 - DNA, 423 bp, Homo sapiens
atgacaggtgagctcactgcttatgtaggtagaacaagagccaagtgaggcagtaaagtgttagccaaccagtggcttgtcttcctgctctgtcttttgtgagcctcaattttgtttagcttttcccaattccgagtgaagctcttcttcccatgctcacagcattccataccagttttcttggatgactctatcctgggggacccccacttaaccagccatagttctgtccccttattgttatttttgtttgtttgataagagagaatttgtactgaatcaacacctcagacaaatcccacctagagtggttccaaggaaaatggtgagagaaatagtgaatacaattcagtaaagagaaaagacagaaagaagaagaagaagaagaagaagaagaagaagaagaagaagaagaagaagaag

SEQ ID NO: 250011 - DNA, 440 bp, Homo sapiens
ctggcctgggcactggattttacatctgagtctccaccttcctagctaggctccttagttacttcacagaacttgaacttatttagaacttaaaacgtggctatggatgctgcatgtaatgattttgagagaataggtttgttaatatatgtgaaagagccctggataattcctggaaatggagcaggcctttgataaaaacctgttttcttttcctttttcaccttcccttttctaagatatgtaaatcccctcatctatgaaatgggaagctatctccttgggtggttggagaatcagaagacacatgtagctgggcacggtcggcccacacctgtaatcccaacactttgggagactgagatgggaggatcacttgagcccaggaatttgagatcagcctgagcaacataggaagaccccgtcgctacaaaaaaaat

SEQ ID NO: 250012 - DNA, 358 bp, Homo sapiens
atgttgggatactgggaaatgttcttttgttttctggagggttaccatgatttccaaaccctagtccttccctggcaccctgcctccaccacacagacacacacacatatatacacattgctgttccagaatatctaggaggtcatagagttgtttttgtttttggctattactgctgctattacttgtttatcaaaagaggatatgaagccaggcacagtggcatgtgcctatagtccccagctactgaggcgggaggatcgcttgaactcgggggttcaagactggagtgagttatgattgcacctgtaagtagccactgcactccagtctgggcaacaggggaaactttgtctta

SEQ ID NO: 250013 - DNA, 707 bp, Homo sapiens
gggagatcaggcgcaagtcttttggacttaaggattcttaagattgtattgcctgtcacaaaaatatacttgtgcaacaccatatgagcctcaggatcacactgatttgtgagggaggcagacccttcttggtcagtttgtaagtctgctccttcatgtcatcagatgtcagcttcagccaagtgggaaccttgcagtgacagggcagagccgattgagacaggcccttcccaggagtgcacatgcgactcatgatggtggcagtcaggcggtccagtgactacgtcttgaatatgttatataataatgcttttcaaactctaatgtgcacatgaatcacctggggatcttttaaaaatggtttctgattcagtggatctgagggtggagcctgagattctacatttctaatgagcttccaaatagatcatgcccatgttgttggttcacagaccagaattggagtaaagaatgtcttggattagtaattcagttagatgacctttaatgcacactttaaccttgggagtctgtaaatataccaggttggagtggatgagctagtataaagaaaactaaagctgggcgtggtggctcatgcttgtaatcccggcgctttgtggggccgaggtgggaggatctctttaggtcaggagtttgagaacagcctggcaatgagactctgtctcaaataaaataaaataata

SEQ ID NO: 250014 - DNA, 757 bp, Homo sapiens
ccagattagattccacttctccctgttcttacagtgccgttagtgctgaaaggggaacgtgccttgttcatttggttctgcacagggtccagcccagtgcttggcacaaacgtggtctcggcagtgctgcatccctggcttgacctggaggtagcaattccttcaagccatttgctcatcttacattggttcgtgggccatggaatggtgtcgagagctttctgcctatcttccaaggaggtttaggtcctgccaagagctcacagatcctatttcttgccttatctctggcatttatttcttccttaaccagcctagcttcagtgctccagaaaagtgccctgcccttccacaccaggatccctagcgactcccgaatgatgctttcttggactctgttcacatggcctcagcccttctgcaccctgctgcacgaaacctggtgccaggccaggccaggccagccggatccctgcttactccttaccctgacatcccgctggtggagagggatggaggtaactgcaagtgaaagaccagttagaggaccgcatctggaagctgtgccaaattttaaatactgtatatttaaatatatatttttatattatatactatatatatagcattatgagccaccaaacccaaagaactataatgaagagccaaacaaaacaaagtggctcaggttctaggggacgtcctagggtggagaaagaggcctggaaggtgggcagccccttccatcgagggtggg

SEQ ID NO: 250015 - DNA, 754 bp, Homo sapiens
attccatattatgcaaatgaataagccctgaagagtcaaactgaaaaaaaaatgaaattaactgtgaaagatattattacccattcagcaagaggaaaatgtagacagagttaacccttccttttcatacattttcttgggaagataagtgccagggatgatggtccgtgtcccagatgtaaagaagctaggcacggtttgcagccagttcccccatcctccttctgtgctcacttttttgtttcatgctctcttaccttttggccacccagtcccctcaactagtccttgtccttcccttccaaaaccaatctcagagaaagattttatgaacacagttttactaatatataagtaactgagcatacttaatgtgttacttttctgaagcatcagcatgttaataggagacaaagccaaagaagtaaaaccctaaagataaaaacaatagaatttcgcacactggtaacctggtgataggagaccatttctgaatggagagagggctcgtgataaataaacacaaccctaggcagagaatataggcaaatggattacagtatttaaatcaaagtagtattccttttgccgtacattggagttgatcacataaacctctatagcaagatggtatgttatttaacatttaaacaaagcttccagggaaagccatttggtttgtggttagggatttttgttattcagtagcaatgaacctgaaattctatattatctttgcatgttgaattttaga

SEQ ID NO: 250016 - DNA, 809 bp, Homo sapiens
attccatattatgcaaatgaataagccctgaagagtcaaactgaaaaaaaaatgaaattaactgtgaaagatattattacccattcagcaagaggaaaatgtagacagagttaacccttccttttcatacattttcttgggaagataagtgccagggatgatggtccgtgtcccagatgtaaagaagctaggcacggtttgcagccagttcccccatcctccttctgtgctcacttttttgtttcatgctctcttaccttttggccacccagtcccctcaactagtccttgtccttcccttccaaaaccaatctcagagaaagattttatgaacacagttttactaatatataagtaactgagcatacttaatgtgttacttttctgaagcatcagcatgttaataggagacaaagccaaagaagtaaaaccctaaagataaaaacaatagaatttcgcacactggtaacctggtgataggagaccatttctgaatggagagagggctcgtgataaataaacacaaccctaggcagagaatataggcaaatggattacagtatttaaatcaaagtagtattaaaatacaaagagaagattatttttaataatacatttgtcagtgagcatttcccgccttttgccgtacattggagttgatcacataaacctctatagcaagatggtatgttatttaacatttaaacaaagcttccagggaaagccatttggtttgtggttagggatttttgttattcagtagcaatgaacctgaaattctatattatctttgcatgttgaattttaga

SEQ ID NO: 250017 - DNA, 199 bp, Homo sapiens
attttttgcagagatcgggtttcaccatgttgcccaggctggtctcaaacttctggacttaagtgatccaccctccttggtcttccaaagtgctgggattacaagcatgagccactgtgcccatcctaaacatttttttcacataatttggctgttatcacccctagtattggtgctttaaaaatgtatactgattacg

SEQ ID NO: 250018 - DNA, 936 bp, Homo sapiens
gggtcagggctgccctgggaagggcagcgacgctgggttggtaggagcatagactgcagggcacctgcctgagtgtagagtccctgggcctctaattctgtaaaatcgcggtaatagcatccgcttctctgagctgttagaggtgtaacaggtaaacccatgtaaggtgcttaggacagggctggtgctggctaagtgccgttaatatcgtcagcatcattacctgcgttattgtagcactgatcgccatgtcagctgccttcagggtctggcaggtaaagtagaggggccaggtagagatcctgctgacctggcaagcacatgttccctccagtcggggcgttgaccgctcagcagcaggtctagtgtcacccagtctttctagttctcaggagaagttgagggtctggatttttagaggatagctcttgtttcctttacttttttttttgagacagagtctcactgtgtcactcaggctggagtgcagtggcacaatctcggctcactgcacctcctcctcctgggttcaagtgattctcccgccgcagcctcccaagtagctgggattacaggcatgcgccaccacacctggctaatttttgtatttctagtagagacggggtttcactgtgttggccaggctggtcttgaactcctgacctcatgatccacccacctttgcctcccaaagtgctgggattacaggcgtgagccaccgcgcctggcccttgttttcttaataatgacaacaaatttttattttataaaaacgcaattcaaaaattagccgggtgtggttgtgcacatctgtaatcccagctattcaggaggctgaggcaggagaattgcttgaacccaggaggcagaggttgcagtgagcccagctattgcaccactgcactccagcctgggcgacagagagagactgtctca

SEQ ID NO: 250019 - DNA, 393 bp, Homo sapiens
ctggtccctggtgccaaaaaggttggggactgctgccctaggggacctttttctcaaactgcttcacacaacactccaagaacatgatgggaactgggaggaaagcgggttccatgagtaggtaagtttgggaaatgctgcagcctgcactttcctggagcttcatcacgtattaaaggctctgataaggccccagagaaagaagctaatttccttgtttaaggtggagttccgcaagctacaggccaaatgcagcccctacgggtggagcaaggaacggtttttacactttgtaatcgttggggaaaaaaagaacaatcttttgtggcacttgaaaaatatatgacattcacacctcagcgacagtaaatacagcttcactggcacacagcc

SEQ ID NO: 250020 - DNA, 423 bp, Homo sapiens
cccaggctgaagaggtagaagttggcagaagttaaaagcaatgtctccacaatggagaagtgacatgctaaaggaacctggcatccagacatttcctaacccccaatccctccttacatatgacctgctcttagaggagtacagcgtggtggttaggagtgtggactcggcagccagaaatcctgggatctgttgcttgttagctgtgggccttaagctaagaacttaacctctctgtgcctcagttgctccatctgttcaaatgaagataatgataatgaagatgatatcacctgctgtgtaggattgttatgaaaaatcaagaattaatatttgtaaatcacttacagggtctggcacataataagtgctgtgtgggtgtttgttaaataaaataatatacaatgacataggcattgtggt

SEQ ID NO: 250021 - DNA, 463 bp, Homo sapiens
tctagacagtactatgggtagtatctgtggggaggttctcagaaacatgtcgcatgctcttttagaaccttaaagtattcctagtctcctctacttccagcccttggctcttgggcctcagtctttttacttttgcggctgtgtttctctgaaggcttggcattagtagattgaaaagaataaccatctagggaaatgtgaattcagtttctttctgacattctgctctctacaaggggatattatgtacacataaacctacttccaaaataatgaagtgaggcctaattccttactcttcagagagcccactgtggaagtgtcactgaccttgtgtatgggctgcccttcatggctctgggagtcattataaagggcagcatttggcgtggtgcgtcctaagccagtgtttctcggctctgttccttagacatgtgttagtgttaatagatgttcttggaaa

SEQ ID NO: 250022 - DNA, 385 bp, Homo sapiens
gcctgttatatactaggcattatcatatttcttgattcttttaaatttcattgattttaatatctaaaacttccctattaggtacctttttcagatgaagcaaactaaaatttagaaaagttaagcaatttccccaaggtcatgttagtatatatctgggagaataacaatttgaattcacatctttccgactaagccaggctgaacccttaatgacctttctcaactatcagctcacctctccccataatgcatattttacagctcaaaaaggagaggaaggaaaaacctttaaacccattgctagaaagggtgtattacgtacaaggcagaatggcaagcacaggagaaatcattaaagaatgtcataaaagaccaaaaaaaa

SEQ ID NO: 250023 - DNA, 524 bp, Homo sapiens
tccctctgcccctcccttcagtggaggggagactttgaaatcaggtgcttggggtgggggcgctgctcccagtgggggtgtgaggaacctggaggatgaatccctgtcccccgccctccccctactctattcttccttaccctgcccctttccactccaaaacctcaagcctctggttcacatctgagtgacctttccaaagcaactgttctcagggggtccttgggagccgggaggctgtgaccttaacccacttctttggacagtgccttcctggcactccacccccacctgccacctcctgagaggaacatttcggctggtcttggcaaaaacatcagtctatgatccaggcagcctggtacagtaccagctctgccactgacaccactgtgaccttgggaagccatttacacatatgggtctcagtttctccatatgtaaaatgacttttgtttagctttcctgattttcaaacctttttttcaaacagtgaatcctcttgtttaaattgtaaatcatgt

SEQ ID NO: 250024 - DNA, 444 bp, Homo sapiens
gttccccatgtgtgaggcacatttggactcatttaatcctcacaacacccatatgggatttaaccatttaacagataggaaatgacagcatacagaggtgaggggacctgcccggggtcactcagctcacaaggagcagggcttggcgtccagttcatgcaggctatggcctccctttaaccaccatgcaggctctgatgcacgcccatgtccatggtcacactgactccttcctgctactccatgagatgacccagctgatatcactgcccccactttacacatgaggaagctgaggccagggagaggaggcaacttttccacagtcacacagcttgccaggggctcaccaggaatcaacccaggccctagccgtcccagaccattcctctttctgactcagccactgcccttcaactcaaagttttctctcccaggagaaaa

SEQ ID NO: 250025 - DNA, 594 bp, Homo sapiens
ggccgatcactgtactctagcctggaagacgagtgagaccccatctcaggaaatacgaaaataaaaaagagatgtcatatcatgcagtgttaatgagataagctgtgtgaacttccagaaggctttaacatccttcaaagaaatagaaaacacactcctaaaatttatatgggaaccatcaacaagacttagaatagtcagctatcctgagcaaaaggaatcaaactggaggaatcatattacctgacttccaattgattcaacagagctacagtacccgaaacagcatgatactggcataagaagagaaacataggaacagtaatagacaacccagaaaacaaataaagatttaatccaaaacagatcagaaagtacattaaatgcaaataatctaaatactttcatgtaaagagttagattcatatcaaaacagaaccgtatggcatgcttcttacaagagacacactttatatgtaaggattagtaaggcagaacataaaataatgaaaaaaaaatgcagtgtatgaaacaaccacaaaaagcaagtgttgctaagctaatgtcagacagaagagaataaggcaagaagca

SEQ ID NO: 250026 - DNA, 818 bp, Homo sapiens
gctcagagtagcagcaagagccagaaggaaagatgcaacacatttttaaacaaccaatctcatgaagacttagacattattgtgaggacagctaagccattaatgacaatttcacccccatgatccaatcacctcccaccagaccgcatctccaacattggagattacaattcaacataagatttaggggggacaacatctaaactttattacttaggatttacttcttttggggagggggtcctcagtttcttcatttctaaatcagagataataaaaactatcaaaaatatgtgttgttgtaatcaaaatagtaaaccaacataccccacaaaaatgattacatatagtaagacaaatagtgggtaattttctaactttcaaactcttctagcaccagatcctatggatatgtgattctgttaggataaaagagacacaaagatgtagtgtattcagcccatctgggttctgattttagttctgttgagaacaatttgtaagacattgttcagttgtactggccaccaaagctctaagaacttcctagctgtgtgaagaagctcaacgagatcaggggttagcaaatttttctttaaatggccaaagagtagagttcaggctttgaagagccacagggtgtgtgtagcaaatactcaactccatgattttagtgaggaagcagtcttagacaatacataaacaaattatcttgtgcttgtgatctaataaaattgtatttatgggcactgaaatttgagtttcacatttcaacttgtcattaaataatatccttctttcgacatttttcaaccttt

SEQ ID NO: 250027 - DNA, 392 bp, Homo sapiens
tttgtttgtttgttttggagatggagtttcgctctcgtcacccaggctggatcgttggcttgaacatttcttctgcatttttccataactttcccaagcagaatatcctgccctagctgtgttctccaagacctatgttctatcaataatctggctggccaaaacctcaacaaagtccctttgctcccacctcctctgcacaagtcttcagacttctccctaaaactggcagacatagaaacacatctgttgttaattcaacatgtacaagtgagaggtcacactctattccctgtacccaggaaagatagagggtgtaaattctagcttccaattagctccagcgaatacaatctctctgggactctacctatcccagaaaaaaaatcaga

SEQ ID NO: 250028 - DNA, 337 bp, Homo sapiens
ataattattttgtaagttgggtgatgggtaacaggattcattatactattattttggtttatatttgaaatttttcattatactaagtttaaaaaattaatacttgctcctctgtgcttccaaacaccaaaatacatgtgatcccatgaaatcccaagcacgctgtattggtgtcatttacaagcctgcctttctaccgagttagtgagtttcctacaggccgggatggtttcccattatttgctgcttttttgtatttcttccaggatctgactttgaagcctggcaaatagatgttaattgaataagttatttaagtaaaatggggagaggaaaa

SEQ ID NO: 250029 - DNA, 291 bp, Homo sapiens
aaatttagaagagatggataaattcctggaaatatacaaccctcctagattaaatcatgaagaaatagaaactgaacaaaccaataacagcgagattaaaagagtaatttttaaaactgcctacaaaaagaaagtccaggaccaaatgaattcacagataaattctatcagactttcaaagaaaaatcagtaccaaccttaccgaaactattcccaaaaaaatacagaaagaggggatcttccctaaagatcattctatgaagccattatcaccctaattccaaaaccagg

SEQ ID NO: 250030 - DNA, 350 bp, Homo sapiens
cagcatagttgatgttttaattctacagtaaaagtctcattaactattctttagcatgaatgagtcttctgaatagtaggtcaattttagaagtttaaacattttaaaagcttctgtaggatttgtgctggttgaataagttgattgtaaaaatgttcactgaaagtttgttcaactgaaaggaaatagacatctttaaattggtgtatttgtgtgagtgctaaaaatttgtgcatatcagcttgttttccctggggtatgaataaggtatatgtgtggatgttgagcttgattaggaggaatgattacatgggcaagacaatctttccccatagtatcctgcaaccaaa

SEQ ID NO: 250031 - DNA, 190 bp, Homo sapiens
tagttaacaaatcagttaacgtattctctgtcaaaattgtctttatacaaaaaaaaaaagtaacagctacttaaaaaattaaaaaggaaacatcaggccaggcgcggtggttcacgctggtaatcctagcactttgggaggccgaggcaggcggatcacaaagtcagtagttcaagaccagcctagtcaa

SEQ ID NO: 250032 - DNA, 423 bp, Homo sapiens
attccgcctcagagccgtcgccttacgttcccttaaacttaatttttccatcagcagtgtggatctgcttatgatagttcctacctcataaggctgttgtgagccttaaaaattaaagcatttggcacataacgcttcacaaatgctaacttgtatttacattttcacgtaaaaagattgtgatgcgcaagttctttgaagtcttggttccatgcaaaaagctgttcacagaggttgagaaaggttaggaattggtttaagttcgcggagagatagggagttgctgctgagacgcaagcaatttcatagtaccgattccctaattgcacctcgtccccagtattcatcggctcttccaggaggtggcagtcttgtccaaggtatagcaagaaaaactcagtgcaataaagtacatgcatcaag

SEQ ID NO: 250033 - DNA, 502 bp, Homo sapiens
gatcgtaattcctggggtcctaaaatacagctgttacagttacacaaccaccaacttttcatagaccttaatgattcccaaaatgctggcacgttggttgtctcaattagtcctctctacaaccctgtcaggaaggtattctatttgtcaccattttatagaggagggaacaaaaggtcaggaaagttaaataatttccccaagatagcccagctttcagtgatggatctgggagataagcccacctcccatgctcgttgtaaagtagtgctttccccgccttctcatgagatgtcttacaggggaaagtcattcttaagttaaaaacaacagcagcagcaaggcccgtacagcatgctcaggtagaaaatcacctcctagaaggagtccaacttcgggttccttcatgtagtggctcagtttgtttacctccttgcccacatttaccttcaaaaatttatcttgtaaacaaatgaaaaaaagcagaaagggctctttcaaa

SEQ ID NO: 250034 - DNA, 501 bp, Homo sapiens
aaattgggtaaagtattataaacagtagtaggaaaaaaatatactacatgagggatcattgcagtagagaaaaacactttttagttatcttctgcccataatgtacccataaagtgtacccataatgacagaacaatttgggcaaatgtgcttgtactccaggagtcctgaaggcatagttcaatgtgaccctttgagaaatctatgattctttgcagtcttcatttttatcttaagaattcatgcagattttgcatctgctactccataatgtttattttagtataaaaatatttaaatttttaaaattaacatcacttatccccactgctgtataccttgatttggaaagtaaggtggtatgcacaatcacattgaattcatagtaagtgctgagcagattggtatcttatgtttgtcgaatgtttgagttgcacacacaaattaggcttctagaacctatacaggaaaatcatcacttggtcttggacattaaaaaaa

SEQ ID NO: 250035 - DNA, 321 bp, Homo sapiens
attcttgggtctccagctctactgaattctgtgagtggggtccagtcatctgcatcgttaactacctccctagagaatactgagcacctttaagaacccttctgaaccattcacagaaatcaggagagctcttgtttttatctgcctctttcttgttacagatccaagaggtcactataaattcttatcatgcctcccctaagttggaattcacagggatccagtgaattattccttcctcctttctcccaacagaggaaagctgtgtgttcaagactaacgactctagggaggtctcaaggtaaacagtctcatcagtct

SEQ ID NO: 250036 - DNA, 339 bp, Homo sapiens
tctggcacttacacatgtattcatagagttcattctgatgctctgaacctcaagaggatgtgaaaatgacttgcctgtaattaccccaagatgaagatttattgaagcagttatgctccagcaactgccactcatttgtgctggttctactttttccccttaattgaatgtgaacatttgccacaaaaaaaaaaaaaagattctggaaatgaagttctgttagtttttagtccaataaataattttagctacgcttaatgtagcttttttaaggccttcctacgcttgaaaaaattaaagttgagcacgttaaaaccctggtcatttgtaaaataaaaa

SEQ ID NO: 250037 - DNA, 1033 bp, Homo sapiens
aggctcaggcaagggtgtatccagccctgtaacctggtcccctctaccctagaatccctggaggcctcagctctcccgccagcagtgggggactccggcagataccccctctaccagctgctgaactgtggccgtgggaatagctgtggggccatccatccagacattgcccacatggagcggctcctgcagcaggccatggcggagagggagcggctgctcaaggcccgggaaggaacaagaaggggcacggaaggttcctcaggccctgctgttcctgccatcacggccccgcccaccccaccccaccctccaggcccgcgaatcttggatctccggcagcatctggagggatggggccacaacccggaaaactgcccacatgtgcaggtgtctgggtgctgctgccgtggacccctggtgaagatgggcggccgcatcaagacctggaggaagcgatggttctgctttgaccgccaagcccgccgcttggcctactatgcggacaaggaagagaccaagctcaaaggtgtcatctacttccaggccattgaggaagtctattatgaccacttacgctgtgccttcaagagccccaacccccgcctgaccttctgcgtcaaaacctacgaacgccttttctacatggtggctccgagccccgaagccatgcgcatttggatggacgtcatcgtgacagccgctgacgaaaaccacgccccctgagtggccccgccctcttggggggaagtcccttcgaggctccgccggcgcggggcgcgggggcgttcctaggccccgcccactgccggaaaacttggacgcaccgctttggaactctcccgggagttccgcaggcgcggcagttcagctggcctgagctgctgcgttctgggttgcaggtgccttgcccccgacgggatcgccggcccctaaggctctgcccggggcaggaggaagattgcaggggcgggaagaaactatttattggtgctcctgtgataccgaattaaatacggaggaaaaacaggaa

SEQ ID NO: 250038 - DNA, 1117 bp, Homo sapiens
  misc_feature (219)..(220): n is a, c, g, or t
aggctcaggcaagggtgtatccagccctgtaacctggtcccctctaccctagaatccctggaggcctcagctctcccgccagcagtgggggactccggcagataccccctctaccagctgctgaactgtggccgtgggaataggtgagacatcagagagaaggtggggagatggaagaagaggcccagccactgtaacccaccccgtctgtgttccctnnatcctagctgtggggccatccatccagacattgcccacatggagcggctcctgcagcaggccatggcggagagggagcggctgctcaaggcccgggaaggaacaagaaggggcacggaaggttcctcaggccctgctgttcctgccatcacggccccgcccaccccaccccaccctccaggcccgcgaatcttggatctccggcagcatctggagggatggggccacaacccggaaaactgcccacatgtgcaggtgtctgggtgctgctgccgtggacccctggtgaagatgggcggccgcatcaagacctggaggaagcgatggttctgctttgaccgccaagcccgccgcttggcctactatgcggacaaggaagagaccaagctcaaaggtgtcatctacttccaggccattgaggaagtctattatgaccacttacgctgtgccttcaagagccccaacccccgcctgaccttctgcgtcaaaacctacgaacgccttttctacatggtggctccgagccccgaagccatgcgcatttggatggacgtcatcgtgacagccgctgacgaaaaccacgccccctgagtggccccgccctcttggggggaagtcccttcgaggctccgccggcgcggggcgcgggggcgttcctaggccccgcccactgccggaaaacttggacgcaccgctttggaactctcccgggagttccgcaggcgcggcagttcagctggcctgagctgctgcgttctgggttgcaggtgccttgcccccgacgggatcgccggcccctaaggctctgcccggggcaggaggaagattgcaggggcgggaagaaactatttattggtgctcctgtgataccgaattaaatacggaggaaaaacaggaa

SEQ ID NO: 250039 - DNA, 955 bp, Homo sapiens
taagaacacgtgggggccttcagacactctgatggctatctgagagctggtgcctggggtgggagagggggatgtcattccttgcatgctgtttggtcagcttcttccagtcatcaggaagtttggcttcctggctccagacatggctctcacagtctccttttccacccagagtctcaagccactgcctcctaggttctgaccacactgaatacctcctaccaatcttttcatgactggcactctgtacactattggctcctctacctggaaccttttccattttttttcctttattctcagcaaacagcaattccactgccagagaggtagtttcctcttttctgcaccatgcagctccctgtcaacagcttatatacagcggtttccacttgtgtctcctgtgttaagctctaagcaacttgaggacggggctcacactctagtcagtgctgtctgaaagcagcataatatgagtcaccagtgtaacacagccacataattaaagattttttaacagccacattataaatgtaaagaaaaaagtcggccgggcgcggtggctcacgcctgtaatcccagcactttgggagaccgaggcaggcggatcacgacgtcggaagatcgagaccatccttgttaacacggtgaaactccgtctctactaaaaatacaaaaaattagccaggcatggtggcggatgcctgtagtcccagctacttgggaggctgaggcaggagaatggcgtgaacccgggaggcagagcttgcagtgagctgagatagcaccactgcactccaccagcctgggcgacagagacagactctgtctcagaaaaatattatcatttaacatgtaatcaacaaagttattaacaaatattctacattcccttgttgggggtataatcttttgaaattaatgtgtattttataccttacagtgatcttgattc

SEQ ID NO: 250040 - DNA, 405 bp, Homo sapiens
ttttgggtttttctttatttcttctaaacctataaatgtgatggataatttttataagtagatataatattactaaatatataaattatttgttgaatgaattcatgaattaataaaagagtgatgaaataactaaatgaaaaataaatgcataggttttaaaccctctgatctgtgtatgatagccccttccttttattcacttctaaaaacacagatgatctcattgttccacatttcttgtgatgtttgccataacgtcagcaatggtgtgatatagaaaatagatgcctactataagttggacctgctataaaatatctcattgtcatctcataaaaatattttgaacattatatgtatattatacttctataaacaggttaaaaattatctactgctgta

SEQ ID NO: 250041 - DNA, 443 bp, Homo sapiens
ttctccaaagaaaagtggctagtttttatatcaccacttttcagggcatgctgaggctttgaacaagtcagatttgtttttcttctctgtcaagcactttctcatacattactccattgatccctttaacagccttaccagggagacacaggggaattatagtcaccattttacagatgagaaaagtaagacccttgattcagcgacttaccaaggatatgcagctagtaagctgcaaatcaagattagaaacccaggtgccctttttctgaattccattctgctgcttactgctctgaactactttatttcatgatgtctaaagaccttcacacgacatagactatacttgcacagactcttagttgcataaacccctgggtacttggtatattttaaaatgacttactattcaagtatacagttctataatgctgtactct

SEQ ID NO: 250042 - DNA, 761 bp, Homo sapiens
gcggtggctcacgcctataatcccagtactttgggaggcccaggcgggtggatcatctgaggtcaggagtttgagaccagcctgaccaacatggcgaaaccccagctctactaaaaatacaaaaattagccaggcgtggtggtgggagcctgcaatcccaactactcgggaggctgaggcaggagaagcgcttgagcccaggaggcggaggttgcagtgggccgagatcgcaccattgcactccagcctgggcaacagagtgagactccaattaaaaaaaaaaaaaaaaaaaaagactcaatattgttaagatgtcagttcttctcaacttgatctgcagattcaatgcaatcccaatccaaatccccagaagctattctgtgaatattgacaaactaaagtcaaagggtgtattgaaaggcccaaaacagccaacccaatactgaagaatgacaaagtgaaaggactgatactactactcccctttaagataacacaaaactacagtaatcaagacaatatggtattggtgaaaaatagacacagacatcaatggaacagaataaagcacaaaaacagactcaagagccagcctggtcaacatagcaagaccctgtccctataaaaaatttaaaaattaggctgggcgcggtggctcacgcctgtagtcccagcactttgggaggctgaagtgggtagatcacctggggtcaggaattcaagaccagcatgatcaatatgctgaaaccccatctctacta

SEQ ID NO: 250043 - DNA, 373 bp, Homo sapiens
atttccctaatgactaatgattttgaacatcttttcatgtgcttattgctcttttgtatgtcttgtttgaagaaatgcttgttcatattctttgtccattttcagttgtgatatttgttttttatgttattaacttatattagttctatataaattctatgtacaagtattatatcaggtatattattagcaattactttctcccgttctgtgggccttcttttcacttccttttttccttatttaaaagtatttcattctcaaataatgattgaatctatttaaggtgtataacatgatggtttgatatatgtatatattgtacgatgcttaccacaattaaattatatcaccacccatgctgtacagagcc

SEQ ID NO: 250044 - DNA, 368 bp, Homo sapiens
ctcaacctccctcccaccgcctgctgccaagggccgccaagagaaatgtgggcaaaccacacggaccaccccaggcctcccaagggcacttgggggtgatgccagccccaggaaggagtcctcaataaagatccaaggtgctaacaagaagatgtcaatccattaactccacttgaagggaagaaaaaaaatgtcaattactggtaatgtgaaacaaaagagtgggaaatcgcaaatgacagtctttttaagacggccctagggccacttccagctgaccctgtgcattaaccaagcagggagatttttttccttggctgctccctcctgcgtccctaatagcataaaataaaaagattttagataag

SEQ ID NO: 250045 - DNA, 435 bp, Homo sapiens
ggttattgtctgtcaggttggtacgtggagagtcatctcactaaatgatcacaatgttaatgaattaattaagacttcaaacaaaatcggattatgtattgctggtggaaacgtgaagtggtacaggcactgtggaaataatatgttggttcctaaaaaaattaaacataattattaaataatccagcaattctacttctgggtacatatcacaagaactaaaagcagagactcaaacaaagtatttgtacagcaatgtgtgtacatccttattcacaatagccaaaaagtagaaaagccccagtgtctatggatgaatgaatgaataaacaaacaatgatctattatgtacaatgaatttttttcaccacaggaacagatggaaatctgatacacactcaactacatgtgggtgactttgaaacatatgataat

SEQ ID NO: 250046 - DNA, 572 bp, Homo sapiens
aatctccaggtatgtgtacaccatattgatcagagttttacattaatgaagatgcaagttacttgtgcattctagtgagaggccaggttttcctgctccccttttattgtggagagtggggaaggaggaagtggtcaaggcagtggcctattttccttcccaaggtagtgtggcagaggctattcttgtctcctataacctttcaatcctccacctgtaacttaactctatctgatctcctaagcgaagcatgtggctatccattatagagatgtttcccagcctctctgcagctaggagtggccatttgactatgttctggtcaaaacatatgagtgtaaatgatgtgcaccttcacaattcttaccctttccctcttccctttggcggcaatgaagatgtatataattatactactttagttttttatatgagaaaaaaagaactgcgaacttgtttcagccattattttgggcagcagcccaacttacatcctagtgaatatagagagatagtgaacatggtctgaggcactgaggttaaggaattttctaatatggataaaaaagaaa

SEQ ID NO: 250047 - DNA, 113 bp, Homo sapiens
aattttaaaaataaaataaaaatcatgttttatgtgattcatgtttctcctaatgcaaagaagatgggtactattaataaaaatatttttaaaatgtaagggctaaggagcca

SEQ ID NO: 250048 - DNA, 1869 bp, Homo sapiens
  misc_feature (1111)..(1111): n is a, c, g, or t
  misc_feature (1147)..(1147): n is a, c, g, or t
ctcagtgttaagaggtggcgacttgctcaggcttctaaaggacaggtgtttgggagcctcttgccggaagcctgctgtgggggccctctgtccctgctcctcgccggcccccatccccaagggtgcagcagaagccaggttttccctgtccctgtccgggctgtctctgttccttctattttgctgattttcagaaaaactagatccggcacctttgtggtgcacagtccccaccagcgggaaccagtaggtgacaggctccattcaacaggacaggcaggttagggacacccctggctggcagcagccgttcctgctcctacccagccccggttactccttctgggacctcaggcaagtgacttcgcctcccctcactggtctcccctgtgaacaggggctccagctgttcttcctgcacaggccatcgagccagtaaaatgaacttggcacccagcgcatccatacggagggtcttggagaacaacttctcttcggaccttagagtttctaaggtgattctagaattccatgccggcaagtttggcaaactgcagcttcagggaatagcccctacaagactaccctcactgcagaccaagaactgcacaccagaaacaagctcaggcatccctaggaccaccctcacgtctgagcaatgggctacaggtttgggggtccttacatccaccctcaggctcattaattcacctgcatgactcagacagtttatggtgaaaggaagcaggttaaagtcattgatgaattctagagcagagtccaggagagcccagtcacggagctcccgtgtcctcaggatgcagcacaacagaatagagctgaacagggcacctttggggtccaggtgtgtctgggagcttgaccacctggctgtcagcgtggctggccctaagtctccagtccctcgcagaggtcagaactgaggcagcaaagcccctgaaaacgctggtactccagtgccagccaggacgttctgggggccgagagctcaccctgcaggccacccccggccccggccccagcgttctcgcagtggaatagtcacgtttgtctgggcagctccttcagcgttgcctgcttcctcccttgnggcagggctgcccgtgcctatgaagcatgtaaaganccaccgtgtgcaggcgttagcccggggttggctccacctagctcttccgcaggtgtcattctccatcgttgctacatcctgaggaggctggaactcagggtttcaatacatttgccatcaccatcaacgttataaccttatcaaccgtgccaggtaggaccatattgcagtctggtggatgtcacctaaaaaggaagaccggagtcccactcagtcatagcagtttatctagtccatcaccacatcagatcagcagatgtcccccagggcgaggccactcaggtttgcaggctgccattcgaccttgtcaagttccaaaagcagaggcggccttggcgtcaccctttcaggcatctggtgtagttgagctgagacgatgccctccacgccgctcttaaggtagtactgtaatgtaggattcacgtaaaattggatttcccggccgggcgcggtggctcacgcctggaatcccagcactttgagaggccgaagtgggcggatcccctgaggttgggagttaaagaccagcctgaccgacatggagaaaccccatctctactaaaaatacaaaattagctgggtgtggtggcacatgcctataatcccagctactcaggaggctgaggcaggagaattgcttgaaccagggaggcggcggttgtggtgagctgtgattgtgccattgcactccagcctggacaacaagagcgaaactccgtcgc

SEQ ID NO: 250049 - DNA, 362 bp, Homo sapiens
gcaatgacgtgggacccagagcctgagttgaaagcccagctctgccactcactagctgtgttattcacttgctgtatgtcttggtttccccatatgtccttacctgtaaatgggaaacaataacagtggggcttgttatttgcaaagaactcagtacagtacctgtgtgtctgaggattctaatgtgcaaccaaagatgcaaacccctgctgtatataatcgatcctgttgatcaaagtctaacaagttctcttttctttttttttcttgagatggagtcttgctcttgtcacccaggctggagtgcaatggtgtgatcttggctcactgcagcctgggcgaaaaagccagactctgtctca

SEQ ID NO: 250050 - DNA, 335 bp, Homo sapiens
cctgacctcaggtgatctgcttgcctcggcctcctgaagtgctgggattacagatgtgagccaccatgcccggcctcatttgaactccttaatcatcaacaagagatgaggtgtcgctatgttggccaggctgatcttgaactcctggcttcaagagatcatcctgcctcggcttcctaaagtgctgggattacagaggaaaggccatgtgaggacacatcaagaaggtggccatctgcaagccaggaagtgaggcctcaccagacgccagccctgctgactcctgatcttggactttcagcctccaggacagaaataaatttctattgtttaag

SEQ ID NO: 250051 - DNA, 482 bp, Homo sapiens
ctgtagtgaaggcatttggtgggtagaagttgagcatgactatcacttcgttctggtaagcaagggtagctaatgcatatcttgcttccttgtggctaattcagaataggagaaaaaggattctgggcagaaagagaataagaatacgtaaaaagcactattttgtaaacataccaaatttttctgatgtttcctcatcaggaaattgctggccttcaagatttaatatcttcagagaaataaaatttggcaaactggcaactatgaaagggaaaataaaaatttagttatgtcagctacatctctcacagcaaagtgtaacatctttaaaatgaagaaattagaaattaatgtaataattcagattgaattcatatgactaagtagataaaacaaatttttgctcagaaaataattctgataactagaaatgttgttaaaattctagaaatttcaaatccaactgagcgtaaaggtaaaaa

SEQ ID NO: 250052 - DNA, 581 bp, Homo sapiens
gaaaatctgtttaattatttaatgcttattaaaccctgagtgcatttatattgcacaaacacatcctctgcttaatgctctccaggagttatggaggattcaaatcaaattacactgtcctttcctcatggtataattaaggagcaatatgaaatgattagcgtacaaaattaagttagttttcagatgataaagacaatttttttctcttttgaaatcaccgttaaaacaatcagggaaactccattttttgaagaaagtagagaacatctgtgaataggaaccacaatatgaagacagaagttggatggagaaatggcagatgacatatcagagtggagagaagtcacactgtcctggagagggaagaaatggaagaagccagtggtttccttgatagaatcctaaaaaggctcaggaattagagatgtgataagctgaggaaggcagaggtgaggaaggggctggtgtggagagtgtttctaagtctgtctaaggaatatgtggatgtagagattcccaccccacaccaggcaggtaagtgagtgcccccttgtgcctttgccacagatgagaaaata

SEQ ID NO: 250053 - DNA, 880 bp, Homo sapiens
gggcaacagagcgagactccgtctcaaaaaaaaaacaaaaaaaaacaaaaaaaaatgaccattactcaacaaggtaaaatctccaatgtctggcatcctggcatcctattactaggcatataaataagcaagaaaacacagcccataataacaaccaatcaatccttattttgatccaaaccaaccccaaactgacacatattaaaatgaacagagaaagacattaacattaattttaactatatcccatatgtttacaaagttgagacatggaaaaatattagaagaaataatggccaaaaattttccaaatgtaatgaaaaatataaacccacagacctgaagctcaatgtcaagtacaagaaatacaaagaaaactgtaacaaatcacataatcaaattgctcaaaaccaatgatatagatcaaatcctgaaggcagctgggaaaatagtacatgttattttacacaggaacaaagataagaatgataccaaatttcttgccagaaatagtgcaagtgagagacaacagcagtgcaacttgatctttaaagtgctgaaggcaaaaactgcaaacctagaattttatgcccaatgaaaatatattttaagaaagttaaataaacatattttcagacacataaaagctggcagacactttgagaggctgagctgggcagatcgctcgagccccagagttcgagaccagcctgggcaacatagtgagaccctgtctctaaaaaaaaaacaaaaattaggccgggagcggtggctcacgcctgtaatcccagcactttgggaggccgaggcaggcagatcacgaggtcaggagatcgagaccatcctggctaacacggtgaaaccccgtctctactaaaaa

SEQ ID NO: 250054 - DNA, 828 bp, Homo sapiens
gggcaacagagcgagactccgtctcaaaaaaaaaacaaaaaaaaacaaaaaaaaatgaccattactcaacaaggtaaaatctccaatgtctggcatcctggcatcctattactaggcatataaataagcaagaaaacacagcccataataacaaccaatcaatccttattttgatccaaaccaaccccaaactgacacatattaaaatgaacagagaaagacattaacattaattttaactatatcccatatgtttacaaagttgagacatggaaaaatattagaagaaataatggccaaaaattttccaaatgtaatgaaaaatataaacccacagacctgaagctcaatgtcaagtacaagaaatacaaagaaaactgtaacaaatcacataatcaaattgctcaaaaccaatgatatagatcaaatcctgaaggcagctgggaaaatagtacatgttattttacacaggaacaaagataagaatgataccaaataaaggatttaaatcccaaacagatcaggaaagtacattaaatgcaaattatctaaatactttcatgtaaaaggagttagattcataatcaaaacagaacccgttattggcatgcttcttacaagagacacacttgatatgtaaggattagtaaggcagaacattaaataatgaataaaaaatgcagtgtatgaaacaaccactaaaaagcaagtgttgctaagctaatgtcaaacagaagagaataaggcaagaagcattattagatatgaaggaaacatttaataatgataaaggcttgtattcattagaagagtttattcaacagattt

SEQ ID NO: 250055 - DNA, 458 bp, Homo sapiens
gggggtctgtgtgagagggtcgtgatcaattgagcaagcagagggtatgtgactgggggctgcatgcacctgcactggtaattagaacggaacaggacagggatattcacagtgcttttccatacaatgtctgtaatctatagataacataaccgattaggtcaggggtcagtctttaactactaggcccagggtgtggcgccgggctgtcttcctgtgggtgtcatttctgccttttagttttcacttttttttttctttggaggcagaaattgggcataagacaatatgaggggtggcctcctcccttagttacggtatagtagtagaaatttagactatgaaaagtacttaatatttagaggcttgtcatatattttgtgctttatttcttaattctatgttatgtatatgtattttaaatatataatttacttctcattgatatatcttatttt

SEQ ID NO: 250056 - DNA, 240 bp, Homo sapiens
gttctgggcaaatgaacagtagttctcaaactttttgactcgtgtgctcttcatgttttgtattctcatctctgattgcatatccttacccgccagtaagatgtggccaagccttctacagtctgtaccacaaagataaaagtgtagggaatatactttttcaaaccatacatgctactccgataaccctcctccacagagaatcacttaactgagagcaattagtcatctttctcacta

SEQ ID NO: 250057 - DNA, 478 bp, Homo sapiens
aataagactcaaatgtccattcttcctcatgactctcaaaaggctacaggtgactcctatgtttacctgcttattaaaatatatatatatataaaatctggcattttttaaaacagtaaagaagactttattcacgactattgcagtaggggttaacttcactgcaatagaggagagagatgaggctcaagcccaaatacaagaaaaagtgaggatttgcaaccaaagagcagagtgaggaggttaatgaatgtaaaatatttaaaaggagaaatcacaggtagaaggattcttgctaaactggcctaacatgattctccctttaaaacaggtcaagaacttatacatcaaaggtaaggatgaagaatttgatcagatagcaagggtggagggtactcttgctaaactgacttagtggggttcttgttaaagtggaatctgccaggacagacatggaaggccaaagccaaagccattt

SEQ ID NO: 250058 - DNA, 351 bp, Homo sapiens
taaggctaggagtttgagaccaatctgggcaagatagcaagaccttgcctctacgagaaatttaaaaaattagccagggtatgtgccacactgccttgcctgggcactgatacctgaacgctgagtttgggcccgtggagatgaaccctttaactaaggtgaagctgatcaatgagctgaatgagcgagaggtccagcttggggtggccgataaggtgtcctggcactccgagtacaaggacagtgcctggatcttcctgggagggcttccttatgagctgactgaaggggacatcatctgtgtgttctcacagtatggggagattgttaacattaatctcatgtgggaca

SEQ ID NO: 250059 - DNA, 347 bp, Homo sapiens
tatatttggacagtgctttaatgctgccggttgtaaaggcattgtcttggtattagaaattgctggaaggcagccatagtcccaaatagcaaaaataagctggtttctcaagttgttacttaggcattaccctagtcacattagaatgcttgaacaacttgcaagaaattataagaaaagtgcaaaagtaatcaagtcttcagggaagcatgccaaggtgcagatgaaaagaaggccttctctgctgactgccccaccacccatagcttaggacatctgctgatagatgccataaacctggaaatggttacccccatgggctgtgtgttttggaaagcactctatta

SEQ ID NO: 250060 - DNA, 636 bp, Homo sapiens
tttacccattcttttttttttttgagttggaatcttgctctgtcacccacattggagtgcagcggtgcaatctcggctcattgcaccctcggcctcctgggttcaagtgattatcctgcctcagcctcctgagtagctaggaccataggtgcgcaacaatgcacttggccgagttttgtatttttagtagagatggggtttcaccgtgttggccaggctgctctcaaattcctgacctcaggtgatttgcctgccttgggctttcagagtcctgggattacaggcatgagccactgcgcccagccttatatttacccattcttgaatgaaagagattgattcaagcccaatgtttgtcattaaaccatttagttatttgtgattaaatgtctcttgttagatcttaagctagtatttggatgatgtgtaaaagtattagcctgattttggattgtggtaattcaggtagcatcagctctgctgaactataatctcctactgtttataccgtgcttaaggaggataattttttcctgaataacttgaggcattttatatttcttcctgtgttagaaacagtgcatataggcaataatagatactggggaccactagagggaggaggaagaggagtgg

SEQ ID NO: 250061 - DNA, 399 bp, Homo sapiens
ttggggcttgcaccctctgaagcaatggcctgagctgtacattggccccttttagccacagctgggaagcagggttccaagtcccaagactgctggctcacaaaaccatttttccccctaggcctccaggcttgtgatgggagaggctgctgtgagtacctctgacatgccctggagacattttccccactgtattggcaattaacacttggctcctcattatttatgcaaatttttgcagctggcttatctttctcctcagaaaatggatttttctttgctattgtatcatcagactgcaaattttctgaaattttatgctctgcttcccttttaaatataagttgcaattccaaagcatgtatttgtgaatgaataaaattgaatgtttttacaagc

SEQ ID NO: 250062 - DNA, 351 bp, Homo sapiens
cagttagagccacgtgcacttaagaaatgggatgcaggttgccttatcaattaaagaatgttcaatgcaggccgggccctgtggctcacgcctgtaatcccagcactttgggaggccgaggcgggtggatcacaaggtcaggagttcgagaccagcctgagcaacatggtgaaaccccgtctctactaaaaatacaaaaaattagccgggcatagtggtgggtgcctggaatcccagctactcaggaggctgaggcaggagaatcgctagaacctaagaggcagagattgcagtgagcagagatcacgccactgcactccagcctgggcgaaagagtaagactccgtctca

SEQ ID NO: 250063 - DNA, 643 bp, Homo sapiens
ccaagtccggcgtttaaaccgcggccagtgaattgaatcgactcacatagggcgaatgggtaccgggaccacctcgtccaggagaactagtacatagtttttttaagaatagacaaattaatcagtaagtcagaatgataaaataaaaaaagaaaatctgagcagacacatataacttgtaattatattgaatcaaaaacttcccaatgaagaaaagccaggaccatatacatgacttcactgaagaattctaccaaacactgaaagaattaataccaatccccctcaaatgcttccaacaaactgaaaagggaacattttcaaactctttatgaagccagcattatgctgatatcaaagccaaagacaccataagaaaaaaactatagaccaatattccttatgcatattgatgaaaaattctcaacaaaatactaccaatccaaacgcaacagtaaattaaaaggattataccacatgaccaggtggtatttatccctgggatttgagcaaggttcaacatatattaataaaaccaatccatgtgctacaccacatcaacaaaaccaaggataaaaatcgtatgagggatctcaattgatgcagaaaaagcatttaacaaaatccaacacctattcatgat

SEQ ID NO: 250064 - DNA, 205 bp, Homo sapiens
tacacttttaacaggcatttttatagcaacattgttttgtttttgtgtttgagacagagtctagctctgttgcccaggctggagtgtagtggtgcaatcacagctcactgtagcttcgacctcctgggctcaagggatcctcccacctcagcctcctgagtagctggggcccacaagtgcatgccactatacctggctaattttt

SEQ ID NO: 250065 - DNA, 262 bp, Homo sapiens
tgctcccctcccccttcttttccttcttaacagctggcccgaagaacctaaacttagcaagggcgaggtgtaggaaactagatagtgcattctacagttggataggaaatactgggctcaatgtgtttaaggttaagattaattcctcacttcctccgaatctattttaaaaacagagcaaaggatggcatatgctttcttctaacaaaatgacagatgatcaaaggataaacatgatctgcatgtaaaaccctctgactac

SEQ ID NO: 250066 - DNA, 395 bp, Homo sapiens
acttgagatgtttgatacaggcatgcaatgcataataatcacatcatgaaaatcacattccctcaagcatttattctttgtattactaacaatgcaattatacaattttagttactttaaaatgcacaattactgactgtagtcaccctgttgtgctatcaaatactaggtcttattcattctttctgattactttttgtacccattaaccgttacccagccaactttaattttttaaaattagaggtaatgcaaaagtatctaataactcaaaatttacagaatttcctgagttaagaaaaaaattcaaaagtgatgcttgccttttcgctttcctaaagatgtcatttgaaaacaagtcttctgttttgataaagttaaattaatccatttca

SEQ ID NO: 250067 - DNA, 404 bp, Homo sapiens
ctgtaaaattttgagctagctctgcccctttctgtactagatacaatcctggatgtagagaatcagagacttgaggttaagacctagctctggcaccaacttggacaagtcacatcacctatctccacctatctccttcactgtgaaatgagaggattggactaaatgatatctaaatctcccctggcctccattgtttctgctttgtggatgccgttttatggattgagaaatcaaagtctattgatgaaaatgattgcaatgtgcagattcacttggaacacagaaagactcagagagctggtcagtaccaaaggaggttggagtgctttgccttgaatgcaagaaataacgatgtgcaatgtcatggagaactttaaaacaataatagatacaagaaaaag

SEQ ID NO: 250068 - DNA, 652 bp, Homo sapiens
taagtcaaggccacatcctctttgtgccatcagggaactgtgttatcagtcaacttacatacttattgtggcccattgttccatttcaggtgacatggaggattttgtgagtcaagttaattgagcaaactgggaaatgggttgttcttacacaggatgtcatccataactaagacctcactgtaagctggaggaaaagtttattacatttgagagaaaattatatgttctttgaaactgtatgcagttgtagtgatttccttgagacatgcaaaaaatgtactaggtattcattttgactaagctcactgtataacttcatttttgaaaacaagagttaaaaaccagacaaacacatcagtatgaccacagtgttttcctttaattttagttcactgggcagattttcttgacaaagttagtctttatgaagagtgctaaaataagcaaacccttcccttctgatctcataatattggaataatcttttataatctttaaatatttttctagttcagtgtaaatcttaaaatgacactcaggcattgaatagaatttgaatcatgcctttatttgctgctgaaaattgcctttagatttctgtgtatgttaaggaaatattgcctcccacccaccatcaccagtatttatg

SEQ ID NO: 250069 - DNA, 285 bp, Homo sapiens
gcccaggaggtcaaggctgcagtaagatgtgatcgtaccactgtcctccagcctgcatgacagagcaggaccctgtctccaaaaaaaaaagtgtgtctgtgtgtgtgttagaaacatttttctaattttatttaactccttacaagcctatggaaacctggcaatgtaattgtcttttactgtgtatatttgttttaagttctccttctaagaattcctatctagatttattttttcatgttgttatttttttcttttttactttttatttggatataattatta

SEQ ID NO: 250070 - DNA, 136 bp, Homo sapiens
cttacatgattttgtacatccaaggtaaattcagaaactatttattgttgagggtaaattgaacaccttcggttttaaccttgtaatctgtacttcccagagcctctcaggagcacctacaatgggagagaggaga

SEQ ID NO: 250071 - DNA, 411 bp, Homo sapiens
ggagtcttactctatcgcccaggctggagtgcagtggcatgatctccactcactgcaacctctgccgccaaggttcaagcaattctcctgcctctgcctcccgagtactgcataataaatacatgattacatggttcagacttgttaagaaggcagttatagatgagcgaaagattcaaacatcaggaaagaaatcagagaatgatacagatggaaagttgctaaatactgacaaatggtatcccttggcaggagggctgtgggtgacttgtttacttcactgatcttttctgattttgtttctaaatttcctataagcttaaagagtcaaaagaaacatcaggaaacaaagttgcttatgcattataatcaagagttttttaaaagatgactacgtaagtactgaacaac

SEQ ID NO: 250072 - DNA, 392 bp, Homo sapiens
ccttgcatccttcaatccaatcaagttgacactcggtattaaccatcataccctcttaagtggatctccctcctttgtctctgttatcacatttataatagataattcacatttgggatccacattttttagacatagattaagatagtgtgatgtacttgactaagaaatgcaccaagctaacatagcttctaaaagtgagtctatgatcatgagactttcttctcacagccatttcgtaaatgactggcaaatgaagtctccaaattatatcatcactgtagggatgccacagaagtaaagataactactccagtaaatatggtgggaatatggtgtttccctatattcttcatctaaggattatattgctctaataaataggtcttaat

SEQ ID NO: 250073 - DNA, 433 bp, Homo sapiens
tttatcagttctattttggaaataaactttcaagtatggcagctatggaaggtgttgaaggcattccagtgctatttgtggcctggaatcaaccagatgtgtttaggcttggcactggctttaagttccaaacactggttagaaactgcctggaatgccaaaggaaatacagcattccctagctgaagagtattttaacactcaacaagtggctgacatcttatggaaaactttagagggaaaacactatttggaatcagttcagcctccatgatatacaccctcctaatttgtattttctaatggtttcttctctgatttttattcttagactcctatgactgataagacagtcttgacatcctctttcctctgtttcttccactccctcctaacttggcagtttgctcccatttaagacctaagatcccct

SEQ ID NO: 250074 - DNA, 644 bp, Homo sapiens
ttagctaaattaaccacccgttaccgtccaagccttcctgtggacattgcaagctttcagtagactccagagttccaaaagagttctaagacaaattctgcccatgcacttgttaattagttggggagatggattcctggcgctttccatctgccatttaccagagtactccagaatcattttcaaacacgtttctttctgtcaagaaatcaagtcttggccaggcatggtggctcacgtctgtaatcccagcactttgggatgccgaggcatgcggatcgcctgaggtcgggagttggagaccagcctgaccaacacggagaaaccccatctctactaacaatacaaaattagctgggtatggtggtgcatgcctgtaatcctagctactcgggatgctgaggcaggagaactgcttgaacctgggaggtggaggttgtggtgagctgagattgcaccactgtactccagcctgggcaacaagagcgaaactccatctaaaaaaaaaaaagaaaaggaaagaaatcaagtcttgaggcatcatcattgttatatcatgtgcaggtgtctagcctggatgccacccagctatgccaaatgcggggagaaactccctatgggcactgtggctgggtccagagctc

SEQ ID NO: 250075 - DNA, 437 bp, Homo sapiens
ataggcttgaagcagtcacttagtccctctacgttcaattttgttatctataaaatggactgaactctccaagagagcaaatgcatgcaaactctgattgttagtaactgtcaggaatcctgggttaagtaggaggcagaggccatatgcaggtaggaaataatgttatgatctgtctcttaataaagaaatatatttggcatgcccagacaggatgacatataaagctcttttcaatgtagcatgctatgacactaagcttattgatcaccaattagcaatggtttgcaacctttttccgattgacatttaaaaaacacacacatgaaatcacacaataatcaagatgtttagttccactttggaaaaactgaaagtaagtggttttagttggggaaaatatcatgaagaaactcttctgcttttttgtagaagat

SEQ ID NO: 250076 - DNA, 379 bp, Homo sapiens
gaagaagtggcaaaatgtgaaaagcaagaagcaagtattaccagagacacctatgaaaaagaaatctttctgaagaacatttttaaagtgccataatctgttcgcactgcccatacttctgaaagcagtactttcattttcaactcagaggttgagcctggtttctcaactcaagctgcatattagaatcagctgggaagcttttaagaaatcccaacagccaggccacaaaccagaccaactaatgcagaacctctgagggtagaacacagctcatggcccatagtgttggtgaggccaacactatagctgcaagcacttacttcatttaagaagtttatcgagagctttataaataaattctgttctccatctacta

SEQ ID NO: 250077 - DNA, 400 bp, Homo sapiens
catctggaggtggtgatccaacaagacaaaggcatcagtgttcctgccatccatgcttaatttgctttgaatgtgctcctagcagccaaaaccaaacaaaggtacaaccattgaaatcataaaaccctgtttcccattctaatctggttagacaataccgcattcaggactagggaggctctgccaggaggcaggagagggataaaagagaattctcagagccctacccagcccacccaggctcccacccacacctgtattaggccaaaagcagcactgatggtccaaagagaaaaccaggcagcaggtcccctgcccagaaggaccatcctaacacaaacttctgcttagccgaccctgaagaaccccaccttatccctgaaagctttctcttgtgctc

SEQ ID NO: 250078 - DNA, 474 bp, Homo sapiens
gaaattattccaacccctggctgaagtgttaattataattcactgcttagcatttcagcctccacattggcattacctacaactaataggaagatagaaaattctcttttgagtagctaccaaggtacaaggtaggtgctcagtgtctcaacatttatgagaagttgtcaaagcgaccgaactgagagcattcaactgaaggaccaatttgcatgcaatttgagtcttaaaggtacaataattttaaatagagggagtcagtattttaaacagtagcccatctatggttcaggtaccaaatgcaacaggagagtgagcccatctgactcatgttagtctgaggaaatgtaactggaaagaataatacttatagcattacttttttaaagaattggccaggtgcataaggccattataaaaggcattagtgcaaagaaaaatactgaaaaaaaggaaactttcttaaataacaaa

SEQ ID NO: 250079 - DNA, 499 bp, Homo sapiens
agataaggaaactgaggtttagcttagttaaataacttgcccaaagtcacagagtaagtgatagaaatggatgaaagtcaaacccccacaatctaactcagagcctataccatgttattccatgcaatattttattttattttatttttcttagttcaaaaactacttagagtaaactcacagtgaagataaattcctgatggcagactagagtacaggaaagcaaaaggagccctcccactaaaacatatatcgcacaaaggaagtagagagaagtgcagtttaaggtcaagagatggaagatatcataatatgctgccaggctgcctttgtgtaaattctataaagaaattatttttcaaatattcaataaaaagcaagtgttatttaaagacatggccaggtagaatgacaaatggcataccatttcaatttttctcaggcacgcaagttttagctgaataaacataaaagaaatcaatctacatggtgcaaatgt

SEQ ID NO: 250080 - DNA, 425 bp, Homo sapiens
aggtggtatctatttttcctctattgaatcttggttggtcgtttgatttgcttttaccagtagaatgaggcagaaattacttctgagagtaagttttcagaggtcttgtaacttcctttttcactctcttaggaaggctcagctaccatataaagcaatctagactgtcatgctggtgaggctagatggaaataaataccctgaaggttggtagaatgcaaaactacaaggagagaaaagctctgaaggataagagcctatgaggaaagagaggtttcagcactccagccatcctagctatagggtcagatatatgaagtaataatgatactccaccctcaatagggagcagagaaaacccatcctaattaagcttcttcaaattcctgatccataagataaaataaaatggctgttgtattaag

SEQ ID NO: 250081 - DNA, 508 bp, Homo sapiens
tgccattttcaaagccgaggtggcgaggtgtcaggctgcagattcggacggtcattctccaaggctggatttgcaggtcaccacccggtacctatagacagagggtccagcaggctggttagcagacaccgctccagttctaagacgccagcagtgggatccacgtttaaggtggatgcggctgaaatgggaattatccccccacaggctttgctgtacagttctaagaagccagcagtgggatccacatttgttaaggtggatgcggctgaaatgggaattatccctccataggctttgctgtaaatgaccaggtcctttagaatgtacaacctctcagtgctgctgcaagctgggagctggatttctttctgtcttctttttaaaatccgttccttgtgttttcctaaatagccctttaaagagaaatgcaaccccagggctgctgaatgccagggaagactcccccaccccgcagctttgaactcagcaaaccaaaaaaaaaaaa

SEQ ID NO: 250082 - DNA, 827 bp, Homo sapiens
gggttcgaaggatctatctaaagaggagaacaaatttcttctggataattctactggaaacagagtggaacaagggatgaaggcagagaggaaggggaagaaaattaagatacaaagggaaaagttcgtcatcatcatcatcattagacatgtctcaactgggtttcagatcagctaaagagagatatactgtatcagcttacagtgaggagtgagtctgatcaaatcttttcctcttggcgtatggctgagctttggacccagaaaggatggttgccccttcctagaatagacacatccagttgagtgttcaaggggagcatggaccccagatgtccaaaagggacatgagggaggaacatgagccacttccctgcgcagctcctaggtgtacctgaatgtcatcgatgtcactaataaatgcagtaatatatccaggaatgctatgtatatcagatacgggagtgtctgtcatcttcttttaagaggtactgactttttggaaatacaaaacaatagtcttatcagtgtgtctatgaaaaaaaaccaaatgtagccacctacctgcacatcccagaggcctttggaggacatgtgagaaagggggctgacaggagcttcaagtgtaggagaagaggaaactatcctccttccctcctcatagtcatcgaacaaggaggactcaaaacaatagttcacttgtctgtcacttctcaccttcctcagtggttccagccctcattgcagaatctagggtagaacaattgttgggacagctgcttgtgaaaaggagaggcagttctaaataaaagcagtttactcaacac

SEQ ID NO: 250083 - DNA, 426 bp, Homo sapiens
attaatcacactccctcccatgcagtttcaaacatgtcttccaactgtcttaatattatttttacaaatcaaatatttgtcttttaaataaatgtatagaattccttttgctctgtgaaggactcatttactctcattgtccaaattagtatcaatctcattatggttatggcatacttatgtcccttggttcatcagaaagataaatagatatatgcattttagaaagaatagatttaggtggatgtgtataaatggtatatttacatttactatttgtgatgtgatgactaatctacatcacaaatggacaagttcacacatcaaagagggaagaataaacaactcaccttgaagacaatggcctaaagtaaaaatatcttaactaaatgttttcgactgtaaataagtggtataaattctgta

SEQ ID NO: 250084 - DNA, 377 bp, Homo sapiens
atgatatttaattgtgataataataatctaagctgttgagggcttactttatgctaggaactgtgctaagcagtttacatgaggtggctactgccattcctgttttgcagatgagagaactgataatcaaagattaagaaactttcccggccgggcgcggtggctcacgcctgtaatcccagcactttgggaggccgaggcgggcggatcacgaggtcaggagatcgagaccatcccggctaaaacggtgaaaccccgtctctactaaaaatacaaaaaattagccgggcgtagtggcgggcgcctgtagtcccagctacttgggaggctgaggcaggagaatggcgtgaacccgggaggcggagcttgcagtgagc

SEQ ID NO: 250085 - DNA, 336 bp, Homo sapiens
ttttccttgaggtgataagctcactttattcattttaaagaaaatgtctgccagatgtccacgtctgaaattccatagtttaccagtcatcctaaaagtaccaacagggttccaggaaagaagcagaatgctttatatgtggatttaatgttactccacctctgtaacattaaaaaaaaaaaaattagccaggcatggtcacgagtgcttgtagtcccagctacttgagaggctgaggtgggaggatagcttgagcccaggagtttgaggctgtagggagccatgatcatgccaccgcactctaacctgggtgtcacaacaagatcttgtcgctta

SEQ ID NO: 250086 - DNA, 755 bp, Homo sapiens
acagccctccactgccccctcacaatatcaaatagccaggtgacagttcttttcctgtgtggtacaagaccctacatttgttatcttgcaggcaatacaagagggcctctgaccaggggaccctagacagaacaggagcagggaatactggatggaaaagaaaggattctgaatgttgagtcttcagcctttcttctcattgtacagttttggtagccaggcttatatttatatccccaggggtcagaatggaagattcttctctggggaatctgactgccaaattgtaaggacccaaagataatgatattggaggtttcctgtgtaaattatctagcaagattgccatacacagaaacacaaagttgacaagctccgcctatgagcacagaacctctgattaattattttatgccttattttaaaatttgagcacaggacagtttgtcaggcatcttcagaaaacctcatgagagagcaaaacaaacagaaaaatcaattatgacaattattcacagttaaaagctaaaagatggttttatctatgagactagaacaaatttctatttaaagacttagaataagagcttttggaagtaacatgataatagaaatagaaaaaaagcaaaagaaaggttaaaagaaatgtaacatttccaaagggtaaaacaaaaaagagttggaagataggagaagaaaagtaagaaaagtagacataacccaagaggttcaaattccaaattacaggagttcag

SEQ ID NO: 250087 - DNA, 732 bp, Homo sapiens
agggagaagagaaagaagaggccgggggcccccagaatagagaaaggggggagagtattgtggagagagaaccaaagtgggaggggagaaaaaaggggtttgtacaggggttttaagaaagggaacgggaaatttgatgaacaaaaaagtttgaaaagggaagtaaagcctttgttcaaatggacatttgggaaccgaggataaattatatccccaggggtcagaatggaagattcttctctggggaatctgactgccaaattgtaaggacccaaagataatgatattggaggtttcctgtgtaaattatctagcaagattgccatacacagaaacacaaagttgacaagctccgcctatgagcacagaacctctgattaattattttatgccttattttaaaatttgagcacaggacagtttgtcaggcatcttcagaaaacctcatgagagagcaaaacaaacagaaaaatcaattatgacaattattcacagttaaaagctaaaagatggttttatctatgagactagaacaaatttctatttaaagacttagaataagagcttttggaagtaacatgataatagaaatagaaaaaaagcaaaagaaaggttaaaagaaatgtaacatttccaaagggtaaaacaaaaaagagttggaagataggagaagaaaagtaagaaaagtagacataacccaagaggttcaaattccaaattacaggagttcag

SEQ ID NO: 250088 - DNA, 689 bp, Homo sapiens
agagacaggtgatacaacatctctgagattctcaacatgtttggtaaaaataattaaactgcttttaatgtatatgtcatgattaatgttatctataatgagtgtattagggatacattaatattcacaaagactatatagctattaactaattgttctgtggcttatagacataattttggatgattcgttctttttttgccactaataaatatacaaaaacctttcatgttttaaaatgaataaaaagttataattctgaagaggtcctttatttaaatgaaacacactaaaaccattgaattttaatatttatattatgaaatgatctgccactgttttttgtaagtgtacctgctattatgactatattttcaagttaaagattcatgacgtttttgtgagaaaatattttaaaaacttgttaattttttcagattaactacaaaaaatctattgtaaaaatttataaaatactaataattaagtctctttattttcatgtcagtgctcttaaaatataggttgtttcaaagacagtagcaataaaaatgtcaattcagaattccttcagggatgaccctaagtctaacaggtatatcctttgaaacaagaaaaatatctagcaccttgggaaatgaaaatagtacatttttattttctcttaataaaattaactcagattgtca

SEQ ID NO: 250089 - DNA, 654 bp, Homo sapiens
  misc_feature (17)..(17): n is a, c, g, or t
ctctggcgaagcttcantagactacttctccataatattcatccctgtagcattgttcgttacatggtccatcatagaattctcactgtgatatataaacccacaccctcatcactcttcaaccgcattggcctccttgctgttccacaccagatgagctcctgctacagatcctgtacacttgctgttccctctacctggaatgcttcatttctcacctccttccagttttcctcagatgacaccctttcagtgggccctttcctgactactctatttaaaattgtagcaccctccccatatacatacatatacacacatacacacacacactcactgacacacatttacagcactctctcttgccccttatgtttttattcagttttatcagcttataatatatagttgtctctcagtatccatggggactcccatggatactaaaatccccagatactcaagtctgttatataaaatggtatagtaattgcacataacctacacatatcctcctgtatacttaaagtcatctctggattacttataatacctaatatgaggtgaatactatgtaaatagttgttatactgtaatggttttaagttttacaatttttattatttccgcagggttttccaagtacggccgtcg

SEQ ID NO: 250090 - DNA, 537 bp, Homo sapiens
ctccttgctgttccacaccagatgagctcctgctacagatcctgtacacttgctgttccctctacctggaatgcttcatttctcacctccttccagttttcctcagatgacaccctttcagtgggccctttcctgactactctatttaaaattgtagcaccctccccatatacatacatatacacacatacacacacacactcactgacacacatttacagcactctctcttgccccttatgtttttattcagttttatcagcttataatatatagttgtctctcagtatccatggggactcccatggatactaaaatccccagatactcaagtctgttatataaaatggtatagtaattgcacataacctacacatatcctcctgtatacttaaagtcatctctggattacttataatacctaatatgaggtgaatactatgtaaatagttgttatactgtaatggttttaagttttacaatttttattatttttaaaaaatatttttgatctacagttgattggttgaatctatg

SEQ ID NO: 250091 - DNA, 336 bp, Homo sapiens
ctcccccctgccaggctgcctggagcagggctcggcccctgacaccccgcctcccccacaggctgcctggagcagggctctgctggaatcacggaaggaacacacaccctttttgagactatcagaattgcaaagcctggccagttggtgcaagtgtttatccgcctgccatcaccatcgggtggggtggtctgtgacaggctcagcaggtgttggtaaaaggacccttggccagaaatgcaaaggggacagagcaggaactcctcacaatcataacagcagtgagctgtttcttgttctctgtgggaaaatgcttggagcctaagtcttgtacga

SEQ ID NO: 250092 - DNA, 376 bp, Homo sapiens
gaatttgaattgggcacgaacgtttttagggtgatgtgctaatgcaggtcctcttagaaataaaaatgcagccaggcgaagtggctcatgcctgtaatccgagcactttgggaggccaaggtgggcaggatcacctgagttcggggttcgaaaccagcctgaccaacatggagaaacccatctctacaaaaaatacaaaattagccgggcatggtggcccatgcctgtaatcccagatactcaggaggcagaggcaggagaatcacttgaacacaggagacggagtttgcagtgagccaagatctcgccagtgcactccagcctgggcaacaagagtgagactctgtctcaaaaaaataaataaataagaaaaata

SEQ ID NO: 250093 - DNA, 501 bp, Homo sapiens
aggtctccaacctgcaataaatgaaacatctgatccccttgaatccaaataactttttctttgattttcttttacttctatttcttcgtcctttgttctacagcccgagtcaaatttccctttagaaattgaaagaatgtgtgtgggtttttcctgctttttttttttttttaaccaagctctagtgcaaccgctggttcatggactagaatattaagatccaattcaatggcagactgtctccagcaatgttgtatttttatttttttttgccgtcatcccccccacccacttgtgagcaatggttgtacaaattagcctctgtgtactagtcaccgaagctggcttcccaattaaccccaggcttgagagaaaataagactaaagattcttcccctcctgaaagaactaagttatccatgcacaaaagcctacatgttggcacctggctatggagttgggcatttaattgcctttgtaatgactcagtccatctgcatg

SEQ ID NO: 250094 - DNA, 459 bp, Homo sapiens
caagagttaaaaataaaacaaaaacccagcagagtcttgaaagcattgggaggggtgaggatcaaaggcatagggttaatcttacaaaaagaaaaaaagaaaagaaacccctcttcttctgagtcaagagggaaggactgattttttttttttaatgtatgtcagcatggaggatgtgatacctcatacaattgtgagacccatagagataatatatacatgaacaatggccaatacagactacagaggaggatgcaaacaaagttagcagttagttttatcatttgtattatatcacatagcaggtgttctatcatatcatttgattaatcttcaaacctaatgtgatgtaatattatttatcccatgcttaaatgaaaaaactgaagttgagacaggttcagaaatttccagtcatgcatcttaggtaaaagatgtgggattcatgcctaaatctgc

SEQ ID NO: 250095 - DNA, 461 bp, Homo sapiens
acagaaaggtgggttggtgggggaggagggagaggaaatcgggagatacgcgtcagaggatacaagtagtggatatgtacgatgaacaagtctagggatctaatatacaacatgaaggctatagttaataaaattgtattaggtactttgttaaataagtagattttaggtgctctggtcacacacaaaaaacagtatatgtgatgagtaatatgttaacttgcttcactatattaccattttactgtctctatatatgtacgtgtgtgcacatgcatatacatacacacatgcatgcacacacacacacacacacatacacacatatatatctcccataacatcatgttgtaaacctcaggtatgcacaataaaatttatttttaaaatgttttaaattgagctttaatattaggtcttataccacacccttcccccccgccccccaccacacacacaca

SEQ ID NO: 250096 - DNA, 538 bp, Homo sapiens
cattcatttcacttcagtgatctcttttctctatgggtaactgaagtatcccacccccggagctggagctgggttccacttgccatccttgccacagagtctatggtttgggccttttcacctctccacagatctacagatccaagtccagttcgtaatgcacaagaggtgctgctttacctgtacagctctctacgctcctccattgcctcttaactactcatgcattcatgcagaggaaacgctcttttttaccaactcatactggagagtatgtcatcatgccaaactaatgtgctgaaaactgccctcaagagatgacctaagtaagccaaataccttcttttataggaaaagatcttaagtccatagagtttgggtggcttgtagctaagccagaaatatagcccaaatcatcattccatccctataggacaagcttgctgaagaacacagtcagccttctgtatcagcaggttctgcatccatggattcaatcaaccatggattgagaataataaaaaaatcccgtaacaat

SEQ ID NO: 250097 - DNA, 582 bp, Homo sapiens
cagaatccttagaatttcctgtatacaagatctgcaagtaaatactattacttctttctttccaatctgcatccagttgattttgttttcttgtctaatttctgggctaacactttaactgtaatgttaaataaaagtggagatagtggatttcttggtcttgttcctgatcataggggggaaaacattcaatcttttcccattaagtacgatggtaaccaagagtttttcacagatgtcctttatcgcgttggggaagctttcttttcctagtttgttgaatgtttttaccatgaatgtgtgtggatgtggacttttgtcaaatactttttttttaatggtgtggagatagtcatgtggtttttgtcctttattcttctgatatggtgtattatgttaattggttttgtaatgttaaattaatcttgcattaccgaaataaatcctacttggtcattgtgtataatatttgtacacattgctagatgggatgtgctaataatttgttaaggatttttcatttcacgaaatatcatatttttctttcttatgatgcctttttctggtttaggaatcagaatg

SEQ ID NO: 250098 - DNA, 469 bp, Homo sapiens
tggtaatttggggttatatcatgtgcattatgaatgaacatagagactggattctgttatgttcttctgaagattattggttttttgtatagcagaaatttaactaaacttgctccaaactcttatctcccctgggcaacaactggaattgaaagctttgtttagtcctttcagatttagctatgttgcttatagtttgccttgtataatatatgtctaggtctggaatcagctagggatttgggcagtttgtatataaaagtttgtcccagaagggagagtaccacactctctgcagcactttcccttctgggacaaacttcacttttccagctgctatgaactccactcccaaactatatcctttcatttctttaccagagagactgcaagttttcagtcaagttttagttgccctgtgtgacagcagcaaagcttgccctctgtcaaaaagctgtttaaaaaaaaa

SEQ ID NO: 250099 - DNA, 305 bp, Homo sapiens
caaaaccctgactgaaaaaaagacttctacaagcagtcagcaaacaggttatttcccacacatatctcacatttttatttacattatgagccagttaggttaattacacttttcagtgactcaaatgcaagtaaaagattctgaactcagcactaataatgtcaaaccctacataaaaggcactaattggccaggcgcggtggctcacgcctgtaatcctagcactttgggaggctgaagcgggtggatcacctgaggtcaggagtttgagaccagcctggccaacttggtgaaaccccatctct

SEQ ID NO: 250100 - DNA, 334 bp, Homo sapiens
gaatgtgatcctacatcataaaaccaaaacaccccttcagggtgctgtgtagagtacgatccgagacacagtcatccttgtgctaaggtcagcctgtttgcagcagcaaaacccagatctgtggtgatgtcaactgcatgaatcctgccattgggtaattttaaagaccttgtgtaacttcgaagaccttgcgtactactcctaatgtgaggatgaagttattctgttccaactccagtgctagaatcataatgttgcttcttatggaaagtacaatttaagaactgtgtcttaggttaaataaacagaatctaggatacctttatagactatc

SEQ ID NO: 250101 - DNA, 211 bp, Homo sapiens
gttcgaactatagagcaacctgcatataaagtcgttcagccaagagcatgggcagaatgaagccctgctgagcatttgtgcagcttctcaagttctttacagcaacctcacataaaacgaaaaacaaaaggcatggtttgttcatgagaaaaatctcaaaatgcaataaaatgtgtttttataacctagtttactttacttctcgtggcat

SEQ ID NO: 250102 - DNA, 218 bp, Homo sapiens
gcagttctcagccatgacagatgggagtttcggcccaattgaccagtattccttactgataagagacactgaccatggagtggttctggtgagatgacatgaccctcgtgaaggggcctgaagcttcattgtgtttatgtatgtttctctcttcaaaaatattcatgacttctcctgtagcttgataaatatgtatatttacacactgctcctcatag

SEQ ID NO: 250103 - DNA, 336 bp, Homo sapiens
agcgttcttttggtattgggagtgccagttgtctttgtttcatgaactacttctccgtaatagcatgcagccatcttcaagaggtgagaatttcacttagcgacttaaacagaagtgttatctcaagataatataatatctggagggagaggcaccagagctcactctctctgctgcagcacagaggaaaggccatacaaacacacagggagaaagccaccatctgcgagcagaggagtggggcctcaccagaaaccaaccctgctggcaccttgatcctggaattccagcctcagaactcggataaaataaatttatgtgatttattacaccaag

SEQ ID NO: 250104 - DNA, 302 bp, Homo sapiens
tgtggttgcagtagtgttttggatatatgcattccaagtttaggagcaagacgagttattctttgttaatgggaaagtccttaggagccctggactggttggttcttaggtcttgtggacgttgtctagttgggaatgatacagataaataggtgagatagatggtatcatttagaaagaattgataacactgtaaaggtcagtgaactggagaaacaaggacctggttttaaaatcctgcttgaaaccaccacataacacttttttaccttcacttataaaacagtaatgatacttattta

SEQ ID NO: 250105 - DNA, 516 bp, Homo sapiens
gtgtatttcagattttttaaaacagcttttccggagaaaagggagggatcacacctcacaataatcaccactgatcaatttcattacattattattattcaacttcctacatatcaccataagtatgtatattttccttaagtttacactgtcacatttaaactttactagaacaagctgggaaagagagagagagcaagcgtgagcaaaccctataagaattataaaataatatatataaaggggaatttattaaatttaaaaaagaattataaaaggacagtaatcccagtaatcctcccactgtgtctttggttaatactgtattcagacatgaaatattttgtctcttttgttggaaacaaaagcaagtaataataatggaaagtagctcttttaatatatcaaaataagtataccagttccaaaaataggatatctgcattctcagcaactatgatcttttccagcagacttaaaataattagttctcactaaacattgatcggaattttc

SEQ ID NO: 250106 - DNA, 764 bp, Homo sapiens
attgcttgaggccacgagttcaagaccagactggccaacatgacaaaaccccatctctgctacaagtacaaaaattagctgggtgtagtggtgtgtgcctgtagtcccagctgctaaggagactgagacaggagaattgctttaacctgggaggcggaggttgcagtgagccgagatggcaccactgtgctctacctgggtgacagagcaagactctgtctcaaaaagcaaaacaaaacaaaagccaagatcttgatgaaaaaatagtgatgagaaacattgaccggacaatcatgaaggctctgcaccttaattgggcttgggtaaattttaaaatccaagtctcaattataaaatgaggaagtaaaacaaaaagttctaaattttgctttttaaataattgagtcattctctgtatctttaaaacactaaagtagctttgtcttcattttcattctcatttgagaggttgtagaactaccttttaaaagttaataaggttataaaacctatgaaagtgaggggtcagcaagtgttggtcctgctatttttgtaagtaatattttattgaaatacagccatatccattcatttccagttgtctgtgactactttcatattactggagcagggttgagtactcgtagtagagatcacatgggccgcaaagctcaaaatatttactacctggcctttatataggcttagaaaatagagccttgacaaaattttatactttaatagtgtggtttttccttctgtta

SEQ ID NO: 250107 - DNA, 241 bp, Homo sapiens
ctcctcaccatcactatttctcttgctctgtttaatttcctccctcatcctcatcactttctgaagccagataaatgtttcttttgtttacagctggttgatgatgagtctttcccactagaagataaacaatatgatccccaaaaatcccctttctaacactacatccctaaaagctaaaggaaaacctgaaaacagccattcagcaaaattaggaataaaaaccaatacaacccccaaa

SEQ ID NO: 250108 - DNA, 409 bp, Homo sapiens
atttttaaaataaaaagttttaaaataaatgaagaaaacccctaaagtcataaatttgctttggaaacagtgtgaactcattacatgatttccttcttaaaaaaaaatacagtttgcctttctgttaaagctctagaaacagttacccaatccagtagcaagaagcattccctggcaccaatcgtaaggtccacgtcccaccacagtgaaccagggttcctatcaaaagacttagataccaattggaagagcctaccactggccaaagaaaagaaaatgtgagcattagtgaaaataataattaatgtggaatgaagcatatcaaatatttttaaatccagaattataaagatgctttttaagaaattaatctcagttacttttggagaatggtggtggattaactcat

SEQ ID NO: 250109 - DNA, 504 bp, Homo sapiens
cttttgtataagaaattaggaaaaaggcaatgtgtgtgtgtgtatatatatgtgttcaattgtgcacaaataaatactggaaagacaaactattgagattggtgggtaaaaataaagatgggtgggtgaaaatggagtggaagggtttgatgtaattatttgggtagttctgactttagaatcgtgttaatgttccacatgccctaaaattaaatcaatctgtatgaaaggtgcactcaatggaatataacagaaacaactgaacttaaatgtattttaaatgaataacactctttgaggggattggcaatgttaacccaggtaacttaagaatgtactattttgacactatactataaggctaaagacaatcataaagaattgtaaatacttaggagatttgttttttacattgttatgtgaggattagcaattttaaatctattatatttgtattcttggactggacaaattaataaatacattgtgggtaattggagtcag

SEQ ID NO: 250110 - DNA, 454 bp, Homo sapiens
tcaaatttattttacattccttccatactaactcttctccttgcatgtagacagacttgtggctgctttcaatgacttctgaaattaggtcattaaaagtcatacattctttggctagtaatcttgggttactcactcatgagaggccaagctttatctaggaagttcaactactcgagactgtcatgctgtaataattcaggcatgaggacaccttcctgtgtgtgcaaaacctctcatatttttcagtgtggctccggcacaaatgaggggggggctacgccaaagacatttattttacatctgctttcggtttagcatcaggggaaacaaagcaaagaagaatgacactgaagaatcaaaaaaaaaaatgagcataagacccatgaagattacagacacatacactcctaaaattaaacattaagcggaataaaaataatcccagattata

SEQ ID NO: 250111 - DNA, 549 bp, Homo sapiens
atgagaactgataactaatatagtgatggtagtaatgcaatggtggcaactaatatatagaatataaaagaaatagtatgttatgggataaaaaggtttaaaaattataggaagagttaacaagggtttccaggctactggcttaccacatggcatggaacagtgcaagacagtatataattagttgctaagtactgcaatttcaataataagcaatttaaagctcataggagtggacaataattgaagatgactctttgcagaaagtgtcaggatgtaagctggggtatcagagaaaaggtatacatcagcctataagaaacagcaattttcccaagtgtcttagaattcactttcttgtttcctgtttgtgttctggagtcaactgacacacagggaagacattttcctccccttatgaactctaaaaaagtggagtaaatggatttaaacatggtccatagcctttcccaaataaagttatatttctaattggagaaatacataaattttctatcacaggccccagtagagaaggacaggggaagg

SEQ ID NO: 250112 - DNA, 453 bp, Homo sapiens
ctcaagctccggtcatgtccctgtcttcttggctccacagggaggaaacgttggttccgagttatgattttcctcctttgtgcatgtccgggttacatgactttcagttttggctctgctatacctcctgttaccaacagaatagggtcagtttgggccagtcttgtggttacacctcagtgtcacaggatttcctctgccaaagggctgtgaagctcaggaccaaggtaatcaaaattcagctctactattggattgtcctggattgttttagcagttgacagggatcaagctctgtcccagcaaccttgatcccaacagagaactgatgctcctaggaccttcacctcagacctcagtgcatcctggtttttgtttttcttcctcctccacaacttttttattttgcaaatgttgatacattcataaaggttgaaagaataatacaatgaa

SEQ ID NO: 250113 - DNA, 603 bp, Homo sapiens
aagtctccgaagggtgctgtccctgtcaatgaaataagaagcggctagctgatgtagcgtctccagagtgaccgaagagctattggtggtggaatcacttccttcagctcgtttgctcaacttccgcttgtccacaaaaattgttagttttgggttgctgagagcataaatgtgaaaataggcaggagttacagaattacagagttcctctacattaagaataactttcaggcccatttgctttttacatcctactggtgtttaacctggagtcttttgctattttacgaagagtattgaaacatgtctctctggagtcaaatatttcatttcagacacctccctttatgatgtcaatctaagggctgagctaagggaaataaatgtgattattgttatgagggcatacagtgagatggcagcagcctgtaagccagaaacagaagcatcaccagaaactgaccatgctggtaccctaatctcagacttccagatttctgaagaacttcaaagaaacaaaagtctattgtttaagccacctagtctgtcacattttgttatggcaatgtgagctaactaatacactacctttaaaatataaaa

SEQ ID NO: 250114 - DNA, 738 bp, Homo sapiens
ataggcaggaatgattaaactggaggcagggaggctagataaaggtcattgcagtaggtgacaaagcttgaaaaagtcagtgtcagtggggttggaaaaaaggaggtggagaagaaaaacatgttgaggtcaaaccgctggggcactaaggctgactggatctgggtttgagggaaaagacttgagctaggatgactcccaggtttcctcctgactcaggtgactgcgtgaattgtgatgccaccaaataagatggagaaacagaaataagagtaaggcttgtggttttgttttgtgtgtaaatatgtgtatgtttataaataagaagggcttagagaaaaaaaattaaggaacaccaatattgaaaaagtaagcagaagactgacagctacggtcagaggggtagggaaccaagaagagatcagagtcatggatgtctaggaaaggcagagttttgagaagaataatgtaagacagaggaaccagaaccggagtcctagaggggctcttgtatgacaagagagactggaaaatagttgaggccgggagaaagaaccagcatagaatggccacttgtttgaagacatgagggaggactcaagatgctgttctcaggcttgctgatatttcagcaaaaacttattttgttctaagaaattatgggtctgattcttgtgaggcttgcaagtcctcaccgagagacattctctagtagaaaagtccagtcacggtccagag

SEQ ID NO: 250115 - DNA, 209 bp, Homo sapiens
tctcagatgccagccaggggccagtcttgcaagcagggctttctatggatggtagttttggtcctgatgctcttttctatctagactacttcagataaaatagaatatttattgacttcttttaagttactgtgctaggtactatgggtatattagagcattagcgatatatatttcctgccaacacagtgtttacttgctggaggaca

SEQ ID NO: 250116 - DNA, 713 bp, Homo sapiens
tagagagacctgataatgtttatggatttgaggaaaagaagaaagtagaaaaggaaagactgatgatgcaagggagagaaaagatgatcaacagtgctgagaaggacggttgttttagagaaggtgcaaagatggtaagggcaagggcagatataaagagtctagaacagcgttccccagccatttctaaacttatgcactcatttcatagtaatatatattatttgaacatttttttaaacatctaatggttttgcatgtaatgcaaaatgaaatgagttaaagttttaaaatgtatgcgtcattttagataagtgtatattaaagattttattacaaaattaattgaatatagtatttactaatattcatggattataataataaattctgaatgagttccatctaaaaagtgattcccatggtttaatttactttaattatgtaagaaatgaccatttatgaaacatacattaaaatgacatctattagtgtgcttagtttggcaactaaataaatattgaactgtaggttgaaatttaactgtgtctcatagtatcaaaagtagtcaaaaacagacaaaatctgcctttacaactaatgctagaaaagcttacattttgggtaaaaacatgtgatttatttttattctttgtttatttctagtgaaataaaagaggatttctggctgctattagtaaacacatctatac

SEQ ID NO: 250117 - DNA, 485 bp, Homo sapiens
ccccttattcaaagggacagagtagagacacaaatggagatgacagtgttggattttgagagcaaagacttgcacaacccttcgcctgggtcttctcatctttatttggtccacgtgatgcatttctagagccctaatgtgatgatagatgtgaatcactctcttcagctgttctcattgtgaaaaaggataatttcatagtaagggaagttgtgatgcagaaggtttttgagtgccaagtttgaagtgggaatgtgtagaggacaatgcacatccataggcagctttcaaaattacaagctattatatgatgcaacgtttggtttgaaaatcatgatcaaatttcagcagagcggtaaagagggtggtgtttgagtctatttccatggtagtacgggtaggaacctaggaatttccaaatcttgtcttgttaaatatccccaccctgagttctttatagggttcctgggttctgtgcaggaaaa

SEQ ID NO: 250118 - DNA, 415 bp, Homo sapiens
agcctgtagtatactgaagatagtgacagcattaatccaacccaaacccctaaaaactggtgtctacattgacacaatttccaaactaatggtctctgtgttagtccattttgcattgctacaaaggaatacctgaggctggataatttatagacaagaggtttattttggctcatggttctgcagattatacaagaaacatggtgccagcatttgcttctggttaggcctcaggaagcttttacttgcggcagaaggaaaggggagctgatgtgtcacatgacaagagcaggagcaagagagatgccaagttctttttatttatttatctattttatttatttatttatttactgagaatcgtgccactgcactcctgcctgggcaacagagcaagactctgtgtcaaaaaaaa

SEQ ID NO: 250119 - DNA, 1327 bp, Homo sapiens
agcttcctgagtagctgggattacaggtgcgcaccaccacacttggctaatttttctatttttagtagagacggggtttcaccatgttggccaggctggtctcaaactcctgaccttgtgatctgtccgcctcggcctcccagtgtgctgggactacaggcgtgagccccgcgcctggccccacatatcagatttttgggtatccctagcatatgtccgtcccacaagtctctgtggagactgctatggtgtgtcagtatctccatcccgtctcacaggatccttgcgtgttttgcacatacctgtgtgtgtgtttcaggtttgtcatacatcttttctgttgcggatgtggcatacacaaatggctccaggctgtgctggggggtgtcagtttcctacatctgtcaatgtatgccacagatgtatgtgtatcttgctaggatgtgctgtcactactgcacacctgtctcacaaccagcacacacaatacctgtaatgtttatttccaggctgctcatgttgtggtagcaaaaggcacactgtgtttccaggtttgtcaccaacataaacctgtccacttggaacagatcttaatcactcatttcatcaatatctagtatacaggaaatactggggaatggggggcggagtgagcggtgaacacactgaacagaatctgagatttaataagccaaatcaacaatgtgggaagttcgttttgttttttttttttgagacggagtctcgctctgtcacccaggctgcagtgcaatggcacgatctcggctcactgcaagctccgcctctcaggttcacgccattctcctgcctcagccttcccagtagctgggactacaggcgcccgccaccatgcccggctaattttttgtatttttagtagagacggggtttcaccgtggtctcgatctcctgacctcgtgatccgtccgcctcggcctcccaaagtgctgggattacaggcatgagccactgcgcccagcacaatgtgggaagctaatggacaagcagtttagcaacgttacataaatattaaagaagtaagcagtacgtataggttaataaactcaaagacacacctactaaacatcaaatatattttgtatgctgatagcaatctgtcttaaataagcagcagttgatacaattcagtactgtatataaaacatttataattttgtacacatacaatttttattttgtatgttaatcttatagttacgaaacggtctttaaattttagaaatgcaatctgaagactttatgcctttaacgaaatatctgattataaatccacatggggacagat

SEQ ID NO: 250120 - DNA, 358 bp, Homo sapiens
ttttttttttttcagatgggtgttcactcttgtcacccaggctagagtacaatggcctgatctcggctcactgcaacctctgcctgggcaacaatgagacttcatctcaaaaatcaaatcaaaacaaaacaaaattcattcattcctttattctttaatgataattagtactcattccatcaattagtgttgaggaactactgaagtagtccagagaacaaggagggtgatgtgaaccagggtactgagataagaagtggagtatttggattgagagttaaataagaaagacagtagcttgtacttggtaattaattgggtgtctggttttgccattaattgaaaggggggacaaata

SEQ ID NO: 250121 - DNA, 396 bp, Homo sapiens
gctttccctgatggcttttcgttacatctgtgtgcaattccctgtgacttaatataaaccatagcactggtaatgaatttcagtatctcaatattctctcagataaaattaacatttccccagatgcaggcatttgtcaaaattcagcaaatatacacttaagatttgcacatttcattgaatgtaaactttacacaaagctgtaaataaataccagtcatccctcggtatctgcggaaattggttttaggatccttgcttacaccaaaattcacacatacttaaagggaccctgtgggacctgcatataggaaaagctggcactctgtatacaagagttcccttcctgagaatatttgtattttcaatacgcatttggttaaaaacaaaaaaaaa

SEQ ID NO: 250122 - DNA, 399 bp, Homo sapiens
ttttcagggttaacaaagagtgagaggcagagccaataatataacataatcaccttatcttgagccaaatgcttttttctgttattccatactcctgttttgaagttgaatagtgaggctaggcacagtggctcacgcctgtgatcccaacactttaggaagctgaggtgggcaaattgcctgagcccaggagttccagaccagcctgagcaacatggaaaaaccccgtctatataaaaaaataaaaaaattagccagttgtggtggcatgtgcccatagtcccagctacttgggaggctgaagtgggaggatcacctaatcccatgaggcagaggttgcagtgagccaagatcacaccactgcactccagcctgagcaagagagtaagacccttctca

SEQ ID NO: 250123 - DNA, 642 bp, Homo sapiens
caggaggaccaggccaaccagaccttggctcgatacaggaagacggtgcatgagctggatgacgctgaggaccgggctggcatggcagagactgccctaaacaagctgcgcaccagacaccgcgtggccggcaagggcatcacctctgtggagatcatccaggtgtccaagacaggcacctcgaaaaccctttctgaggagtgaggccctccgtgtcctaggccacaactgggtaatacagatctcaactgcagtccattcagagggagaaaatatgaaaatggaaaactgggtctgtcctgagaatgtttactatgcaaaagaaagtgcaagccaggaagagacaggtggtgaagaataaagagcgctatggtggaaaatgagcttgagaatgtaaaacccgccattagaggaatgaaaatgagtggggcttctctggaacggcagtaagcatttggatgacagtaatgatggatctgtttcagttgagttcctacatggtcatgtcaaggacggaatatgtaatgtctgtgacccggctgttctctacaaagaattcctcatgttgacaatgttaatgtcccaatatagcttaaataaaagaaacattaaaaaaataaaaagctggcctcgttggcctca

SEQ ID NO: 250124 - DNA, 93 bp, Homo sapiens
ttcttgatgaactgtgaaccaccactattgcgacatgtatatatatcctccaaatttccaaaattcagattgcttatgaaaaatgcatacaca

SEQ ID NO: 250125 - DNA, 632 bp, Homo sapiens
cagtcatcattcccttataccagtactaaatgtttttaggtacctctgctggggcaatactctctaatagtgctgcacccagcttgcttcacaacctacagttctatcagattacatctacgtggactcatagctacatgctccttagtgaaggtctctagagataagagatatttggtttcctctggcctcattccttcaaatcaactgctgaaatcctagatatactcggagccccgccacatgacttcatctagtggtataattaacatgacactacagtagatgtgaattctcatcttgtagtggtttcaagataaatgaaaaggtctggaagcagtttctaaggaaactaagcaaaacctgtgagtggcttatgctcatgaaatttccaaattgcaattttcttctatttcacttcagtagctggtgtgcaagacttgtttacttctctgctgtgctgtaggttcaaacagaaactgaaacattgatttaactatgaagaactggtaggactcaatgcctggatagctttgaatgggtataaaaatttatagttacaactctgcacatatttacatattttcctcaattaatttatactttgtggcagatatatggagctgacagta

SEQ ID NO: 250126 - DNA, 767 bp, Homo sapiens
caaggtcacagaggctacacccttaacactgcagtgaggagaccccagaagctacaggaagacaggtggtcgctcttcctccatgctgctgaaagtcagatcctcaagctgccatcagtgcacaaggcagcacagaggcgctcagtaactgtggctgcaatctggcatcgctgcagcattttgaccttatacacaagttttggcatgcaacaggttgaaaattacaagcctggttcttcaccacaggttaaatccgagaagcactactagaaggggaatgagaatttgaaagaccctgagccctgggtgtcagattcaaaacaaaccaaaacctggtgacacgcagatcaccaggttgtctgggttgtctgtttatacaaaagacattctgtcaacaaaacaaattcaactcttccctgcagctcaacaatcctggtctgctgtgagacagggctttcctcagtccgtgtttgggtatcagttaatgttagtcctacaaaaacaaaattacgtccctcaagttcagcagccaaaagcagatggtggccgggtgtggtggttcacgcctgtaatcccagcactttgggaggctgaggctgatggatcgcttgaggtcaggcattcgagaccagcctggcccacatggtgaaaccccgtccctactataaatacaaaaaaaattagccaggcatgctggtgtgcgcctctaaccccagctactcaggaggttgatgcggaagaactgcttgaacccagaaggcaggggt

SEQ ID NO: 250127 - DNA, 380 bp, Homo sapiens
cagccctgtcccacctcgcccaccgggggcacccccacactctaccagccatgctgctgaaagtcagatcctcaagctgccatcagtgcacaaggcagcacagaggcgctcagtaactgtggctgcaatctggcatcgctgcagcattttgaccttatacacaagttttggcatgcaacaggttgaaaattacaagcctggttcttcaccacaggttaaatccgagaagcactactagaaggggaatgagaatttgaaagaccctgagccctgggtgtcagattcaaaacaaaccaaaacctggtgacacgcagatcaccaggttgtctgggttgtctgtttatacaaaagacattctgtcaacaaaacaaattcaactc

SEQ ID NO: 250128 - DNA, 282 bp, Homo sapiens
gctccctcctttctccatctccaattcatcatcaataatcataaacatttactgagcatctcctaggtatgagggataagaaggaagagggagaaagaaatgcaggaagcagctccgacttgcgattctgatgaggaagagctttctgaagaacagcactgaagcaatcctggcctcacagcagagagggaaaggaagggaagccaccaagctgcccagggtagggggtaggcctggtgggatcacctgggctgaatattttcaatcaggcactatgcctgc

SEQ ID NO: 250129 - DNA, 406 bp, Homo sapiens
aaaaagggtcaattactcctctaatttatttgggtacaaggtcacaacaaaatagacattcccagctatagctatcacaaatgatgttctctaaagattgctcagcaagactgttttctattttgatttcatttatgttgaattgagttcttctccaagaagtcgagttgtattgcagaaagaactggaagccgtgtgtccactgagaacaacctggcatctctccttacctaccttgctcaaggtcacctgtggaaaacggcaaacaaaacaaaaagacaccctccctgctccaagtaatcaagaaatcatgtagttctgagatacacagagaggaaactgaggccccaatacgcggtgtaatgagcccaaagccatgaggcaaattaggaggccaagactaggt

SEQ ID NO: 250130 - DNA, 1101 bp, Homo sapiens
gtgtgattctgttcagcgaccgtgattctgttcagcgaccatgatgttgagcccctaattgagagtctgttaccactattaatagctactctgttcgggccctacacataacggtgtatctaaacctctctacaattttatggacagagtcttgctgtgtcgcccaagctagagtgcagtggtgtcatctgggctcattgcaacctccgcttcctggattcaagcaattctcatgccacagcctcccaagtagctgggactacaggctcataggcgaaagggacttgccttgtctcagatgagactttggactgtggacttttgggttaatgctgaaatgagttaagactttcacggactgttgggaaggaacctgtggtgataaggaagatgtgagcctggagatacagaagctaccacatgaatgttaaaaatgaagctgacgcagcaaaaggcagtgccaaggaactaaaagaaaacaaattttgattacatttttggagttcctgggtcaagcagttcatgacactgaggcttttccgctacatgaataagtactttttctttcccgttaaagtgggtttgtgctggcttctctatcactcacaacaactggatactaactgaggcaacacttcctacctcttacacacattacacccataaaacagaaacaacatctaaaattagatttcaacacagctaccaagcagaaaagttcaaatcaacaagttatggataatgttttattgaaactacatttctcctcccaatgtgagtatggtgttggccaacatgttgcgtgttgattctgcttgcctttgtgtcctacatataggatgtgtactgtgtaatgaatcgtttcttcattatttttctcagcttgcatggttgcctccctcacctccattcacagagctcactgtgacagcattcaaccttgtcttggtacaagtgtgtaatttacataatagtcgcctctgtactttcctcagtaacttaaacaaagaagaccatcactcactgtgcttgcctttcaaattagatttgatatcaaattaaagtctcattttattaagtttctgaagccaaagtctttga

SEQ ID NO: 250131 - DNA, 408 bp, Homo sapiens
gattccccgggctgtacgaattcggctttaggcacacacatggacatgcttcccaatgagccctggcccagtcaactcccagctccaggaaccccccacagccctttgctggggtgcacaccgtccagagcactgacttccccaacgagccaggtggaaatgtcccagggaggaccccggggcctgaggagcctactgaatcctcaacaaagaagggaagagaggcctaggccacagcaggcccagaattattgtgttatgctctggatcttggggaatgtgtaatccccacaccgtatctatggcaactctccattaaccagaatttggttctacaaattcctgttcccattcattctagaaaactcagagctgttggtctttttaaaaaaactcgctgaaaaaaaa

SEQ ID NO: 250132 - DNA, 566 bp, Homo sapiens
tgtgtcatcagctaatagatctgaaagtgatgccggtgtctctaggaaaggaattgatcatagccaagtgactgacattctctcggtcaggaaaagagcttgcttcacagcctttgaagtatgactgtatgtgtggtccccttgtactttggagacagaaggtactggcagcgagtgtggtggatgggcagaaggtgtagcattcggagattatttctgtatgtaattaagagactttcaagggttagccagacttttttccactcaagtgtggattatctttgctacctgtgttaaagaatatcaggttttgtttcttattgtgatttttgagtctaaatgatccaagatttttaaaatagatacataatgaaatccaggcctctgaaaaattatggcaacattcatttggagtgtggctaaaaactcatactttatccaatttggttgcctctctcagttactgcagtttatagaataattgagcttgaaccatgtgaatgctcagaatgtcaatggtggagtatttattcaagagaaatggctgaatctcgatacgaaaacga

SEQ ID NO: 250133 - DNA, 476 bp, Homo sapiens
gagagtgatcgtgagcaacccggaaccagcagtcccaacctggactgacgaactgggctctccagtcctgggccgtggggctccatgcctcgggctggcgggacaagcggcggggagcccggagcttcggagccgccgccgggcatctagccagctccgcgggagaagcccgggggcgcgtcgggagccaggggactggtgtgaactagccgcccccgcaggcggacgtttagctccggcacccgggagcactgacactgggcgataaggagttcctcggcaatcggctgtccccagtccccagtcacctccggcggacgtgaccgccggatgctatgcagctaggtgggccaggggggcctttgcattgccttccctgaccccttccttgccgcggaggagccacagtaagatgcctctgtacgactctccagaactttcttttgcaaaataaaggccaaatgttgggcattcta

SEQ ID NO: 250134 - DNA, 286 bp, Homo sapiens
ttagggtgaagtccaaatccaacgaagagtgttcttatcagagacagaaaagggggacacgcatagacacagaagaaaatgataggctaggcatgatggcttgcacctgtaatcccagtgcttcgggaggctgaggcaggaggattgctcaagcccaggagttccaggctgcagtgagctataatcaccccactgtactccagcctgggtgacagagcgagaccctgtctctgaaaaaagaaagaaggaaggaaggaaagaaaaagaaacaaagagaaagaaagac

SEQ ID NO: 250135 - DNA, 738 bp, Homo sapiens
ggccctgttaagaattcctgtattattttgtcatgctttaaggcccaggaaagacctaggcaaaactcttgatgggcttttgtggcatcccagcctttgtataaggagactgacttttaatatttaacttaacccttcagtcagtagtgaaacagtcgttatggaggcctgcattagtgagacctggcctgccacaatcctgtgttcatgtattgaaagactgtattattaagatggcagtactacccaaagcagtctacagattcactgagagccctatcaaaattccaacagcctttttgaaaaatggaaaagcttaccatcaaactcatatggaattgtaaacgccgtgaatagccaaaacaatgcggaaaaggccaaagttggaggactgacacttcccaatttcaaaacttactataaaactacagtggtctaaacagtgggctgttggcacaagtacagatgatactaacatacagatcaatagaatagaattgaggcttcagaaataaacccatacatctatggccaactgactttcaacaaatgatgctgcaataactgaatgtacacatgcaaaaaaaaagttgaacctctatgtgatattgcgatagaagaaatacatattttggtcttgtaccagtttcctggcacatagctcctaaaacccttgcaacatcccaagtccccaagctgtgagtatctttgtatgctaatgaaatgactaatgtctgg

SEQ ID NO: 250136 - DNA, 526 bp, Homo sapiens
aactccgaaattaattatccaactgtctttttgatatatccatttgaagatgtcatttggaaaagtgtcaggtgtctactcatgatcagtaaatatttactgattcagaaagagaataatatttggaaccacttagagtttattgttgggatgaaagaaaatattccagtgtaactaattgcaatagtaacttaagtgataacaacaatgtaattattttaaaggatgctgcaaaactgcttccaaaattcagggacctgtcctaataataagctcaactaaaatataatttgatagcacattaaaacaatttaaagattatatggaaaatgttcatagcaagcataatattaaatgttaaaacactaatcttatttccattaaaatctggatggatacagtgatatcctccagaatcactatcattcaattctgttttagagattctaaacaatgcaatatggaaaaataatcaagtaagcagagaaaatgttacaatgtgagatatgaataacatgtatatggc

SEQ ID NO: 250137 - DNA, 480 bp, Homo sapiens
aatggtgcaggtagatccttcacgaatgataaaggaccatcaccttgataaaggaccatcacctcctgatagtgagtgagttctcatgagatctgattccttaacaggctgtggaacctctttcctcactctgtcttcctcctgctcctgctttaggaggcatctcattttcccttggctttctgatataatgaggaggcttcctgattcctcccagaaacagaagacactatgctttcttcacagcttgcagaaccatgagtcaattacacctcttttatttacaataatacagaaaattagaactgcagagaagagctgtgaaatgtcttcaaggcctttttccctttgtgttggctattagcacagggcttctttatatgcaaatttctgaaatcttcttgaatttttccccttaaatgggatttttgttattgctacatagccaacctgctaaataaatatctgaaaaagtaaaaa

SEQ ID NO: 250138 - DNA, 400 bp, Homo sapiens
agaataaagaacccagaagtaaagccaaatatttactgccaactgatctttggcaaagcagaatgacaatggatccccatctctcataaaaaatcaactcaagatagatgaaagacttaaatctaaaacctgaaaccataaaaatcctggaagataacattggaaaaactcttctggatattggcttaggcaaagtattcctaagaccccaaaagcaagtgcagcaaaaacaaaaataaataaatgggatctatttaaattaaaaaacttctgtacagcaaaagaaataatcatcagagtaaacagaaaacccacagagtgggagaaaatattcaaaaaccatgcatctgtcaaaggactagcatccagaatctacaaggaactcaaacaaatcagcaag

SEQ ID NO: 250139 - DNA, 456 bp, Homo sapiens
atttccctcctgactctcgctgggagagttgtagactcctgggaaacacaggtctatggcctgcctaagagaggaccagcccacaccaaagaaagtgccactgcctcctcctcctcagtggatgccaccaagccccgaggaggacaaccttttccttaatctccttgaaacccaggcaaactttgacaaaaggaaaggtgtttccagtgtgttgttaactgaaccttggttgcttggcagtatgcagttcttgtctaatttaccccaaggaaatgtctgtgtgatgtatttttaatttgctgaagaaggataagtgttcaaacctttgtacatttatgctgaaattaatttttcaaagtccacataacttcagtgctgtgggatagtccttaagaacagaaattatgaccaaccataataaatgacacatttttgtgaaatgtcaaatctcataaa

SEQ ID NO: 250140 - DNA, 392 bp, Homo sapiens
aaggagataatatatagaaattggcttcaagtaaatatttgtctgtaacaccatgttgatctgatttctgcaaattgctgaggaacaactggtttatggtgcgtataaaaagattttttcaaagatcttatgcttcaagattttaaaatgtaaaaataccttctctatgccacacaacttcatttctctgtactttttttttaatgccttatgccagacttgcatttattttgggcatatatcatcagctacggaatatgcaaatgattttaattcatcctgtaagcaatgagtggaaaatgagctgtacctgatgcagcttctcaaatacaacattgaaaaagcctgaaaatgaaggcactacataagtagaatatgcataaaaaggaaaa

SEQ ID NO: 250141 - DNA, 493 bp, Homo sapiens
tgcctatcttcctccccacagaagcactccatcctggggaaaagcatgtttagctatggcagtccagcgtagggttttgcccaacaggatgtggtttctaaagcagacggaagctgcacacaaggccccaagcctggcttctgacaccagcctctggctgggtgcaagaagctcaggggcacactccacagggcctggctgcacagaggtgcgagtgcagtggctcacatctataatcccaggactttgggaggccgaggcaggagggtcacttgagcgcaggagttcgagaccagcctggacaacatagagagacgccccccccctacaaaaaattaaaattagccaagagcagtggtgcacacctatagtcccagctactcgggaagctggggcagaaggatcagttgagaacaggagttcaagactacagtgagatatactcacagcactgggtgacagatcaagaccctgtctcttaaataaaaaagaa

SEQ ID NO: 250142 - DNA, 349 bp, Homo sapiens
tctttattgctcccttgttgacgccatccagcccatggcttcttgttacactggactcttgactagtggagtcacatctccagcctggacctctctcctgagctccagacttagatacacatctcttctcagcatcttcattagatgtccaatcggcttctcagacttgctgtgtcaaaacatagcgctaactttttcctttccttaagccttgactgtgtcaacaaatggcacctccagctacccagttgcttgagctaaaaacttttggcacctttgattgttctctttctcttaccctctccccatatcctatccaatgggaataagtcctttcagttctacttca

SEQ ID NO: 250143 - DNA, 353 bp, Homo sapiens
tcttactctacccttatctccctaatttctagccttctacatcaaaagaaaccaccactattagtttttttgtgtatccttccagatatatatgtatgcatatataagccactctagatatatattcttgcccagttttcctcccaataaattatagcatattatatttctgtacctttttcactcagtagtgtatcttgagatctttccgtattgttacagagtttcctcattctttttcttcctcagctgtataatcttccagtgtatagatatatcataatttatcccccactatattagtctgttttcacgctgctgataaaggcatacctgagactgggcgatttaca

SEQ ID NO: 250144 - DNA, 413 bp, Homo sapiens
aaatgtttctgtgtcactctcagttgattgaactcaagttttcactcccatttaacaccacgtgggggccattctgacttctgcagagtgggtatgatcagatcttctgtaaaagtgtaagtgaggaggctgggcacggtggctcacatctgtaatcttagcacttggagggctgaggtggtcagatcactggaggacaggagtttgagaccagcctggccaatgtggtgaaaccctgtctgtactaaaaatacaaaaattagccaggcatgatagcacatgcctgtaatcccagctactcaggaggctgaggcaggagaatcgcttgaacctgggaggtggaggttgcagtgagctgaggttgcaccaatgcactgcactccagcctgggtgacagagcgtgactctgtctc

SEQ ID NO: 250145 - DNA, 402 bp, Homo sapiens
ttgagccattatcctcagcaaattaatgcaggaacagaaaaccaaacaccgcatgttctcacttataagtgggagctggacaataagaacacatggacacagggacgggaaccacatacactggggcctgttttgggagtgcagtggagaagagcattagggaaaagagctaatgcatgctggtcttaatacctaggtgatgggttgataggtgcagaaaaccaccatggcacacatttacctatgtaacaaacctgcacatcctgcacacgtaccctggaacttaaaaaaacaaaataaaataaagtgggtataaataccactgccgaactgcctctgggctgctattttgggtccagtgcctatggcatggccctgctctgcaaggaacagtacctgtgc

SEQ ID NO: 250146 - DNA, 434 bp, Homo sapiens
agttatttttaatctgttatttaaaaaaatttctagagcaaaatttattcatcatatactatagttcaccctcacccatggagctacattcaaacacccccagtggatgcctgaaaccacagattacactgaacctgatatacactaccttttcctatatgtacacacctaaaataaagtttaatttataaattaggcaaagtaagaaactaacaacaataactaattataaaatagaacaattataataatattttgtaatgaaatatatattaatgttgtctctcatctcaaaatatctcattgtactgcactcactcttcttgtaatgatataataaaatgcctacatggtgaggtaagtgtgtgactagtgttggcattgtaacataaatttgaaaatacagaaataaacaattctcgagttttaaattg

SEQ ID NO: 250147 - DNA, 286 bp, Homo sapiens
actaaattcgcggccgcgtcgaccattcttttgtttgtcatttttatgaaaagaatgagatatcaatttatccatgacatagagggtcacagcacacttatttctcccaggtaggttggcctggggaacattaggctcctaatgtgtggaatttcaatacaactttctgaggaaggagttcagagaacttttagtctaaggaaaattaaagttaagaagttccattatcataatcagcctcctaactgctgttacgtcgacgcggccgcgaatttagtagtagtag

SEQ ID NO: 250148 - DNA, 284 bp, Homo sapiens
gagctgggggtggggggccgatccttcaccaatgtttaagcaccatcttctagatgctgaccttgtgataatgagttctcatgagatctgcttgtaaaatggggcatgacaactttttcctttctctgtcttgctcctactcttcccgtatgagacatctccttgccccttgacattctggtatgattgggaggcttcctgagtcctgtcagatgcagaagccactatgcttccttacagcctgcagaatcattaccctattaaacctcttttctttatgatca

SEQ ID NO: 250149 - DNA, 302 bp, Homo sapiens
agcaagatcacagctaactgcaccctcagcctcccgggctcattcgatcctcccatttcagcctcctgagtagcccaggaatttgaggctgctgtgagctatgatcatacaccgcactccagcttgggtggcagagtgaggctctgtctccaacaacaacaacaacaacaataacaacaacaaaaaacagtaaaattagacttaaatatatgtaaaataataaaaataataaaaattcacttgaactatacctaacaacctaaatcgaatcacaccttaggaacatcaaacatttaaatgta

SEQ ID NO: 250150 - DNA, 417 bp, Homo sapiens
acagcattctcaccctgttaaatggaaatttagagcacccttaaattccagaataattaaaattgctatttggattgaaaaagcccttaggcaacatttattgaatattaggaaataacttttataagattagaatccattttttatagaaaccaaatttaaaagtatacatattttaatataagtgttgtggtaatacactaaccaaaattgaacacacagttttaaagctttttatatttagtagcaattgaatatatatgacatgttttacatagattaattttactatttttctttatttaaacaagagaaccaaattgaaagccgacagatactgcaaatgactgggatttttgtttctgccttatctttttgtgtttttttctgaataaaatattcagaggaaatgctttt

SEQ ID NO: 250151 - DNA, 269 bp, Homo sapiens
actatatgctttattattaggaatgtagtaataataagactatgttatctaggtcacataaaagaagatgttcaagctaatctctaaatcctattaatttctttacttacattaaaaaaaaatagtcaattggctctactattcaaactaatgtattcaaaacaatgtgccttattaaaggtatagatcaaaattcaaataacttggttcaaatacagtcagtcccagagtcattcggaagtgtcaaggaagaatgcagagctctaaga

SEQ ID NO: 250152 - DNA, 460 bp, Homo sapiens
ggatgtgtgaacatggtaattggggaagaagtgctttggagatgctgcatgttttgagcaacgggagagatgaccaggtcagttggtaaactagagctggccaccgattgctttgtgttgcccacttctagtggctgggcccaggccagggtgggtgagggcagtacatgccggtggctgcagttacccctttcccttcttgctgtgcaaacctttgagtcttcgtgtatttttctggagggaggaagtggtctcatcacagctggaatgactgtttgagcaaagttcccctgttggtctcatcctgctgacggacaggactctgggtacctgtcctgcctagcccagccccccattctactcatccccagccccattccctctgcattccccaggtaagatggggaagcttctatgataggatatttttttctttagccccaacttaccctttagaaaa

SEQ ID NO: 250153 - DNA, 480 bp, Homo sapiens
tgtcaactggctcctcaacatactcaggctggggtggcgggggtgggggaggacattttcctacagacacagtaggaacatggcctctaggcattaaattaaccagcggtttctttggcatgttcgaacaagtctagaacccaaagcgcatatgctaaggggagaggaaaattgcctacttgataaaaataagcggtatctaacctctgagctcagagcttgatttctgatgccagtttgataagactggcaaatgcacttcttggtaacaacactgaggccagtacgggagcaccgagtattcaagtctcacacatagcatgacttaagaaatgacagcagcattaggaaatgtgctaaaatttttaaaggcgtaacaaccctgtcttctggttaccctaacctgtgatctgtttatttccattttcctttttaaaaaaaaaaaatcctaaaaaaaaataaaactcacaaaatcttcaa

SEQ ID NO: 250154 - DNA, 1243 bp, Homo sapiens
gtgtgggtgagtgtgtgagggtgagggtgagctatgtgctcatccgtgcatgggggtctgaggaggggaatccgttcggagagggccagccaccaaacaggacatgttgtggcaagccacaccatgacaaagaacatgtctctgctaggaatatgtgggcatctggcccacgaaaagctctgtggttcccactttctccacaatgaagaagatgccagctcagtggcctttggcgtacgatcttttcattagaatatgggaaaggtgtagaggccccaagtacagatacgacattaaattgggtggtgcgtgtaggcgcttttgaaatttcattctaaaaaatccaaagtgcctaagttacgtgaacacagattaagtgacacaaaaagaacgcttccttcagaagtatccgccgcataatctcatctctgcctcacttacttcctatgcagtaggtcttggaaaagggatacattcgcaacgatcaatccttggattaactttttttagtcagggaagggcacggtattaattctgaaataagcttcagaaaaaaatgtaagaagcaggcatgagatagccttaatatacactagaaagcagttctatatatcttacctatttcctttaaaaatcttatgtacataaatcttgaaattgatttacatgccaaactattttatcttgaatatttccaaacataaatctgtgtgatggtcatttcatgttaaaatgtgtatcttaatgagttacaaatattcttctaaaatgaggaaaacccacagcaagacaagaaatccacttctacttctaaaaattgtgtagctgtgctaacacatgcgtctcttgtaataaatgtgatatgagttcaaaggaagacacagaacactagctataatttcaaagatcaagtttccttaaaatattacaacaggggagtagaaaatatgcacgaaggaaacatcccctagttaagtgccagacaagcactgatgttcatgtcccaccagcagaacactgtcaggaagaggagagtggcatttgatgagcctcccactgacctggctgcaagctgtcagatgccatgtcatagcatttcctctatttagatactttctaagtgcctcaagtttttcaaaggggaaaaagtagagcttgatgggggtggggtagcatttcaatctgcatgtttgaaaacatgtcttcattttcatctattgccattctatggaaacgcagccgc

SEQ ID NO: 250155 - DNA, 263 bp, Homo sapiens
agcaaattaggttcattatttacgaagtgcctacataaaaacctgagtatgagaccaagaaaaatagattctgtagttttagttaaaaaaaaaaagaattgacttgtaaatcccaactgcttgggaggctgagacacaagaattgcttgaacccaggaggcagagcaagagaactgcttgaacctgggaggcggaggttgcagtgagccgagatcgtgccactgccctccagcttggacaacagagcaagattacgtctcaaa

SEQ ID NO: 250156 - DNA, 541 bp, Homo sapiens
ttaaaatcatttttagtagatttatatttcatgctcattgcaaaatcctcagtatacctccatgtacaatatatatggcagaaaccaaaagttcccctaaaatcctatttcctaggataaaattccctattaagtatcaagtttgtcatttgagaacctttctaggtatatgtaaaatatgtctatgaaactttttacatacataggattgtactgtagtttctgttctataatctgctttcattagagagtggacaactttttgtgccaattcataaggatttacttgatccttttatcagccacataatattccataatacaaatgtatcatgctatcctatggaaagccatctgcttttttcctataacaacactgcagtgagtattcttgtacataggtttttcaatatttgcatcagtaaatttctaaaggtaatttcctgggataggaataggaatggaataggaatctccaagtcatagttgttacaaatgttttatggttatgaatttagacatttgagactttattttggaa

SEQ ID NO: 250157 - DNA, 490 bp, Homo sapiens
ctcagaaacctattgatacatgactgtgtatgtttacattatatatactgtatatgcacacatgcatatatgcatatatatgttatacatttacatatgtacatggatatcacatactttaaattcctgaagatgtcattttcattaaatacatatgcacacacactcataaacacacacagactcatatatacacacaaatctataacacatttgtgctcacatatacattcctctgtgtgtgtgtgtgtattacattactgctttttatctgtgaaatcacattctgcagtttcatttactgtgatcaactatgatctaaaaatatatgagtacttcaataagatattttgaaagaaaccacattcacataacatttatgacattataattgttctattttattagctattgttcatctcttactccatctactttataaattaagcttcataataagtgtgtatatttaataaaatatatagtatat

SEQ ID NO: 250158 - DNA, 409 bp, Homo sapiens
acactggctgttttggttttgcttttataatgcttgaataacagtaattgaaaaaaatagttatttagatagtttttgaattctctgttattacaatgctgttagtatcctgtaaataaaaatgtaggggcaggaaaaggcaatcatatatatattcttcaacctgaaatgttttccctcagagataagtttaatgcccaatttatcctaggttcttggtacctatatctcttctctttcaaattggcttctgataggccttttacattttcttagttttatttacatcgctctgtttttgtttttgtatttttgtggggtttttttttttaaactgtaaaactcaaaatcttcttaaaatgagtggaaaatcataatgcatttttttaaataaaggaagctaattaat

SEQ ID NO: 250159 - DNA, 462 bp, Homo sapiens
acttattcatttttggaccattgttgactgaaactgtggaaagcaaaactgcagattagagggattactgtattctattcatattatttcttattttaatacgtaataccattatttatgatccactaagggttgtgtgtttcactgaaagtcactttgcctttgcatttactagctacttggttatggtctttcactatctcctgatagcaccttaatcaaaggaagatatctctgaaagtacaaaatcaatgcgaaaaaaaaaagaggaggcatccgtattttatataatgagatcttaaaatctgtattgaaactcaccagaaccaatctgtaaaagggctctgaaactatgaagttagacttctgacagagcctccagaattatgtgaacttgtctcaaaacattctctaaatggctatgtacatattctgtctgaaatagtaaataactggaagtca

SEQ ID NO: 250160 - DNA, 312 bp, Homo sapiens
cagattcctcagaaggtcccgtgaccccagatcttcctggcaccagcttcaccgtcagcccacttctttggggcaggggactgcatggccctggaccccatgactgctccctgccccctgtaaaatatcccctttagacagagaagctgggtgggggcagagagaaaggaaaaataattacttcttagcctctaacctttccggcaagtgactcggtaataaataatccccacgtccctccagtgcgatccatcagcaggaactcctaattacttcagactcacttgaaaccgcttccagtcccactttcaa

SEQ ID NO: 250161 - DNA, 267 bp, Homo sapiens
ccgcgtcgacaacagcattcatctgttgccagtcagatatgaggtaatgcttgtcaaagaaactgcagcagaacaaactgtgctgctgacctaggactccttagatttgcccttcaacccgggaaccaaactcagatctacctccttattgatagtctaggatttttcagtttaaaataggtattccccgggaggcggagcttgcagtgagctgagatcgcaccactgcactccagcctgggcgacaaagcaagactcaaaaaaaaa

SEQ ID NO: 250162 - DNA, 955 bp, Homo sapiens
attacaggcatgagccactgtgcctggcctaaagtccttgttttacatggaccacggtggtggttgatcatcaagttgcttaacctcatccgagcctatagtggtccttgtttccatagcatagaaaacccttgttatcactgtctcccctttagtttgacctgaaactgtaacaaatatctttctcatgcccactcagcatccaggcatcagagacaggctccacaattaatttttcagcatactgaaaaaacacttgccagtgaacgactgtggctagggtaagaatgatgaagtgagaaggcaaagggaagacttgcttgcaccttccaaaaaagaaggtggttctttttcaaaagtagatgttggcttcggctctgagcacacttcccaggctacctgagctccatgggcagctggaaacttgccctgccccaggggctggtggatacattaccttttcaagtttcccttgtgatttcctcccttccatcaccaccagttagttctaacttgttctataatttagaacttctaccaggttccagaaatctgtggtgaggcactgagacaatggaggttagaactcaaacacatggtggcttaaataaagatcatctgatttgggtgtagtagctaagaagagttagctttggttttaaaaagtgggccaggcgcgttggctcatgcctgtagtcccagcagtttgggagatcgaggtgggtggatcacttgaggtcaggagttcaagaccagcttggcccacagggtgaaacccccgtctctactaaaaatacaaaaaattagccaggcatggtggtgcatgcctgtagtcccagctactaaggaggctgaggcaggagaatggcttgaacccaggaggtggaggttgcagtgaataaagatcgtgccactgcactccagcctgggtgacagagcaagaatctgtctcaaa

SEQ ID NO: 250163 - DNA, 727 bp, Homo sapiens
aggggtcccgaaccagaccccaagagagggttctcagatcttgtgcaagaaagaattcagggtgagtccacagcgcaaagtaaaagcaggtttattaagaaagcaaagtagtgaaagtacagctactccatagacacagtagggcgttcctgaaagagaaggaaagcatccaccctgggtacagtgcttgtttatatacaggataaaaagatcatggggggatgtgctctgctacaagcattcgttcttaattactgtattttgcaagaatcaatattattatctttaaagcaaaattaggaatgcctttgctctccatatattgggatattaggacagtcccaagtctgggtctgtttagtaaatattatcaatctgttcccttcaccggaaacatctagaggctagatgctgggaaggcagcccagcaagtcccagcctcattttccttgccctcactcaagatggagttgctctggtttgaacacctctgacaccctggctgagaaggaagtccattcagatggttggagaggtgttagaagtttattttgggtttacattttttgtgtttttttgggtagcatagttaatggacatagtacgtacttagaaacaaaccatttttccttcagactttattcctggagacatcactttaaacaacatctttccaagctcaaggcaaaattctctctgctggtgtctgtcagatgtcaacagaaaa

SEQ ID NO: 250164 - DNA, 390 bp, Homo sapiens
ggatcttgttaaaatactgactttgaataggtctggagtggggcctgagagattttgcattcctaatcagctctcaggagatgtcattgcagcagacccaggtaccagacttgatataggaaggctgtatgccacagttgcttttattttggataagcttggcggattttttttttaaataaatggaagttgggcatcttatttaagattttaattatgatgttcttcaactatgaaggtaatacttactttaaaatacaaatttttggctgggtgtggtggctcacacctgtaatcccagcactttgagaggccgaggcaggaagattgcttgaagccaagagttcaagaccagcctagtcgatgtagttagaaccccatctctacaaa

SEQ ID NO: 250165 - DNA, 380 bp, Homo sapiens
ggtcgataagaagcagcctgccctgctaggctggggtggtgggtggggggtcttccaggcataggaccaaggcaggatggagccagggtggctggagaggagtaccctggggcctgaccagctagtcaggaagtctagctaggggtcaggaagtctagctagtcaggaagctaggggtctggaagtgagggtcgcaagtaagaattttacatcgagggcacagaaaagccatggagggtttcatgcaggagagccatgtgatacagtgcttttatttatttatttatttatttttgagacggagttttgctcttattgcccaggctggagtgccatggcgagatctcggctcaccgcaacctccgtctcccgggttcaag

SEQ ID NO: 250166 - DNA, 602 bp, Homo sapiens
ttgggttgatggtggttccatttattattaagaggaatactgatgagagaataggagaggttattttgttttgtgaggaggacaatttgagaatcaagttctgtttgacctgcgtaaatttgagatgcttgttagatatccaagaaaaaaatgtaagtagtcagttggggcttggtgttcagaagagatgttcaagctagagaaataaatagaatatggaattcatcagtgagtagtatattcatcaatttcaaaaactttttgttcactttcctgcttctaagagatcagatacatcgttgtgatcattgtcagtcaggtaggagtcatggcatatttgtcatttgctattggagtgtgcacaggcagactgccagaatcagactttgcaggatggatgtcagcagcttggggaaaaaatctggagacaatattggagcattgttgtaatcctcaaaaacccaatgatttggagggagggagggcagaagcagtgattcatacttgttaatggactttcctgaagcaggagccaaaagtagttagctttacataattgagaccccagcacccttagcttttagttcttttttttttttttt

SEQ ID NO: 250167 - DNA, 265 bp, Homo sapiens
aatgggtttgaatgttatagagtaaaaaaattttgtgttatggttttagattttacagggcaatttatcattaagaaactattattcattgagttttgatatagtatcaaagtgctgggattacagaagtgagccatcatgccccgcctctcggttttattttctagtagggtacatttcaagagatgcaacccacataaacaatgcttcttcctgtcttccaataatttttaagagaataaaggggttctgagaccagaatgtt

SEQ ID NO: 250168 - DNA, 450 bp, Homo sapiens
gtagtattctcaggtggtgacttttgagcagagcactgcaccatgctgagaggacctggggcaaatgtggaccttctcaccccactgtgcagggatacaggggttgaagccatgacttagccggctggagagcagtggtttttgccccagcaacctggtcaatgtcaaggaagccgatgtgctcagatgtaggctgggcacccccttcctgaggtgtttcctgtcacccaacagacaggctgcctcccagcctccagatggaattgggattgccacctggcttaagatgcaggtcccttttgtggctgttctttagctggaaagcagtgttttgcattttgttaacatactcaggaggcctgactcctggctgtggtcactttacaaagaaagttttttccatgtaacagaaaagaaacccaatatgggagtttttgtacttcataattt

SEQ ID NO: 250169 - DNA, 899 bp, Homo sapiens
tacggaaatgagcaactaccaaagaagcaaaataaataaccaagggaaacttgttaaagggaaaataagggtagaaaagtaataaggccaggagtcaggttagcacacagatatgcatgtttagcatctcatcctcagagttactcagggtagtaccagattggcactgagcaagatcctggcactcaaagcagaacaacacaagagtcacagtctactctactccattgtggtagacactccccagaactaccttgttctcctataacacagtggggttatatgtgccccagggtacatttggctttctggagacattttttctttggcaaaactgatgggaagagatgttactggcatctggggagtaaaggccagggatgctgcttaacatcctacagtgcacaggacagcccctcaccacagagaatcttccaggccagaaagttaacagtgctgaggctgagaaactcatttataccagagcctcagttctgtttggagcaggagtgtgccacaccccaagagaaaaatcactggtctaggtccatcttggctttcccatctctttccactacatacttgtcttcccagctttccttgaactaggggagtctgccaggaggtttctggggaagttttgcttttggataaaagaaacaagggcactgaggaaaacctcttctcctcctgcctccagcttcagacacgtaagtgcagacatgacagctgaagctgggacagccagtttgggttataatggggcaaatacaaggaccaaagacaacgcagtgaggagggcagagaggaaggaaggcaagagagtgggatctggctgacattgatgatcatcattgtagcgctgttttaagcccatcatttcactcatccaacaaatg

SEQ ID NO: 250170 - DNA, 1865 bp, Homo sapiens
ggtcgcggactgtccggttgctcccgcctccttccgtcggatccgcgctctcccgcggctgcgccggcccggccgcccaggagacaaagcgctgccgccgccgtcgccgccaccgggccagtcccgaaccatggccgggccaccccgcaacctcgcgcctcccgtcccgtcgccgccctaggcctgcgctgcgagatgcagaaacagaggcccagagagatgaatagcctgcctggggtcccccagcccagatgctgcagagctgacatttgaatccagagaagagcgagctgaggctggagctgagcagagggcagggaggcaagtggtggcctgagaggccccaggctcccctccaggccccgcgattgccaccatgaagctgaacgagcgcagcctggccttctacgccacctgtgacgccccggtggacaatgcaggcttcctgtacaagaagggtgggcggcacgcggcctaccaccggcgctggttcgtgctgcgcgggaacatgctcttctacttcgaggacgctgccagccgtgagcccgtgggcgtcatcatcctggtggcagtggctctctggccgcgggccctgtctgtgtctccgtggtggctctcacagggctctccagacactccttgactgcatccttcagtcttggcccctaggcctggggccccttgggagcttgcctgacctcccttcctgggctgggtagccatggcccgaggtgaccttctagcaggttcccccagggaggggaggccaccagctgactcaccgcctaggaaggcccaggtgctgacctagtggcggagaaaaagccgcacaccgagtgtggcttccagagcccctcttcagctccaggcagccccctctaacatgtcccctcctgagctcagcccccacccccatactcctggtggggaccaggtcttgcttggcttcggggctgaccgccggtcccctttcttctcaccacagtgcccatttttcatccagggagaacctcggggctgggacacctcctggccctcaccctgggtcatgtttacagtcctcagtgccccacaccggtggccccctgaggacacctccaccctgaccttgattttcccaaacgctgcctcttggtgacagactcagcccaaaaccccttccttctgtctctggagacccttgagcttggggaaatatggaggggtgtgtgtctgcaatcaaggcctctgcagctcacggctggcccggtgggctgggacttccgtctgaattttaaatacttagggttcatttttttttctctggcaacaaagcttgatgttttcactgctttagtttcctgtttgctggtgggaggggatacggtctgtgactctggacttgctctgggggaacagttgtcactgcccccggggagaggggcagcttgggctggagaagcacagccagagacagagcccctcgagagggatccttggctgcttcattgtcttccccccagcaagccctgctctccacaggcacctctggggtcttggtatggtccccgctcacctccttccagagtcctgagtggtgtgggtgtgggtggcacaggatctggggcatgggaggggttcagagcttcccagagccccgtgtcctggcagactcagctggtgggctggggtgttaaccccagtcctggcgtaggtttacagactctcaaggtacgttggccctggtctcctgggagagaggggtgagggatgtcccctaccaaagcacaaggtgggatcaggctgcctcctgggttgggtgtcgggggagctgtccggcagcctggcagggagatgcaagggctaaagtaaaattttgtcaagta

SEQ ID NO: 250171 - DNA, 2010 bp, Homo sapiens
ggtcgcggactgtccggttgctcccgcctccttccgtcggatccgcgctctcccgcggctgcgccggcccggccgcccaggagacaaagcgctgccgccgccgtcgccgccaccgggccagtcccgaaccatggccgggccaccccgcaacctcgcgcctcccgtcccgtcgccgccctaggcctgcgctgcgagatgcagaaacagaggcccagagagatgaatagcctgcctggggtcccccagcccagatgctgcagagctgacatttgaatccagagaagagcgagctgaggctggagctgagcagagggcagggaggcaagtggtggcctgagaggccccaggctcccctccaggccccgcgattgccaccatgaagctgaacgagcgcagcctggccttctacgccacctgtgacgccccggtggacaatgcaggcttcctgtacaagaagggtgggcggcacgcggcctaccaccggcgctggttcgtgctgcgcgggaacatgctcttctacttcgaggacgctgccagccgtgagcccgtgggcgtcatcatcctggtggcagtggctctctggccgcgggccctgtctgtgtctccgtggtggctctcacagggctctccagacactccttgactgcatccttcagtcttggcccctaggcctggggccccttgggagcttgcctgacctcccttcctgggctgggtagccatggcccgaggtgaccttctagcaggttcccccagggaggggaggccaccagctgactcaccgcctaggaaggcccaggtgctgacctagtggcggagaaaaagccgcacaccgagtgtggcttccagagcccctcttcagctccaggcagccccctctaacatgtcccctcctgagctcagcccccacccccatactcctggtggggaccaggtcttgcttggcttcggggctgaccgccggtcccctttcttctcaccacagtgcccatttttcatccagggagaacctcggggctgggacacctcctggccctcaccctgggtcatgtttacagtcctcagtgccccacaccggtggccccctgaggacacctccaccctgaccttgattttcccaaacgctgcctcttggtgacagactcagcccaaaaccccttccttctgtctctggagacccttgagcttggggaaatatggaggggtgtgtgtctgcaatcaaggcctctgcagctcacggctggcccggtgggctgggacttccgtctgaattttaaatacttagggttcatttttttttctctggcaacaaagcttgatgttttcactgctttagtttcctgtttgctggtgggaggggatacggtctgtgactctggacttgctctgggggaacagttgtcactgcccccggggagaggggcagcttgggctggagaagcacagccagagacagagcccctcgagagggatccttggctgcttcattgtcttccccccagcaagccctgctctccacaggcacctctggggtcttggtatggtccccgctcacctccttccagagtcctgagtggtgtgggtgtgggtggcacaggatctggggcatgggaggggttcagagcttcccagagccccgtgtcctggcagactcagctggtgggctggggtgttaaccccagtcctggcgtaggtttacagactctcaaggtacgttggccctggtctcctgggagagaggggtgagggatgtcccctaccaaagcacaaggtgggatcaggctgcctcctgggttgggtgtcgggggagctgtccggcagcctggcagggagatgcaagggctaaagtaaaattttgtcaagtaatggctgattgtgtcattttttttccccatcaaaatccttgattgatttccctggcagagcccagagcaggctgtgcaagggcagggactagtgtgtggtcccacatggctggtgccctgccaggcacgttctcacttctcaagg

SEQ ID NO: 250172 - DNA, 3126 bp, Homo sapiens
ggtcgcggactgtccggttgctcccgcctccttccgtcggatccgcgctctcccgcggctgcgccggcccggccgcccaggagacaaagcgctgccgccgccgtcgccgccaccgggccagtcccgaaccatggccgggccaccccgcaacctcgcgcctcccgtcccgtcgccgccctaggcctgcgctgcgagatgcagaaacagaggcccagagagatgaatagcctgcctggggtcccccagcccagatgctgcagagctgacatttgaatccagagaagagcgagctgaggctggagctgagcagagggcagggaggcaagtggtggcctgagaggccccaggctcccctccaggccccgcgattgccaccatgaagctgaacgagcgcagcctggccttctacgccacctgtgacgccccggtggacaatgcaggcttcctgtacaagaagggtgggcggcacgcggcctaccaccggcgctggttcgtgctgcgcgggaacatgctcttctacttcgaggacgctgccagccgtgagcccgtgggcgtcatcatcctggagggctgcactgtggagctggtggaggccgccgaggagttcgccttcgctgtgcgctttgcggggacccgggcgcgcacctacgtgctggccgctgagagtcaggatgccatggagggctgggtcaaggccctgtcgcgtgccagcttcgactacctgcggctggtggtgcgcgagctggagcagcagctggcggctgtacgtggcgggggtggcatggccctgccccagccccagccccagtccctgcccttgcccccgtccctgccctctgccctggccccagtcccatccctgccttctgccccagccccggtcccagccctgcccctgccccgccggcccagtgccctcccgcccaaggagaatggctgcgctgtctggagcactgaggccaccttcaggcctggacccgagccccctccaccaaccgcttcgccgccgggcctcgggcaccccacgggcccctggacatggcccccttcgcccggctgcacgagtgctatggccaggagatccgggccctgcgtggcaagtggctcagcagccgggtccagccctgaggccaccagggcgcctgttttagggggacacaagctctatgccctctgggacaggccgggtcctggagagactgggggagcagatcctgagggaaatcatgggcaaggctggcccccaggccctgagtggcctggttttgggggatgcaggctctgagaaggtgctggattctgagtgggcctttaggaccatgtgacccagaaggcctacccttgaggggaacgtcacgtgcaacactaaggagaatccagggcctgagggggaggtttcctgagaactccggccccaggctggcctgagctgccgggcagaggcctgtgctggcaacaggcattgccgggcctgcagctcagagggtcactgggactgagggcgatctgtggcctgaaaagcaaatgcacagttagtgcagctcctgaccaggccttcagggtggacagagggaggatcggtcatggcagccacacctgggcctggccttgctccgggacctgccagaggagctggcctggctctgtgcctgcctgcctccaggagcaggacggtggctgggagggtagtgactggggacacaggtgcaggtgttagtgcaggaccggaagggtgaggtggcctggtcctcggggctcctggcctgggctggctgaggcaggactctgccaaaagtcccctgccaggcctcatggtggtgctcctggtggcagtggctctctggccgcgggccctgtctgtgtctccgtggtggctctcacagggctctccagacactccttgactgcatccttcagtcttggcccctaggcctggggccccttgggagcttgcctgacctcccttcctgggctgggtagccatggcccgaggtgaccttctagcaggttcccccagggaggggaggccaccagctgactcaccgcctaggaaggcccaggtgctgacctagtggcggagaaaaagccgcacaccgagtgtggcttccagagcccctcttcagctccaggcagccccctctaacatgtcccctcctgagctcagcccccacccccatactcctggtggggaccaggtcttgcttggcttcggggctgaccgccggtcccctttcttctcaccacagtgcccatttttcatccagggagaacctcggggctgggacacctcctggccctcaccctgggtcatgtttacagtcctcagtgccccacaccggtggccccctgaggacacctccaccctgaccttgattttcccaaacgctgcctcttggtgacagactcagcccaaaaccccttccttctgtctctggagacccttgagcttggggaaatatggaggggtgtgtgtctgcaatcaaggcctctgcagctcacggctggcccggtgggctgggacttccgtctgaattttaaatacttagggttcatttttttttctctggcaacaaagcttgatgttttcactgctttagtttcctgtttgctggtgggaggggatacggtctgtgactctggacttgctctgggggaacagttgtcactgcccccggggagaggggcagcttgggctggagaagcacagccagagacagagcccctcgagagggatccttggctgcttcattgtcttccccccagcaagccctgctctccacaggcacctctggggtcttggtatggtccccgctcacctccttccagagtcctgagtggtgtgggtgtgggtggcacaggatctggggcatgggaggggttcagagcttcccagagccccgtgtcctggcagactcagctggtgggctggggtgttaaccccagtcctggcgtaggtttacagactctcaaggtacgttggccctggtctcctgggagagaggggtgagggatgtcccctaccaaagcacaaggtgggatcaggctgcctcctgggttgggtgtcgggggagctgtccggcagcctggcagggagatgcaagggctaaagtaaaattttgtcaagta

SEQ ID NO: 250173 - DNA, 2811 bp, Homo sapiens
ggtcgcggactgtccggttgctcccgcctccttccgtcggatccgcgctctcccgcggctgcgccggcccggccgcccaggagacaaagcgctgccgccgccgtcgccgccaccgggccagtcccgaaccatggccgggccaccccgcaacctcgcgcctcccgtcccgtcgccgccctaggcctgcgctgcgagatgcagaaacagaggcccagagagatgaatagcctgcctggggtcccccagcccagatgctgcagagctgacatttgaatccagagaagagcgagctgaggctggagctgagcagagggcagggaggcaagtggtggcctgagagtttgctgaggatgatggcttccagctccatctatttccccgcaaaggacatgatctcattcctttttatggctggatagttttccatggagttgtgggcgcataggccagctgcttccaccctatgagcgtcagtttcctcatctgtgaaacggggatgtagagtggctgcaaggtccccttggggcactgggtgacctagcgtcagtggccttgtgcataacagcccttctatggggtccaggccccaggctcccctccaggccccgcgattgccaccatgaaggctgtctggagcactgaggccaccttcaggcctggacccgagccccctccaccaaccgcttcgccgccgggcctcgggcaccccacgggcccctggacatggcccccttcgcccggctgcacgagtgctatggccaggagatccgggccctgcgtggcaagtggctcagcagccgggtccagccctgaggccaccagggcgcctgttttagggggacacaagctctatgccctctgggacaggccgggtcctggagagactgggggagcagatcctgagggaaatcatgggcaaggctggcccccaggccctgagtggcctggttttgggggatgcaggctctgagaaggtgctggattctgagtgggcctttaggaccatgtgacccagaaggcctacccttgaggggaacgtcacgtgcaacactaaggagaatccagggcctgagggggaggtttcctgagaactccggccccaggctggcctgagctgccgggcagaggcctgtgctggcaacaggcattgccgggcctgcagctcagagggtcactgggactgagggcgatctgtggcctgaaaagcaaatgcacagttagtgcagctcctgaccaggccttcagggtggacagagggaggatcggtcatggcagccacacctgggcctggccttgctccgggacctgccagaggagctggcctggctctgtgcctgcctgcctccaggagcaggacggtggctgggagggtagtgactggggacacaggtgcaggtgttagtgcaggaccggaagggtgaggtggcctggtcctcggggctcctggcctgggctggctgaggcaggactctgccaaaagtcccctgccaggcctcatggtggtgctcctggtggcagtggctctctggccgcgggccctgtctgtgtctccgtggtggctctcacagggctctccagacactccttgactgcatccttcagtcttggcccctaggcctggggccccttgggagcttgcctgacctcccttcctgggctgggtagccatggcccgaggtgaccttctagcaggttcccccagggaggggaggccaccagctgactcaccgcctaggaaggcccaggtgctgacctagtggcggagaaaaagccgcacaccgagtgtggcttccagagcccctcttcagctccaggcagccccctctaacatgtcccctcctgagctcagcccccacccccatactcctggtggggaccaggtcttgcttggcttcggggctgaccgccggtcccctttcttctcaccacagtgcccatttttcatccagggagaacctcggggctgggacacctcctggccctcaccctgggtcatgtttacagtcctcagtgccccacaccggtggccccctgaggacacctccaccctgaccttgattttcccaaacgctgcctcttggtgacagactcagcccaaaaccccttccttctgtctctggagacccttgagcttggggaaatatggaggggtgtgtgtctgcaatcaaggcctctgcagctcacggctggcccggtgggctgggacttccgtctgaattttaaatacttagggttcatttttttttctctggcaacaaagcttgatgttttcactgctttagtttcctgtttgctggtgggaggggatacggtctgtgactctggacttgctctgggggaacagttgtcactgcccccggggagaggggcagcttgggctggagaagcacagccagagacagagcccctcgagagggatccttggctgcttcattgtcttccccccagcaagccctgctctccacaggcacctctggggtcttggtatggtccccgctcacctccttccagagtcctgagtggtgtgggtgtgggtggcacaggatctggggcatgggaggggttcagagcttcccagagccccgtgtcctggcagactcagctggtgggctggggtgttaaccccagtcctggcgtaggtttacagactctcaaggtacgttggccctggtctcctgggagagaggggtgagggatgtcccctaccaaagcacaaggtgggatcaggctgcctcctgggttgggtgtcgggggagctgtccggcagcctggcagggagatgcaagggctaaagtaaaattttgtcaagta

SEQ ID NO: 250174 - DNA, 2590 bp, Homo sapiens
ggtcgcggactgtccggttgctcccgcctccttccgtcggatccgcgctctcccgcggctgcgccggcccggccgcccaggagacaaagcgctgccgccgccgtcgccgccaccgggccagtcccgaaccatggccgggccaccccgcaacctcgcgcctcccgtcccgtcgccgccctaggcctgcgctgcgagatgcagaaacagaggcccagagagatgaatagcctgcctggggtcccccagcccagatgctgcagagctgacatttgaatccagagaagagcgagctgaggctggagctgagcagagggcagggaggcaagtggtggcctgagaggccccaggctcccctccaggccccgcgattgccaccatgaagctgaacgagcgcagcctggccttctacgccacctgtgacgccccggtggacaatgcaggcttcctgtacaagaagggtgggcggcacgcggcctaccaccggcgctggttcgtgctgcgcgggaacatgctcttctacttcgaggacgctgccagccgtgagcccgtgggcgtcatcatcctggagggctgcactgtggagctggtggaggccgccgaggagttcgccttcgctgtgcgctttgcggggacccgggcgcgcacctacgtgctggccgctgagagtcaggatgccatggagggctgggtcaaggccctgtcgcgtgccagcttcgactacctgcggctggtggtgcgcgagctggagcagcagctggcggctgtacgtggcgggggtggcatggccctgccccagccccagccccagtccctgcccttgcccccgtccctgccctctgccctggccccagtcccatccctgccttctgccccagccccggtcccagccctgcccctgccccgccggcccagtgccctcccgcccaaggagaatggctgcgctgtctggagcactgaggccaccttcaggcctggacccgagccccctccaccaaccgcttcgccgccgggcctcgggcaccccacgggcccctggacatggcccccttcgcccggctgcacgagtgctatggccaggagatccgggccctgcgtggcaagtggctcagcagccgggtccagccctgaggccaccagggcgcctgttttagggggacacaagctctatgccctctgggacaggccgggtcctggagagactgggggagcagatcctgagggaaatcatgggcaaggctggcccccaggccctgagtggcctggttttgggggatgcaggctctgagaaggtgctggattctgagtgggcctttaggaccatgtgacccagaaggcctacccttgaggggaacgtcacgtgcaacactaaggagaatccagggcctgagggggaggtttcctgagaactccggccccaggctggcctgagctgccgggcagaggcctgtgctggcaacaggcattgccgggcctgcagctcagagggtcactgggactgagggcgatctgtggcctgaaaagcaaatgcacagttagtgcagctcctgaccaggccttcagggtggacagagggaggatcggtcatggcagccacacctgggcctggccttgctccgggacctgccagaggagctggcctggctctgtgcctgcctgcctccaggagcaggacggtggctgggagggtagtgactggggacacaggtgcaggtgttagtgcaggaccggaagggtgaggtggcctggtcctcggggctcctggcctgggctggctgaggcaggactctgccaaaagtcccctgccaggcctcatggtggtgctcctggtggcagtggctctctggccgcgggccctgtctgtgtctccgtggtggctctcacagggctctccagacactccttgactgcatccttcagtcttggcccctaggcctggggccccttgggagcttgcctgacctcccttcctgggctgggtagccatggcccgaggtgaccttctagcaggttcccccagggaggggaggccaccagctgactcaccgcctaggaaggcccaggtgctgacctagtggcggagaaaaagccgcacaccgagtgtggcttccagagcccctcttcagctccaggcagccccctctaacatgtcccctcctgagctcagcccccacccccatactcctggtggggaccaggtcttgcttggcttcggggctgaccgccggtcccctttcttctcaccacagtgcccatttttcatccagggagaacctcggggctgggacacctcctggccctcaccctgggtcatgtttacagtcctcagtgccccacaccggtggccccctgaggacacctccaccctgaccttgattttcccaaacgctgcctcttggtgacagactcagcccaaaaccccttccttctgtctctggagacccttgagcttggggaaatatggaggggtgtgtgtctgcaatcaaggcctctgcagctcacggctggcccggtgggctgggacttccgtctgactcttccatccatagttaagagctctcgcgggggttctctatagatctcgccccaagcc

SEQ ID NO: 250175 - DNA, 390 bp, Homo sapiens
aaagggaaaaagagagggaccaaaaaaaatagcatccatttgaaatagatggttttaatgattgtattgcaatgtcatgcacgacattgtgaatgtaattaataccactaaaaatagttaaaatggcaagttgtatgttatgtaaccattttaaatgatgtaatatgccaaaaatcacagtgtgcattttaaatgaaggaattatatggtatctgaatttatatctcaatagagctgtttttagaaggtggtatccacaagcaagcatgtgtgtgtgcacgtgtgttggagtacattcacatgcacatgtgtgtgtggcaagagtgtcagtttcctagctaatctactttgggtggaaactgtcagtgatgactaggcaaaggtggagaa

SEQ ID NO: 250176 - DNA, 1103 bp, Homo sapiens
gcaggtagcagctgctttctaggatgctcatgcccttctgacctcaccaactgagcacttcaggggtaagctgtatataagttagacccattatcctaattacatgtcttaatttaaatgatttaaaagcatataaactataagtgcaaaaacaagttgtttctcaaaaaactaagttgaattccttgaatagactcagcaaagaacaatcactaaaaagtaacaactggctgaattaggggtgtgttgggtgaggggactagaaagactagaaaaaaaaatcatgaaaacatggattctgcagtcagattccattgatattttaaagaaactgacactgggcattgtagccagcacactttgggtgtggtttatatgagaaagatgaggcagaactctacttcagcagacactcaactcaaaaagactggcaaatggacatgtatttacatactttacattcaaataaaatgtgtaagataggaatctgatttgctttgggtctctttaattggctttttcaattaacccaccagccaccataccaattgcatcagctgtaagtgctttttctactctcttatgttccattctggcaccaaatttcacgataagcactgatatgctagaacatattccagggagagggataaacatggaaaaggctctatggctcaggtagcacctggtggtgtctataagctctgatgggctgtcaggctcaaagataaacagattcagagggaagaagagggtctctgtatcttgctctttacctattcatctatgtagttttttcctttcctttccaagaattaccctttctgctcacatactagactgtaaactcaaagaaagtaaacaaaatacctgttataaatgccctatggatagacatttatcttacaaatgcctttaattttaggctgtaggtttccaaccgagcaaaatgcaattatttgtatttgactctacaggttccctagcccaacctcctctgtgcttttagcataaaacgaaggcaatggggggaggatctgtctcactgatgataccaggtgactgacacagaaagcagtatgtagtgagggcttactatgtgc

SEQ ID NO: 250177 - DNA, 769 bp, Homo sapiens
cggccctggggcggggagacagggggcggctccactccggcgctctgcggaggacagcagcgatcgccaaggctcagctggagtgcagtggcatggtggcatgatcttggctcactgcaactgctgcatcctgggctcaactgattcttctgcctcagcctcctgagtagctgggactacaggcacacactaccacgtccagctctatgatcagaagatggcataagtggggctgggcacagtggctcagtgcccagctgggattacgcctgtaataccagcactttgggaggccaaggtcctaactcctcacccttgtcacactcctggtaatgctgtaaaactttaccatggaccacagttccaaggacccccgaatgcagtcatggagttaagcctgtgaacaacccacacctcctgtcaatgctggcaatgttcagagcataacaaaagaaaccagaaagctgacatacttcctaccccaaaatattttgtcctgttgggggaagaggctcatatcccacctggatgagcactttcatgtgcatgagtcgctaggacaggatggtgagaccggagtccaggagcatctgactggcaagcaacatctgccgtgacagcacctgtattattctgttttcatgctgctgataaagacatacccaagactgggaagtaaaagaggttaaattggacttacagtcccacatggctggggaggtctcggaatcatgctgggaggtgaaaagcacttttttaatagggtgag

SEQ ID NO: 250178 - DNA, 643 bp, Homo sapiens
accttgtgatgcgtgaggaaaaaatattaccttttccccctactctttctggcacccaacaaacaagtggggtggcaaagacaccccacttgggacaactggcaaaagctctatgatcagaagatggcataagtggggctgggcacagtggctcagtgcccagctgggattacgcctgtaataccagcactttgggaggccaaggtcctaactcctcacccttgtcacactcctggtaatgctgtaaaactttaccatggaccacagttccaaggacccccgaatgcagtcatggagttaagcctgtgaacaacccacacctcctgtcaatgctggcaatgttcagagcataacaaaagaaaccagaaagctgacatacttcctaccccaaaatattttgtcctgttgggggaagaggctcatatcccacctggatgagcactttcatgtgcatgagtcgctaggacaggatggtgagaccggagtccaggagcatctgactggcaagcaacatctgccgtgacagcacctgtattattctgttttcatgctgctgcaaacacacaatgcagctgcaaacacacaatgcagctgcaaacacacaatgcagctgcaaacacacacggcaggtgcttacaagcaa

SEQ ID NO: 250179 - DNA, 511 bp, Homo sapiens
cagaaggcagatacactttcactcctcctggaagactctcagatagaagaaacatagtactagcctagacattgctacaattattacattatctctaatcaaaggaaaggagtattttagaatccgtctttccttgaaagagagatgaaagattaagggataaaaaaaaatagggcggatatgctttcacttctctggtaacttctggatacatgagataactatgatacacattcaaaaccaagtgatactacatgtacagcatcatttaattacacctacagaaagaaaagaatggtttacctaaaaaaattagtgttgccacaactggtcactcagcagaaaacaaattaggtccctcatctcacttgccaattacaaaaatattccaggccaagtgcagtggctcatgcctgtaatccaagcactttgggaggccgagctgagtggatcactaaggccaggggtttgaaaccagcctgggcaaaattgtgagacccaatctcttaaa

SEQ ID NO: 250180 - DNA, 600 bp, Homo sapiens
gaatgttatacaggagttgagatgtaactattttgctttgtaaatatcctgcctttaaaaaaaaaatcctctttggacagctccgggaagtactgaacaagttgaagttactgcttctacagcctgggaggtgtttatgatgaacctattttagcattaatgttgattataccaacttatcatcttaactttcgagtagataatattgtttgggcactaagacacatttgtacttttatactgactgttctctttgccaggaattttctttttctttagagatagggtgactctgtcacacaattactcagtgtttgcagtgactttataaaacatatttaccataaatcacaagaatcaactgtgcatacagacgactttagtacaaagaaagaaatatacacagaaaggatactgtagtggagagtaattggtagtggtaggagagagaccttttcaaaatcattttgaaaggattttagttgagacacttggaacaaacaggagaaagagcatttttgtaggcatgaggaatggctctaaaacaggaaggagcttgatatttttaaggaattgaaagaaaagcaacgtaaagaaaga

SEQ ID NO: 250181 - DNA, 333 bp, Homo sapiens
gaatgttatacaggagttgagatgtaactattttgctttgtaaatatcctgcctttaaaaagagaggaacaaacaaccaaaaatgagcaaccattgttatttacccaaagctaagctgtttcttaatagctgtactctatctcttcagtaagtaatttgccaggagaaatacaatgtttttaaggaatatttttgtcagcgtaaactgttaaacactgaatcccaacttttagctatctgaaaaatgtatacttaaataatacattatggccatttgactcaaatgtaagttcttttgggatggtttttcattttcttaaaataagtgttcag

SEQ ID NO: 250182 - DNA, 396 bp, Homo sapiens
agttcaaactatatcctattagacattatcttgttaaacagttcctgttgctccatgcttttgagatgttttttaatctctggtttcatcctgttaatttattctcttggttgtaagcgacacaaatgattgacgagttcccttgtatatttgcatcagcatcattcactgaaacattctcgaaggtagggcatatgtcagagtcctggcagatgtaggctgcttcacactgtgcctccagattgggaaaaggtggcattcctaatcaccgggggaagtaaattcatcaataaatgtggtttaggacagctgaagagctgttagaaaaaaaagggagctggggtccctccaacattccttagataaaaataaactacataacaaagaaagtctctt

SEQ ID NO: 250183 - DNA, 467 bp, Homo sapiens
aaagatgagggtgccagataattccactcactctctatttggaggtttcctgtggattattgtaaatgtgcgctaaccaatttcataccctttattattttttaaataatgtaacaggtcaccttgggctgcagggacacttggcaaccatttttacagcttttaacttttggtgcccgggccgggtgtggtgtggtggctcatgcctgcaatcccagcactttgggaggccaaggcaggtggatcacctgaggtcaagagttcgagaccagcctggccaatatggtgaaaccccgtctctactaaaaatacaaaaaattagccaggcgtggtggcgggcacctgtaatccccactacttggaaggctgaggcaggagaatcccttgaaccagggaggtggaggttgcagtgagccgagatcatgccactgcactccagcctgggcaagaagagcaaaacttcatgt

SEQ ID NO: 250184 - DNA, 584 bp, Homo sapiens
ctgactcctaagtatttacccaagagcaataaaaacttacagttacacacagaaacctgcatgccaatatttataacaacattatttcatagtcacccaaacctgaaaacaatctgaatgctcctcaaatggtaaatgcatacaaaatggggggtccataaaaacagtgagttacgagtcagcaattaaagggaacaaactatagattcatacactcaaccacatgattgaacctcagaggcactgcaccaagtaaatgaagccagactttggaggcaacattttgtatgattccatttatacgacattctgtgaaaaggcaatacagtagggatggaaaacatatcagcattttttcatggactaagtgtggagggagggttgactacccagagacaggaggaaggaacgtttggttaatgacactcttcagtgtcttcacagtggttgtgggtatataattatatacaactctcaaaccatatcaaaattgcatatgataaagagttaattcaactgtatctaactttaaataaattaaaaaatttaaaacactggatgccactatgctctcactagaattg

SEQ ID NO: 250185 - DNA, 386 bp, Homo sapiens
acgttattttaccacaatcctgggagatttacttcatgaatgcaaggatgtttcatcatatataagtcaataaatgtgattcatcaggtaaagatgattaaaagctaacatgattatcacaatagatacagaaaaggcattcaaaaaatccaatacctataaaaatattctcaacaaactaggtattaaagaaacatctcaaaatagtaaagccatctgtgacaaatctgcagctgaaatcatgctgaacaggcaaaagctggatgaactctccatatgaataaaaataagacaagaatatccactcttaacactcgtattcaacatagttctggaagtcctagctagagcaattaaacaagataaagaaataaaagagatctaaa

SEQ ID NO: 250186 - DNA, 489 bp, Homo sapiens
caatgagatttcaggaggatggacaacattttttaaattttgagacaggatctcactccgtcaccaaggctgaactgcaatggcatgatcacagctcattgcagcctcaaactctggcctgagcaatcctcccaccacagcctccccagtagctgggcccacaggcttgtgccaccatactcggctaattcattttaatttttgcagagacaggatctctctatattgcccaggctggtcttgaattcctgggcttaagcgatcccctgcctcggcctcccaaagtgctagaattataggcatgggccaccgcatcctgcctagtcagaacatgcttaaagcaggaatcttaaatagaatgcaatgtcagctgggcacggtggctcacgcctgtaatgctagcaccttgggaggccgaggcgagcagatcacttgaggctaggaattggagaccagcctggccaacatggtgaagccccatttctactg

SEQ ID NO: 250187 - DNA, 768 bp, Homo sapiens
ccagtgtgtagtcttttatccctcaccctcctccctattctttaagctgatctatttgcctacttaaattatataagtagtatcttttctatctatagtaataatttaatattgcttctgcctttatcctaatgaaaggaatatctcttcactattaaaatatgcatgcaaccctatttcccagtgtaaataaagtgactctcaattttccacttccatacctccctcaatagaggtttgtttttaaagtattgcagaagcacaagattttgagatgtatgcaaatggatgctcctttttcagtcacttattttcaaaaagaaattatcccctcctgccttgcccctgctgagcccctacatctcccagcccctaataaaaacctagcttttacctagaactttcaaccttttgtcttcacgtcagctcccacaactgtaaaaatatgagatttggccagataaatgatcaatgaggttcccttaggctctacaattctgtggttctatttcctggaaaatcatgtaattgaaagccagtgtttggtgcaatgaacatttaaggacatcatttttaaaaacagcagcccattttaacttccattgcagaaagatgtggtcttgttggatttctaattgcaaagcagctacatgtggtctacatgtcaacttttaatagcataagcatatttcggttgatagaaatgtaaccacactgtatgaaagtggctccgaaaaacctagaaaattgcatatctgaaaaaaaaaa

SEQ ID NO: 250188 - DNA, 714 bp, Homo sapiens
ccagtgtgtagtcttttatccctcaccctcctccctattctttaagctgatctatttgcctacttaaattatataagtagtatcttttctatctatagtaataatttaatattgcttctgcctttatcctaatgaaaggaatatctcttcactattaaaatatgcatgcaaccctatttcccagtgtaaataaagtgactctcaattttccacttccatacctccctcaatagaggtttgtttttaaagtattgcagaagcacaagattttgagatgtatgcaaatggatgctcctttttcagtcacttattttcaaaaagaaattatcccctcctgccttgcccctgctgagcccctacatctcccagcccctaataaaaacctagcttttacctagaactttcaaccttttgtcttcacgtcagctcccacaactgtaaaaatatgagatttggccagataaatgatcaatgaggttcccttaggctctacaattctgtggttctatttcctggaaaatcatgtaattgaaagccagtgtttggtgcaatgaacatttaaggacatcatttttatctaattgcaaagcagctacatgtggtctacatgtcaacttttaatagcataagcatatttcggttgatagaaatgtaaccacactgtatgaaagtggctccgaaaaacctagaaaattgcatatctgaaaaaaaaaa

SEQ ID NO: 250189 - DNA, 707 bp, Homo sapiens
gctcgggataagtgtcttaaaatagttattttggaataaacctcacagcattttagatgccatcagaaggttagaaaaaaaaacttccagaagcctcccattagggacagtggagggaacccaaagctgaactacccacctaggaaggggctgaggaaggaaaaactgctgcaggctgaagaagcgtccaccactgtgggactgttagaaacttctagggggtgctggttggtgggggcagcatctgctgaatggagttattaccaggtttccccctgagagctgcagtcccaacatcagaatgaagagatctaactgcttagagatttctgttaccatcttctttttgatgtgaattactcttgaaatgccggagaagggacaaatttcaaaaataaaatgaatcatacaaacattgtcagcttatttttgcgtaatggcattaaaaacaagcaaaaattctagaactctctcacatgctgttcgaaggaaagtttccctgagacttgaaggcaacagatgccacatactgaaagaaggtagacgactaccagacaaggtttgcaagggaggtggtgtgaaaaccagttccattatcttgaccctcagccatatcaagagcatataaaagttgggagattggccaggtgcggtggctcatgcctgtaatctcagcactttgggaggctgaggcaggcggatcacaa

SEQ ID NO: 250190 - DNA, 506 bp, Homo sapiens
actttatttcaggcatgtattggggaactgctcctttcttcctgaccccacaatctcattaactttgaaatgagcaaaggatgtaagcagagcaaagaacactagaataatatccaggacactgggggaaaggcctctgtatattatatatgacttcagcaaataagttaagcttcagtatcctcatgatgaggaagctaaaaataaccctctttctattcctgcaaaattgtgagagtttattgaagtgcatctcataaactataaaaaactacaaaaatgcaaacagatgcataatgaaacaattaacttgttaaaatgtaccttctaagtatagtgagtgaaatcaatgctggagagaagaggaacataattgaacttcgttattaagaaaatgcgagcatatatagcaactaaaaatttgtctgagacaggtggatgtaaaaaattaaagtttatggtagataatcaggaaagcaataatccacctatttcataccttaaaa

SEQ ID NO: 250191 - DNA, 1611 bp, Homo sapiens
gttgtcggtacaggctggcatgaccctaaggtgtcactctcagcttttgagggtgctctgttcaaagacagacaaggacttttctttccttaaatgcggtcctctgtgactttgctgttttagattttaggattaagtttaaaatgtgttgggcactgacaaggataagaaattgttcttcctgtcctctctataggcagaaaaccatcttttccaagagagagagatggcaagggtgtaacagcacagttcagagttatcagtcagcaagagtgaatgtgcatagccttcctctcagtaaagtggatccatttgaaggagaaaaaggaaacaaaagtctctgacattatattattctgtcagttactgctttctctagaagtagagaatggaccaggaaaccggtagctgctttgatattattttacctttttcctttcttgagaattatagattctgtacctgttttcatggacatgagatagcaaaatcccctcgggcacaagcatgtgagggaaaactgatttcctgctatcttcctggctagaacattcttacttagcctactcaccatgctagacattttccagtcgttctaaaaccctcttgatgaaggaatgtaagttcctggagcttggaagtaggaccttctatgggttaaaatatttagctcttacccatagtgaagagctaacgacattgatgatatggctaattataatagatataattaggtaggtaagttaaaacagacatagagaccagctgaagagtctttatttttattgatttgtaggataaggaaatatttttatatgtgctattatttctatggtaggaatgtttaacttagggaaaattaatggaaaaacaaagctttctacacttctcaagtgtcctgcttcaggcagttttacctacaacagcactgatgttgaatttcactttaagttgtcacatggtctgagttgtacaaaaagaaagaaaaattctggccgggtgtggtggctcatgcctgtaatcccagcactttgggaggtcaaggcgggtggatcacgaggtcaggagaccaagaccatcctggctaacacggccatctctactaaaaatacaaaaattagctaggcgtagtggcgggtgcctatagtcccagctactcgggaggctgaggcagaagaatggtgtgaactcaggaggcagagcttgcagtgagcagagatcacgccactgcactccagcctgggtgacagagcgagactctgtctcaagaagaaaaacagaaaaacaaagaaaaaaaattccaaaagggtgaaggaataaaagaaagaaaatgttgtaagaatgtatagaaaaatattctaaagaaaactgctagagacaaataaagtataaatatattttagagaaccgaaatagttcctaaacacgggggatattttcgggcaccacaacaggggtgattctatcaaatctcggccggaagaaaatatatatcatatatagtaagacacaaaagcgggggagcagaatgacaccccatagaggtggtacaccccacaaataggggacaacttatatatacacgtcaagtatttatgaatgtgaacacac

SEQ ID NO: 250192 - DNA, 236 bp, Homo sapiens
ccccagcacacatgctttgtttttggccagactttctgagattcagcaggaccaatcttctgtgccctaggcattcattatttttaagggttatttactgtttagacaacaattccagatgttcaagagcatggcgtttccatagcgccattatccctttgccactgtttttaggtctctatttttggtcaatgtttttcctttatacaaacatccttttaatatcattgagatcc

SEQ ID NO: 250193 - DNA, 438 bp, Homo sapiens
ggaaataaaatatatcacagagtataaagtcaaaggcaatacattcataatcaatagttattttcaatcacgctgttggttggttggtcacattccttgcctacaccagatttttgtatgatgctttatgttaataggttttatgtgaggattagaatcttcactggtgctggatccattgtaagccaccttggcacagagaagccaatctgattatctcagggacaacttggaacctcgtgtaagagttctgtttcagaaggggaacatcacacactggggcctgttgtggggttgggggaggtgggagggatagcattaggagatatacctaatgtaaatgatgagttaatgggtgcagcacaccaagatggcacatgtatacatatgtaacaaacctgcacgttgtgcacatgtaccctagaacttaaagtataa

SEQ ID NO: 250194 - DNA, 256 bp, Homo sapiens
cagggccttcagatttctccatctgtaaaacaagggtaatgatatttccttctccagctcatcagaagagctaacacgaaattctggagagcattcttggcagctgggaaagaaggtaactaataaacctgattatttttaatagcataaggacctaacaatgacaaataaatgtctggtctctcttacgacagggtaaaaacaatgtaaaggagagacatacgtatggtgtaataaatcagccaaatatcttgga

SEQ ID NO: 250195 - DNA, 148 bp, Homo sapiens
taaaaaatgtttaccccacgagaaggcaaaaaagagaatagagggagagagaatgaatgatacaccatgaacaagtgcagtttattttgtggctacaaggttggatcaatgtttgaaagtcatgagtgtaattggtcctgtcagtagg

SEQ ID NO: 250196 - DNA, 888 bp, Homo sapiens
agctacttgggaggctgaggcaggagaattgcttgaacctgggaggcggaggatgcgatgagccgtgatcacgccattgcactgcagactgggcaacaagagtaaatctctgtctcacaaaaacaaaacaaaacaaaaaaaaaacaaactgaagattttgattggaattatacttaagtaattttcaaatctggggagaagttatatctttacaaaacttattttttcaatccaataacaaggtcagcttaacatatactttttctttctccttagtaaatatttgcatttttcaggtaggccctacacacttactaatttaatttctgtgtattttatatgttcttattttacatgttgctattataaatgggacattattttatttttatagttgactattgctatatagaaaacatatatttatgtattcctttttaagtgtccaaattactttttttgattcaagtgggttttctgggtagaggaaaaagtttctctttcaaataatgatcattttacctcctctaacatttatgactagtattctttttcttatctgatagcattgcttatgacttcagaaataatagtagtggttacaaatatgtttattttatccttcacttgaataggaatgtctttaggattgttatgactgatatttgttggctgcacatagacattctttaaacaagtgtcccactgacttgtgttttgcttttgctgctttaagctagaatgtcccaggtagtacacacacaatctctctcacacacacgcaactctcataatacactcatgaaaagaaaagagttctttgagattctaatatctgggacctttgtggtagataatcaggctctatcctcagaggaaaaaaaattg

SEQ ID NO: 250197 - DNA, 365 bp, Homo sapiens
ttgaagtgattctcctgcctcagcctcccaagtagctgggttacagtcatgcgccaccatgcccaactaatttttttctatttttagtagagacaaggtttcaccatgttggttaggctggtcttgaactcctaacctcaggtggtccacctgccttggcctcccaaagtgctggaattacaggtgtgagccaccgtgccctgcccacctgtcagtcatcaccatggtaagacagctccaggggtcacgaatatccaggcactctggctctgtgtgtgtgtgtatatgtgtgtgtgtgtgcatgtgtgcatgtgtgtgtgcatgtgcatgtgcgtgtgtgtgtgtgtgtgtctgaattttgtgca

SEQ ID NO: 250198 - DNA, 309 bp, Homo sapiens
aaagtagaaccaaatacaacttgcaagggaactggatgcttctggaagagtttgataagtgttgtttgagtttataaagtaaattaccttttttactttccaggtaaaaaaatatacctttgggaggggaacaacacacactggagcctgtcggggggcggggccacaggagggagagcatcaggataaatagctaatgcatgtggtgcttaatacctcagtgatgggttgatggatgcagcaatccaccacgcacacatttccctgtgtaacaaatcctgcacggcatgcacatgtatcccggaactt

SEQ ID NO: 250199 - DNA, 487 bp, Homo sapiens
tgtaaagaaattataaaatgtcatgaaaacaaaagagaataatatgtccaagatcagcatttcccacatgacaaacagtaggcttcctgaaattccaaaccctcttcctcctattgtattgacttgctcataaacaataccaacagacaaaccaacagagaatgcatggaacagattatccgtaccttaggccgtaaattccacgcagataacgtcaagatatgggcaggttccaaaagagtttctgcctctcccaacctacagttatctgggctgaggcagccccctttttgaagctgtgtccatggaatttatgatctgatgtagggttgttctgttctactggcacttcacggttacaggagaacaaccccaggacagagcccagcagtctgcccaaacacttcaaattctatctgcaaagaactccaggccttgctcaacccactttctgggtggaatataataaaaaattttccttaattca

SEQ ID NO: 250200 - DNA, 424 bp, Homo sapiens
tgtgattcactgaggacggcagccttcccttcagcattccatccttcacccaccaccctctaacacaaaagagattaccacaagaggacttggaccctacactcatgttctgtttgctttctgggttttaggctaaagcattatttacatactcctcatgcaaatatccacttggctatttagagaacaaagcagtgcctactggaaagattttttttaagtattaataagtgaatgcattctattattttaaaaatttgtgatgtctttatccctttgtcagctccatactttgccccatacactcccatacctgtaatcaggacctcctttttgttctagcccatgaattcctaactgcactcctttcctgccatgtgcttgtgagagaaaaaaaagcaggcataaacctaatgctaataga

SEQ ID NO: 250201 - DNA, 303 bp, Homo sapiens
gaagaaagtacattcaaaattatagtgttggcacagctcaggccaaattgtatcagttgtttctagtaactatataaacagaagtatagaatcttgagtatcttataattaaagacttctaagggcctgatctgtataaatacggagactgtaagtattgagtttatatacgcttttaaaaatagaattgagctgactcacaaactttgttaaatatgtacacaaactactcacttattggcacatagctattgtttggttacaaaaataaaacattgctaatgaaataaatttctgggtata

SEQ ID NO: 250202 - DNA, 328 bp, Homo sapiens
ataaaacaattccttgtacttgtctctataatactataatcctacagttaagaaatccatcacacctttaatcccagcactttgggaggccgaggcgggcggatcaggaggtcaagagattgagaccatcctggccaatatggtgaaaccccatctctactgaaaatataaaaattagctgggagtgctgatgcacacctgtagtcccagctactcaggagactgaggcaggagaatcgcttgaacccgggaggtggaggttgcagtgagctgagatcgtgccactgcactccagcctggccacagagccagattccgtctcaaaaaa

SEQ ID NO: 250203 - DNA, 368 bp, Homo sapiens
ccccttgagtgttcaccccgctcctggagggtgggtcatccactctctgtaggaaagggcttttgaggagatcttagaaggccatagcaattgacttcaacgaagatgtggcaggcagggagttctctcttgatgtccttgcccgtggttgcacaggaaggaagtctgaacaccttcattccagcctcaggctgtctccagtctctgggtcctgagcaacccagacccagtgggtagggggcaggaaagcaggaagagccagcttctgtcctctcttccgggccctttgaagcaacttgccacttggcgttttgtgggttaacttaggtgccgtttgaatgtggtataattaaaatattaatgctttg

SEQ ID NO: 250204 - DNA, 130 bp, Homo sapiens
agttttgttcattgaagattttaattaggaaacaaagcttagcaggagaggagagccagagaagtgacagggaagctacaggttacgacagatttgtgaactcagccaagcacagtggtggcagggccta

SEQ ID NO: 250205 - DNA, 275 bp, Homo sapiens
agaattatccctttaagaaggggcttctattcttccagttcatttggagatatggcacttctcttgattatagtgtgcctagtcttctgacagctgatgttatacattgagtacattgaggtcaggaccactagctcatcttttctttttttttatttttttagacagagtcgttggaacccgggaggcagaagctgcagtaggcagaagctgcagtgagccgagattgcaccactgcattctaacctgggcggcaaagcaagactctatctcaa

SEQ ID NO: 250206 - DNA, 655 bp, Homo sapiens
ataacatgccctaagccctgtgtcaatcactgttctccagagaaacaactgataggatatgggtgcatgtgcctgtgtgtgtgtgtgtgtgtgtgtattcattttcagaaattggtttatgtgattataggggctggtcgaatgtaaaatttgtagggcaggccagcaggctgggagctaggcagacgttaatgctgcagtcttgaggcataattccttttctgaagccctaaccccctcaatgcctcagaatgtgactgtattggagatagggcctttacagagataattaggttaaaatgagaccattagcatgggctgtgatccagtctaactggtgtcttcataagaaagagagatgaggacatgcaaccagggggatgtgtgtagagaggatgaccttgtgaagagacagtaagaggatggccacctgtaagccaaggagaggggcctcagaagaaaccaaccctgttctgacactaggagcatgacaaataaattcctgttgtttaaaccacctagtctgtggtactttgttatggcatccccagaaaatgaatgtatacatatagtgattctatttttaacattttgaggaacacaccatactcttttccatagcggctgcattgttttatgtccctccaacagtgac

SEQ ID NO: 250207 - DNA, 533 bp, Homo sapiens
tgtcttccaaatgccctccactcgatttgtgtttgtgtattctgtactgggtgtcccgcacacatgtggctctgaagggaaggacccattccttgaaatcagttcaccccacagcctctgtgatgccttccctcatcttccaacttctgcatgcccgtagctctctagttacatcctggacactgggattaggtcatctgccttgattactcccagtcccattagactagatgcctgtagaaggcagggtcctggcaaaatatcaatgtattcaatttcttttatttttttgagacagggtcttgctctgtcacccaggctgtagtgcagtggtgcgatcatagctgaccgcagcctcaaactcctgggctcaacgatcctcccgcctcagcctcctgagtagttgggagtagagatgcgtcccacatcgcctggctaatttttgtatttttgtggagaggggatctcgccacgttgcccaggcttgaagccagatcaagcaattgggttcttcggatttccgaaatagaccc

SEQ ID NO: 250208 - DNA, 490 bp, Homo sapiens
cacaggtgtgaaggggcaacccaccccttcatctgaacctttgggaaaatgtcagcctctgaaaagactttcttggcttgtgacagtggtgttttgtggagggcaggaattggggctgtttctctggcttgggaagaacagtcagtgaaaggatccccaaaatgaagtaaattaaccatagcaggaggtaaccgggagaaatagaaaccctccatttgctgttacccaagaatacccaggagtatggagtcttccagtgtatctgggaagcgagtttcaatctaaaaggtccatccaggagactcccattaccatttgggttccaattatgtgacatgagaacatttcatagtgaaggtggatggcatgcagtaggtaccaaagaaatgcctctcaattatgattttttaattttttttttttttgagacagagtgttgctctgccactcaggttggagagcagtggcatgagctcagcattgtctgagc

SEQ ID NO: 250209 - DNA, 606 bp, Homo sapiens
gtgaagggcaactgggagaagattgatagattctttagagacgtagcctaactctaagatggctagttttctggagagaaatggagaaagagagagctgggaagagactttctgggttagtaagaaatctcaagcactggcctttcctttcaaaggagtcagaatttgattggattagtctgtgaagcaatttattccctagggtgatgtcaaaaacaatcgagcaaccagcttgcaatgacgaatttagcagctgggtttggtcagggaaagagacaaagagagccttcccacacccccatcatatcaaggtggacctgcccactacttctcaggggaaacagactttactgcagtattccagtcattgcagctttcacctaaaagctttcacacaattgctttgggctattcataatagccccacactgaaaatccaggcgtccttcaatgggcgaacagttaaataagttggggctcgttcagcttatggaatatgtttagcaagaaaaaggaatgaactattgatacataccacagcctgctaatctccagagaatcatgctgaatgaaaaataaaaagccaattcaaaaggaaaaaaaatg

SEQ ID NO: 250210 - DNA, 194 bp, Homo sapiens
aactaaaagctgaacaaagtgactaaaataacatctcacagttaattggataatctgttattgagttaaataaatttatctcttaatatattcccagtagaattgtgtttttttattcttaggtaatagttttgctggtaatattaaaaaagttatatcacttgccacctatagagttttctttttacctttaa

SEQ ID NO: 250211 - DNA, 367 bp, Homo sapiens
agccttgaatccagtgacagtgtccttctaagagactgaaaggaagacagatacagaggggaaggcacgcatgtgaagatgggtggagagaccaggagatgcatccacaagcccaggaacacaaggaattgctggagccaccagaagtcctaacttccagagaggcatggaatgggtctccctcagagcctccaaaaggaaccaaccctgccgagaccttgatttcagacttccggcctccagaactgtgagagaataaattcgttgtgttaagctacccagttcatggtgatttgctgtggcagtcctagagaactattatatttggctaacacacataatagatctcacaacaagcaaaaacatg

SEQ ID NO: 250212 - DNA, 526 bp, Homo sapiens
ggacagaaataatatcaccaggatcaccaagatggacttcgctgggctcaagaacctccgagtcttgcatctggaagacaaccaggtcagcgtcatcgagagaggcgccttccaggacctgaagcagctagagcgactgcgcctgaacaagaataagctgcaagtccttccagaattgcttttccagagcacgccgaagctcaccagactgcccagtgtggaactctgttggatggcactagacagaaatcacatccctcctacaggatttctacaaagcacgtgttcctggagcaactattatgaggaagatagagaaggcctagaaaatttggtccctgttgcctttgagacttgcaccatcaccctgcaactgagcactctgaccaaatatcaagatcaactgtgctttctgaaagatcaaattaagtctaattttaaatgggacaaaaggtagcactctttttatattcctacttaagaagatatccttcttggttctgttccattttgcacatggagtagt

SEQ ID NO: 250213 - DNA, 856 bp, Homo sapiens
ctaccactttcaggagagtggttttaggcccgtggggctgttctgttccaagcagtctgagaacatggctggtagaggctctagctgtgtgcggggcctgaaggggagtgggttctcgcccaaagagcatctgcccatttcccaccttcccttctcccaccagaagcttggctgagctgtttgggcaaaaattcaaaccccacttggctactctggcctggcttcagcttggaacccaatacctaggcttacagggcatcctgagccaggggcctctggaaattctcttcctgatggtcctttaggtttgggcacaaaatataattgcctctcccctctatgtcatttcactgtggcaggaagaaggagcatgctggtgaatctgatgatcagcaaagaagtgaatgtggctggagctggagtggaaagtggggaagaaaaggacagaagaagaaaggacaagtggctgcagaagatcatcttgggtcttgtgaaacacggtgaggactttggcctggaatctggttctgaattagaatcacacttttactgtttactgacaatggacaagccacttacttctctgagcattagtttccttgcatgtaaaattaagaaaatatactctggccaggcacggtggctcatgcctgtaatcccagcacctcggggaggccgaggtgggcggattacctgaggtcaggagttcaaaaccagcctggccaacatggtgaaaccccgtctttactaaaaatataaaaattagccaggtgtggtggcatgtgtctgtagttccagctatttgggaggctgaggcaggagaatcgctcaaacccaggaggcagaggttgcaacg

SEQ ID NO: 250214 - DNA, 272 bp, Homo sapiens
tcccgtagagcacagggagagttgagaccgagcctaaacctggcccagggatccctgctggggacgacctaactgacctagtcctcctggggtaaaggaatgtctagagggaaggatggtgagaccagccagaggttccaaaacgcatacccctcctggcagtggtctagaatcctagatcaagggttggcaggagggccacatccagccagcagcctgtttttgtgcaacccatgagctaacaatggtttttacatttttacaaggttgag

SEQ ID NO: 250215 - DNA, 411 bp, Homo sapiens
atgtgcacctcattcattgtcggggtcctgagatttggttaccatagctgggcacatggcaggatgtgcctgcgtatctagcccttcatataatggcagaccctgagactcaaacaggcttttcctggccagtggtttcaaacacgtcctggtagttcactgctggagggagcacaccctgtgcaactcaggtggtgaaggactcaaaagcttatggctaccctctccagactgcttgacttacacctttttcctattgttcttgctctacagccttttagaggaataaagcccagttgggagtctaacatgctcctgagtcttatgagtcctgtttgtgaattatcaagcataaaggtggtcttgagacatccacacatgcacacacacacatacacactcatgaaaaga

SEQ ID NO: 250216 - DNA, 475 bp, Homo sapiens
tatttctcacatatgactagttatcaatataagtttttagaagtattatcaggttagcaataaaagcaatggtatgtaatcatcagcctagaaaatattgtcaattgtaaattataaaatgtacaaacgtaggactgactgaaaatactgcaaaaaaaatcaatgtttttatcagtggagcagtaagtaattgatatatggcaaatgatataaaatctgttgtgctttcaataaaaccataatgatgtaattatattatgcactagacatagccaaagtttctcttatttttaattattgtgatagaaatttactcttgtgtaaattgctgtatacctgtgtcactgatgaggaaattctaattatcttgaatagttttaaaaatgggaatgtttctgggagaaaggaattccccaaaagagaaaaaataaattgctcttttggcagttggattagtggtgaaagagtgttataa

SEQ ID NO: 250217 - DNA, 345 bp, Homo sapiens
tacgcaattggtccttacgctggatttatctttaaaaaaatttttttttgtagagacagggtcttactttgttgcccaggctggtctcaatctactgggctcaatcagtcctcctgcctcagactctcaaaatggattcatctggccaggccagagcaagacaccgtctcaaaaaaaaaaaaaaaaaaaagggttcatttatcttgaaacgacaagcaactacctgtgtagacctcagtctacagtacatatcaagcaattcaattttttcttgtaatgtcatgagcattctctgcttcttgggaacacttccagcatcaccaatggcaccttgtatgggtttca

SEQ ID NO: 250218 - DNA, 434 bp, Homo sapiens
ttgattgtaattggttagcttccttagatattcccaggaggaagtaatggcctcagggggcctccagaaaaaaaaagatctcatgaaatttctttcgcttagtggattgagcctggggctagctcatatgatgactatgggaccttcaatttgctgaatctatccacaagcttctacactctttgggagattggttaaaagtctctcgaagacaccaagacttcaagagaagtcttgagttcttcagagaagtctggagaagactgagaatttgtaaggcagtttcattgtttttgaagggttttttaatatcccctaattttacttgtgttggtctatctgtggaaatgtgtggtatgtacacacacacaaaccatactacagacaaactcataatacgaaacattaaagttttgtttctgctgttctgaata

SEQ ID NO: 250219 - DNA, 335 bp, Homo sapiens
tgattccaagtctaaatgctctttccaacaggcaatgaagatttccagtggaagtttctgttcaaggaatacagtgtgttacacattgaacagaaccagtaagatctgcagagatttcaagaatgaaatctatagaaaattctaaacatttggcttaaaatttttctctatatttaatttacagtttgtgccattccaatgacaaggtgtgctttctaaaaacaggtgtcatagatacttcttgatattctcttcattgctgattactgttctagggtcttggtagacaataattatctgccagttcaatgaatgaataaaatatatccatgctc

SEQ ID NO: 250220 - DNA, 348 bp, Homo sapiens
ctggaagattctataccaagataaatggtatacattacaatcccatccgtgctgtgcccccagcccactgccaaccccacagggaacacagcagctgctaatcctctggaaaggtcctactgcctgcagaaacttaccactcttggtaacggtgcttagatttgtaaacggaatatctacatttccaaaaaatgatcaactcccgtcatgctcccaggagtgtcagtctgactttgcctttgaggcttcatctctctctgaacacgactgcataaaggtaaggtcatggctttggtcaacggaaaaagcaacggctgcacagaggctgatggtgtgggccggaccccc

SEQ ID NO: 250221 - DNA, 665 bp, Homo sapiens
gaagtttacatgtttgaagctgggtcttgatatacgggataagagtgttttcacaatttgtacacaaatccttggctacacctttcttcaaatggtggaacctagttcaccacctcgagtatagcctgcccttagttaccctcatttctaagaaatagaatgtggcagaaaggacaaagtgtaacttctgagactagatcaaaaagtggcatgtggcttcctcctggctttctctgggatcagtagttctgggtaaaacaagttaccctgttgtaaagacattctagcagctctctggagaggctcctgtagcaaagaagtgaactctctcagtagccagtgaggagctgagactgcctgtcaacagcctggggactgagcaatcttagaaatggattgtccagacccagtgatgccctcagatgacttgtagaccaacagtgtgcagaagggtagatttttaaaaggttaaaaaaaaaaaaaaaaaaaaagaccagccaggtgcagtggctcacatctgtactcccagcactttgggaggccgaggtgggcagatcatctgagatcaggagttccagaccagcctggccaacatggaggaagccacatgccactttttgatctagtctcagaagttacactttgtccgctctgccacattaaga

SEQ ID NO: 250222 - DNA, 528 bp, Homo sapiens
aattgtgaaaacctcttatcccgttatcaagacccagcttcaaacatgtaaacttctgtgggcaaaaattggcatgtggcttcctcctggctttctctgggatcagtagttctgggtaaaacaagttaccctgttgtaaagacattctagcagctctctggagaggctcctgtagcaaagaagtgaactctctcagtagccagtgaggagctgagactgcctgtcaacagcctggggactgagcaatcttagaaatggattgtccagacccagtgatgccctcagatgacttgtagaccaacagtgtgcagaagggtagatttttaaaaggttaaaaaaaaaaaaaaaaaaaaagaccagccaggtgcagtggctcacatctgtactcccagcactttgggaggccgaggtgggcagatcatctgagatcaggagttccagaccagcctggccaacatggaggaagccacatgccactttttgatctagtctcagaagttacactttgtccgctctgccacattaaga

SEQ ID NO: 250223 - DNA, 458 bp, Homo sapiens
aggtgctgctgtgtgcctctgtcccgccttcccgccactgtccaaacctccctgctgccagctcactttcccagccatgcaagtggggaaactgcatcacctctctgtggcccggaagacagaagcaacgacacgatctcttaaaagctactgcatgggggccggatgcgacggttcacacctctaatcccagcactttgggaggccaaggtgggggaggggggtgtgaatcacctgaggtcgggagttcgagaccagcctgaccaacatggagaaaccccatctctactaaaaatacaaaaaaaattagctgcgcatggtggcgcacacctgtaatcccagctactcgggaggctgaggcagaagaatcgctggaacccaggaggtggaggttgaggtaagccgagatcacgcaattgcactccaccttgggcaataagagcgaaactgtctccaaa

SEQ ID NO: 250224 - DNA, 531 bp, Homo sapiens
gatactcctaatgagttcagggttctctgtataattattttggaagttgaagtaacttagttgagagaaaaatgctattctgtggccagtctgtggccagataccacaccattttatgttgatgaccacccagggatcagaccagacatcagtaagaacggctcaaagcagcccatcacttctactgggggacaaccctgagcatgtacattccagtgtttctgaggcttcatgatatatgaggaaattcaagagaaggggaaagaactctagctaaaaagaccagttatgcattagattctgtaattagttaatacagctaaacatatcactggtttttccatgtttatataaaaatggtcttggttttttatgaaatgatgctttaaagtaaatctttggtttttatagtaattcataagtaaaattctgttgatggttgcttttcagagaatttcaaagatttatgtcaatcaagtaaagtctaaaactacaaatagttatttaaatacttattttgggctcactaat

SEQ ID NO: 250225 - DNA, 558 bp, Homo sapiens
taataagtttaggatgggtcagaagatttgtgcaatggagtgaatgcttgtgtgcttcccaaatttcgtatgttgaaactataatcccaatgtgatagtagttgatggaagggcctttggacagtggagccctcatgaatgggattagtgctcttaaaagaagagaccagagagctagctagctgtctttccaccatatgagggtgcaatgggaagctggcagtctgcaaccagaagaggaccctcaccagtccctcaccgttctagcaccgtgaactcagacttcagtctccagaactgtgagaaataaatttctattgtttatgtcacccagtttatagtactttgttatagaagctcaaattgactaagataatttggatattaggttatatcgcttgcaggaggtatgtaacttcttgaaacatgtaaactctctgtgttgtgttctgctgcctaaatccaccagataaatatttggtttactttgcttgggaaaactgttactcaaatgttctctgtacaaatgcaggagagtaaaattatttccccatttta

SEQ ID NO: 250226 - DNA, 305 bp, Homo sapiens
aaccttgtattctctgactattgagcaacttcgattccactggcagtctaagttcaaccaacctcagaggagccttgggccacagagaagacctgactctacagacaattctccagtgtttccaacattggctcaacccaaaactcaacttcagcagaaatgaaggtaaaactgcaggctgctttatctgaactcagcagcaagagataacataaatggaagtaatttggaagcagaaagcaaaatgcaagtgtaaggaatatttataataaaactcaaaaatgtatcaaaacataaacatgatg

SEQ ID NO: 250227 - DNA, 417 bp, Homo sapiens
gcagattgagataatacttgtaaaatgcttggggaaagcctcagattcatagtaagcactcagtaagtgtcatcatcgtcatcatcatcattaattaatatttctacttttacctgagatattatctatgtcttttcattacctaattctccaactaaatgctgctcacatgctattcaacaaagattttacctagggagtcatcgctccctaaaaattggacttatattagaaatagcagcaaggtgcagtggcaggtgcctttagtaccagctaatcactacttgagaggctgaagcaataggatagcttaagcccggagttcaaggctgcagtgaactatgattacacctgtgaatagccactgtgctccagcctgggcaacaaagtgaggcctcagtcgctaaaagaaaacag

SEQ ID NO: 250228 - DNA, 433 bp, Homo sapiens
ttaaaagatgatttgcggacagattaaggacttcagaaggagagatgacaccagacctaggtcttgcagatgcaaactcctgtcaagtgtgagaggagggggagtattatccaccagtggcagataggctgggcatctgggcagaatgataagagctgtggccctgcagccagtccctgcatttgcaccctgagtttgccatgagctgtgtgaccttagtcaagtttctcaacctctctgtgcctcagcttccttctctgaaaaatggggatcgtgttttgcacacagcccgacacacagcaaatattcaaattcctttgcaacaagcaggcattcattatctataattcctattttataacttttttgtttgatctatcccagaattcattctgaagaaattcaacagaataaatgatcattttccctgaaa

SEQ ID NO: 250229 - DNA, 239 bp, Homo sapiens
tctttggtgaggtgtctgttgttcagatcatttgatcatttttaaaatgggttgtttgttttcttattgttgagtgttaagaatccttcgtatattttgaatgtaagtcccttatcaggtatatattttgcaaataatttctctcagcctatggcttatcttttcattctcttaacagtgtcttttgcagagcacacattttaaattttaataaagtccagctaatcatcaatgttttt

SEQ ID NO: 250230 - DNA, 570 bp, Homo sapiens
gcaagcacgatgtccttcggtacgtgaatggataaataaactgtggtacatacagacagtggaataatattcagcacagaaaataaatgaattatcaattcatgaaaagacacgaatgaaacttaactgcataatgttaagtaaaagaagccagtctgaaaaagctaaatactgtgtgattccaaccatatgagattctggaaaaggcaaatatgagtaccataaaaaataattgattgtcaggagttaagaggggcaggaggtataaataggcaaaacacaggaattttagggcaatgaaatgattccgtatgattctataatgacacgtcattataaatttgtccagcgcccaggatgtattccaagggtgaaccctatgtaagctatggactttgagtgacaatgttgtggcagtgtaggtttatagattgtaacaaatgtaccactctagtgccacatgttgatagttggggtggtggaggggtgtgcatgtgtagggaaaggggatctttgggaactcattgtaccttctgctcaattttgctgtgaacctaaaattcctctaaa

SEQ ID NO: 250231 - DNA, 411 bp, Homo sapiens
cagcccaatgagagacagtcctgagacttctcatgaaactattctatctcctaaagttgctaagcctgaagttgtgaggattgggaacaactataactctcaggcattgctagagggaatgcgacatggtacagccaccagggtgggctgaataagtgttccccccaaaattcatgtccatcctgaacctaaaaatgtgaccttacttgaaaatagagtctttgcagatataattagttaaagtaagatcatacttgataagggtgggctctaaacctaatgactagtgtccttaaaggaaaaaaccggtcgctcacgcctgtaatcccagcactttgggaggccgaggcaggcaaatcaccaagtcaggagatcaagaccacggtgaaaccccgtctctactaaaaatac

SEQ ID NO: 250232 - DNA, 428 bp, Homo sapiens
aaaagaaagaaggcaagcaagcaaatgataactacatgaggcaatggatatgttaattaacctgattgtggcgaccacaatgtatatgcatatcaaaacatcaagttgtataccttaaatatgtaccattcctatttgttaattatacttcagtaaagctgaaaaaaaattttttaaatacaaatgctgttgaggatgtggagaaagtggatccctcaagtacattgttggaaagattgtaaaatgatgcagccactttgaaaaacagtttggcagctcctcaaaatgtttaccatagatctgttcttgcaaaaacttgtaccccaatgttcatagcagcatttattattcataatagccaaaaagtagaaacaatccaaatgtccatcaagtgattaatgtataaataaaatgtatgacctggtgtg

SEQ ID NO: 250233 - DNA, 367 bp, Homo sapiens
acaactcttggaactagaaaatgaagaacaaagtaagcccaaagttggtagaaggaaagaaataataaagattggagcaaaaacagattgagaagaaaggcaatagaaaagatcaatgaagctgagagtgttttttgttaaaagataaacaaaactgacaaatctttagctagactagctaagacagagaaaagactcaaataaaattacaaattaatgtggagtcattccaactgacaccacagaaatacaagggttcattcaagactgctatgagcaattatacaccaatgattggaaaacctagaagaaactgataaattcctagaaacatacaatcttcgagaccaaattatcaagaaataaa

SEQ ID NO: 250234 - DNA, 495 bp, Homo sapiens
tggtacttttttttccgtgaagcttagttgaagtatatttgaattacaataaactgcacattttaaaagtgtgcaacttgatcaattttaacatatatataaacctgtgaagccatcatcacagtcaagagaatgaacctttctatcacctccaaaaggttctttgtgcccctttgttacccattcctctctgtgtcccctaataaccacctgcctgctttttgtctttctggatgagtttacattttctagaaatttgtattgaaggaataatatagtatgtgttcctttttgcctgttttttttttttttactcagcatgatgctttttgacattcatccatgttcttgtgtgtatcaacagtgcattctttattgctgagtagtagaccattacatggatagactaattcatttattcatttacctgttgatggacatttggattgtttctagctttgggttattacaaataaagctgttataaacatttgt

SEQ ID NO: 250235 - DNA, 370 bp, Homo sapiens
aatgtgccctcaatgcagccattacattaatgctcactaaattcattcctattcatattctctacctctctttctacaaaataaaattgcttaccttcctgattaaggcaaactaaccctgatggtgtgacctttgtcagctgggcaggtggtaatgccagaacagttttaaatacctgcttacaaaagaacggttttcaccgtacatggaacaaaacaggaagaataccttggtaattttctgtgatgtatcttatatttgtttcacactgaataacaaatgtctatagtcagattcaaggataactgtcagcattaccttaaatccaaactctgtctgaaagttaaaatcataaaacacctaaaaaca

SEQ ID NO: 250236 - DNA, 583 bp, Homo sapiens
gagtttgaaccatggtcctgccacttcctgataatggcacctcagatgcagcctacatcaaggaagctgcctgctgttaggggaacaggatacctgcagaggctccggtcctgacaatgccttcagctccacctcccaccaaagacctgtgtggtgtcagcagcagccccatttgcagaacttcccagagcaggttatctgcaatggaagcagtgatgcagcacccacatgtcccagaggaagggttgtgagctaacagctcacagctggatcacgctgggggatttttttctttccccgggagaaaatgcatctaatgactgattgagatgacgaacagaagcctggccctttgcgtatctgggctgctgacccaataaaatggagcccctgtgacctgctttcagggctttcacaactggtcccgcatgacgaccctgcctgacaaccccaacttggcttcagccttcctcttgctggatgacttcagcaagtcagacactctccatgcatgtgccttctcgtttataaaacaaagacaggattattgtgagaatcaaataaaataatggatataagcatt

SEQ ID NO: 250237 - DNA, 242 bp, Homo sapiens
gctaatttttgtatttttagtagagatggggtttcaccatgttggccagcctggtgtcgaactcctgtatcctggtcatttttatatctcgaatctggctgagaggtccctgtttttcacaatttcgttttggaattggcacatggaggtctgcctcaaacccactttggtatctgatatctatcacgtggacaattcaatggaaataaggcggagacagtcctgtcttcacacagtgttgg

SEQ ID NO: 250238 - DNA, 221 bp, Homo sapiens
tttttttgcagctattgtaaaagggattcagtttttgatttgactctcagcttggtcactgttggtgtatagcagtgctactgatttgtgtacatgaattttgtaacctaagactttactgaattcatttatcaaatctagaggtcttttggtggagtctttagggttttctaggtgtacaatcatattaccagcaaaaagagatagtttgacttcctctt

SEQ ID NO: 250239 - DNA, 370 bp, Homo sapiens
atcgtgtactgtgtggtagaatcagaaatctttagtttccataacgtgtaaagtggcaaaaacaatgtcttccaaggttgatgtgacattccacatgtaaaaacatttgtcttaatatgtaactcatattatatactcaaatgttttcattccactactccctcaaatgttttctttcttttcaagtccctgtaaagttgcagctatttatgtcccctttcattttgacatttaaaaattatgtctaatgctgggtgagatggcccatgtctataatcccatcactttgggaggctgagacggcaggatcacttgaagccagcagtttgagaccagcctgggcaataaaatgagacctctgtctctacca

SEQ ID NO: 250240 - DNA, 278 bp, Homo sapiens
aaagtcctcacgtgctttactcaggctttgggcttaaggagtgtttctgatgtgggctctggagccagactgcatggctgtaagccccggcctctctgcttcacacctctgtgatcttggacaagtaccttaactttctgtttctcagtttcctcatctcagatgataataggacatgcctcacagggtggttgtgagaacctgaataacatcgtaaagcacttcaaacagtgtctggcacatcagttgttattaataataattatataagataaaat

SEQ ID NO: 250241 - DNA, 99 bp, Homo sapiens
tgacatagaggaccagtcaatttctcaaatcccagagaagaccattgacctgaaagatattgattggcctttccgatacctagtctcatgaaaaaaaag

SEQ ID NO: 250242 - DNA, 360 bp, Homo sapiens
tttagagacaaggacttgctatgttgcccagctggtcttgaactcctaccctcaagctatcctcctgccttagtctcctgagtagctgagattacaagtgcatgccacctcgcttggcacaataagaaatttaagacagtttggtaaactttactcttgtaggtgttcttcacatttatttttactcaggttagctaatgtctttatcaaaagagacatatttagtattttccagtttaaagaatttatgaactatacaaaagttaagtgtgaggaatttttttaaaaaaaaaaaacattttttagaaggttaaaatgtagcatgtactacagtaaaaactctttccagtactgatttta

SEQ ID NO: 250243 - DNA, 458 bp, Homo sapiens
ttccactggctcacatactagacaggaaggcagacatacccccttgtcactgaatatgagatagattgtggtaggtacctaacagaagtacaatccaaatgcaggggagagacagagtgagaggaaatcagttacatcaggagagagacctgagaagtcctcttttctctttaaatatgtgttagatggtttatgcattcattcagccagcctttcctgagtgtctttatgcagcaggccagcaattctcaactctggccaacggaagaattgcctcatgtttactgagtcaaaatcaactgggattggaattgagtatgtgggcggggagcacgttaaatctgtggttaagacggaaagcaggaatgatactcaatctgctaggccagcaatgggaacactaacatttaagacatttctcctgatctctgaaaacttgcaacctagcagaggatata

SEQ ID NO: 250244 - DNA, 302 bp, Homo sapiens
tcaaagaaaaaaaatccacattcaacagtgcaaccagagtcttacagcatttatatgtctcactggatctaagacaaaaaccatccacactgacctccccgctgggttctgcgtgagattaacaactgcatggacccacagagcagccacgggctctgtgtttctgagctcactcagctactccctggatactgagcaaagctgcagccagtatcaggaagttagctcagatcacacgttcacgaggtttatcagatgtagaaattatcaataaaattattccatttcataaagaaggcaag

SEQ ID NO: 250245 - DNA, 1285 bp, Homo sapiens
aatttgtcaaaaaaataccttgagatgacaggtagttggttttgttaatattatgtttgccactttaactatgttaaatgaaatgacaggtattcattaaatatctacaccatttccagataagacaaactactaaaacaaaaataaaaaagtgttccacttatctttttctctctacctgattgtttcagaatttggaaactcttattaagtatttttattttcaatctgggtgtttgcataggttcaataagaatctattctccttatgacaggacataattgggcaagtccttggcttggcttcttagcctagagaggcttttaaaggtctaatctgagatttctcaattactagatagtttttaaaaactaaagttgactgataacaaagtcagtaaagtctcttggatatcaccaaagctgtggctaaaatatattttaaaattactgtttttattatacctatataaataatcaggtcaaaattaatgaaactagatttatttttgcaaaaaagtcaactttgatttttggtaaaaatggaaaataaaaatatttttctccagaataaaaaagattatattttagtagaaaactattgtgcatccattgtcaaattctaggcctgttcattttctttgaagttttattatctccctataaaccagattgactcctgaatttttgttttttagttccactagaaactaaaactgcccttttccaaagctctgcaaactgaaactggtgactttaagcttcagaaaaatcactgcaacagagcacttatgccttaatgccaatcttaatgcctgctgctatctgggtcactcagagagtttaccagaatgtttaatgaaataaccagagacattcaaattgcaaaccagtaaagcacatcacattgcaactgctatcttcagtctaccatttaaacttgcctcaaactcacctctagaaattgtttcacctagctgccctctaaactcaaaaactaagatcataatttgctccaaatattaactttgtttttttaatagaagaatactctgaattcctttcaagcaatacaatctaaaatgagcaagttagcctcaatagcaccccaaaatagaagttcttggtatcttaacagcttaacaaggaggagcttgtgttcctactgatgtcaaaagaaatgcttaaagatctcagttggctttatggtgattctagaactgggcaatacttgccaccttaaattagaataaggtttccaatgagttacagcagaggagattgg

SEQ ID NO: 250246 - DNA, 424 bp, Homo sapiens
agaaatatgttggggttactgcacctgtaaaaagtgaaaatggccaattatcatcaatgtcaagaagaaaaattgcccttgttgccctttcactgtagtaaagtgctgcttccaacaaaccagcacacaaatgccaaccacaggtgcattccgcttgggaggatgggggagaaactagttgtttgactctgtacaagaaccaatcaccaggtttccttaaatggcacactttctttgaaatctgaagcaagaaattacctctccggacacaaccaagttcatctcgtgtcctctcaggacatacagccgggctccactagagggcagcagaaagatggagatgctcgagagaaaaggagacttaagttagttctcaccatccgtggagggtgtgaggaacccaataaaaaccgtactggtatta

SEQ ID NO: 250247 - DNA, 380 bp, Homo sapiens
ctggtggaccttctaagtaactgctagaatgattgggtaatgtatacagcttttgcttctccataaataatgtaagtattaaaaaggagattttaaactagaaggaaggaatctctggagtgagaggaaaagtttaattgtatttcagtatctatgtctatgaaaagttgatatacggtgtcactgtggtatacccaaacttgtttatacacatgtataaccagtacacagtaagtaccatgagtggcttttagtgattttatctttttaccttgtagtacagtctccctggtgtctcacaaggctagtttacttactttggccatatgcttcacatagtaggtttctggaggttttgttttttctaagatgagagagtg

SEQ ID NO: 250248 - DNA, 665 bp, Homo sapiens
  misc_feature (630)..(630): n is a, c, g, or t
  misc_feature (665)..(665): n is a, c, g, or t
actctagtagctagggttgctgggaaaatgaattatggcaagatgagaaggtgggactcaagacttgggaaactacagaggaaggtagcccaaaagatattgaatagctacacatttaaaattttttttagaaaaatttaaatttttaattatttttgacagagtaagactccgtctcaaaaaagttgggatggttcctaaaattgcgtatagaattaaggcacagaattgtgtgtaaggtcctgaatctggctaaaatacagtggatgtatgtattggaattatgaggcataagtagccagtatctatagttagaatctacaaggcctcctttttgcacctgtagactagaatataactgttattggtgcctttgagtgttatctctcagtggctagaggtgctgtttcaagcacaatttagactagggttgaaccactcattgttcaaatcattggtgggctccaatgtaaaatatcactacatcagtccacaagcaacattaaggaaatctaaaggaaatggaaattgactttctagagtataatgatgttctagggcataatgaggaaaattttaatagattataatgatacatattggtatcattaagacaacagatttgagcanatacaattaaggtggtcttattttttgctcgtttn

SEQ ID NO: 250249 - DNA, 514 bp, Homo sapiens
cttaatctaagtgttgcagcttttgattgcctctctgcaaactgctttccagtggaatcatattgcagctgttctaaccacccagttcctgctctggacactgagtacattaaaggaagtacaaaacagttacttcccaaaaactctcaaccaacttttctttccttaaatgatggtcattctccatatggcaggagcaacatttttcttatttttctctgctggtttgaaatcagaactgaactagatattctttccaaattagaaggtacctctttcactgacaacaggaatttagaggatttggggtttagaacaatgttatttaagttcaataactggaaaatctcttgatgaagcaaaacctgcattaacatagtaatcatactttttggctgataaagaaaaataaacagctctcgaaaagaactttttccaaaaatgaaaacattctttagctttttagggtacttcatataaaataaaatgaagaaatttaaaatgacaaaaaaga

SEQ ID NO: 250250 - DNA, 527 bp, Homo sapiens
aatatcaataagatatagcgcttgcagtccttacattttagggcacctacactgcttttttagttatggatatacaaggctaatgttcagctggtacacacaagtacggctgaaccaactaatcaaatactgaaatacttcaatgcaagttggttaacagctgcaactctgagtggtatccccccatgcttctcacccctgtgccagtccttcctctcaagattccccagacctccacattttaggaactagtgggttaatacctggctaagatagagccctttggacccagctcttattagtcactcccattctacttggttggtgcctattctttactaattgttacatattttaaatgtcatccctatagaaaactatgtggtaagcaacttgaaaatagagactgtgtctcctaacactttttaaactcacccaaacatttatttactttcaagtgtatacacactgatttgggcagattttcaagcaaaattatcagatagaataaatgattctctgcatac

SEQ ID NO: 250251 - DNA, 1596 bp, Homo sapiens
atgctgtcatcttttgtggtttttgagatggagtctcactctgttgcccaggctgtagtgcagtggcacgatcttggctcactgcaactccagcctggaggacgagagtgagacttcgtcaaaaaaaaaaaaaaaaagaaatgacaaactactgatacttttttcacgaagtttagctttcaaattagaacaaaaggaccaagtgcaatcaagacagttgttacacagaatacatctgtattctgatgttggactaagaaacggtggtgaataaatcaaaataaatcaaattgtgatagtagagtagaaagtttagtaatttagtgcctttattccaattcattatacatgaacctatggttaacaacttttggaatccctccccatttggtttatctggaaaacaggaaaatcgccaactctgctatcacttttttggtcctttttggagcaaaataaagacagtcatgtaacacgtaacattttggtcaacaatcaaatgtgcatatatggtaagcctgaaagattataccactatatttttactgtaccttttctatatttagatatgtttagatacacaaatacttgccattgtgttaacattgtactcagtacagtaacacgctgtacaggtctgtgtattttctatgatgctcacatgcaatcacccaaactgcatttctcagaactctgtcattaagcaacacatgactgcacatcagctcaattttccttctttgtaatgggttataccatatgtactatttttacactaaaaacgagaagatacagaagaaaaataaacacaattttaacagccattttaactgaagtggcatttttgcatgttttcatcatttgctgtgtatctttaaatagcacaataccttagcacgttaaagaaaaaaatacctgagggtagcagcaaatccaaatgcagttaggaaaaccatggacgatctgcttgagatttcaagaattttgaatagatgtgaaaattctattggtgtacagctttatgaacaaggaattcagctttatcatcagttattagaaagctgtgcaaggaattaagttttatccatagctttatcagtggagagtggcttacagaaagaactatcagatgtgtttaaattttaacagccctaatgttttggcattgctgttatttatgcactccttatttatagctttgatagctttaattttctagtcttatcatgtgcctgacaaatgtagttatatgccttactgacatttccattaaaaactttaattttgaattattcatgcataactatggaatttgttacactgggctgaaagttgacaggatttcaaccaccatctgtaaatttttatttagattatgtatctcataatcttgttttttaaaagaacaggggaaacatttcttgtaatctgctgtttaacaaataatagttttttaaagttaggcagtttacagtgagccagatcatttttgtattgattgaaaaatacaacttttagaaacttaggtttcagtattaacgacagcatttagcttagcattacttgttgtttgaatcatttaactctaaggaagac

SEQ ID NO: 250252 - DNA, 439 bp, Homo sapiens
gcctgtgaagggcaatccttttcccgtggactgggatctatagaaatacagaaatgtgcccaggggttcatctccctaataaccatcattcacatttctcaacctccctaataaccagccaccatgtgagaaggatccacagttactgtttatgactataattaactagtacctgggactggtcagtggagttggttgcaacctgatgctaaggatgtcaaagttgtctcggcctctgttcccagccagtaagtaattccctggcctcgggccataccccctaatcttggtcagctgattatgacaggcagacagcacagtaaataacactatatattaagaaagtctgtagcaagggcctccaatgtgaaggtcaacacagtcactgtgatgcgtgtatttccattttgtaaagcatgatctctggtggtcattttta

SEQ ID NO: 250253 - DNA, 486 bp, Homo sapiens
tctgtagtcagtctggccttgtgccctgagtcccaaggcagggccagccatgctgtgggctgtccgctgcctaatcctggggacgaagccaccttccacagtgaacccggatctgccttccctgggaggggaggagaggagagcagaagcagagagtgccggtggggaagggatcagggcctcagggtcagaaaagaggcttgtggccctcggcagggagaatctgtctacccctccctcgggagatgcccaaaagaaagagatggcctgggggagcaggtcatggcgatgagggcaggggcagggatgggcagtgactgcaaatgggccatgatttcttttcaggagaggaaaacattctaaaatggactgtggggatgtaaatacactaaatgccattgaatgtatactttacatgggtgaactgtatgctatgtgacttgtatcccgataaagctgttatagtaaaaaaatccaaaagcacaa

SEQ ID NO: 250254 - DNA, 435 bp, Homo sapiens
agtccttacccgacctattttctgtccactctatctgtttttgagagaggtctcaaaaaataaaaaataaaaaataattttgttaaaaagataaaatagaaatcgtagatgaattcttggaactgggattaatcagaacatggcagattagcatccaacatggaattgctttattctcattcaaggtttccctcattcttcactctccccatgctggtcaccttgctgtttgttcctcaaacacatatgacatgcgtttctgtcttggcagtcatcctgctacctgtaatgtcagcactgctttctgttgtcccttcagtcaggtcactgttcaaatagctctctagacaggctcttccttatcattctacttaaaatagcccccaatcactctgtgtccctttagcctgcttcctcttcctgctatttcatact

SEQ ID NO: 250255 - DNA, 765 bp, Homo sapiens
caagatttctttttaaatggttcacagttaaatttaaatttctatatttagataggatagtgtttatataccaaccgcagtatccaggaaattcagtggtaaagctgacacatagcgagtttatagtctattttgtagtctgtgtatttagagaaggtttgaagcttacttagcaaaaaggattaaacattcaagcagaatttctttagcacaaatgtactatttgatttcatatatttgttgagataatagtgtgtcacattttaaagattagttctcaagaaaatgtgttaggtttatcttttaaaagaaggatgcattcaggaacagcttttatatgtaactttttatagtatttcatattggatagacttggtttggtgcaatccgtaagatttgatcaaatttggaagaagttacagacacatttttatagtgttttctgtagcatctttatttttttcagatgggcgtattttatgttgcttccaactaatcaaaataagaaattgagtttgcctgtgccaaaaaacggaactatcatttttcacattcttttattttccatgtcatttttaagtaagattatgtttctaggacttatgaattcctgtcttgctttgagaaataagggttgaacatttaaggggaactcactttattgagtattggttggaggaatttccatccagtaatttttggagatgggatcgttcgacagattatgcctcaattattctctggcggatcttcactgagctgcct

SEQ ID NO: 250256 - DNA, 538 bp, Homo sapiens
ctgaccaaaagctttcattatgaaatcatcaatatcccagataagcaaatcacaccccctaaatatatgacaattagcagataagagttttccattttcattggtaagaagtttatagactgaaaataatttgccaaaatttacctttgcattctcagtcatatctgtaggtagattaacaaagtctagtttttatttttattctttttatgtatttatatatatatattttgtagtgatggggggtgatatggtttggctgtgtccccactcaaatctcatcttgaattcccatgtgctgtgggagggaccaggtgggaggtaattgaatcatggggacaggtctttcccatgctgttctcatgatagtgaataagtctcatgagatctgatggttttataaaggggtgcttccctgcacaagctcttttctcttgcctgctgccctgtaagacatgcctttcaccttccaccatgattgtgaggcctccccagcaacgtggagttgtaagttcattaaacctctttcttttgtaaa

SEQ ID NO: 250257 - DNA, 451 bp, Homo sapiens
aatatagtaacttgggtacaaggcatgatatggtcacagcaagcactaacataaaaggctttctatgggccaggccctgttctcagcacctcatataaatgtattcatttagacctcatcgaccattctatcagataggagctgggagaagccccattttacagtggggtagactgtgacacagagaggttaagtagcttgcccagcatgtagcagatctgggattgaaatctggcagcctggggccaaacctgtgattttaaggactccactgtttgcatttgcaacagaagccagcctttacagtgaataaaggaaaagggtttgatcagaatggtctcttgcagccagggtggtagctcatgcctacaatcccagcagtttgggaggctgaggccggaggattgctggaggccaggagttccagaccagcctgggcaacatagtgaga

SEQ ID NO: 250258 - DNA, 688 bp, Homo sapiens
cagtctcactctgtcgcccaggctggagtgcagtgcgtgatctcggctcacggcaacctctgcctcccaggttcaagcaattctctgcctcagcctcctgattagctgggattatagatgaatgagtattcttatatgaattttatatatgacaaaaaaaaaaagcacagaaaggttaacttgtcccagcaactcaaccagaactcaaatatagtccctgtggctccaggttcactagtcttccccttaacagttgtagatggcatagcatagcagttaagcctgcaacttgctaggccaggcttcctggagtcaaattcttactctgtcactttttagctgtgaatctgaacaattcacttcattgtatctcagcttgctcatctgaaaaactgggagaaattgtacttattttgtatgattgctgtaagaattaaaatagtttatctgtataaagtatatagtcccatgactggcatatattaagtgctcaataaatgctagcgattattttaataatacagttgattttttcttaaaattgtgtgaaaactacactctatagccatgatttaaaaaaaaattatatgatacctagtgaaataaacggtaccatgtccttccacctaaattagcaacaaaagtcaaatcttataagtttctttctgtttcccttataaattcaata

SEQ ID NO: 250259 - DNA, 237 bp, Homo sapiens
ctccctccacccttctgtttccaggagcctcagaatggttcaggcccttgccagtcatggcacccgcctgtcactgtggctgcgtctggtaaccacagattgggggggccacgcctaaacagtgtccgtgcatttctgagaaaagctttttccaaatattacattctgcttttctacatttctcattttccatgttggcatttaaaatactcataccagagtatcagccaagggaag

SEQ ID NO: 250260 - DNA, 363 bp, Homo sapiens
tctgacaaggactcccacgtccctccccggctaacctggatcctgctcaacccaacacctgccttctctcggtccctgggttcccgcaggccttggggccccacagtcatatctgctgttcctgcagctcggcacagtcacagcaactctccaaatcatgacgctcaaaatgccacatctaaaaagaacatccgggctctgcccctaagaaagaattcatgcacctacaaagaggaaggaacggcacagccatccacctttcaactcctgagtttccatctgcacccttcaacacttattaggacttacatgaaactatgtgacatctttttatttctattaaacaaaatacagctttcttcc

SEQ ID NO: 250261 - DNA, 590 bp, Homo sapiens
gtcttgctatgttgcctgggctggtcttgaactcctgggctcaagggatcctcctgcctcagtctctcaagtctctgggattacaggaaccggtctactgcacccagctattttaaagttctacatctggacaactttaaaaggaagaggtttgggatggagaataacccacatcatacaatttaaacccctataagaagcagtagtttaagcagctttgctagagtaaatcatgatttcagactgtgtgaattttaaatttcctctgctgtataaaaccactgtaagaacaaaaatagacaacaatagactacaaaccccagaattacaaagttgtttggaattgttaacaatattgcctgttcatgctgtaattagttagtatgacggagatgttttattacatgatagcaccacacctgggtacagtgttgggaagataccaggaatcaacaaagagtacaatgacatgtcttatgggttcacatgttaggtttccagtacaatattaatatggttctgagccgcaggttgataaactattcctgggtttttaatatgaaaatgtctcagaagtggttacctttatg

SEQ ID NO: 250262 - DNA, 214 bp, Homo sapiens
ccaataaaatcaaaacaaggtagacagataaaactgaaataaagtatcaatgcaaagatacagatatacacacgaaaaaaacaacagcaagtagggaattatgacctctccaatggacaaagcaaaactccagtgacagaccctaatgaaagagtgatctgtgagccctctgaccaagaattcaaaatagcagttttaagaaaactcagtgatc

SEQ ID NO: 250263 - DNA, 433 bp, Homo sapiens
caactgaagtcatagtttccaagaacccattaacgacgttaaatgcagacttactgtattctgaaacaggacatattactggaatacctcaaatgccatacacatacaatatgattaatttaaaatccaggaatacctggaaattttattggttaaaaaaaaggaacacaagccagctgcagtggctcacacctgcaatcctagcactttgggaggccttacagatctgagccatcgtgccctgccaataacaaagttttgatgagcgtttttctctctctccttctagtgaatccagttctggaggttcagggtcataatgttgggatcctgcccagctctctccataatcctctgtgtgtattatttggaaatgcctctttttaatttattttttcaacttctattttaggtttgaggtaatccgtgaggg

SEQ ID NO: 250264 - DNA, 320 bp, Homo sapiens
caactgaagtcatagtttccaagaacccattaacgacgttaaatgcagacttactgtattctgaaacaggacatattactggaatacctcaaatgccatacacatacaatatgattaatttaaaatccaggaatacctggaaattttattggttaaaaaaaaggaacacaagccagctgcagtggctcacacctgcaatcctagcactttgggaggccgtgagccaccgcgcccggcctatgctatattcttctaacaagttttttttaaggctttaattttattagactcaaaatgccagtaactgagatcctctagag

SEQ ID NO: 250265 - DNA, 467 bp, Homo sapiens
gtgtgccacttagaggtctgtattagtctatactaccattgacagtgtcttgccattatagcgtattatttgccaaaccaataggtgcaagaaagtatcttattgccattttaatttgcatattcaaaatttaagatgtacaacaactttccatgtagttaaaatgattttttccctgagagactccttccctatttctcttatgtaagtgctttttaaaatattatgtaatatattcttcttatgtaagtgctttttaaaatattatgtaatatattcttcttatgtaagtgctttttaaaatattatgtaatatgttcttcttacgtaagtgcttttttaaatattaaggaaattaatcctttgtctctcttatgcatttcaaatatttattttcatattgcattgatttataacttaacttttgaaacacttccaataaagaaaatttaaattttgtatagtaa

SEQ ID NO: 250266 - DNA, 1077 bp, Homo sapiens
ggtccgccacagccccagaagaagctggatcctgactctatccctagcccaatccaggtgattgagaatgatagagccagcagaggaggacaagtttatgccaccaacaccagaggccagatccctcccctggtcactacagattgcatgatacaagaccaaggaaatgccagtcctcgattcatccgttgtacaacatactgttttccatgcacgtcagatatggctaagcaagctcagattccattagctgctgtcatcaagccctttgccaccattccttcaaatgagagtcccctttacttggtaaatcacggcgagagtggaccagtcagatgcaacaggtgcaaggcctacatgtgcccatttatgcagttcatcgaaggaggaaggagatatcagtgtggattttgcaactgtgtgaatgatgttccaccattctatttccaacatctggaccacattggaagaagactggaccactatgagaaaccagagttatctctaggatcttatgaatatgttgccactttggattattgcagaaagagtaagcagcccaccagaactgatccaagggaatatttaatgtgccatctttttgcacatatcaacacagatatgacattgcttgctgaaagtgggaaaacccatactctcaacaactcagaatgataatgggtattatccaacaaaagaggccatattcaatgaagctcacaattgtaagcagcgagaacaaccaggaaatggtcttcccgaacggttccggctaacaacgaccaaggactttacggggagtcttccttacggtggagttccctttggttgtgttcaccaggaggatctgtcgcgtgcctaatcaatggaacgctctcccggtcctggatgtgcgctcccacagggaaaaaccccttctggggccaattcagaagcaacaagaggcgagaggtcgcaacacgaacactccccgagaacggctaacacatcggggcggcaagcacagggacggcccaggcacgctcggggcgcaaacacggggggcacagcagacaacacctgagcaaaagaaggcaa

SEQ ID NO: 250267 - DNA, 469 bp, Homo sapiens
ctggagtatgggcagctctttgtgactgctttcatgacttgaacacagctgaaaggacatcaggtaacttctgaggctaggttagaaaaatccatgaagattctatttatttatcttagggcattggacaccttaagctgccatgtgaatccacatatatagctatataaacaaattatatatatatatatatatatgtatgtgtatgtatatgtaggtgtatgtatatatatgaatacatatttaaaatatatatataaagagagaaagagagagacatttttgaggagcctcagctgttgcctccccagcccaggagataggcttacatgtgaataggccttccagatgaccccagccccacccaccatctgactgcaaacttatgagggactctaagcgagaactgcctagctgggcatatttgacttccagaatcataagtaaaataaattattatattcttgta

SEQ ID NO: 250268 - DNA, 420 bp, Homo sapiens
ccatatttaattctaatcactaaaatgtgaagtgagaagaagttttgatgtgagactttagacagttgggaaacaaaatgggctacataaatgggagaagtggaagaccctgaaaatatccatgtttcagttgaatttgaattaacaaaaaatgaaactcttaaccaggaatcagcaaaaagtttatgtaaggggctagataataaatattttaagctttgggaaaatatactctctgtcacaactttccacctctgctgttgtagcatgaaaatggccagagatgatacataagtgaaagggtttggctgaatactaataaaactttatttacacaacagctagtgggccagatttggcccaaagcccatagttctcagacccttgttcgtaatcttcaggtaataaaaagaacacaat

SEQ ID NO: 250269 - DNA, 395 bp, Homo sapiens
caccggcttgaggctgcctttcccggcgttccctcgtttattggctcactcttcctttcatttatgtccaatgtgagtcaggcatctctcctggtggctgtcttccatgtggtgacttatgtatccaggatccttctactgtgtttctcctccattgcgaagtccttcacttccagcacctgagacattttttgggtatatctacaagtggcatatatcacttctgcccacattcacctgggtagaactcaatcacattgtttcacctaactgcaagtgaggctgtggaatatagtctccctatgtgcccaagcagaagaaacaggattggtgagcatctagcccatctctaccactaacagtttatcccccctaataaatcaatacactgatga

SEQ ID NO: 250270 - DNA, 508 bp, Homo sapiens
caccggcttgaggctgcctttcccggcgttccctcgtttattggctcactcttcctttcatttatgtccaatgtgagtcaggcatctctcctggtggctgtcttccatgtggtgacttatgtatccaggatccttctactgtgtttctcctccattgcgaagtccttcacttccagcacctgagacattttttgggtatatctacaagtggcatatatcacttctgcccacattcacctgggtagaactcaatcacattgtttcacctaactgcaagtgaggctgtggaatatagtctccctatgtgcccaagcagaagaaacaggattgtgtgactctacaatgtgtgattgctcctggtgaatcaaaaggataaagctgctgattctgcaatttgataacccaaccatgctgacctcaaagtgtagtcaatccatgaagttcctcccaccacagctcatcctgaacactgcccacctgagtcatcaagaaaggtttaagtacatta

SEQ ID NO: 250271 - DNA, 436 bp, Homo sapiens
caccggcttgaggctgcctttcccggcgttccctcgtttattggctcactcttcctttcatccatccatcctttgcgcaacaatatttgatgggaagcctgccaagttttcagattactccatttgattctcacaagaacatcgtaaatggaaaagactagaattgccctgagttcacagattggtcatcgaggtcaaagaaatcaagtgacttctggaggccacacagctaataaacagcaaggcaatgacttgaacccaggtcttctggttccaggtccagagctcttttctctatattctaaacacttgcaagcaggggaaatgttatcagtcccctacactctccagtgactattctgtgtctttcctagggttttaggtgagctcaatttgatagaggtatacaacataaagtataactcaagacttcaca

SEQ ID NO: 250272 - DNA, 197 bp, Homo sapiens
atgagattatctcaggtttagggttcccctaagtttgaaagtttgacataaagagatatttagatttaaaattcgagactaggtgtgttggctcacacctgtaatcctagcactttgtgaggctgcaatgggaggatcgcttgaggccaggagttcaacaggagcctgggcaatatagtaagaccctatctctacaa

SEQ ID NO: 250273 - DNA, 608 bp, Homo sapiens
tgatttatttttccaactggacttcttcccggggctctttctgggcccagctgcctttgtgatcccgcgccccggtcctcggcctctcacctccagcgccggggcgccccctgctgtcggaagcggctgtgaccgggcagaggtgctatctgggactctgggttctcagcccggggacagcgaaccgaggggcagatgatccatcagaaaagagccggcactgcccagccccgcgcccctgcccctgcctttttccgggagcgcgccgcgccgcacccgctacggccgcttgaccccatctttgagcccggccccaagctctgggaccgtcgtgcccctcatcaaggaagagccaaggaccccaaggagaagagaaaggagttcatgaaggcagaaatgcctggggcccacgaacatcccagtgtggccctggacgggacatcatgctgggcaacacagctaaaatgcgggtgaagaccagatttcttgcacatggcggtgacgggatgctccctagagagcttcaagtggattctttgctttttattttctctcttaataaaaatgtatgatgtttacattgtcagagaacaaacagaaaaatggct

SEQ ID NO: 250274 - DNA, 503 bp, Homo sapiens
caccccttccctccagacctgtgtgccttctgccctggctccagggccccccacaccgtgaccagggcgggatccctatggggctggccagtcggcaccgtgccaggcccacagtgccctgggcgtccatggaagtcgttctgtgtctttaaaatcagaaggaagacattaacctttaggctgaagaaaatgttttagtacacagcaataacttatttgtctttatccaacagccataaaatataactttaaatattctattgatagagaaaggagttcatgaaggcagaaatgcctggggcccacgaacatcccagtgtggccctggacgggacatcatgctgggcaacacagctaaaatgcgggtgaagaccagatttcttgcacatggcggtgacgggatgctccctagagagcttcaagtggattctttgctttttattttctctcttaataaaaatgtatgatgtttacattgtcagagaacaaacagaaaaatggct

SEQ ID NO: 250275 - DNA, 567 bp, Homo sapiens
gactccagtttatggtgaggagaggagggggtaaaaggaaacaaagggtgaaggaaacgatggaagtagtaatgctcagcgaacagttgactatgccacctgaagtgcttatgaacccgttttggctttggaaactttcttcagacatggatgctcacctgttggtcttgatgacttgcttgactagaatgtgacagatgtgatggactgggactgccaatgctaggtcatgagaaattctaagaattctgcctggtctcttggaacactgattcagggacccctgaaccacagtaaagaagttcaatactggagaagacacatgtagatcttcaagccaacaatccaaattgagccccgtattacaactctccatgttgatgtaccaaaaaggtgtacgaagccatctgaggccctcctgatcagcccatcagtcagctgaatcctgccgagaaacctctgtcaatttcacatggtacagagaattgctgatctgagctctgcctgaactcttgactcacagaacaatgagatataattaaaagattgctgtcttaagccaaaaag

SEQ ID NO: 250276 - DNA, 444 bp, Homo sapiens
aacaactttttaaccatctctggatgatgtgacagaagcaacgtttgtagtacaggaaagaggaaaagcttccattttaaacctgatgaactttatattgtatgaagctgattcagtgtcactcgggcttctcgtagctgagataaaaacggggttttattacacatgtgtgaagaaatgaagaagagtgtgtacaaatgtttgttgactctataacaatattatgactcaggaaaaggaaaaatctttatatgccaaaaggaattcaaagctagagaaaagtgaaaaatttatcataacaatatcaaagtcacaaggtaatttcacatatactcatgaacaagctgcttcaaagagtgtacctaaacaatgcatcagaagatgacagagggattgaaaggaataaaatctgtaaaagcattaaagatagcataatcaatcaaa

SEQ ID NO: 250277 - DNA, 357 bp, Homo sapiens
ttatagttaagatgatttaaaagaaggaagagagtgttcaatgacaaaagaaggcactaagaaacagctgtttccaatcaagtataaacaacaaattgatctcttttaatttggaagaaataacattattgactgcttgtgaaactgcatttatttgtggcctaggaaaaaaacttaaatgaagatcttgaatttttaaagagtttaggtaaactgggatatttttaataaccatcctttatcttaaaacttgtttgctatatcctaggctgccagaaaattttgtttgggcagttttagaatggggagaatgtgttggttagtgagataggcagactcttcctttcccttcaactg

SEQ ID NO: 250278 - DNA, 450 bp, Homo sapiens
gcaagtgattataacccctgccaaacttgttaggaagactctttttacaatatatggcagctgatcagagctatccagctagtggtttgcctcagttttaagatcaccattttaaggaatgattaatatttattctgaatgatattcatgagcctttagtgctttctttttacaagacaaattaactctagctataaaattaataaaacactgtttttaaaaatgagagtaggtttactatttccattacagaacttatagctgaacattttggaatgatttaatcaatattactcgaggattttaggaaaataattcaggatgattttattattataaggattagaaaataacttcagttttaaattttgaagtttaagttctaagcacaaatgtcttcttgtcccctgattcttgcagtatccatggagaataaatattaaacactca

SEQ ID NO: 250279 - DNA, 812 bp, Homo sapiens
aggattttctagccatgctaagagtaagaatggacttgtggaggataggagctccaggcatagaagtctcctcaagtgttagtctaaacataaagcagcacttgcatagaagattttccacaagaaaatatggcaaaaaaacaccatatattgaggaacaacaactacaagggaacagtgagcttaataaaggtgacagagctcacatagtgctctggaatattggagttttgaccagctagagagaagagacctcattgaaaatcttgggcattcagtagagacctcagaaaagtcagactttatgagtagactttgtatattcctagaataaaggcagctccagaaaaaacctagcaaagctgaaaagcaaatctccaagcattaaaatggtgtcctagtcaattaactgccttctagaagaaaactcaacactctttacaggtgaacaacaaagttaagttgctgagctatgcaatatccacagtgtgagtcctaaatttataactttactacacataaaaaagcatttagtgtgaaccataaccaggaaaataatcagtcaataaaaatagaaccaggaatgatagaaatgatttaaatggcatgagaatttgacatattagtatcataactgcattgctggatttaagaaaacataaacatggaacgtaacagatatcatatcaagggaaagtaaaaggataaaagagtcaaatcaaattaaaggactattaaaaggtatatcttaaatgaaaaattcactggatggtctcccaatcaggttagttgtttccagggaaaaaattaac

SEQ ID NO: 250280 - DNA, 389 bp, Homo sapiens
agcacctctggctgtctgcccacccatactcatggccatggcacagatgagtgccacctgactggtggagcaggcaaacaggatagattggactgaccactgtcaggcagttcttccaaaaacaagggcaagactcagtgattgaactgagctgtagacctttaagagccatagccatctagaaagctctgttgaaggcactgtcagcctatgcccctatgatgcagggctcactggtaattgtaagcagcactttccaggaccaatgcaacactgagactgcactctccctctgtgaagggcaggtattatctcccttgtcttcctcctagaagcatagtgacttgcaccttagcagtgatcatcagagaactttgagtatgtaaaga

SEQ ID NO: 250281 - DNA, 174 bp, Homo sapiens
tgagccctggaagtcaaggctgtagtgagccgtgattgcaccactgcactccagcctgggcatcagcgtgagaccttgtctcaaagaaacaaaactcctcttaatgtcaagggaaagacccaaaaacctgacagaaaagatgggtaagagaaattaacaattcacaaaaaatat

SEQ ID NO: 250282 - DNA, 433 bp, Homo sapiens
cttccttgaatcactgtctcacagataattaggttcagaagaggagaaaaaaaaagatgacgtcaacatggagcagagtttttcttagaccttagcctagcaaggaaagagaaatgcctggtctcagtgctgggaagctgttccagccagagccccgtggctgtgaagagagctctcctgtctggagccaaacagaaagctcataggtcttgaggccagaaaagttagtaggtggcggctctggtcggtgctggaaatggaggccaggatgaactaagaagcaaactaaagatacttgtaagataaggacgtgtaggctgggtgcggtggctcacgcctgtaatcccagcacttcgggaggccaaggcgggcggatcacgaggtcaggagatcgagaccatcctggctaacacggtgaaaccccgtctctacc

SEQ ID NO: 250283 - DNA, 446 bp, Homo sapiens
cccattgcaatatagatgatttacgtagctggacaaccttaccaataggataagcattatacaaagatatatcaagtacctgcaatgtacctagcagtatgctttggatgatacaaaataacaaacattctcaatttctataaacctccctgtctagatgagaagacaaaactgatagtgaatgaaatagagattaattaagtgctaaaattaaggtaaattgatgccaagtgcagtaagaattcagagaaaagagaaatctttatggatcatattatacattactagaaaaagtaggacttgaactaggactagaataatggatgagattctattgaccagtgagaagataatgaacagttctaaatataagaaattgctcaaaccaggagtctcatgcatcttttattctaaactttccccccaacttgttaatttggcagcag

SEQ ID NO: 250284 - DNA, 724 bp, Homo sapiens
gtttcttcatgggaaaaatgggctgctgacaagtccagctctccagcctgatcttatgtgtaaatgtctttgaaccagatcccagaggagccttgaatgccaggcttggctgatcagacttcacccccagggcctaagggagccattgagggttgttgagcaaaagaacaatttgggaatgcgcagatgcaggactgggaaggagttaagagcaaaagttttagagtgagacgtgggtttgagtcttttcttcatcgcttgctgtgtgacctaggacctgtgctttgacttctctgagcctcagtttcctcatctgtaaagtgaggatgtaataatgttgtaacattcagtgatttcatgcaggtaaagggcaaagggtgtgccaggcacacagtaggcactcactaaatgctggtatacagttacgtcctcaagtcttgttaactagccctgttctttctccctcctgtcgctctggctcaggcctggctcaggtctcccctccctgcatggggccccactcttgcccttcacaggccccagatctgttttgtcctcctcctgctcacacaccttccatggctccccattgttcttgggagagagttcccactccttatcctgtcactcaaagcccagcccactgcacagacgcatggtccattccccgacccaacccaagttccagccacaaatgctggaagtatgtagaagtagctcatgt

SEQ ID NO: 250285 - DNA, 381 bp, Homo sapiens
tcacggccacaacacacagactcaccagtcactggagggcagccatggggctcacaaagggattcttccttccacaaaaggactcacaacaggcatccctaaatagctcgctgcaaggaaaacccactttgagttgggaaagtcacatttccatagagtggattagagaaatagggctttcattggaagaggtggctcagtctgagaataacagctgggaggtgtaatagtaaaaccatcccacagccacagccatagctggtctcctctgggcagcatcagcacaccctccatgggcgggtgcttgctcaggatcacacagctggtcggaggaggcaggatttgaactcggcagtctgatgcatcaacaccccatgccta

SEQ ID NO: 250286 - DNA, 416 bp, Homo sapiens
ttaatttttatttgatgaataaataaaccaagaaagaattattatttgatcaatgtgtatgttgaaggaagagagttagtagagacaagaggggaccataagaaaaaaagtgataattaatgtccaaaaacctagacacaggacaggatgacatccaaagaaaaagataataaatgtataattgacatgctgtatgattgtcattggggaaagcagagaagaatgtgtgttgtttcagattgtggtttgcacattcagaataaggaattaaagagatcttagtggtgacactatattctatatgaaattgtatggtatacaattatctgataattaaagttggagaaagcaatttgctgggcttcttaagagtcataaaaaaatttttgaataaagtatcatataccatggtttca

SEQ ID NO: 250287 - DNA, 765 bp, Homo sapiens
aaagtagaacttttatatatgtttaaaacttcaattacaaaaaaattaaatacaaatgctttaaacaaaagttttgaaatatcaaggcaaaaatggtgtgctggagtgacatggtaaagccagcaaaattttgaccatattctgaaggtcagccctgacataaatgatatgaagaaaccaactatgaaatggatgcatgagtttcccagccagtggatattacttaatttgtagtttccacatatttgggattttattaaatgaatttttatcgaacaaattacctatattatacagaagatcagcctttcaagtttagaacgatagatgtctcaatatgtttatcgtgggccaccaccaaataagaatattagattttgccctagcaaacataacatctaaatattccaaagccacttatgcatgatatatgaacagattcccaaaagcacattatatgaaaatcaagaatccagttttagcctttaatattttatgtttgatataaacatgccaaatatttaaactttctcatgcttttagtgatatgtgaagaaatgtgctactatctaaaataaaatagaaattgtcaagtctgaaaacccttctttttctattaccacctcctcaaaacacagagccttcgatcctcaatttacaactgttgctttgggaaacatctgaaagccaccctctataatttcacatttcattcttatgacaaagttagtctgcatgtggctttatcttagtatattttacaaa

SEQ ID NO: 250288 - DNA, 475 bp, Homo sapiens
aagaggaggggaaaagtattcccctcaataaggctgatgtcagaggcaatgttcgaccagtactactaaattctaatccatttaactgtgataatttctggtaaaatcatgagttttcatgacaatgtctatatccattatatgtgatctgttggaagttttggctagagaaacttaattgtgaggaaatttaaatattgtgtgatgcaagtacttactgaatttggaaaccccttgatagcattcccagcaagtgatagttcaacctttgcttttattcttccagccacagagaactcactgctttaaaaccattccattactgggtagctctgaattgttttcattgttttctcttaaactgaaatctgcttccctgtaatattaatgaatacagctaaggacataccgtgtggcatactatgagagagctccatccagggtgaggcatcaaaatcatgaacctttttaaaag

SEQ ID NO: 250289 - DNA, 852 bp, Homo sapiens
ataagcaaaatgttaacagactgaatccagcagcacatttctttaaaaagagatataccttgaccaaattgggtttatcccagaaatactgaaaatggtctaactctaggaaaacgcaaaatttgagtcaccaaattaaaggaaaaaaactatgaaatcatttcagtagattgcatttgatacaattcatacccatttataatgtaaaacttagtaaattccttaatgtggtgaaaataatcaacaaaacatctacttcaaagatgattcttactgaggaaatatgaaaaataattacttgaaatcaagaaaaagaatgcagactatcaccacttcttttcaaccttgtactgaaactcctagcaagtatagtaaatcaataaaaagaaattaggctgggcgcagtggctcacgcctgtaatcccagcattttgggaggccgaagtgggcagatcacttgaaatcaggatttcaggaccagcctggtcaacacagtgaaacctcctccctactaaaaatgcaaaaattagccaggcgtggtggtgcagccctgtaatcccagctattcaggaggctgaggcagaagaatcacttgaacccaggaggcggaggttgcagtgagccgagattgtgtcactgtactccagcctgggcgagagagcgagactccatctcaaaaaaagaaagaaataaattaatggcataagtgtaaagaagaaaaaacaaaatgtcattcagaggtgatatgattatctgtatagtaaaccccaaagactccacagttttttagaaataatatttttctcaaagtggcttcccgtaaactcaataaataaaaagttgcatttctgt

SEQ ID NO: 250290 - DNA, 282 bp, Homo sapiens
caagcaaaaacttcatagctttacctgtatttcatatttccttcctaaaggggcagatcatttgcagttcctttctacatttttttttttgagacggaatagtttcattctgttgcccaggctggagtggagtggcacagtctcggctcactgccactcccagttacttggggggctgaggtaggaggattgcttgagcctgggaggcagaggttgtaatgagccgaaatcatgccgctgtactccagcctgggagatagagcaagatcctatttaaaaaaa

SEQ ID NO: 250291 - DNA, 364 bp, Homo sapiens
ctagctgaaatgtgaaagtaatctactttaatagctttaaaccacaagttggtaaattgaaaatgagccctgtgacctggtgcggtggctcacgcctgtaatcccagcactttcggaagctgaggccggctgatcactggagcctaggagttcaagattaggctgggcaacgtggcaaaacccactgtctgtcaaaaaaagtgcaacagttagccaggtatgctggtacacacctctagtcccagttacttggggggctgaggtaggaggattgcttgagcctgggaggcagaggttgtaatgagccgaaatcatgccgctgtactccagcctgggagatagagcaagatcctatttaaaaaaa

SEQ ID NO: 250292 - DNA, 886 bp, Homo sapiens
  misc_feature (19)..(19): n is a, c, g, or t
  misc_feature (21)..(21): n is a, c, g, or t
tgtgtgaaatccggatccncnctcgaggtcgtttgtatcgataagcttgattgtgcgggggattcgatgtttctgactgaaatgcatacatgtgttaaccaaaaaacaggaatactggctgtaatggccccaaactagaagcagtactcaaaattcaaaagtagagaaaggataaataaatcacagtgtacccattctataaagcagtgagaatgaacaatatacaactacatgtaacaatatggataaggaaaccagatgagtatacatgataattccattcatatcatttaaataaaatacaaagaggcaaaactaatatatactatttggaagtcacgacttttgggggatcagtgattgaaagggagcagaaagggcctttccggggtcatgataatgttgacctttgatcggggtgtattcagtttatggaaatgcattgatctatacaccaatgataaatgtgcttttctacatgtatattttacttcagtaaagttaaaatttgaaaaaccactctgccaaattttttagtgcgaaagtggatacagtttagagcaagtgaatggctactgcagtctatgaagcaaggaaatgtctgagagtttggacttgacaagtcctggcagaggagacctgagtggatgggtgtaaggtattcctgcagaataaaaaaatctaagacattgcagtactggttgtaacagccccaaactagaaactactgctagaaactagaactactggctatgtaactaggcagcagagtaccacctcgagggaagggaagctagaggagaggaattctgttggaccttgatgctttaaagattcttctctgagcttgatcttaacaatgtggaatatatttcctttctcatga

SEQ ID NO: 250293 - DNA, 538 bp, Homo sapiens
tggctttcctccctcccccaatctatgggtcacagctaacagatctgagggcaactgctgtgctagtggccagggctgcacctgccatccccggctctgccactttagggccttctagaggcagtgtccttaggaagtagctctgaggcatgggttttctgctcctgtgcagggcagctgatgggataaggtggggaaggacggtcagtgcttgggccccagctggccagcctggcgatggggaaaccaaaccatgtcccccagcgaagggccagagtgggaacctgtcctcatgcccttcgtcctgaggagccctgaggtgggcagcaggggccaggggaagttttcaggccttcatcaaagagaacaacatcctcagctccgcacccctcatcctgtatcagcacttaccggtgtgtgactgcccttgtcagctagcatacggtgggcccacctggcccactggctgtttatgccactgatttatgatagggaatattatctttgaacccaatgaagtgttttctcccccatcaca

SEQ ID NO: 250294 - DNA, 886 bp, Homo sapiens
tggctttcctccctcccccaatctatgggtcacagctaacagatctgagggcaactgctgtgctagtggccagggctgcacctgccatccccggctctgccactttagggccttctagaggcagtgtccttaggaagtagctctgaggcatgggttttctgctcctgtgcagggcagctgatgggataaggtggggaaggacggtcagtgcttgggccccagctggccagcctggcgatggggaaaccaaaccatgtcccccagcgaagggccagagtgggaacctgtcctcatgcccttcgtcctgaggagccctgaggtgggcagcaggggccaggggaagttttcaggccttcatcaaagagaacaacatcctcagctccgcacccctcatcctgtatcagcacttaccggtgtgtgactgcccttgtcagctagcatacggtgggcccacctggcccactggctgtttatgccactgatttatgatagggaatattatctttgaacccaatgaagtgttttctcccccatcacaaaaaaaaaaattcttatttttagtagacatgtatttaccaaaaatatgtactcaattattgtattttggattttatcaatttaaaaattgtggaaatttgtttgctcttacgccaacataatattgattttgcctcttgctctgaaagcccaaaatatttaccgtctagcccgttacagaaaaagtctgctgactactgagccagacctccattacctccatccctgttggattatttaaagaaagcctcagacagtaagggcttttttaaaagaataaaatgacttggtttgcgcttggaagcaggggaagcattcagatgagcggtttctgcattaaccctgccta

SEQ ID NO: 250295 - DNA, 246 bp, Homo sapiens
caatgtatagttaagtcactaggatgaagacacaagacaaacgaaggcacaagtaaataaaccggaggtactagagttaagaagtaaagcaaagaactttccctgtgtagcacgaatcacagagagaggtatggaggagctatagttacagtctgtttcattgtcataataattgcttttaagatccagagccagtctggtgtttggaaaacaaaaagaaaataaatatattttatcacaacccaa

SEQ ID NO: 250296 - DNA, 405 bp, Homo sapiens
atatatataataaaaatttatatataaataaatacataaacaaactcaagtgtccaacagggctagataaggagcttacaagaatgaagcagttgtgatgtgattcaatagggaataggtggggccttggcaaaccaaagaacatattctgtctaaagtggatggccacaacttgctccagctgtggaaacttgggccatgtactgctagatctaaggattttcttttgagagatgctagatatatacgttttttaaaaataaaattatcctgattttaacaacattgccttattatataaaacataccttggagggtgtgggtaagacacaatgtccttgaaattatatttcactgggttaatgaaattggctccagaagaaaataattttaaacagcaaacca

SEQ ID NO: 250297 - DNA, 360 bp, Homo sapiens
cagagtaaaatcagaggacttctgtaatcattctctaacagaactcgaagtcttccagggcagccaatacttactaagagaaatcaaggtctcagagaaaccaaagaaacagcctcagggtctccgattttgaacgttatgccatagactaggtctgcacacaacaaaaacagtaactgtttcgatggcactttttccacaggtaatatcatcttatatgtttggctaagtctcaacatcccaaaaaggatcaaaagattctctaagttttgcagttcaacaactgtgcacacttttatttctcatttcaagtgttaaggatattgctctaatgactgcataaaactctctcctcatgta

SEQ ID NO: 250298 - DNA, 593 bp, Homo sapiens
gctgtatcagctgtaaagaatatgaatcttcctgagatcccaagaaatattaacattggtgacatcagtataaaagtgccaaacctgccctcttttaaataaaaatgtaaaaaggccactcccaggtaaaatccagggggaagagtcatctaagtttaccatgcagttgtttaccaaaaatagagaaggagagtcttaacttttgctcttggatttaagtcaaggtactgtatagaagttgtgtaaaatcagtatgaaagttcaatgttgctgttcttgctcagtgattttaaagaaattgagtagttcctatgtgatttttttttcttttctaaactgcattcctgtgcccacctacggcatgcctctatgtattggctactacagtgttttaaaaagtgtttcagatatttctctaattatgtacaacctaaaatgttggtgttttgtatggatcacaagtgcagcattccttaattccttctgctatatgtcacacaattgttatttaaagaaccaagtatgtattgcatgaaaacattatgacctttttctcttatttaaataaactccaaggtaactggacttctaaa

SEQ ID NO: 250299 - DNA, 301 bp, Homo sapiens
gggtggagccaccacttccagttctgatcttctcattctggttgagtacctgggcttgccagtgcaccccccaggaacaccgcctagtccagggctcccacaggtctcagactgacaggagactgggtcatatgaccagcactagccaatgagctgtgagtacacgtgacacagggacaagctgggtcatgtgactggcactagccaatgagctgtgaggacgtgagcacaggtccagctaggctgggtcatatgacaagcattagccaatgagctgtgaggacacgtgagtacaggtcca

SEQ ID NO: 250300 - DNA, 302 bp, Homo sapiens
tcaaggtctccgcctcttagaaatgcttgattttcagtattgctaaacagggattgaagaaaacaaactgaacaaagaaacaaataaagcctttaacacagtgagcaaagacacagcacctacgccttccccgggccccgcaacagctccagagctgcacagctgctcccagagcctgagcatggacctgagctctggctcatggatctcaccaatgcatttcttccctctgtgtcaaaaaagcatccagaaattggattcatttacttgggacataaaataatgtatacctacagttttgt

SEQ ID NO: 250301 - DNA, 251 bp, Homo sapiens
ctgtgcaccgcgggcctgagaacagccttcctttcaccaggctccgtgcacgtctggtgtttggattccacgcctgaggaaacgtgtgggtgaccatctggctgcgcggacgcctgcagggccagggacgggccgcccctccttcccaagggcaaacagcctcgggacggcgacgggacaagctctgctaagtagtcagccacaaatttgttttctttgaaggaaataaagaacaatttttctattgtata

SEQ ID NO: 250302 - DNA, 870 bp, Homo sapiens
ctcaattcatttttcacaattacagatcaagctccttgttctgcttttctccttctcactactgtacttgactagtctttaaataaataaaacctgtcttgtattgctgctcctaaaacaacataagagtaaattgtctgtactgtttgaagcttttccataaaacaaatttctcttcataatcacactaggatatgagagttaacattattttaagactttttgagtcttcatgttcattcttttatcaattgatctttttttttgtcctatgtggaattataagtaaatgatagaatgcagatgaaacttttctagttatatttgattttgtttctttttattttatccaggaataatgaagaggtatctatgctgaatataattatcatttacattctaggatgtattatctcagaaaaaaatatttgagggcatctgaaaagttttttgatactttgaaggaaaagatagattaggcttaaattgacactttaaatggtatgaagctaaaaagaaaattaacagaatggtgaaagtgttttgctaacgtgattggcaacagattgatatatactatataaggaaatcattcaaagactacaagcaaaaaatagattaaggtttatgagcaagtaccagatacgggaatctatttgagctcataagcagctaaagataatatatattaaaagatacctacttttagctagaatgctgataagtacagaccttttggaaaaatactttgatgttatttgttatgggcaatacaaatgtttcagtgcttccaccgtttaggggattataattcagaaataatctaaggaaagaaaatgctaagaattatgcatttcaggataacaaggg

SEQ ID NO: 250303 - DNA, 363 bp, Homo sapiens
gcgagaacttaaacccagagtttgatgataaggcctttgtttgtaataattctgcctaaccactatacacattcactaaatgctcccacagttgcctatgaaaccatctgatcatatccacaaacctaattactttctctttcaaaatcagttctaataatgtcaaatcagtctttattccatcagtggtgcaatgaggaacgttcttagtaaccaggcaattgatatccttaaaaatgtctctgagagccaggcgtggtggtacactgttatcccagctgctcaggagactgagtcaggagaatctcttgagcccagaaattcaagaccatctcttaaacacacacacacacacacacgaaa

SEQ ID NO: 250304 - DNA, 1009 bp, Homo sapiens
ggccaatattatcttcttaacttttcgtctagtgatttccctttcccactttttaatatttctgtggatttcatgttttttaaattaatctaacacatggcattaatggaaaataacccattatgttttaattaatgagttctaatcagtttctgccactgtctttttttcatgctcaaattgtcccaagcttatcagtggttccctttcaagctacttcctatgtccttttgatataatgtcattggtgtttgaagactcccttgctttatgcacaccaaaatttccagggtcatcttgttatcttgcctgccccagacctgtaatcagccatctctctgagaagttctggttcttttaagtggggaatagcatttagaaaccaaatatgggtgttggacatgcccacttttaacggagcatcgttatttttaggacttttctaaggatagtgttaggaaatcatattttttcaaaatcacgaatttagtctcatagctccaattcaagtccaccactacaaggttcttcatcacttctcacattctatatatgcatctcccctctctcacagtgaaaacccaggttctcagcaatacttgcttattcactttatccaacaatacgtacaaaatagtttcagcataacaatactaatactgctaccaacagcaaactacttagtacaactgttttttttttttggacattgtttttgcacttagactatagtccattaagggtatctagttagagttatatatatagttagatacatttgtttctgttgatattcagtgttaggatgtgattttttatattcttattctgaaattctaaaaaaggtttgcatgattcaaaacttaaaaaaatgtggccaggcatagtagctcatgcctgtaatcctagcaatttgggaggccgaggccggaggatcccttgaatccaggagttcgagaccagcctgggcaacaaactgagaccctcatctccatatattaaaaaaaaa

SEQ ID NO: 250305 - DNA, 530 bp, Homo sapiens
tctctttccagtacctcctatctatctagataatacggaagccagggagaagaatgggaacccaagatctatgagcccttatggcatatgaaaagtgggtgttatctgaaaagtagaactctagatgaaaccaggcctttcccaacaatggagcccaggacaatgctgtcttcaatgtccataccattagacttgttatagatgagtttctataatgatggctttctggttaattaaaccttctgaatgattctgtgtaacactgacttctgtgattcatcacagaacaagtcttccttctttcatggagtattactgttttcagtgactatatttggttgtttactctttttggcaccaatcacccagtgaatcaacaaccagagttgcaaacaaattaccctcattgtcttttccgagtcccttaatttactttatttttcatttgttgcaaatgtcattgtttctgctaatgttgttttttaacatctgccaagataaaaaataaaaaaatcacttgtaaaaaaata

SEQ ID NO: 250306 - DNA, 841 bp, Homo sapiens
agagagggaaggaaacatctgtgctggggcctgctccctctgccccagcactggggaatcactgccttcctggctgctgccacataccacaagatctcctctgctggagaggagaggatgtgttcctcccaggccacggggcccctctgccttgccccaagcacagagctacctaagggactgacctttgccacactggagctcacctcccgggggcctctggcctacccttttccctgccagctgaagagactgccggcagcctggacgtcctggttagctgaaggcagctgaaatgtgggcctccctatgtggggtttagtactgaattatgtgtttgtggttttgcttctttttgtagacccacaaatatttttatttgaatagtaaagagctgtgctcagattgtagccatggttgggatttgggatcaacgaggctggttagctggactgggaggggaggcaggtgagatgggaatttggtgttggttttctcactgtgctgtgctcctagcccctgaggactttgcaggaaagctgtttggattgaccacctcaaggaactcctttgctgtcctatgacaattactcctcttgtctttccacctagaggaccgttatgccggggctgtgagttctggctgaagctgcacaatctggctttgatctgggtagctaagaacaggtgttcagggagggcatggtctggaggcgcctgagggaaaagtatcttctggttagaagtgaagcaccaatgctcctgttgcttcccttctcccatatcctctcctgaacaaacactgtgtggcttctgtcttcttggctgtgtgtttcaaaac

SEQ ID NO: 250307 - DNA, 475 bp, Homo sapiens
ccccatgttatctttgaatgtagacacagcacgctttagggttgcaatagcaagagacttggttgcttgtaggtcattataacgaatgccccctggtcctctcagtttctcatcctgcttccctagatcctagaccccacttcctgggtctctactgagtcccaggtaaaccccactgccaaggaagggagccaggtctagtgagaggctgcagcagtgagtgtttcaggaaagcaagcagtggagtgggtgagagccagcaggggagaatctacttggcacctgtgccaggccccttggcattctcctcacgtttccagcccctgggaggattgatgcatctgcctttgagctgttgtgaaaacgcaggggctgagaaatcacttttgtgggctggggtagggggaagggctgaggcttctctgggagatgtccaatgagcggccagtgctgcaggcttggaatcttaatgagg

SEQ ID NO: 250308 - DNA, 490 bp, Homo sapiens
ttaatgaggcctgagccctgaccggagagagggaaggaaacatctgtgctggggcctgctccctctgccccagcactggggaatcactgccttcctggctgctgccacataccacagtggggccgacctctgggcctccctgtcacatgaaacatggaagccaacagcctggccccacagatctcctctgctggagaggagaggatgtgttcctcccaggccacggggcccctctgccttgccccaagcacagagctacctaagggactgacctttgccacactggagctcacctcccgggggcctctggcctacccttttccctgccagctgaagagactgccggcagcctggacgtcctggttagctgaaggcagctgaaatgtgggcctccctatgtggggtttagtactgaattatgtgtttgtggttttgcttctttttgtagacccacaaatatttttatttgaatagtaaagagctgtgctca

SEQ ID NO: 250309 - DNA, 474 bp, Homo sapiens
caaagatatttgagttaatgtttaaaactgaaaatgatgtcaccaattaaattcatcacagaaagaaaaaaaatgttaacatttaaagaatgcctactatatatgaggcactttttacctttaggttttatagttaacattcttatatacaaagaaactgaagcttagagagtttaattaactgacccaatataaaaaaggtagttaatggtgagcctggcattcaaacctaggtccatttgctgctgaaacccatacatgccctttccaatactacctagctctgggaatttataagcacacaaatcatgagtacaagatacaatacaactttagaaagtcagtcactaccagaaaattagtaaaatgtttaagggccagacagatgagagtagcactgctcagattttccaatacactgaagagcttcagtctctaggactaatgtaaatggtttgaaatggggagataaat

SEQ ID NO: 250310 - DNA, 452 bp, Homo sapiens
ccacagggtgtggtggcagcaggtgcctcttctgcatggccagggtcccccatcgctcacagctgtcagtgtgcacatgctcagacctgcaccattcctgtccagcccctgcagttaccacctggaatcttcagccaggacttggaggctgtgaggtcagtcgggaagtggatcaggaggccacccccttctgtggcacttctgagatgacaacttgtttcacagttggatgggggtggggaaggaaagagcggccccattattccagaacattttatccacacaggctcagacaccctgtgatgaagagtccaagaacagcctgagataaggatgtcattcttctttcacaggccccacgatgggtttatcttttgggaccaagacattgggtccctacatgttttcccctacccttcttaggaaataaaatatcaaacaacccacagtcc

SEQ ID NO: 250311 - DNA, 349 bp, Homo sapiens
ctctctgctgggagcctttgtgcagtgcacaaactgcacgcgtgtatgtagtagccctgctaataaggattacttagaccgagccaggacaatgagattcaatcctgaaatttttttcaaacttggaaagaggatctcttttccatgggattgaaaatagagctcctgagaacctgcctgatggagagtgcaacatagagaaaagcagaacgaagacacagagagaaggagttccattttgacttctagatccaaccttgcctgcagctgagcttgttcactgagtaagattatcactatacttttcagttttatgagccaataaatccctcacttttcttcaaataat

SEQ ID NO: 250312 - DNA, 422 bp, Homo sapiens
cagagttctggaggtatttttagtctccatcttaaagataaattcacatgatcttcgaattcgaaaggcagcagtaaggcagaaattatttctcttctttctctggcagcagtagaaggcatagcatgggcctcctaaatgattacttagaccgagccaggacaatgagattcaatcctgaaatttttttcaaacttggaaagaggatctcttttccatgggattgaaaatagagctcctgagaacctgcctgatggagagtgcaacatagagaaaagcagaacgaagacacagagagaaggagttccattttgacttctagatccaaccttgcctgcagctgagcttgttcactgagtaagattatcactatacttttcagttttatgagccaataaatccctcacttttcttcaaataat

SEQ ID NO: 250313 - DNA, 396 bp, Homo sapiens
atgacccactggagagtgagaaatttaacccaaacaagttgacgtacattcttgccgtccactccactgctctgggaaattctcccctggcccttccattaaagccacgtgataacccatgagatgttaccatgactgtggggcccgcattggtcaaaatggaggacataatcaatctgtgtaagcgacctaaaattgccttgtccctcttgcatctggcccttgcttacagaagggctgggtatgagtagggtatcattggtaaacaggtgaaaatagctcccgaaataggaaacatacaattttgtcctggtggaaggagagcaacaatgctagtacctagggaagtggggagtgcattacaccttgggaaattctgggacagggaacattaat

SEQ ID NO: 250314 - DNA, 5401 bp, Homo sapiens
  misc_feature (343)..(343): n is a, c, g, or t
  misc_feature (378)..(378): n is a, c, g, or t
  misc_feature (696)..(696): n is a, c, g, or t
  misc_feature (894)..(894): n is a, c, g, or t
  misc_feature (1142)..(1142): n is a, c, g, or t
  misc_feature (1891)..(1891): n is a, c, g, or t
  misc_feature (2039)..(2039): n is a, c, g, or t
  misc_feature (2050)..(2050): n is a, c, g, or t
  misc_feature (2118)..(2118): n is a, c, g, or t
  misc_feature (2132)..(2132): n is a, c, g, or t
  misc_feature (2181)..(2181): n is a, c, g, or t
  misc_feature (2388)..(2388): n is a, c, g, or t
  misc_feature (2520)..(2520): n is a, c, g, or t
  misc_feature (2556)..(2556): n is a, c, g, or t
  misc_feature (2692)..(2692): n is a, c, g, or t
  misc_feature (3978)..(3978): n is a, c, g, or t
  misc_feature (4047)..(4047): n is a, c, g, or t
  misc_feature (4113)..(4113): n is a, c, g, or t
tcggtggcttcctcctcgtcccctggactctcgctctcttcctcctgtctcctcggccccttctccgcaggctgaaggcggagctggagatattcggggagcaggtccggagcgcccccgaggtcggggccggcgagggagaggccggacctgagctcccccgcgctcgcgacgaggaggatcccgagccgccggtggctgcccctgacgccctttaggccagcaggacccgcccgttcccgaccttccctcgagacccgccaagaaataaaggcgatgatttccgaccatgctcgcgttctccgcggagtctgtgctacaccgtggagcggggcggggcgtnctgggatctcgaggcggggcctctgccggaccccncccaccagtcgagccccgggcgccgtacagaggctgggtaaatgctcctgaactcagagagagtaagtgggtgtcagtatcccccgccccacggcctcatctcgagttcccaaaccatctatgttgtcaacaggggccggagggcaggtgttaacccattccggtcctcggggcctgtgcgtctccggtggtctcaggaaacccagagtctctgcaagacccgcagactcgcgctggctctgggacatgcccgcccatctgagctcccctcacaaattgggttctagccaaggctgcctctccacccgtctcaaacantccaaaacacgtgtcccctcggggccttcgccctactggtccttctctggggtcacatcccccaggcaacctcagatctgttaaatgtgtccgccactctggaggccggcatttgggacccaaatccaaaggcacccagcagcaggctgcggccattgactgagcatgtactgactaagcaggcatttgccgattgcntgctgggtaccaggcactgttctaagcactggattttaaacagcgcggtcagcgacggcctcacctaggaagtggtatctgagcggagaagcgaggtagagaagcgagggggtgagccctgtgggtgtctggggaaaggtgggcctggcagaagacatgcctcatgccaaggcgggaggtgaggctgcacttcgctgtgtttgaggagacgtctggagaaggccggcgtggtagagtggaatgaggtngagtgggatgggagacgacactggagagttgccaaggaccagtcaagttggacactatctaatgtgtgtagaagaggacctggcacacagtcagtattcagtgaatgccagctctcacatattgttgggatgattcactattcccagtccctagagaatgggaactgagatgtgtgactcacttagatcagaggcttctgtccattaagtgatcagtaagtggttcatatgatttattattattattcccaggctacagatgaggaacactaaggtgtgtatatctctcagaacagagatttttataacataaatgctcaataaatggtatctatcatttattattctcactgctattcttgctgttattcccaatttagcgatgaggaaaattgagatagtgaatctgtacagtaagccctcaataaacgttgggtctcacgtttgttgccattattatcccaagtccacagatgaggcccagggagctttagtccccgagtcaccactcgcatccgggcagagctgactccaggcccaggctgtggtcccctgccccactgacaccacctacttgctaaggccagtctccaggaatctctaaggaacttcagtatcctctttgtcatcctctctgtgtcacacaaatggggtcagcctggatattctgccgatttaccactgggcacctaggattcgagtcctggtttccctgttcaccagctggatgacctcaggcaaattgcttnatgtctctaaaacgcagtgaccagctgggtgctgtggctcacgcctgtaatcccagcactctgggaggctgaggcgggtggatcacgaggtcaggagttcaagaccagccttgccaagatggtgacaccccttggtttggtggtggcnggtgtctggantcctagctactcaggaggctgtggcagagaattgcttgaacccggaaggcggaggttgcagtgagccnagatggcgccactncactccagcctgggcgacagagcgagactttggcttttgatttgccctntgttctcctgactcaactgaccttcctggcagggctacttctcctttcattgaaataattgacagctgcctgggaagtcttcactcacttcctgtaacagcttttctcagggcttgcattcaattaccataattctcaagcttcttggcttgtagttcaggttcaaatgtgaatgagcctgggggagctcagtgttgccaaaaggcngaaggacattctttttattattattattatttttatttatttatttatttatttttgagacggagtctcgctctgtcgcccaggctggagtgcagtggcgccatctcggctcactgcaagctccggctcccnggttcacgccattgtcctgcctcagcctccagagtngctgggactacaggtgcccgctaccacacccggctaatgtttttctgtatttttagtagagacggggttttaccgtgttatccaggatggtctcgatctcctgccctcgtgatccgcccgcctcggcctcccagantgctgggattacaggcgtgagcaaccgcacccggccaggacattcttgaaaaaagtaagccagaaagaaacccactgaaaaacagaggagtcagaggaggggcccgaagagatgcaaacatagcacatcctgagtagcaagctagacaaggcatggaagagagagtggccaaagtgactgcagtagaatctcccggaggataataatattactacctaatagagcacactagttagcagaacagaacccagggccagactgtgtttgttagaatcccagctctgctgcatactagctgtgtaacttcaggttacacagttaggttacttaaattccctttttttttttttttttgagatggagtttcattcttgttgcctaggctggagtgcaatggcgagatcacggctcactgcaacctccacctcctgagttcaagggattctcctgcctcaccctcccgagtcactgggattacaggcgcccacctccacacccagctaattttcgtatttttagtagtgacggggtttcaccatgttggccaggctggtctcaaactcctgacctcaagtgatccacccgccttggcctcccaaagtgctgggattacaggcgtgagccaccctgactggccgttcataaagttttgaggacatgtagcatgttacgtttcagagaatcaaaggcatccaccatttcttttttgatctctcaattttgtgttcatttagatttcagacagcaatcaaaacatcaagtacaggtgaatacaatcccaggccaccttttcctgggaacctggatattgagctcttacttttctccattctaggatcttgttaagcagtgatgctaaccagtgagtagaacagtgagaggtccgtgcatattctatttgctgatctaccagctgttttaagggactggtcagtggcagaattaacatatttgccatacctacaaaattcacaagtacctagacttcattttccattttcctacaaaactcaaactctgtttttgtgacctattactcaccgtaatcctacccagcatctttctcattggaatcttgagtaacatttacccaaagattacattagttccattcttcttcctttcattatcaagtcattattagatggagatgatttgaatagcctaggtgcctgttttttgtcttgtagtccttccttggtgttaactctgaaattaatttatctctttttttatttttatttatttattttttgagatggactctcactctgtcgcccaggctngagtgcagtggcacaatctcggctccctgcaacctccacctcccgggttcaagcgattctcctgtctcngccacccaagtagctgggactacaggtgcccaccaacacgcccggctaatttttgtagttttagtngacacagggtttcaccatattggccaggctggtctcaaactcctgacttcaaatgatccacccaccttggcctcccaaagtgctgggattataggcgtgagtcaccatgccctgctaaaattaattgatttcttccaagtgtgtgcagtcatgttttacttctgtgatcagacctatttaagagttataaagattccttccaattgtatcttatgaaagccagtaggcatttaatgaccttcttttctggagtcattgtctttatattttgtgcctcatttttggaaagcctgttttactttccgtgtgtcttcttatttctaaagtcttattaaacctacattatctaaaatgcccattacctataaatttctcttccactctgagattaaatatctttctcagtggttacctttatatttttagaacattttattgtttaaaaatcacagtcaaagcttcaaaaaacatacaccccaaaatatcccaatttcagtatcctactacccagaggagagcacatggctgttcttccccttctggtgcccacagcactagcgaggaccctgccctgaagagaccacttgcccaccctcctgcccaccatatgttaagtcaccgtttctaatacatttatttatttatttatttatttagtaagatggagtctcgctctgttgcctaggctggagtacagtggtgcagtctcggcgcaccgcaagccctgcctcctgggttcaagcaattctgtagcagcgtcccgaggagctgggattacaggcacccaccatcccatccagctaatttttgtatttttaatagagacggggtttcaccatgttggccaggctggtctcaaactcctgacctcaggtgatccacccacctcagcctccaaaagtgctgggattataggtgtgagccactgctcccgggccctaatgcttttataatttagtttatatttgaactatttggaatttattttgtgtctgtacataatctggagagaatttactgaatagcacatgtatccccccaactgcaatgccatcctcgccatataccaaataatcatgtctattttggtcaatttctgaactgtttattctattcctttatctagttacctatttatacacaaataccaaactttttattattatacccttaaataatattatgaaactcacttggtgagacctcctctatattttcctactgtttcagaatttttcaagggtagtttctttcctatgcatactctagaatcatattgtctatttcc

SEQ ID NO: 250315 - DNA, 808 bp, Homo sapiens
attcaaaaattattaagaaattcgagatggcaacagcagttgtcacaccaagcacagtgcccttctgagcatgaggctctgtgtgactgcatgggtccatgagaccagcactgtgtgggtctgaatgatggctttggtgttcagtttagcacacgcggtctaccacgtctgcatgagtggtaaatgtagtgcctgggtcaaaatgttccttctgttcaaatcgaaatacctcatctctatggctctatggctgtacattaggacctagaacagtggcccattgctcttagactggaaccatgtccactaaaataaacctaagcagatgttgtagacctagccccacaggactgcatttagctgcttcagtgacactttgatgaaagtatggagaagtggagacattatagataaaatatatcaattcccagagaaaactcttgacttaaaaacttaactgtagtaaatatatctttttcaggtgatgaattatttttttaaaaaaggttacatataggaattctgcagtataatttggaggctattagtgctatattaatggaaattaattattttttaagtaagtccaaaaaataatctagaaagtaagtttccagagcaaatctgacctagcatttggtatgctaggctctgcttttcatgattttgaaataaatcataattagacttaacaatatggagaaaataaacttgtatttttaagtgttctgttggcttattttctgtttcatccaactcaataattctgataaataaatttggttctagtttggtgcttgaaaaaata

SEQ ID NO: 250316 - DNA, 307 bp, Homo sapiens
  misc_feature (48)..(48): n is a, c, g, or t
  misc_feature (61)..(61): n is a, c, g, or t
  misc_feature (65)..(65): n is a, c, g, or t
  misc_feature (73)..(74): n is a, c, g, or t
  misc_feature (88)..(88): n is a, c, g, or t
gaaaaaaaaaagttttcttttgaaaaatttgtttcttttttttctttntttaaaagaaggntttnaaagaggnnttcccccccaaganaagaataatctagaaagtaagtttccagagcaaatctgacctagcatttggtatgctaggctctgcttttcatgattttgaaataaatcataattagacttaacaatatggagaaaataaacttgtatttttaagtgttctgttggcttattttctgtttcatccaactcaataattctgataaataaatttggttctagtttggtgcttgaaaaaata

SEQ ID NO: 250317 - DNA, 336 bp, Homo sapiens
atgctcactcccactcctgttgcataattcaggtgtgcctctgggaaaagccgttcggatcattgtctttacccacataatccttggtggtgaaggtgtggcctaaggttaattttcaaactgcataaagatatgaagctatgataccaaaaaacagaaggaaaaaaatgccaattatttaaaagactctgggagacagaagaaacccaagatatctttaactgatgggttcccaaatgcctgcccgtggatctatcagttttcattgacctgcagcaagaatgacaaaaaaacaaacaatgcactgaatttttcataaagcttaatttattcaaa

SEQ ID NO: 250318 - DNA, 368 bp, Homo sapiens
gaacatgacccgcaccactcatggggccatgtttgtctcagaaaatgcttgaccacagagcaatgcagttggcaaacaatgaccaaaagataaccagaaaaaaagtcactaaacaagcaaatacaacagcagcggcaaacacaacacatggctgggaggggagatctgatttccagagttgccatatgatttaaaacgtccagtttttcacgggaaaaattacgggacatatagaaaacgaaaaagtaagctgcgcatggtaaaggcaatgtaatttgaagagaaaaaggagatataaatataagaaaatcagatgtgtacatgattcatgtttgcagatgacacaactttattcctagaataaagtt

SEQ ID NO: 250319 - DNA, 647 bp, Homo sapiens
tgagattacaggtgtgagccactgggcctgctcattagttcttgctggtgtaacaggagggcagagattaggccacagtagaaatctacagcctttcagctggaaacaactgtgaaatatcatacactgtgagctattatagtggctttacaatgtttttactgatataatcactatattcattttttttttttttttgaggtggagtctctctgtcaccaaggctggagtacagtggcgcaatctcagcacactgcaacctccacctcctgggttcaagcaattctcctggctcagcctcccgagtagctggcattacaggcacccgccaccatgcccagctaatttttgtatttttagtagaaacggagtttcactgttttggccaggctggtctcaaactcctgaccttgtgatccacccacctcgacctcccaaagtgctaggatttacaagcatgagccaccgtgcccagcacactacattaatttttaacaccttgtactcgctcatatattttaaagttgacatatagaaattttcatcacaactctaaataattacaaaggatatttctggcatcttataaatactgatattataaaataaaacttacattactatttttaatgtacgcaatggagact

SEQ ID NO: 250320 - DNA, 725 bp, Homo sapiens
cacacaggctttaaaaatgattaaattactcgttcagtatgatcaggattatggtcaagtgccttctttctgctcttctgtctgacttgcagctaaaaataaaagtcaggaattagattcttctttttcttctccactgaagagcaccctttgtggtcgctggcgctggttaggaggagatcccctgcccagagccctcatgtggggacaggatcttccggcagcactgggtgttcaaggtagggtgccgggcctttggtttacatttctggatgaagctcttctgctgccctaccctccctctgtctgaggccacccggagtcttccctttgcggcacacagtaagcagctttagtgacacgtttccgggcctcacctcctcagtttgctgagtctccattacatctgtggcaccgtttaagcagcccataatcatttgtggggtaaattaatacagtacatgtctcaggccctcccccaggattggcatagggaactgagaattccacctgtttccctttcctggatccttgcagttggtgaccagtggagaagatggccctggggtttcctcctcagccccaaattcctacatccctccaaaagaacctcagagagcaaaggcagccggacgcatccgaccctggcctccttctcaccactgctgacagaaggagcagaatcttggcagcattgttaggtcttcatctgctattagctgatt

SEQ ID NO: 250321 - DNA, 294 bp, Homo sapiens
ctgggagcaatgcaatgccaagagaggtgtttttttgttttttgttttgttttgtattgtttttaagtgacctaatctaaattgctaaatgaactctttggttatcttatggagaatggactttttgggaagcagggatatgggtttgaagataagttcagtaatctaggcaagagataatggtagtttatagtgtaatggaagttatataatatatatttgtatatatattggtctcaggatatatttttgaatattttttatccttctgatggatgaagatgcaaaaaaaaa

SEQ ID NO: 250322 - DNA, 883 bp, Homo sapiens
ctaaaagtgtgatgtcaagaattgagaatgaaaatttaaaaaaaaaagttgagaatggtactcaagattaactgagtcttaatgcgtggaccacaacatactgatctcctaaagtactagttgtcaattcaagcaaataagtgtcttgaatttcccttccttgtgcataaagttaaagactgtacttcagtattctactaagtctagttgccaagcaatacatgctgtattataagtgttgtcttgaactgatcactatttccaaatgctgctattaccacttcttaaattataaattagtttagcttcatcagcatcagtttggtctcttgtggattcattaaccattcaatgtaattttccaattagtagaacttcagacatgtatgaattgcacttcaaatatgaatcacccatgcttctattactgtagaataaatcccccaaattatgctttacaattacagtcgcccaaattataccttacaattaacaattttgttatcaaaggagccctttttttttttcaccagaaaatggtaacaaatggggaagataagctgtgcgttcttttgcccaacctcagtggggcttaataataccactactcttactgtttaaaactccactgtaaagtgagattgatacttctattgcctgaacattttattgctgttgcagctgaagattgtatagcttttgcctgtaagtcattctttggtaaataatactgttttttaataatatcaatagtaggggtccggtgtggtggcacatgcctgtaatcccagaactctgggaggccgaggcaggcggatcacctgaggtcaggagttcgagaccagcctaactgacatggtgaaaccctgtctgtactaaatac

SEQ ID NO: 250323 - DNA, 571 bp, Homo sapiens
tggtaaatttttttccctagtatcattaaacatttgccacctaactgataaatcacactaactggtgacagtgcagggggagcgggggaaagaggcactggctagatactctggctagatactctggttaacattagtttaacaagaagaaaacagaagcagagactaaaatccaagtttgtgtgcttctaaagcctgtactctttccattatgtcctactggctctatcaaacactactcctgggatcttctcttattcatgtattttatatggattgtgataacacaataaagactttcgttccaaggaacaaattgcctgtatccagttagggctgtggaatctaactccttcaattcttttaacagttgctgtatggcatagcagaaacaacgctggatttggaaataaaaaaacacataactgcatcccattctggcactgcaatgctgacagttacaacttgtgtgagtttaagcttccttggctagaacttagttagtaataataactgtcctatgcagctctgaagtatgttgtaaagtccaaatgaggtaatgtttaagaaa

SEQ ID NO: 250324 - DNA, 627 bp, Homo sapiens
  misc_feature (14)..(15): n is a, c, g, or t
acaacacgccattnncacctcgagcccaagaattcggccaaggaatttgatctctaattaaatccatccaattgatgaatagatggaaaatgcctgcctctcaaaattaatttaattcccttcttctccaactctgtccgatactcatttaaaatttataatcttcccacatccaaaggatgtggaattatacccttcttttaagacatatcaaatgcctcctcttttgagaactttctcctgaatgtaatcttgcctttctctgaaacacaacaatattccatcatagtgagtttatgtgtatgcatggctttgtcttttctttctgccattctcctccccttgcttttctccaagaattagactgtcacttccatgcagggacaggagggggtggttgggcttacttgtatattacagtcccccaaattggcaatgtctttttcatggtggtggtccaataaatatttaagtggaagtcaggaacatctttgttccatatactttaacattaaaaccacaaactcagagttaataatttttttgcagataacaattttgagtgtcttaaagccactgatacatccaatgcaacgtagtattttttttctttcttctaaaaaaaaa

SEQ ID NO: 250325 - DNA, 589 bp, Homo sapiens
actatctcagagtgtctgggggagaaggttgatagatatgtcatctctcaggtatttatccccaaactgcaaatttctgtatgtccgaggaaaggacaaacccattaaacctactttattatttattttccaaactttctgtgttttagttagaagcgtgatagatacagtcaacccttggaaaacttttttaggattttttgttgttaaaatgatgttcgtaaaaacaagccttctataaagatatctttcagtttttatatacccaaattaaagaataataggatagggattataacttttgattatattacaattgaaaacaatatggtcatacaaactttttttgtttttcctttccttgagaaaaatttaagactgaagagaagtacagagaattaaaaaaaaaaaaaagaaaaccctactgtgtttcttctgccagcatttaacaagtgtttatgcagtcatttttaaacttaaagaaagggaaacataacacacaaagttgatgtcctgtttgatacccaccaaccccctgggcaatcactatcctgagtttgggtgtctattattctagtatttaaaaagt

SEQ ID NO: 250326 - DNA, 407 bp, Homo sapiens
cactgcactccaccctgggtgaccaagcaagatcctgtctcctccgccccactcccccaccaaaaagaaacaggagataacaaatgttggcaagggtgtggagaacagggaaccctgtacactgttagtgggaatgaagattggtgcagccattatggaggttcttcaggaaattaaaaatagaactaccatatgacccagcaatccctcttcttggcacacacccaaaggagatgaaatcaccatctcaaaaatctgcactcccatgttcgctgcatcatgggagcacacacacatacacaaaatagaatatcattcagccttaaaaaaggagactctgtcatttgccacaacatggaaggatgtggatgacattatgctaaatgaattaagccagacacagaaag

SEQ ID NO: 250327 - DNA, 714 bp, Homo sapiens
gctctttgttcccctgcctttctgctttgccttgtgcatgcagtgagttcccaacagccttaacattctcaacatcttcatcatccagatgctatgttgcatgtggtggttgaggttgtacacagcaagactccagatggagccatccgcatggtaggtgagtggcatctcccaaggtatgcaaagccatcatgggagccctgcctgtcctgcagacgtgaactgggcatgcgatgcaggagggcctagggtaccgctgctcccggagctctggagcactgatcaggagtgtcgcatgtgtccggttgctttcgaatgcaggaggcgacaagtactagtggctcactcagagacccttggcactttcttcagggaagctatattcatattataaataaacttaaaaaaacattcatatgtatagttagaattgatttgtagggtttttgaactgatgtaacttgggcaaaactgaagttcttatttttgttgttgctaagagacaataaagataaaaataaaataaagattaaagataaaagatttggtatacaaggagtataaatatgaaatgagagggcattttaaaaatgaattaataattttgaaatatatattaatacttgctgacttccaaagtatcatctgtgataatttatctcattgtattccatttcgttgtaccaaacatcctaattgtttggaaaaaaaaaa

SEQ ID NO: 250328 - DNA, 530 bp, Homo sapiens
caggagggaagaccaaggcccaaggagccaggaagttcctgacagtcatttgaaatatctttgcttttctctgctgaatctcatctttagttatgagaccacctctctagttaaaatacataaagtttcttaagcttttctaggggcagggtgattgtaaagtagcatacctgtcgtttgtaaagtagcatacctgtcgtgtgtagtggccattggtgctttcatgcttattttgacaggagacctgtaacaactcagaataggtttgcaagagaaaaactggtattatctcttcctaaagggaaatcattttcttctctggtagattttgcaaatgatctcatattcactaaacctctatttgcctggtctcaaaatggatgtgtactaaaagcagaacattgctagcccaaagctacattttctttaactaccttctataaacaggcctaacgtctagacctttttgcacaaagttgtagtcacaaagtcaagccccttctccgtaataaacacatttaattatatta

SEQ ID NO: 250329 - DNA, 507 bp, Homo sapiens
caggagggaagaccaaggcccaaggagccaggaagttcctgacagtcatttgaaatatctttgcttttctctgctgaatctcatctttagttatgagaccacctctctagttaaaatacataaagtttcttaagcttttctaggggcagggtgattgtaaagtagcatacctgtcgtgtgtagtggccattggtgctttcatgcttattttgacaggagacctgtaacaactcagaataggtttgcaagagaaaaactggtattatctcttcctaaagggaaatcattttcttctctggtagattttgcaaatgatctcatattcactaaacctctatttgcctggtctcaaaatggatgtgtactaaaagcagaacattgctagcccaaagctacattttctttaactaccttctataaacaggcctaacgtctagacctttttgcacaaagttgtagtcacaaagtcaagccccttctccgtaataaacacatttaattatatta

SEQ ID NO: 250330 - DNA, 2081 bp, Homo sapiens
ccaagcgccatgagaggccttctttgctggcccgtgttgctgctccttcttcagccctgggaaacccagctccagttgacaggtcccaggtgtcacactgggcccctggatctggtgttcgtgattgacagctcccgcagcgtgcgccctttcgagttcgagaccatgcggcagttcctcatgggcctcctccgaggcctgaacgtgggtcccaacgccacgcgcgttggcgtgatccagtattcgagtcaagtgcagagcgtcttccctctccgcgcgttctctcgccgcgaggacatggagcgcgccatccgcgacctggtgcctctggcgcaaggcaccatgacgggactggcaatccagtacgccatgaacgtggccttcagtgtggccgagggcgcgcgaccgccagaggagcgcgtgccgcgtgtcgctgtcatcgtgacagacgggcggccccaggaccgcgtggccgaggtggcggcacaggcgcgcgcccgcggcattgaaatttacgcggtgggggtgcagcgcgcggacgtgggctccctgcgcgccatggcatcgcccccgctagacgagcacgtcttcctcgtagagtccttcgacctcatccaggagttcggcctgcagttccagagccggctgtgtgccattgatctgtgtgctgaagggacccatggatgtgagcaccactgcgtcaattccccaggctcctatttctgtcactgccaagttggctttgtactccagcaggaccagaggagctgcagggccattgactactgcagctttgggaaccatagctgtcagcatgagtgtgttagcacccctggtgggccacggtgccactgcagagagggccatgacttgcagcctgatgggaggagctgtcaggtccgggacctttgcaatggcgtggaccatggctgtgagttccagtgtgtgagcgagggcctctcctaccgctgcctgtgccccgaggggcggcaacttcaggcagatggcaagagctgcaaccggtgccgggaaggccacgtggaccttgttctgctggttgatggctccaagagcgtgcgtccacaaaacttcgagctagtgaagcgcttcgtgaaccagattgtggacttcctagatgtgtcccccgagggcacgcgggtggggctggtgcagttctcgagccgcgtgcgcaccgagttccctctgggtcgctacggcaccgcagccgaggtgaagcaggcggtcctggccgtggagtacatggaacgcggcaccatgacagggctggcgttgcggcacatggtggagcacagcttctccgaggcgcagggtgcacggccccgtgcccttaacgtgcctcgtgttggcctggtcttcacggatggccgctcccaggatgacatctcggtgtgggcagcgcgcgccaaggaggaaggcatcgtcatgtacgccgtgggcgtgggcaaggcggtggaggcggagctgcgcgagatcgcctcggagccagcggaactgcacgtgtcctatgccccggacttcggcaccatgacgcacctgctggagaacctcagaggcagcatctgtccagaggagggcatcagcgcagggacagagcttcggagcccatgcgaatgcgaaagcctcgtggagttccagggccgcacgctgggggcgctcgagagcctgacgctgaacctggcccagctgacggcgcgcctggaggatctggagaaccagctggccaaccagaagtgagggccacggacggcccagacccgggctggggcgcggcaccacggacggtgccccttgcgcgccatcggtgcgccggggccaggcagaacctgggcccgtccggcttgggctgtcggggcggaggcgctggcgggcttccggcattgagctgagttggcctcgcccggaccattaggcggactgcggcgtcagggggatagcgggtggtgagggaaggggcacgtgctagaccggcacgccctcgccgcgtgctgcgctcagttctttgttggatttcttgtttgtgttcttaaaaaaataaaaaaaactgatttccacggaaaccg

SEQ ID NO: 250331 - DNA, 1958 bp, Homo sapiens
ccaagcgccatgagaggccttctttgctggcccgtgttgctgctccttcttcagccctgggaaacccagctccagttgacaggtcccaggtgtcacactgggcccctggatctggtgttcgtgattgacagctcccgcagcgtgcgccctttcgagttcgagaccatgcggcagttcctcatgggcctcctccgaggcctgaacgtgggtcccaacgccacgcgcgttggcgtgatccagtattcgagtcaagtgcagagcgtcttccctctccgcgcgttctctcgccgcgaggacatggagcgcgccatccgcgacctggtgcctctggcgcaaggcaccatgacgggactggcaatccagtacgccatgaacgtggccttcagtgtggccgagggcgcgcgaccgccagaggagcgcgtgccgcgtgtcgctgtcatcgtgacagacgggcggccccaggaccgcgtggccgaggtggcggcacaggcgcgcgcccgcggcattgaaatttacgcggtgggggtgcagcgcgcggacgtgggctccctgcgcgccatggcatcgcccccgctagacgagcacgtcttcctcgtagagtccttcgacctcatccaggagttcggcctgcagttccagagccggctgtgtgccattgactactgcagctttgggaaccatagctgtcagcatgagtgtgttagcacccctggtgggccacggtgccactgcagagagggccatgacttgcagcctgatgggaggagctgtcaggtccgggacctttgcaatggcgtggaccatggctgtgagttccagtgtgtgagcgagggcctctcctaccgctgcctgtgccccgaggggcggcaacttcaggcagatggcaagagctgcaaccggtgccgggaaggccacgtggaccttgttctgctggttgatggctccaagagcgtgcgtccacaaaacttcgagctagtgaagcgcttcgtgaaccagattgtggacttcctagatgtgtcccccgagggcacgcgggtggggctggtgcagttctcgagccgcgtgcgcaccgagttccctctgggtcgctacggcaccgcagccgaggtgaagcaggcggtcctggccgtggagtacatggaacgcggcaccatgacagggctggcgttgcggcacatggtggagcacagcttctccgaggcgcagggtgcacggccccgtgcccttaacgtgcctcgtgttggcctggtcttcacggatggccgctcccaggatgacatctcggtgtgggcagcgcgcgccaaggaggaaggcatcgtcatgtacgccgtgggcgtgggcaaggcggtggaggcggagctgcgcgagatcgcctcggagccagcggaactgcacgtgtcctatgccccggacttcggcaccatgacgcacctgctggagaacctcagaggcagcatctgtccagaggagggcatcagcgcagggacagagcttcggagcccatgcgaatgcgaaagcctcgtggagttccagggccgcacgctgggggcgctcgagagcctgacgctgaacctggcccagctgacggcgcgcctggaggatctggagaaccagctggccaaccagaagtgagggccacggacggcccagacccgggctggggcgcggcaccacggacggtgccccttgcgcgccatcggtgcgccggggccaggcagaacctgggcccgtccggcttgggctgtcggggcggaggcgctggcgggcttccggcattgagctgagttggcctcgcccggaccattaggcggactgcggcgtcagggggatagcgggtggtgagggaaggggcacgtgctagaccggcacgccctcgccgcgtgctgcgctcagttctttgttggatttcttgtttgtgttcttaaaaaaataaaaaaaactgatttccacggaaaccg

SEQ ID NO: 250332 - DNA, 1835 bp, Homo sapiens
ccaagcgccatgagaggccttctttgctggcccgtgttgctgctccttcttcagccctgggaaacccagctccagttgacaggtcccaggtgtcacactgggcccctggatctggtgttcgtgattgacagctcccgcagcgtgcgccctttcgagttcgagaccatgcggcagttcctcatgggcctcctccgaggcctgaacgtgggtcccaacgccacgcgcgttggcgtgatccagtattcgagtcaagtgcagagcgtcttccctctccgcgcgttctctcgccgcgaggacatggagcgcgccatccgcgacctggtgcctctggcgcaaggcaccatgacgggactggcaatccagtacgccatgaacgtggccttcagtgtggccgagggcgcgcgaccgccagaggagcgcgtgccgcgtgtcgctgtcatcgtgacagacgggcggccccaggaccgcgtggccgaggtggcggcacaggcgcgcgcccgcggcattgaaatttacgcggtgggggtgcagcgcgcggacgtgggctccctgcgcgccatggcatcgcccccgctagacgagcacgtcttcctcgtagagtccttcgacctcatccaggagttcggcctgcagttccagagccggctgtgtgtccgggacctttgcaatggcgtggaccatggctgtgagttccagtgtgtgagcgagggcctctcctaccgctgcctgtgccccgaggggcggcaacttcaggcagatggcaagagctgcaaccggtgccgggaaggccacgtggaccttgttctgctggttgatggctccaagagcgtgcgtccacaaaacttcgagctagtgaagcgcttcgtgaaccagattgtggacttcctagatgtgtcccccgagggcacgcgggtggggctggtgcagttctcgagccgcgtgcgcaccgagttccctctgggtcgctacggcaccgcagccgaggtgaagcaggcggtcctggccgtggagtacatggaacgcggcaccatgacagggctggcgttgcggcacatggtggagcacagcttctccgaggcgcagggtgcacggccccgtgcccttaacgtgcctcgtgttggcctggtcttcacggatggccgctcccaggatgacatctcggtgtgggcagcgcgcgccaaggaggaaggcatcgtcatgtacgccgtgggcgtgggcaaggcggtggaggcggagctgcgcgagatcgcctcggagccagcggaactgcacgtgtcctatgccccggacttcggcaccatgacgcacctgctggagaacctcagaggcagcatctgtccagaggagggcatcagcgcagggacagagcttcggagcccatgcgaatgcgaaagcctcgtggagttccagggccgcacgctgggggcgctcgagagcctgacgctgaacctggcccagctgacggcgcgcctggaggatctggagaaccagctggccaaccagaagtgagggccacggacggcccagacccgggctggggcgcggcaccacggacggtgccccttgcgcgccatcggtgcgccggggccaggcagaacctgggcccgtccggcttgggctgtcggggcggaggcgctggcgggcttccggcattgagctgagttggcctcgcccggaccattaggcggactgcggcgtcagggggatagcgggtggtgagggaaggggcacgtgctagaccggcacgccctcgccgcgtgctgcgctcagttctttgttggatttcttgtttgtgttcttaaaaaaataaaaaaaactgatttccacggaaaccg

SEQ ID NO: 250333 - DNA, 482 bp, Homo sapiens
agtgttttaggaagttgtcccagctaagattttagctgacagttgagatcaatcactagacagacaagtgagtgaatcttcagatggtcccagcttccagctgttgaatcttcctgctgagctccaaaccttgtgaacaggatgattaagttatctctgctatgctcatgagcgtaagaagtggttgttttcagcttactctaagttttgggggtgattcgttatataactgtattaaccacaacatcatgttccatttttaccttcgctgtcaggaaactcaaggtcaaatttattccttaaatacagcaactgcaatagccttaagtgttagaacaactactttttaattttataacactgagcatatatttctattttattaatcttattttgtctttcgttgaaaaaatatgaagtgtacataaacaacaaaatgacccctacctaccccctaataataaaagtatgaatttaatacc

SEQ ID NO: 250334 - DNA, 733 bp, Homo sapiens
ggtgcaggttttgcaaaaacaaaccattgatttggaaatcataaatatattctaaattttaatatagttacttatgttaaacataatgtgttaaagttttagcatattctttttgactaatcattagttacttatgttaaacataatatgttacatttttgacatattcttttgactaattaatcatttcctttttaaactcggagaggcaatggggggtacagagtgagacaggaaggcagcctctgtaacaacctgaggactcatggttggggaaagatgtcatctacttttagtcaagagataaatgttttacctgctaatagggaaacccacccaaaagcacagagaaaagtctggtcaaaacattgcattgcatctaataaaaactaattaactggtttaaaagcaaaagatcccttggtactgcaaaactcaatcgctttcacaataaatagataaactgctttgtgggaagaatttactaatacatggaagaacttccattagaaactacatgtttatttgatttcttaaaacgtatttaggcataatgtgtgttctaattattttcatttcttgaagaatatgtattcttatacaattcttattgttgacaactttgtggctacacttttgtcttttcttctttccttcctttctctctattatgccttctttttccccttttttcttcgtcaaaattcttaagccttctaaagtcaatcctgtc

SEQ ID NO: 250335 - DNA, 400 bp, Homo sapiens
atttgtttttacttttttgaagttcttatttccgccactttgcttttcaagtcatcctttgctttattttttaatcccatcctgtcatctttttctctttctttcctcttttatttttctgctctaattcatggagacagcatcttcctgcattctattgagaatgtccaagagatttttaaaaacattcttcagaactttgggaagatactttttctttctttctttctctttctttctttcttttcttctttctttttctttctttctttctttcttctttctttttctttctttctctttcttttctttctttctttctttttctttctttctttctctttctttcttcctttcttcctttctttctttcccttcctttcccttcctttcccttctt

SEQ ID NO: 250336 - DNA, 520 bp, Homo sapiens
tggctgagggagggaggtccctttgcaccatgcagctcccaggtgaactgtcaccccaccctgcatttctttgttctccatggatgatgccatccacctagtcagtcccaatgacccagagaaaatctgtgtacctcagttggaaatgcagaaatcacttgccttttgcattcgtctcagtgggagctgctgaccagagctgtttatactcagccatcttgggcccttctccagttcataattttatgtcttctattgtacagctttacttattttgtctctgttttttgttattgaaagagtgttgctgaaatctttgactgtaagtatgcatatccctatttacaattgtggatatgcctatctcattgaagttctatcacagtatttttgttattattattgtttattaatatactgcagggttcaccttgacaatttttcattattgtttatgattgaacaataattttctcattattgttttgttatgttgaactcattaaatcagtttggatag

SEQ ID NO: 250337 - DNA, 657 bp, Homo sapiens
cgccaagagcgcacagactttgaagcaggaaaagacagtctctagagcaacatggaaaggatccagtatttgttttcaggcaaaagcaagcctccaaaagccccttggttcttctctgtgtgtctcgccccttctgccttgtacaccagactgccggcaagcaagcggggaggtggcgaacagctgggatcctccagtgaaaagtttgctcagcgcgagagatgtcaagaggctgggattgtcgcctatcgggaggtggggagctctctcactcacacttcctgggaaatgaaggagaactaataggcagcccgcatttgcagccagccagcctgggtggtattccttgaagtgaagcgctcataaatcccttctggggccagagccggtttcacaagctgcaggatttgggtggcctgcctgctctttgggagcgggcttgggaagctgaagaaattgaatcaggacctcaggccctttacagactcccttctacacttggttgctgattaagaacattatgtggcatttaaaatggcacaattatcttccgttggccgttcctagctaaaagtagactcctatcagcccgtgactgacgacaagaaggctcttcgtccctgtttttgaaataaacatgggtataatctgaaaaag

SEQ ID NO: 250338 - DNA, 691 bp, Homo sapiens
gtggggaacgagcgccgggttccgtccaagcactgtgggagcaggaaaccccgagactctcggcgaagaacgtctctagagcaacatggaaaggatccagtatttgttttcaggcaaaagcaagcctccaaaagccccttggttcttctctgtgtgtctcgccccttctgccttgtacaccagactgccggcaagcaagcggggaggtggcgaacagctgggatcctccagtgaaaagtttgctcagcgcgagagatgtcaagaggctgggattgtcgcctatcgggaggtggggagctctctcactcacacttcctgggaaatgaaggagaactaataggcagcccgcatttgcagccagccagcctgggtggtattccttgaagtgaagcgctcataaatcccttctggggccagagccggtttcacaagctgcaggatttgggtggcctgcctgctctttgggagcgggcttgggaagctgaagaaattgaatcaggacctcaggccctttacagactcccttctacacttggttgctgattaagaacattatgtggcatttaaaatggcacaattatcttccgttggccgttcctagctaaaagtagactcctatcagcccgtgactgacgacaagaaggctcttcgtccctgtttttgaaataaacatgggtataatctgaaaaag

SEQ ID NO: 250339 - DNA, 217 bp, Homo sapiens
actccacccgctgcagtggcatggttgtgcctctgcactctgacagaagactggctatgcagctgtccagtgttgaacacagccttgcattgtaattgcttaaatgtctgtttctccaactgctctatgaccttgttaaagatgggaaccatgtcttagtttgcttacccctgacatagaggagcctcaataaataataaatcttaaaagtttaata

SEQ ID NO: 250340 - DNA, 195 bp, Homo sapiens
caagaaatggcatcttagtgtaattataatttgcatttctcttatgaattaagttgaatttgcaaaaatatgcttaaggcacatttttacacccattttcggtgaattgcttgttcgtgtatcttactcatttttctagaatgtctagtcccctttttcttcactcgatataaaaagtattttttaaatattaga

SEQ ID NO: 250341 - DNA, 298 bp, Homo sapiens
gcttgaaccagagaggcggaggttgcagtgagccaagatcacaccactgcactccagcctgggcgacagagtgagactccatcttaaaaaaaaacaaaaaacaaaaaaactctgttgcctacttgagaacatccaaacccctgtgctaagtcaaagcctttcaagccatctgctgccttctctcccaccccatcttttactgttccaaccagattctctactctggtctcactttggtaaagttctctcaacttttccttgttttactgtctttgctcacactgtcccctccatctat

SEQ ID NO: 250342 - DNA, 288 bp, Homo sapiens
atgagaaatttccctctagaattgtattttgatggaaactgatttcctgtattggataaataatggacaatatgtacgcaactttagctcaagaaacatcatcagatttcccccaacctgaggccttctctgcacatgccagaacatctgcaggaaaaaagtgcctggggcaggtacagggtcactgtgtctacacagtgctagagcatctgtatatttgaaaacattcagacaattaactctatttttcactttttgtcacatagacccagtttgagtttaacgaaa

SEQ ID NO: 250343 - DNA, 592 bp, Homo sapiens
cagaatgtaaggtttcatgatgttttgaattatacgtgtgtgcatgtctgtgtatacccacatatatttctggattatatatgtatacatgtaaatatatacaggcatattcagcaaaacatacttgaaaaaatacattaaagcattaaagtgttaggaagggctatgtctgaagtggaattaaaaatgatgtttcttctcttcttccttgcctttctcaaattatctaaagtgagcacattgtttttgtaaccaggggaaataaagatttgtttaaaaagccaagttaaaaaaatcaggccgggcacggtggctcacgcccataatcccagcactttgggaggccgaggcaggtggatcatgaggtcaggagatcgagaccatcctggctaacacggtgaaaccccatctctctaaaaatacacgcacacacacaaattagccgggcgtggtggcaggcgcctgtagttccagctactcgggaggctgaggcaggagaattgcttgaacccgggaggaggcggagcttgcagtgagccaagatcgtgccactgcaccccagcctgggtgacagagcaagactccgtctcaa

SEQ ID NO: 250344 - DNA, 633 bp, Homo sapiens
taattcaatgccacacagccagtacaaggcagaactttgtgattcaattccagatctctcttactccagagccagtaccccctaaagggcatagtcaaaagaagcaaatagaaagttgatagaagtgcagaataataagagtgaaaaatgtgatgacctttagcatagaaatggcttaaccttctggggatgaaaactagcagctgagctacacaaggtgcctctgtcaaacagctctgtcgaataatgcttttaaatgcgaccaatagatatacatgagccaaaacaaggaggcagctggtgctaatctgattcagtactttaataggggaaagcaccggagcaactattttatagtctttttatatatttatctgtaactaagtatatataaatgttatgaacatgaagagagaattgctgactcaccatcaagtgacatttcagtgaagactgtatatcaagtaggaaaagaaattacatgggtatattcactgatggagccagactgtgaccacccagagtaaggaccagaaccatattcttagtaattattcactctgaatgcacaaagaatttatttcttgaatttctgatcattttaatataatcataaaaatggcgattttgaaa

SEQ ID NO: 250345 - DNA, 424 bp, Homo sapiens
gaaattcctgtgactgcagtcatagtaataatctaaggagcccaaagtatgagttaaatatgaaagatccatttttttctttaatgagctgtaaattgaaggggagaagactgtgtagaataaatattctatataccttgtgacccagaatgtgaaaatgatgacagagccatttttctaactgggcaacctttggaattgtccaaaaatgtattaaaggtagctatttctttaggaaattcaattttatagaattcatcagtgtcttctaaggtatgtgaggctgatctgcagttattctaaaatgtttgactattatttttactaaatttcacggacaatgtaactttttttctcttgtggcttcttaaagggaagaacatctggaatttattaaatatgccaaggggcttctgagacttaa

SEQ ID NO: 250346 - DNA, 388 bp, Homo sapiens
gaaacccagccaccatgctgtgaggaagctcaagccacacagaagccatggagaggtgctccttctgataacccctgctaaagtcccacccagcagccagcaacaatcactagatatgtgagtgggaaagcctttgagatgacctcagtcccagcaccatctaaccacaaccagggaaggattctgagcaagaaccacatagctgatcccagttaatttccagaacagtgaaagataacaataaatgattgccattagaaatggttagtgtgaattagttcctgtaaaacttgatcactccttgaaccctggcaaaaaaaaattaaattaaaaattagctgcttgacttgtctgatttgactccaaaatgaataaacttcactcttat

SEQ ID NO: 250347 - DNA, 262 bp, Homo sapiens
tgcccacccttgaccttagcaacctcaaaggctggaacaagaagacactgtgcagtttttaactccacttggcaccacacatggctgagttctggctggaatcctgtctgaggccaaggggtaaatttgaaatgagtgttagtacttctctaagtcacatcacattcagttctttgaataacagtcatgaaatggtcatgggtcattttgctgaagattcttatcaaggattgataaaatataatttatatataaagctttt

SEQ ID NO: 250348 - DNA, 287 bp, Homo sapiens
agagccagccagtcaccaagtcctgcctcttcagcagccctatttactgcctcccatccttcctaggagggtcaggtctccacctgctgtcacctggaactctcaaaatctcgtaaaaacatttcctgcctccagattcacctccctccaatccaccagcctagtcctcaaactgttgccagagagatctttatttcaaaaatgtgcacttagtcaggttccattgctgttcaaaatccttcaacagctccctgacaatctgcagggtgaagtccaaacatcttaat

SEQ ID NO: 250349 - DNA, 3387 bp, Homo sapiens
  misc_feature (1)..(1): n is a, c, g, or t
  misc_feature (1034)..(1034): n is a, c, g, or t
  misc_feature (1051)..(1051): n is a, c, g, or t
  misc_feature (1425)..(1425): n is a, c, g, or t
  misc_feature (1780)..(1780): n is a, c, g, or t
ngatcaacaactgtcagctcccagtcagagagaaagggcctcttcagtctgtctcaggagactgggagaaacagcataaaggaccccacaaggaagggagaggtaccctgggtcaggcgcttgtggagagagggcttcgcatgtaaagtgacgtcagggaaaatagaacagaaaaaaagccagggccagcccagaggcacctgagaagaatcagacccacagctcagcccagccctggcacagagaagagacaggcctggcagcacccagggaccccctttcctcagcctccacctgcaggacagcaggagcactgatgcgctgaaggtacgttctggagtctggaagcagcagaactgaaggaagtaaacacgggtgtctgggaagacccctcaagctgcagtaaagcccaggactgaattggccacctgaggccaagggtggcactccaacctcctcctaaaggctggctagagccacaggaaagggccagaagccagagaaagggcaaaggtggacccctgcctccaaacctcctctggagactgacctcctctttcctgtgccttattgtttctccctcttctctttgttcgccactgggcggtgacctcagggatcctggcctaacctggtgattgtgcaggcaactgtgtccgagaagacccttctctggaagattgaaccccaattcagccatggtgactcctttgatgtcaaactggtaagggctgagccgtgggcacaggataccactccttccagctcttctgctgtgacctgcccatggaagtccctgtggacacgaaatcctgtttggatcatctaactggaggctctctgttcttcacctccacgcgccctcttgaccccaggaggttcaggggaggaagtacgccactctccactggcaccctccttggcctacacagagtcacccctgagcccctcaatgtgtgctgaggtgggccctgctctctgcaggggtatggagagaaatagcttggggtgctgtgaggccccgaagaagctgngcctgtccttctccatngaggcgatcctaaagaggcctgccaggaggagtgatatggacagaccagaagggccaggtgaagagggccccggagaagctgcggcctcaggctctgggctagaaaagcctccaaaggaccagccccaggaaggaaggaagagcaagcggagggttcgtaccaccttcaccactgagcagctgcatgagctggagaagatcttccactttacccactacccagacgttcacatccgcagccagctggcagccaggatcaacctcccagaagctcgggtgcagatctggttccagaatcagcgagccaagtggcggaagcaggagaagattggcaacctgggggctccacagcagctgagtgaagccagtgtggncctgcccacaaatctggatgtggctgggcccacgtggacatccactgctctgcgcaggctggctcctcccacgagctgttgtccatcggctcaagatcagctggcctctgcctggttccctgcctggatcaccctcctcccagcgcacccatgggaaacacagcctgtcccaggtcttcccatccatcaaacttgcatccctgtgctatgcatccttccacctccacaccccaaatggggcagcatctgtgctacttcaacatagagattggacatgctctccccaaatgagccactttcctctccaggtgaaggcaggtagcagatgtgccctgggcctctggggaaatcgatntcacaatccaaaaatggcccacagcccaggaagctaccctgaacatgccagttggaaggctgcaccagactcaaaagcaaactaaacaataaaggacagctctcttctctcctggctaaagctgctctcctggttcagaagacaggctggatgagatctcaggccgagctctgaaatagggaggtaatcctccagcacctgtgtttcctctaacttgctgtgtgacctccagccggtcactcaccctctctggacctcatctgtaagaggagccagctggataagatgatttctgaagacgcttccatggtgggcactgaggcacagaggaggccaaggagaggttgtttgttcatgcatgcattcatccgtgacacatgagtacctactgaggactccataaacagaacgggatacagagataaacaatttgggttctgtccacgtttgtcaaaaggtggtgctggcccacctctgaaagcagaacacttgctcaacaaccttgctgttggcccaagtctaacacattctttatgactgtgagcatctcagagtgagagaaaaatgtagaaagttttttaaattctaaacaggatttagtgtctttagttatcttgctggatgggaaagggatgttgtcatttctggcacaaatgaaaagtaggacggaaagctcctttcattcagtttatctttccaggatatatgaaaagggaccagctggaagactagcctcactctgtcctcgaaagcctgagctttcattcaactccctatttccatgcaaagacgctgggcaaaccacatgttctgtctgagcctcagttttcctatccataaaatgaaggtagccaggcctgcctcaaagagcattcaggaggctctgagaggacatgagagtattttgcaaagtgagggcaaggcccagtgtggagtgatattgttattccaagattccactgcaaaagtggctgctttggatgccagcccaggatgagtagttcctgttctcagggaggtcatccgctgagcatcccttctgcacagatgtctctgattcttgtccttgcaggtggaggacagggcctgctcccctaagctgggaagcctggaatgacctcttgcacaagcctaaattccaggaatcttccccaaatcccagatcctctgcaatctacctgcacccctgacccacccaggagttggaccgggagttgggaagcctaggtcttagtcctacactccttctaatttgctgtgtaaccttaccattaatctctctgggtctcagttttctcatctgtattggaggtagcagtgctagctctgccttcaggcatgcaatatgccagaactacagacaacagcccacaggatgcaaaagtgctttgccatcttaaaaatgccagatcactcagagcctatgaatgtggatatcaacaccaggtctctagcaccgctggatgaaaggagaaggctagaggctgagggaggaaagagcagttaacaaacaaaggcagtagctcatcacttgggtagcaggtacccattttaggaccctacactcaaatgtgcaaaataaaatttctatcattttgctataaaag

SEQ ID NO: 250350 - DNA, 614 bp, Homo sapiens
agcggagagagagagagagaggaggcgagggaagagcgagcgcggggctgctccgaagccagcagaacctcctcggacagcggccccagccgggccccagcagctcgcgtggtcggaggagaagcagctgccacagctgccgcccgagcccggcctcgcgcgccccttgccgccggctcgccggtgcctgtgcggccccaggacgccgctgcccgctcggcggccgggatgcagccggggcatggccgccggcccccagtcacctgccgcggggagcgctgagcccgttgaaattctgcctctgagaagctaacagtcttcctgtggtcgccactcctccccagcagccccctccttgccaaggacggtccagaaggagccccactggggcctccccgctcagcaaagcagacctcacctcccactaccagcttgaagtcacagcagccagaggaaattctgccaccattttcccaggtctgcagcccctccagctgggaacctgctcctggagccatccctctgcaaacagagagcccagagtgcctcggggaaaattggctgaataaaagagcgatcaggacgccacggctccgctgaagcgatgggccagg

SEQ ID NO: 250351 - DNA, 749 bp, Homo sapiens
agcggagagagagagagagaggaggcgagggaagagcgagcgcggggctgctccgaagccagcagaacctcctcggacagcggccccagccgggccccagcagctcgcgtggtcggaggagaagcagctgccacagctgccgcccgagcccggcctcgcgcgccccttgccgccggctcgccggtgcctgtgcggccccaggacgccgctgcccgctcggcggccgggatgcagccggggcatggccgccggcccccagtcacctgccgcggggagcgctgagcccgttgaaattctgcctctgagaagctaacagtcttcctgtggtcgccactcctccccagcagccccctccttgccaaggacggtccagaaggagccccactggggcctccccgctcagcaaagcagacctcacctcccactaccagcttgaagtcacagcagccagaggaaattctgccaccattttcccaggtctgcagcccctccagctgggaacctgctcctggagccatccctctgcaaacaggtgtcctctcccggagaagctagccacaactctcccagcaccgcctctgtgctttctgtgctcgcccatcgtgaagccagcctatgcctccagtctcttctctaccaggagggagcagctaaaagctgagatttgttgcaatttacttttgtcccccacccatgccttcacagtgcccggcacttatttggtgtttaataaactgcccattaaatgc

SEQ ID NO: 250352 - DNA, 454 bp, Homo sapiens
  misc_feature (221)..(221): n is a, c, g, or t
tatgagtctaggtggcagtttctaattagggctgtgaccttgaccatgccccctaccttcctgggcctcaggaaatgaagatggaaccagctccactcataactgagcctggagacttcatgtttctagacttactgagattcttggatgacacatgccaattaatccagttaatctttttcttatcagcaagaggcaagaggaaagtgggggcacggggnaaggtgaaattatttatatcctcaattttatatgtttttctgggcaatgttttaagcactgcacataccatatatctgctagaggtgcccagcaatgtgagacaaaactcatagcaggcaatggaatgaagagccacctcctctgagctacaaaatcattgctatgctaaaaactataattctacgaggtctatgacttttttgtccttaatatgtgctaagtgttacccaaa

SEQ ID NO: 250353 - DNA, 220 bp, Homo sapiens
caccatttcttcaagaaactcctatgaccatttgtttcagattaagcattagtatcagagttactgtggtaccttaagattacccccaaattcaaaagctacacgaaaaaagaataattttggctctctctcaatagtaatgtaatccttaacagttcaaaattatccctagctatatgttactataaactatttttaagacggtttttaatgaataaga

SEQ ID NO: 250354 - DNA, 236 bp, Homo sapiens
gtcagccactgagttaaaagatcaagtccaagccattaaatgtaacatctaacagtctccatgacctggcctctttaatttgtaaccttccaccctttactttgaacttttctgccaagagcactgagcttcctttatgtttttgcccatagttgggagccccctatctggaatatgctcttacccctttgctggtctagctcctactctatttttattttttggaaacagtctcg

SEQ ID NO: 250355 - DNA, 383 bp, Homo sapiens
gggaaggcctccaaaaggaagtgactttaaaggaattaggcaggagattagggggatactagaggtagaggtgggggaaggaggaacaggtaccaacatacgcaaaggtctagaggtgagaaaggaactgaatacagtacaatctgactgaagattagactgtgaatagagggcagagatgaagttggataggtaggcagtgcccaaaccgtggaccccttacaagctaataattaaacatgtgtttgagcacctactatgtactaggtgctgttatgggccctggggttttgctagttatcaaataagaccaaaataagactaaataatccctgccctcttgaaacttatagtttagtggatattaagaagaagaaaaaaaa

SEQ ID NO: 250356 - DNA, 360 bp, Homo sapiens
cataaaaaggaatgaagtactaatacatgctacgacatggatgaaccttgaaaacatcatactaagtgaaagaaaccagatacaaaaggtcatatatgatcatatattgtatgattctatccagaatagacaaatatattgagatggaaagtggattcatggttgcctagtgctgcgaggagtggggaatggggaatgagtgcttaatgggtatgggtttcttggggtgatgaaatgttccggcactaagttgtggtaatgactgcatgactttgtactaaaactactaaattgtacactttaaatgggtgaattgtatggcatatgagttatttccaaataaagagtattatttaaaaa

SEQ ID NO: 250357 - DNA, 341 bp, Homo sapiens
gcctggatgaggggcatgacatggaggacatgccctgagtgagggtgtgtggtgagaaagcagctgaggacgggttctgtggacagctttatcacagatggaggagatgacagtgaaaggcctgcagcatggctggaggaaaggaaagcccgaaagaggtcggtctgggaagcaggagaatataggttcttcccttttgaagtattttaaacaagcccatcatgtttctattctgcccttttcctcataaaatcaacaagaggaattgcacagttgaaagacttaattgagcatagtttatttggcttggcaggcttctatgattttttttttctctcctg

SEQ ID NO: 250358 - DNA, 363 bp, Homo sapiens
ccagccatatttgcagtgcccagtagctgcatgtggccagcaaccctgatactggatggtgcagctctagaagattttcctccaagaaaggggggctttttcctccccacaggagccaggtccatctggtctggatgcctccaagctgcagaatgtgttctttgcctgagccaaagcctctctcccctgtgcctccccctccaccagccagcgctgccctctggggctctcccttccctggacagtctctgtcaggtgtggacacgattggggcatgtccccctggaattttctccaagtcaacccttgagtgttggtttctccccctggacacaggaggaagatccccaatgatttaataat

SEQ ID NO: 250359 - DNA, 416 bp, Homo sapiens
acctactttgcagtgtttgaggatgaaaggagctgagacagggtcctcgctctgctgtgcaggctgaagtgcagtgatgtggtcacggctcactgcagcatcaacctcttggactcaagcgatcctctcgtgttggctgcctgagtaactaggactacaggaaccgtgcgaatagttgaggcaagaacaacatttgacgttatcctttttgaactgctcctggccttaaactgtcccaaaatgtctcttctttggatggaatctccttgttctgcactcaaaatgaaacctgaaagagactacgaaacacactcaagcaactccagagctcttgagacaattacgtgattgtgctctgccttcaaaaagggtgatcccccgctgcaaaacaaggaaacaaaaccaaaaatcacaca

SEQ ID NO: 250360 - DNA, 192 bp, Homo sapiens
tgctaaaatatttacatggctacagtccccaacccccaaacatcagaatcaaagagagatttttctttctgaatgggaggtatgggaggagtgagtttatggcaggagttaggatagtgtgcagcataatgtgctcttcacttgtaggtgtctaaatgcacagctgtcactaatctggcataatgaaatagg

SEQ ID NO: 250361 - DNA, 348 bp, Homo sapiens
gtactattcattcaaggagttaataggtaaaccagtttatccatcactaacttgtttttatagcatcaacatggtgtaaagacaaaaacaatcttgaactctagtaactatcatctatatttaatgcctctatgctacaacagtaagactctggatgattatcagtaccacttagaattagagcttcttgttaaataattcatacatttgatggggaagagcttcaaacaatgctcaaagctccagtaattaatgggctaattacgagatgcttgtaaaatggcttaaacactgaaagttcagtgtaggtataattgttttagagttaaccctgtgtatttaaatgtc

SEQ ID NO: 250362 - DNA, 325 bp, Homo sapiens
tcacccaggctggagtgcagtggcgcgatctcgactcactgcaagctccgcctcccgggttcacgccattatcctgcctcagcctcccgagtagctgggactacaggcgtccgccaccacacccggctaattttttgtattttgagtagagatggggtttcaccgtgttagccaggatggtctctatctcctgacctcatgatccgcctgcctcagcctcccaaagtgctgggattacaggcgcgagccacagcgcccagccagaattgactcttaatgcttactgctagccttaaacagaagcaattcaccccaagaggcaggg

SEQ ID NO: 250363 - DNA, 521 bp, Homo sapiens
atgcagcttgtgcaaagactaaaacaccatcaggcagcttttccaaagcacagaaatggctggaatccacctgccccatgcccttaagagcactgaggtaggctggagcccagccttttctcttgtcctctctgcccaccactttctgggccctctgactgatgcctggatttttaaaattagtatttaaaatgttaatagttttttgcatataggtcatagacacttatctgaggttattcccacatagtttatatttttgtgttattacaaatgagcattccttgcccagtgtactttctcactggctatgaaagatatgcttttcatttttgttcatttatttcataccctgccactctcctgagctaatcatatcaggcagcctttaagctgatccctttggattcccagagatccaatcatcatgtacaagaaagataattatgcttctttttaaaatatatcttgcttgttttgtgttttattttttgtccagaacttctcaaatgtgactgcat

SEQ ID NO: 250364 - DNA, 485 bp, Homo sapiens
cacacttatttaaaccaaaaagtgtagagaacattacatgttcatcttaatacaagtgctgtttgttttagaagggttatcatttgaagtatagatctaagacattttagaaatattcatgtaaaaggatcaaaaattgctttgggggctgggcacggtggctcatgcctataatcccagcagttagatagagaggcctgggcgggaggaacacttcagcccaggagttggagaccaagctgggcaacatggtgaaactccgtctcccctgcccaacctcccccaccgccgcctccccgcccaaaaaaaagctgtgcgtggtagtgtgtgctcttgtggtcccagctgctcaggaggcttgaggcgggaggattgcttgaacccaggacccaggaagtcaagactgtagtgagccatcattgcaccacagcactccagcatggccgacgaagtgagaccctatctccaaaaatgaaaaaaaaaaa

SEQ ID NO: 250365 - DNA, 395 bp, Homo sapiens
cagggtctcactctatcacccaggctggagtgcagtggcgcaatctcagctcacagcaacctccacctcctgggttcaagcaatcctcccaccccagcctccccaataactgggacaacaggcatgcaccacccatgcccagctgatttttgtattttttggtagagacgggggtttcaccatgttgaccaggctggtctcaaactcctggcctcaagtgatctgcctgcctcggccttccagaatgctgggattacaggcgtgagtcaccatgcccggcctagattcagcatttctaactagctctgactgattggtgcacataccacactctgagtactcaggaattagtgaaacataacttccctcacctttcagatctctggagtctagca

SEQ ID NO: 250366 - DNA, 463 bp, Homo sapiens
tcatatttactgattttaatgccctttgaaatatatatgtaataatttaggtaactgcctagtgctggacatttctagaattcttacatgaactttgttgtatttatatttttccttctatagggtttccttaaagcagattattaaaaaagagattaatgggccaaagttcttacaaagataacgtgatttttgtttgtgtgttttttgatatgtatttccacattgctttccaattaaaacctgtagcaacaagtgtgggtctgtcagattcatcacatcttcatcagcttggggtgggtttttgttttgttttgttttgttttgctattttgcaaaatggtagaatcagtggagtttttatcttattattttttttaattcttattgatatcattatgttccatgtctcatagtgacgtgatcaagcatactttaaaataaaggcaaatactttgaagta

SEQ ID NO: 250367 - DNA, 436 bp, Homo sapiens
tacatattaatggatttctttttctttagaaagtatgtttctaaataattaaaacattagaatagctggagaagctaattttgtacgttttgtttttccttctccatctaagagagttatgtgaaaattagtataactaatactaaatagttataatggaatttatagaaacagatcactcattttctaagtataaaatattaggctacacgttaagagaacttaatccagaaaccatcagactttagggactcagaaattgtccaaaagattaaagggagttattagtgtaaagtgtccttaacctagaggccacagatgctgtgaaattattttgcagaatttttcaatgcatattcatttttctggaacaagaatctgtagttgttatcagacttgcaaagtgattcgtgaacatccccccttcaaaaaaaaa

SEQ ID NO: 250368 - DNA, 692 bp, Homo sapiens
  misc_feature (605)..(605): n is a, c, g, or t
  misc_feature (680)..(680): n is a, c, g, or t
catagtattaataccatcatgtatatataccatattttctttacccattcatctgttgatggacacttagcttgattccatatcttgactatcgtgaatactgctgcaatgaacaggagtgtagatacctcttcgatatacagattttatgtcctttggatatatacctagtaatgagattgctagatcagatgatagttctatttttaatattctgaggaacctctgtactgttttcccataatggctgcaccattttgcattcccaccaacaggtgggaagggtatcttgtggtttaatttgcatttctctgataattaatgatgttgagcatttcttcatataactgttggctagttgtatgtcttcttttgagaaatatctattcaggtcctttgcccaatttaatcaggttgtttccttactattgatttgtttgagttccttctatgttacggatattagcccttaccagatgtatggtttgcagatgtagcctcccattccatagattgtctactttgttaattgtttcctttgcttacagaagcttcttagcctcgtgccgaattcggcacgagcgcggtcgtaagggctgaggatntttggtccgcacgctcctgctcctgactcaccgctgttcgctctcgccgaggaacaagtcggtcaggaagcccgngcgccagcctgg

SEQ ID NO: 250369 - DNA, 372 bp, Homo sapiens
tggataagaggcataagtggtcagtgacaagttgtagcccagaaagtgtgaagggaatgggacagatataaaattggaagaaataacagctctgaatttttcaaaagtaaaaacgatatcaatctacaactttaagaatctccatatatcctaagcaaaataaattataagaaactcacacccagacattgcagcaaaacttcagacaacaatagacagagacaaaaatcttaaagcatcagaaaagaagcagttactttcaaaggaagaacagttagactgagaactgacttctcaatagtaacaaaggaagccagcgagcaatggaagggttttcaattaacactgaagtttgataaggcaaaaaacaaa

SEQ ID NO: 250370 - DNA, 581 bp, Homo sapiens
caatatgtatacattttattagtgatgacttaaattacatggggccaggcatggtggctcacacttgtaatcccaacacattgggaggccaacctgggcagcatagtgagaccttgtctttattaaaaattaaaaaaaaaaatagccaggtgtggtagtatgcacctgtagtctcagctactcaggaggctgaggtgggcggatcactggagcccaggaggttgaggctacagtgagctgtgatcgtgacaccgcactccatcctgagtaacagaggatgacactgcactccagcgtaagcaacagagggcaatcctgtcgctaagtaaataaagtataggggggatgcgtgttggttataagcaaatactacaccattatgtgtaagggattgagcatccacagattctggtatggtgtgggggcggtatcctagaaccaatcccccgcaagatagcaaggatgactgaactatggaagaatcaaagcagtgttacacagtatgcaattcctgtcttcaaaaaagttacctcatcaggtagatgagacttataatgaataaaatgaatcaatacagattt

SEQ ID NO: 250371 - DNA, 298 bp, Homo sapiens
tccgccctggacacaaagtaaacatgagctgcagaaggcagcaatcgggccctggccctggcctgggaaaggggtggcatcctgagaaacgccctggtctgcacggggtcacagcagccctgccttctgcaacaaggaaggaaagtgttgcctaaaagaacgcttagctttggtggtgggaaaggagcactacttaggcctagacccattttatttcccattgagaaaactgccttgatagaaaacgttttgtcttagtaaaccaaaagcaacctaaaaaaaaatcataaatcttagt

SEQ ID NO: 250372 - DNA, 358 bp, Homo sapiens
aggactccatctcactttgctgtgttgttctttttcccttttgcccaataaattcgtaacccctcacctttcaaagtgtccgcgtgcctaatctttccctgccatgtgaccagaacccggttttgtctacaacaccagcactttgggaggcgaagatgggctgattgcttgagctcaggggtttaagaacagcctgggcaacatagtgaaaccctagtctctaccaaaaatacgaaaattaaccaggcatgcctgttatcccagctgaggcacaagaatcccttgaacccaggaggcggaagctagtgagccgagattgcgccactgcaccccatcctgggagtgagacgctgtctca

SEQ ID NO: 250373 - DNA, 274 bp, Homo sapiens
taacatgctgaatgggttggctctcatagaaggtattcttgagtgggcagttttccttacaaaacatagtatactaagactgtggtattcagacagctcttcaatcttcaagggaactgtggaagtaaaccaggggtgacatggattatcaaatattgtggatcaggtgagctctaggcttctcaatgcaaggtaattaccctgcactttcatctattttataatattgcctttatttttttccatgaaagagtaaggtttggaaaaacaagaa

SEQ ID NO: 250374 - DNA, 169 bp, Homo sapiens
ctcggctcactgcaaccttgcctcccaggttcaagcgattccactgccccagctactcaagaggctgaagtgagagaatctcttgagcctgagaagcggaggttgtagtgagctgggatcataccactgcactgcaacatgggtgacagagtgagacctgattttggaa

SEQ ID NO: 250375 - DNA, 610 bp, Homo sapiens
aacattcaaatttaagattctagaaaatatttgctccatagctaaatataaaaatttgaaaattatgtgagccactgctcccagtgggtttggataatgaagaattggttgacttctgatgagtttattcatatctggtgagtttactcatattgaaattacactattattaatattacttggctccatgtttattgacacctgcatttaagatttcaagtgttttctgtcatttctcccagagatgtttagttttgttggaacttttgtttggttataccaataagttaatgactatgctttttaattcccttgtagatttcatagggaggatggtttacctaagtgacagttacagtaggacaatgaagttctgttgtgatttgtgatctcttctttaattttgtcactataaaaaccttttattttttattatagaagtacacctataatgttttaaaaaagaaaaatattgaaaagttagattcatcttcccatgccacttctaccctgctaaaagtttagctactcctaaggtctttcttagtgcacataaaacaacatacatatattgatctgtgtaatgccagtgtatattgtctctttgaat

SEQ ID NO: 250376 - DNA, 794 bp, Homo sapiens
agcagtggcaacccgcttgggccctcttccacactgtggaggttttgttcttttctctttgcagttaaatcttgctactgctcactctttgggtccacgctgcttttatgagctgtaacactcaccaggaagatctgcagcttcactcctgaagccagcgagaccatgagcccaccgggaggaacgaacaactgcagatatgccgccttaaaagctgtaacactcaccgggaaggtctgcagcttcactcctgagccagcgagaccacgaacccaccagaaggaagaaactccgaacacatccgaacgtcagaaggaacaaactccagacgcgccaccttaagacctgtaacactcaccgtgagggtccaaggcttcattcttgaagtcagtgagaccaagaaacaaccaattccggacacactttgatctgtgttcactgttttactaacgagattaagaatgttttcacatgtagattggtttatttaagtgaatcacttgactgtttccatttttatccatctttctgccttttttcctttttttacttgtatgagctcctgacctattatgaataataatctctattaaccatgtagcttgcaaatattttatccagaactgttgatcatattttatttatatcactgcattaaacctcaatttttttttcttgcgatggagtctcactatgtcacccaggctggggtgcggtggcgtgatctcggctcactgcaacctctgcctcacgggttcaagtgagtctcatgtttcggcctcccgagtagctgg

SEQ ID NO: 250377 - DNA, 820 bp, Homo sapiens
cgcagtggctcaagcctgtaatcccagcactttgggaggccaaggcaggtggatcgcctgcggtcaggagttcaagaccagcctggccaacatagtgaaaccttgtctctactaaaaatacaaaaaattagctgggcatgatggcaggcacctgcaatcccagttactcaggaagctgaggcaggagaatcgcctgaaccggagaggtggaggttgcagtgagccgagatcattgcactccagcctgggaaacaagagcaaaactatgtctcaaaaaacaaacaaaaagagttaattcattgactaaaacaattctgaaatcacaaagataattacgtatttgttcatctttgagatagcttctccctgggacctcagtgttctcataaaactcagacgttttgttagcattttctttgcttgctctccataataggtaggactcaccctgctctgaatcttactcagggtttaaaccacataaagctgttattaaagacccctctagaaatcagacaagaagaagcatcctaagctattttttttctgatcctgttctttttgtaactaaggtaaggaattgcaaaggtcaaaatctggagagcaaatgatgtcatggatgtcatgaagttgcatcaatacctgatgatgatttagcataacagtgcaacatattatgccaagaagcataatgatgagccaccaggatgttttactgcattaatttcatgactctttattagcaaattgatatgcaaagtagctctccaattttctaccacagagaagctgctggttcagatttacatctttagcaaag

SEQ ID NO: 250378 - DNA, 707 bp, Homo sapiens
tttttttttaatttttgtagagatggggtcccactatgttggccaggctggtcttcaatttctgggctcaagcgatcctcctgaaccggagaggtggaggttgcagtgagccgagatcattgcactccagcctgggaaacaagagcaaaactatgtctcaaaaaacaaacaaaaagagttaattcattgactaaaacaattctgaaatcacaaagataattacgtatttgttcatctttgagatagcttctccctgggacctcagtgttctcataaaactcagacgttttgttagcattttctttgcttgctctccataataggtaggactcaccctgctctgaatcttactcagggtttaaaccacataaagctgttattaaagacccctctagaaatcagacaagaagaagcatcctaagctattttttttctgatcctgttctttttgtaactaaggtaaggaattgcaaaggtcaaaatctggagagcaaatgatgtcatggatgtcatgaagttgcatcaatacctgatgatgatttagcataacagtgcaacatattatgccaagaagcataatgatgagccaccaggatgttttactgcattaatttcatgactctttattagcaaattgatatgcaaagtagctctccaattttctaccacagagaagctgctggttcagatttacatctttagcaaag

SEQ ID NO: 250379 - DNA, 858 bp, Homo sapiens
gtgattctcctatctcagcctcccaagtagctgggattacaggcacacgccaccatgcccagataatttttgtatttctggtagaaatggggtttcaccgtgttggccaggctagtcttgaactcctgacctcaggtgatctgcctgctttggcctcccaaaatgtttgagaagttaggggacttgttctttcagcatctatttaatgaatctgcttgtatttttgatatcctaatgtgtcccaacactgaactcctaatctttcctctaaaacctgttccacctgcagccctctctatttcacttgatggcagttttatccttctcgttattcaggataaaaacctgagactcattcttgtttttcctctttctcttatatcccacatctaatccttaaggaaattatactggcaccacttgtgaaaatatatcctgaaatctgatcacttataccatctaaatcgctaaagtcatctgtacccccacctctcttttgtgccaccatcatcctttgcctagatttttgcagtagcttcttagttactttctttccacctttgctgccttcaatatcttgtcagcacaacagattggcggacattttaaaaacgtaagtcagataatgacactctaataaaaatgagaaaggtttaaaaatagtaaagataggaagcctggacaacatggtgaaacaccatctctacaaaactagctgagtgtggtggtgcatgcttgtggtcagctactcaggaggctgaggcaggaagattgattgaacctggaaggttgaggctgcagtgagctgtgattgtatcacttcactccagcccccgtgactgattgaaaccctgtctc

SEQ ID NO: 250380 - DNA, 341 bp, Homo sapiens
cccctcagagtcattcatgagagttggaatcaacttcttccaaactcctgttaatattgatattttgacctcctcccatgaaacgtgaatgttctggatggcatctagaatggtgactactttttgaacattttcaatttattttgcccggatcaatcagagaagttgttatcagtggtgggtttccaagttgtcaggggcgaaccatacagatcttcagcaacctcaactcttgccttctcagaggaaagaattctacggagggacataaggcagaaaaagagactgaggcaagttttagagcaggagtgaaagtttattattaaaaagctttagagtgg

SEQ ID NO: 250381 - DNA, 2127 bp, Homo sapiens
atccccacccacccggctcccaggatcctcattaggaagccctcaggagccctggggtgggtctccttgccctgtgaacgctccatttgtgttattgaatccaacataaatgcagcattgtcttcagaggtgagcaatggccgtggccggaggtgcgcatgggatgcaggcggcgtgtgctgctgttgattttctctgctctgctcttagcttactttagcagatagtggagtttcacgtggcagtccggtaaaccaaggcagtgtgaacatcccttccccacaatgagtgaaaatgcaggaggtgccgtagcgagaacagcgacagcattctgcgcattggtgagcccgactccccagcctcggtgcccaccgaagccccctctggctgcactgtgccagtgagtccaggctccttctcagcagaaggtggctgctctgcagggcccctcgcctccctgctcctcaggggacccgcactcttccatgtccgtagggagacgcgcaccgagctggagacacagatctgcgaggagtaacttgcctctctcaccagcactgccaggggcggatcagcgccagcaccttccagcatgcgctaaactgctggagaagctggagtggctggaaggagccctgcctgcctgccctcctcctcctcagttgctggccttggcagctctagggtgacccagcaggggcctggaggagtaggaagcagcttcccagctgcagtctgcatcatcctctctgtgctgtcacagaatggaaggttttagcagaaaaaggagtttgtaagcgacattcagaagatttgggcagcagtttcttcccccatagggtcctgtcttttgggagtggggagtgctgggccaggctgctcgctggctgtttcacaggtggtggaatttaagagcagacttgggtcgagctgtgaccgttcaggtgatgcacgcacaggaggttcagctgtgtgcctgtgaggcaggcaggagcgtcacccaagcttcagaagagaattccccggcagcagcgtggcgctcagcatgttccgtgtctgactgttttgattgtctctcagtccagttgacaaattccttttaagatgaaatttgaattaatttgcagaacttgtacaaatctccaagaaaacagcttaaggaacagattaaagaatgaatgccttaggaattaaagcattaatagctcttgagtagactggatggaaagatgagttgtgtaggttatccagatgaggctacatccagggagcaattcttaccttcagagggcgctgcctgtcctccttggcatccaagtgagcgcatctcctccacgctcaatgatgaatgctggccggcatccctgtgaggaaccttgtgatcattttccatttctgaaaactcccaggtggtgggggcccttggcccacatcagcattgaccaccccgggctcagatctggccaggtgcctgcgttgtgatgggaatttcagtacactgaattttgcctctgaccctgatgaaatagcttcggtggcatttgcatcaagatcatgttagtgtcatctctattagatgctttggagcaaacatgaacttgggtttccttttaagatgtcctgtgattccagattcaggggaatctgagaaaagtttgaagaaagaaaattccactcggccagccaaccttgggtgtgcagagcctgccccgccttccccactttgtcctgagaagctgggtcctccccagcaccagagttgctgctgcttcccctcgcgctcttggctgctctcccggccccaagcctgagtgacactctaggattgcagatggcaggctggtctctgggctcccccgtccccatgaccctccacctgcacccagacctctgggtccttgctcaggcagcccctgccctcggtgagacgcagcccactgtgggcccttcccctgggcctgccatcagctcctgtgctcctcggcgccccagcggctgccctgggcccgttcccacagcacctggcacacagcaggagccatgaatgttctttgggaactgaatgaggagtggaaatgcgggcatgtcatgtttttgaagttaataaaaaaaatcccttaaaagttg

SEQ ID NO: 250382 - DNA, 263 bp, Homo sapiens
agtctacagcatcttctgtactcctaatccacccttcatcatttaccaaggcaccgccagtcccagtcaattcttcatttgccctgccccgctccactgatgttgccgaaaaggatacccgctaaagtaaatgggccacctccagatgaatcttcctcgctgtccgagtctgacatgatggcggcagtgacggtagctgctgccctcagcagcaaatcgcagccgggtcgcataaaccggaaataaaacaacagtcgcccgga

SEQ ID NO: 250383 - DNA, 482 bp, Homo sapiens
atttctaactgggttgactggtgaaggtcttcccctgtgtgaagccactttataaagattggaagagacatttgctttttcaaatgcaaaaaatgtaacaaataagacacataaagaaacagggaaacatgacccaatcggaggcccaaaatagatcttcagaaactggctctgaaaaaatgaaaatctattaatatgaattacttgacaaagaattcaaagtaatcattacaaagctcaatgtgctgtaagaaaacattaaaataaacaactaaatgaaatcaggaaaatgatgcataaacaaaatgagaaaaccaacaaaggaatagaaagtatgaaaaggaaatagaaaatctggaaccaaagaatataaaaactgaaccaaaaaattcactggagaggttcaacagcagattttatcaagcagaagaaggaatcaggaaacttgaagtcaggtcatttgaattttttgagtcagagta

SEQ ID NO: 250384 - DNA, 454 bp, Homo sapiens
ctaaactattaactgtattacaagatctctgagattttggtttggtagcttccaggggcgtcttacgtagtgatgctgtttaggggcatctagagatcaggaacaacacttgttctgctgatacagatttgggaatgaaatctgaaaaggcatgaaatagactggtagaagggaaaaaatgttaagaaaagagcattcatattttattctaggtaacagcttgataagttgatacagagggaggagaataataaaaagaacacaagcaaatatttagagaagtatcagtgaattataaggtttttatgtgatttttctagggtctttgttgatttgtcaaagaaaatcaagaaaaatagcatacactttcttctttaaaccccttttgtgtatatgcttttgtgtctgtgtgtataaaatatgtttataaatacattaaactatttttactaat

SEQ ID NO: 250385 - DNA, 488 bp, Homo sapiens
tcaggaatatagaaacccaaaagagatcgtagaagtgacaagagtaacggcaataatgtgttagtggagaagatgctatcagagcaaaaacaataagtggaaactaatcaaaacaattggtcattttaatgtactcatatcatatgtcttaagtaactggtaaatcatgaaatttgcttatttcacttaaattattttgcctgaattttattatgtaattgttattgcttatttaggatgcagcataatataatagattatattgtttgaattattaaatatcaagatcagagaaaattgaataaatcatttctacaagagatgcgaggaatgaatacccagaaaaagtatccaatgcatttttataagtatacgtaaaaaccgcattacatgtattgatagtgttatatagtctgacatgctttgtctagaaaacaattagtatagtatggattcttaccacttaaaaattactctgtactttgctt

SEQ ID NO: 250386 - DNA, 545 bp, Homo sapiens
ctatacagtttgtggcgtcattcaaggttggacagatcacacctcaggaagtcatccctgtaagcacactagaatttatcataaaggcaggtcagtttgtctctttgtacctctgtatttttgtaagtaaaatgggagataatattttgccttgaaagaattttaagaaaataaatcaagcatagtgatttgaaggtacttagctttctgaagatgggtatgttaatttttcctacctatataccagagctataaaggaaaagcttaaggtcctcaaaacataagaattatcaaattatgaattgatggatatgttatatcaatttcttcactacttccacaaacattgctgtatttgtggtatgtgccagacactgtgataggacattctgtttggtgctagggatatataagaaatggtcaagacacattccctggctcctggggcttacgaattcctaaagaaaataggtttggaatttttttaaggcctcattttcaccaagcatatccccagttacagaaatgcagcaaccatactgatt

SEQ ID NO: 250387 - DNA, 231 bp, Homo sapiens
tccgcggatgctcgccctctccgcgctaactagggcaactggaaaagaggcggagagaagtcgctgctgcagcgatttcccccggcggggagcagcccccagctggtgcccgtgacagctgcgacctccgccccctccagccgcgccgggccgcgaggggaactcggggaagtgggaggaggatggagcgggagaaaggagagcagggggcggaggggcgccagctgctcc

SEQ ID NO: 250388 - DNA, 520 bp, Homo sapiens
aagtttcatttggatattttgaggaatatggtaaacatattcaaaaatgtttatgaaagaataaaggtcctaaatagctaagtcatccttgaataaagaggagtaaatgtgggaggtgtgggtggggttggcccttcctacctgatattagtacatcttacaaaaccatggaaataaaatcagtattgtattggcacaagaatagaaagtgagtcaacctaataaagagctcaggaacagacccatgaatatttggggacttaatatacagtaaagtagcacaaatcaaagaggatggacagactgtgtagtagacggtgttgggaaaactgtctcactttatggagaaaaatacttgatctctacttaataccgtatagagaagtgagtgtcacaggactaaagacctaaatgtaaaaatgtaaagctataaaattgaatataacaaaatacaaaatattgctgtgacctagaggcaggaggagacatcagaagctcaaaccaaaaggcaaaaaaaaaa

SEQ ID NO: 250389 - DNA, 436 bp, Homo sapiens
cgccttacttcctcataccagcagccgtggagtggatcttcaacaagcagccaacagcagccagggacagatcctcgggcactgtttttctgtccgaaaaatcagaatcgtatcaaagggtcggacacctggactggcaagacacgttggggttatttataacaggggaaaatgaggtctccagggaaacaaaccgtaataaagaatatgaactcccgcagaccgaattgccttcaacgatcctcaaagacttttgtgtttgaccaatatcaattaattacatcagtaaataactgcctgagccttgtacttctgtcctcccaagatccggaatgacttctgctttcaaaatgaatttcagggctttctttgaagcagtcttgtaaagttgttatatttagtttaaattcaattaaagctcaatctgaaagctctt

SEQ ID NO: 250390 - DNA, 511 bp, Homo sapiens
tctccagtttcattcatctgtcagcacatttcttctctcccatattattccttttttgagagactcctttctgctttttagcttaaattactcttctatatatatattacatcattgcagaaatccaacagattgacattcatttaaagtattcccaataccttcataaaaatgacaggaggcccgttaactttactgaagtctcagttgtggtttttactttgaccaattattttgttttacactggggttgaatagctgtggcctaaccttgggctttttgagaaatgaatgctgtcattcatttgggtgacttgggcaaccttggaaatacatctgagcacctgttggctcatgtgggctgtgggtcaggaatgtgatcttcttgctgagggtcttatgaggccaagtaaaatgtctcaagaccccctggcccttcctgtcttgtagggttttttgtgttatagttgtactttcctctacttctccccttccttgtactatccctata

SEQ ID NO: 250391 - DNA, 377 bp, Homo sapiens
ccaggctgtgagcgggaccgcctgtccttcgggttctgtgagacactgcgcctactgggccgctgccagctgcccaccgtccgcacccagtgctgccgctcgtgctctccgcccagccacggcgccccctcccgaggccatcagcgggtcacccgccactgacagtgccaggatgcacagaccgaccgacagacctcagtgcccaccacgggctgtggcggagctcccgacccctacgccctaatggtgctaaccccctctcactacccagcggcaggctggggagctcctccccctcgaaaaaggtatttttttattctaacagtttgtgtaacatttattatgattttacataaatgagcatctaccattctaaa

SEQ ID NO: 250392 - DNA, 302 bp, Homo sapiens
agcaaaggaattgaatagacatttctccaaagaagacagacaaatggccaataggcatatgaaaagatgcaacatcactaatcattagggacacactgttacaacttgctactggagaaatgaagcctgtggtgtgcagccccactgggagaggattctggaagcttctgcctggtttcctttggacttcaccctatgtgccttttctctttgctgattttgctctgctatgagtgcaaccataggccgggtcctcctaaccaatcagttacataaaatacgctatttaaattttcaactgt

SEQ ID NO: 250393 - DNA, 386 bp, Homo sapiens
gggaaacattacctcatccttcaaggttgctcactgcagacacaaccctgagaagcggcccaggtaaggagtttaggtcaaagccttgcttttttggtatatacagcaagacatattgaaggactgtctttttgcagcccatatggatcagcattccagggagaccagggtgaagaccagtagaggtgggtttggattggcagatggaagattctggcattctgggtccatagcgttaaattcttatttggattacagccgaatcagcagttctggcctgtgatcagggtgcaatattcttattgttctttctcccatattttcttaatcagaaggaaggacctacttccacaggacaataaagagttttgactccaaaaaaaaaa

SEQ ID NO: 250394 - DNA, 546 bp, Homo sapiens
gggtttctcttttgcacctgtaacagagcacaggacacagaaagaactacccagggtggcagctggagcaagctgagtttcctattttttgttattaacaatggctaatatttatcgagtgcttactcagtgccagccatcatggtaaaaacgttagatagatgttttcttttggtatatcccagttgttttaaagcttcctttttatttgtaagtttccagagttttatgcccttcatagctttgagaaatatgccttctatgatccatatagggcattccttaaattgtggaacaaaataaattaaaaggcctgccccaaaattgacatctaaggtgacattgctccctttatatggtttatcaagatgattttcagccccaaggaggtgaaaaactgctgaattgtattctttaaataattttttcttctgcttttttcacttaagagaaatctcttgaaactcatttaacagttgtatacgggaagaataacccctataggttcttattggaatgaccccttattttcagattaaccaaaaa

SEQ ID NO: 250395 - DNA, 443 bp, Homo sapiens
atccctttctggcactgttgccctgagacaagcagtatgcccgtctgcttcctgccagcctgtcccctggggcctcagcaccactgggccagaggcttaggaccccctcctgggagcccccattgcagagggcaggctggggccagggcctgggatggcaagtgcagtggtgagagaccctgcaaaggccgccaggtctgtgagtgcctggacggatgcaaaaggggcacccggcgaggcagggcctgcaaacatgggcttccacaaggttttcatcagccttaagataaatacactaatgacattcaggacattgttacagctcagaaatggaatccatcactgtcctttgcccttgataattaattccagcatcaatgatctgagagctactggtagtcatttttaaatcatcatctcataaaaagaattttctcagcaaa

SEQ ID NO: 250396 - DNA, 348 bp, Homo sapiens
atggtatttttactgtacattttctctatttagatgtgtttagatacagaaatactcaccattgtgttacaatcacctactgtgttcagtgcagtaacatgttgtgggtttgtagcccaggagcaataggccacactatacagcccaggtgtgtggtgtgtgacaccatctaggtttgggtaaatccagtctatgacgttcacacaaccacaaaatcgcctaaggacacacttctcagaaagtgtctcctcatagttaagcaatgcatgatgaattttgtgcaaaacatttgttttcgttttgatcagtaactcagagattgaaacaaaattatgaactgaacccata

SEQ ID NO: 250397 - DNA, 588 bp, Homo sapiens
acatactctaatttggagattacaacacaaattgaaagcactttctcaaatattgtcctaactgcttaaatatttatatataaattagttttctgatgtaaaaatgtttgcagtaagaaggaggaaacccagaagttacaaaggaaaagacagagttgtctatatgaaaaatttaaacatttgtgacaaaagctatcatagttttaaaaggcccgtatgaatattttccgtttattattttaacattaatatagaaaatgttgcaaatttgtaaaaagaacagccaaatagaaaaatgggcaaagaatataaagcaacatggggactaatgaatatcagtttattaatttttaagagattaaaatagcaatggcataatttttcctccatcagattgcaaagatgaataatgtccagcattttggacattctcatgcagagctgataggagtgtaaattgcaactcttctgacaatatgtcttcaaattagaaacatgtatatcctttaacccaagaatcttcttgaaatttattctaatgacataatttagactgggcagagtgggcaaagatatgtgtaaaagact

SEQ ID NO: 250398 - DNA, 317 bp, Homo sapiens
aagaaaaagtcaggcagtcctgatgagtggggacctcctgctgctgcaatctgttgatggaaggtttttgaaacagaggagcctgctctctggcaaccaggatggacaaatgagctgggacctgcgcccctctgccctaatcaactcgccccatgtccagctcagctgcagaatgggcatgaactcctgaagacagcaggaaaaggagtacgcccttgtgtggctgccaagcaggggaatttcacagcaaatattcactaaggaacttatttttctgtttcacaaatgactaatactcagagaagttatactatgtg

SEQ ID NO: 250399 - DNA, 289 bp, Homo sapiens
tcccctccccttccccctccccctcctccttctcctgctgggagttagctggagaaccaacaggcagcattacagaaagctataggccccttcagctggttgagggggctcagctggccccatggctagggcatttgtgtcctgtttcctgccgtgcaggaggggcactgtgaggtcctcccgcgtctcaccccaaccacatacacacctgtaaacaatggagcagtccagtctccagccctacctagaggagcgatttgttctctgatttccataacacagaaaaaat

SEQ ID NO: 250400 - DNA, 515 bp, Homo sapiens
cattaaaaaaaaatcacagataagtacttaaaacactcaagatttgggatttagatcatgattagatacaatagaaagatcctggaatcccgacatgaggacaaaaatggtactgaattctttttgaaaaatagattactgaaaagcgatctaatatagaacagttgcttttacttagatgttcaatgcatatttgttgtataataaccaagttattacagttcagataaagggtccaaagtgttttcgttatgatataatactttctattgtaaactggactaaagaaacgttgtatgttcaaggaagtgttgagcagccatggtgttcctgggacaggctccccaggtgctgagagaggtgctgcaggagtcacagacctgcaggcacgcacttgccagtgactgggacgttggctggtggttctcttttggtgtgattagagctatgtgagttgtctcaatacttgagactgtcggtggttgccaatgctgaataaagcatttatcaaagta

SEQ ID NO: 250401 - DNA, 621 bp, Homo sapiens
gaggattgcctgagcccaggagttcgagtccagcttgtgcaacatagtgagatgctgtctctacaaaaaatttaaaaattagctggtgtcctctcagtgtgtcttgtcctctccatgtttctaaaataaaggaagaaaggcccagcgcagtggcgtacacctatagtctcagcactttgggaggccaaggtgggcagatcacttgaggtcaggagttcgagaccagcctggctaacatggcaaaaccttgtttctactggaaatacaaaaattagctaggcgtggtggtgcacgcctgtaatcccagctacttgggaggctgagggaggagaaccgcttgagcctgggaggcagaggctgcagtgagccaagatcacacactgcactccagcctgggtgacagagcgagactccatctcaaataaataaataaataaataaaaataaatacataaatacataaaataaaagaagaaaaaaaattagccagccgtggtagggcacacctgtaattccagcttcttgggaggtagaagacttgagcccaggaggctgaggctgcagtgagcagtgttcacgccacggcactccaacctgaacaacagagtgagaccctgtctc

SEQ ID NO: 250402 - DNA, 454 bp, Homo sapiens
gtaaatttgacaacttagatgaaatggaaaattttttgaaagacacaaaacacctaaactcactcaggaagaacaggcactatgaatagccttctatttaaaaaatgactttgtggctaaaaacctttctacaaatataacttcagggtcagatgactttattggtaaattctacaaaatattttaagcagaaataataccaattttatacaaactgttccagaaaattgaaaaggaagaaatatttcccttttcattttagctatgtttattactagcattaccctgataataaaaaaggaaaaagatgttatgagaaaactacagagcagtatcccttataaacatctatgctaaaattgtagcaaatcaaatctaacaatatagaaataggaggatacacccacgatcaagtggggtttatcccagcaaggcaaagtcggcttaacatttg

SEQ ID NO: 250403 - DNA, 407 bp, Homo sapiens
tgtgtggtaggctgagacctctgactcttgctcccaataagctcatgaggttatggctccacgggggaaggggctggaattcggaagaaatggacaatccagttatcctcaagccctgattgccttcatgctggccacacctacagggacaaaggatggaaggaggaagggatgacttctgatttaaaaatggggcccatggctgggcgccgtggctcacacctgtaatcccagcattttgggaggctgaggtgggaggattgcttgagcccaggagtttgaggccagccagagcaagacagtgagaagtgagatcctgtctatacaaaaaaaaaaaaagagggccagggagggtaaggagactgacacaagaaggttagtcaacaaaacaggtagaagtgaggtgt

SEQ ID NO: 250404 - DNA, 976 bp, Homo sapiens
tgcagatatttttcacagtttttcatttgcgttttgactttgtttatggtctattttttcatcagaaattaaatgttttaaatgttttgttgtgaaatttatcagtcttttcagagtctaggttttgtgtcataagaaaggcctttcctattttattattatttctaattcaaattaaatattcttgtgttttctccaggtacttctgtaattttatttttaagttaaatgcacttacccacacaaaatgtaagttaaataaagtgtcgaggtgggaatccaactatacttttcttccagatggctgcccagttatggcagtgtccttcatttagttcagctttgccctgctgattgaaatgttgtctataggtgtacttagttcctacagtttgaggttattactggacttttattctgtttcattgatcagattacctatttatacctaatgactctattccttggttatcatcttccctcattctacttcccagagttttcctgggaagttttctttgtttatttttctatatggcttagaattagctaaccaagtcctgctcctctgtcctgttggcatttttattggtattgtattatatttatagattaatttagagataattgacatcgttttgaggttcaaaaacagggtctatattcatttctttatgttcaagaccagtatatgtggccaggcatgggggctcacgcctttaatcccaacactttgggatgctgaggcaggcggatcacttgaggccaggagcttgagaccagtctgaccaacatggggaaaccccatctctgctaaaaatataaaacttagccgttcttggtggcaggtgcctgtaatcccagctactcgggaggctgaggcaggagaattgttgaacctgggaggcagaggttgcagtgagccaagattgtgccactgcactccagcctgggtgactgaacaagactctgtctc

SEQ ID NO: 250405 - DNA, 423 bp, Homo sapiens
actataggattaaaaaattgcgttatccgataatcatagatgctcttattcaccttcccagtatttcaaacatgaataatttttagagcctgtaatgtgaatatggacagatagtaccactgctctgctattctattttgcattttaacttgttccatttctttgcactaggattaaaaacttgtttgagtttactcaacaaaattcatttgcctaaaaatgaattttattagatcattttcctgtttaaaaatttggtctgggggaggtgctggaggtggactaatacaagattatctttgtttttgcgtttagttgtacaatttaaatataaaagaaagcaagccaaggcaggaggatctctagaggccaggagtttgagaccagcatgggcaacatagcaagacctcgtctctcaaaaaa

SEQ ID NO: 250406 - DNA, 380 bp, Homo sapiens
caaaaagcacatggttgtacctggtgaatcacagattctgagtttacttcatttccaaaggtggaagaatgcagccatccctaaatcggatctgatatcttagtggcctactgtttcattttttttgagcatctattatgaggcagaagctatgagaaaggtcagcaaaatacagctcctgacttcaagacctcagacatggtactcacaagtatcctcagaatatgggacagctgtacttattatttcgctagcttcctaaaaacctctttgcttgaaagatcctgaagcagcatttgcagtcattagtttgctgtcttgtgtgtgcgtatgacttgtaagagtgaggatggatatctcatatcacatggcacagaagc

SEQ ID NO: 250407 - DNA, 648 bp, Homo sapiens
tcctcctaacagttgcaattagacaaggtagtcagcctcaaagatgatttttcattttatctagttacttctttaaaaccttacttcaaaagggagaagcccttcgaaagggaactcctgttccatttcaacagtgtggtttgcagtgctttcatagctgtgtcgtcttggtcattctcaaagatccttttaagccacaattaattgccagagattcttcaagttaacatttttctaatttatcatgcttctcttcaccccagggtcccctcaaaactgtaagctttatcaagctcttttcaatttcctttttaactgccagacaggcagtttgctttttcgtttgggggagtcaaaagaggttacatgctgccctagaagaatttaaaaaacaaaaacccatgtggcaattataagacttcaatttcaatagaaaatgttcatttccagtgaaaccatttttattttaatttgcatttaatttctatgtctgtggtatctctaaatacatgtgacttttggccccacacaaatttatttttgtaagagttcatcttgtttgggccattaatgaaaccaaagggtagttgacaaaagataaattttagatgtttcttggttggtgtgaccagtcaaacatttccatga

SEQ ID NO: 250408 - DNA, 290 bp, Homo sapiens
acaagtttattctcagtgttcagtatttgaggcaagtagctctcagttctttcttccttactacatactgaattgtcattttttctggggaccttaaaagaattcaagaatttaattctccctgaggaacttggaggatggtatcaactaaaagtattctcttttctaccactgaggaatactggaactgggagcaaactgtggacctgtgatagaactgaagtggatatttaccatacaatatctcatgcaaacgcttaactcttaaataaattaaaagtgcttgaact

SEQ ID NO: 250409 - DNA, 436 bp, Homo sapiens
actgagacatgcttagactgcaagagcttgcaaatttatcaaaacaaaacaaaatattgtgttggttcaatataacctcacttcagagatatctgacacacagcccttaggcctaggaccactactactggttggtgtctttcatgagcctagaaatagttaagtatctttaaataaaagaaatcccctccactcatgggactgggcacatgctcacagttccacctgtgcaggcaagaggcagcttcctgcagagaaaatctttcaacttctctgacaaatgaatgctcagggctctccactcagcatagcctatggtttgtcagactatcccaatcttattactattggattactactgggggttacctagatgacagacagccccttcgttgtatttctatatgcaaaataaataaattccaagtcagcagtg

SEQ ID NO: 250410 - DNA, 540 bp, Homo sapiens
acagtataaagtaaaactgagttcatgtagtaatgtgtggagacacgaacaaaattggactaaaattttttattgattgctttctaattatggtagaaatacattttaggtttccatttatggagaaagaaaaaaatggcagagggtagaagagtgatgtggaagaaaaaatagaaaatataacttgatacttttggttgaaagaaaaagatgattgaggcaattggccacacctgctctgtctgactactcttgactcctttggcttcttagtgttttcaccatcctaaccactgctggccagtcccgtcacagctgccctctgcttcctgctgcgctatatgtttggccactctcatgttcacatgaatggtacaagacattaactcatgaagtcaaaggatactcatcaggtggcgaacagctgcacacataatgcacagctccacagtgacatataacagtgtgttcaaatacttcagaaagacccttgccacttcgatgacaccaatcaaggacctgatcaatggccaccatttc

SEQ ID NO: 250411 - DNA, 531 bp, Homo sapiens
gtcccaatgagtacaccagtaatcttagcctcagaggtgtgcatctactcacagaagggctcagtggcttccagtgttcaaggttactggattgcacaggagctgttataggacaagccccgtggatactggtggctcagaggtcttacagatgaggtttcactgggaaccaatcagaactcccttatttgcaagtaacagacaccaaactcgaatggacttgtgagaatatgttggctcatgtaattgaaaaagccacttggggctgggcgcagtggttcacacctgtaatcccagcactttgggaggccaaggtggggcagatcacgtgaggtcaggagtgcaagaccagcctggccaacatggtgaaaccctgtctttactaaaaatacaaaaattagtcgggtgtgttggtgcgcgcctgtaatcccagctacacgggaggctgaggcagtagaatcacttgaacccgggaggcagaggttgtagtgagctgagatcgtgccattgcactccagcctgggtgacaga

SEQ ID NO: 250412 - DNA, 466 bp, Homo sapiens
ttttagattgttataagtgtttccaaggaaataaacatggtgaaacactaggaaataacagggaagtgaagagaaaaaacttgaaaaagaacattcaaggtgatactgaagtaggactgcagagaatgacaaagactatgaaggccacaggaaaatggaacagcattccaaagcaggggtaaaaggccagggagcagatattttaggcttgtggaccctctgtctctattctaacgactcaactctgcagttgttgcttgaaagtagttacagacaatacacaaatgaatgggtgtggctgtgtttgaagaaaaccttatttacaaaacaggtggtggtccacaggccatagttttctgaccctgttcttaagaaataacagtcctaaagagtgctgaaagaaaagaaaattgtcatttactgctatggtgaagtaaagaaaataaataggataatagtcgaaaga

SEQ ID NO: 250413 - DNA, 482 bp, Homo sapiens
ctaaaaagcaaagaagaaacttttctgtattaaaaataacaaacattagtaaatgtatatatacagtcatgtgttgcttaatgatggggatacattctgagaaatgtgtcttgggtgatttcatcgtgacgtgaacatcatagagtacactgacacaaacctagatggtatagcctattacacacctaggctatatggtacagcctgttgctcctaagctacgcacctgtgcaacacatcactgtgctgagtactgtacacagttgtaacacagtggtaagtattcgtgtatctgaacagaaaagtacagtaaaaatataggatcataattttatgggaccactatcatatatgcagtcactgaccaaaacatcacacagcacatgacttgtgtgtatggatatctcaattgtaaacaatttcacaaatgttcattatctctttttaagtaagttaataagtaaaactattactaagctgca

SEQ ID NO: 250414 - DNA, 457 bp, Homo sapiens
caacttagcataattttttgtccatggtaggagtataataaacatttgtgaaataaccattcataaattagacattgagggaaagaacttacgaagcatgtgattaatattatcaaaagaacaaatagcagaaaaatcattggtctagtatttaatgatctataaaatgctttcatgtctttttttgctcaacaatattgagcagtaggcaaaatagatgttctctttttataaatgatagtttctaagcagcccaataatttggccaaggtagtaaatgagagggtgaggaccagaaggcacttgtctcaagtctagcgcactccatggcagcttccctttgaactttgtgtgactgaccagaagaaattgcttgaacccaggaggcagaggttgcggtgggctgagatcgcgccatcacactctagcctgggcaacaagagcaaaactccgtttc

SEQ ID NO: 250415 - DNA, 448 bp, Homo sapiens
cagatggaaaaacttcccgtgtgtgtttgtctatgttggtgtctctggctgtgtccacatgtctgtctgtgcatcactggtcagtgtctctgtggatgtgtctatttcgagggcggcggcagggtgatgtgtaagttatgcttccatgtgcaagtgggtgtatatggtaggaagaatcccttcctcttggggtccttgatgggcatgtgtgatggggaaggagcagtctcccagccctgggtctgctccccacatctctcctaattccacttcaccttttgccaccccctccccaccaggggcctagcccttttgtcaccgaaggcccccagagtgtttctgtgtgaaaccctctcatttacactgtggcatcaaaatccacaaaagatggattaattgcactctggttaatagcagcagcacaatgattaaaatctatattcctata

SEQ ID NO: 250416 - DNA, 600 bp, Homo sapiens
gcatttgtcacttctgaataatgggtatatgggtattcattctactttatttaatactttgctatctatttgaaggtcttcgatatttaaacaattttaaagcattttaaatatatatatatataaaacagtctattggaataaacagctgaaaagcatacagaattaggtacattatctttatccatcatcctcatgtgtctggagaaactaactagataattgtctcccatgtttatgatacctatcagctaaattgctttcaggcacattatctcacttaatattctgaacaaccctttgatattggtattatgacagccacttcacttataggaaaagtcaacctttagagttttggagattttcccaagattatccagttagtaagtgatgcaaaactgggatctcactgtcaatgctacagcacagatgacccgtaagaaccctgacaatatattattccaaagttacatgcatcatctttaagatctgtcctgaagctacaggtttgaattcacaaatgaaacagaatactttatcactgacatttttaaagccttcagtcaaatctgtttcttctgactatttttaatatac

SEQ ID NO: 250417 - DNA, 465 bp, Homo sapiens
cactgatgcaatgggcactggtatattctttcagaaagtaattggtcagtatttttaaatagtcataaaaatgtttatacaacttcacctagtaaacctattttcaaaattcatccgggcaacaatatttaaataggaaaatgttgttagtagtagcagtgtgcactgtagcagaatttaaagatgggaaaacttagcaatgcttcctaatcagacgaaggagaaggccaactagattatggttattttaaatttatggaatatcacgctgcctttaaaaaagatttgtgaggatttaatttcagtatggcaaaatttgatgttaaatatgtaaaagtgatgtgcacacatgaatcaagactgctagggaaactgaaagatgaagcaagttgatttggatggtgatattgtaggtatttcttatcatttttgtgtttataatatttgtataataaaacattttca

SEQ ID NO: 250418 - DNA, 472 bp, Homo sapiens
aggaaggctgaaaaaaatgaaataacttggtgactggagttgtttcacaattttattcaggcagtactactggaattaattaatgcttgtgttcttgtcctctctggacactataatccaaattataggaagaaagggtgtttgtctcacaatatgagttaatgcctcaggaaggggacgagtgcagaagaattggttatcagctcctgtaccacacattttttagttgctgagagggaatgccagaaaaaaacaaattgatgttggaatcggtgctgggtagcccaaatctagcggcaattgtccattaaagaatatatccataaaaacttcccctcgaggatacattattttccttctcattgccagggttcaaatttaaagtgcatgtgtgtgtgtttgtgtgtgtgtttgtattttataactctcttacttaactaattttattggatgcattaccaatgagaacccc

SEQ ID NO: 250419 - DNA, 489 bp, Homo sapiens
tgataaatatgttataagaagctcttgggtgatctgaaagctgtccctagccttctgagattttaatgcaggattactaatctgtcccacaaaacatcttttaattccatgtgagagactgtttgaaccacagatataaacccagtatggcaagtcacttattggtgttttgttgttgttgtttaaaatgtagacaacattctcagagttgaggcaaaattcgctaagtctgttctgtttcacatttttttatgatagattttatgtatagagaggagagaaaatatacaatgtagaattggatccagctgctgataaaagagaacacagtaatgtttgacttactcgtaatacttgcatatatattttcaatatgttcatatggtttgaactcctaaagcaaattgtccaagttactagctttaaattggttttttttagcattagacaatcaggaaggcaaggaattctcttcaaattataactcgc

SEQ ID NO: 250420 - DNA, 535 bp, Homo sapiens
acgggaagtgatcttaattttcaaaaataaagtatcttgcttaaaaataggcagttaaagtctgggtactcggcgtgtgcacacacgccgagagtccatacattacttaataatttctactagttgatacttttttccactaaataatgttgattcttgggtcctttgcttaatgcaggaaaatctaggtccttaaatgtgagaattgacacacacacacacacacacacacacacacacacacacaaattaggacctggctgttgacagtcaaaaagaaaaatgaagcctctctagaactaaaatgcaaatagactggagagctgaacttggggatgaaagagaggggaggctataccctaaggctaaagagtcatttgtgatatgattaagatctctgattgcggatgggcgttggctggtggatgggcagtggcttgcgcctataatcccagcactttgggaggccgaggcatgtggatcacttgaagtcaggagttttaagaccagcctgggcaacgtggcgaaatcctgt

SEQ ID NO: 250421 - DNA, 648 bp, Homo sapiens
tgttgttcaatttggacaaagcttcggtccctctgagttttgcgtgtctgtttctgggtgtatggggtggtggtctagatttgctgtagtagatgtgagctgctttgtgtgactgaccatggcaaatgacaaaacttgccagatttttttttttaatctctgaaactataaaatgcccctgcatctactttagtgacccccaagccccccaaacattacttaataatttctactagttgatacttttttccactaaataatgttgattcttgggtcctttgcttaatgcaggaaaatctaggtccttaaatgtgagaattgacacacacacacacacacacacacacacacacacacacaaattaggacctggctgttgacagtcaaaaagaaaaatgaagcctctctagaactaaaatgcaaatagactggagagctgaacttggggatgaaagagaggggaggctataccctaaggctaaagagtcatttgtgatatgattaagatctctgattgcggatgggcgttggctggtggatgggcagtggcttgcgcctataatcccagcactttgggaggccgaggcatgtggatcacttgaagtcaggagttttaagaccagcctgggcaacgtggcgaaatcctgt

SEQ ID NO: 250422 - DNA, 221 bp, Homo sapiens
gaaaataattggacacatttatatttgctgcaaatgatcacttatttattttgctaaaatccaatcttcacatatattctgtgatatattgaattcaagggtttatctcaaaactttgcattttaaattatcaccacttccaacaccagaaaagtggtttaattaaaaatttaattccaaccacttatttcctaaggattatcttttgcatcatataaata

SEQ ID NO: 250423 - DNA, 301 bp, Homo sapiens
aaggatatttttaaatgctttcaaatctgagacttggcttggcttcgtgaatgagtttctagtgtttaaattaaagtattttgtaattagactcctcgtgggcttgagaaataaaaagcctgtccaaagtctagctttatttagagggtcaggaagtcaaagagcacccaggaccatcttggcaattaatagcggcaaaaatagacccagcttctgcaaggttttccaggaaaatctgcttggggcagcatttgttaacctagctgccagtactcctactctcttatactggctgctttta

SEQ ID NO: 250424 - DNA, 331 bp, Homo sapiens
caaaaaaaaaacaactgaggctcaagcctgaagcccactggagcctctaatacaggtctgatgcctgggttttgcccccagacattctgatttaattggtttgcactggcttcctggcatcaggacttttaaaagctcacagatgattataacatgaaatgaagttcaagaactttggtactagcagaacagactggtttaaataaatcaaatacagttatttagccaattcaagactttctatcaccttcctggcctttacactttagtttacctcctatatcccacctacatactcttttgaaaagattctgctaagtccagatatcca

SEQ ID NO: 250425 - DNA, 316 bp, Homo sapiens
ccttagaagcaaagccatggtggaccacaaactggcttcccttgtgtatctgctttgggcacaaaagaccatgtcttcatttcagcacaaaacagtgcacttcattgaggtgtgatataattgcttcaggagagagtttgctctgaaaatgtcttctcggccttcctgaagcaggctgcacgcttatttatattggcaccacatgctaatctcacgaatggccctgttccgccagtgggaggacaaatagctgttcttttgctcccgtgtccatggaaagctcccctttctccttgcatggttgccatagtaacca

SEQ ID NO: 250426 - DNA, 618 bp, Homo sapiens
ggaaatttgatacacaagttgacttttttctacttctaataggacctgagggccttgaaaatatcttttcccaaaactggttttgttatattgtcagaagaatctcactttgtcacataaccagaaatcctaagattcaaatgattcttaatcatcttttataaaaattgaaatgtccttgggaatgttaaaggaatgagattgaatatttataccttcaactgaattacctgaaacagattgcagcccccattataccaggctgaaatcagcacacaaggggatgatactgacacaaagggaaccatgccaaaaagtgctttgaaggttttatggttgttttgaagggaatggggtgaggaaagtagggggaagggagtcctgagaagaatatagatgaaagagggctctctttgattagccagagggcaacataagatttggagaccatgggaaaggagctctggggtgccttcctgcttctcctgtgagttaagctttgacttcttataaatgttgtttcacacctcttctggacaggctcctaattaatgggagacaagagagcaaggtagttgtgtcattgatgctcacaagtagtgagaagttaaaaaaaaa

SEQ ID NO: 250427 - DNA, 437 bp, Homo sapiens
gaatctgactcactgaagactgtcaactgaatgaaggcttaaatttcatggtcttgggtgggagaactttttcatattctttccccatatggaataacaatctgccctgaaaacagggagtattttggcatgatctctttttgcttatttgccttccattttccataaagcaacttttgccaagcaccatacttaagactcaacttttttgcaaaaatatcagacaaagcactgtctttaagaacacagagaacacactagatcccttcttctgaaaatcactgttctatgttgtttgtggatatttttttagcattcactgcatgcctggaatgaataggctgtgtttctccccaaaagagcacaaattaatatacaaggtcaggttaaatagttaagtctgctttcctatcccttatacagaagctatccattca

SEQ ID NO: 250428 - DNA, 580 bp, Homo sapiens
attgggattacaggccacaaaatgcatggcacagggaagggtttgacaactttttgatggatgaacaaagaagattcaagccacttgtcaacaagctcaaagtgattgaaagtggaagcatttacccacacgctcatgcaggttgagaggtgctgcggagatgggtgtccacggatgaccgttcggaggccgacttcggggatgtggccccattagctcaagagtgggtgactccctaccacactgatggcgttggccaggacaggacaagcctactgcagtgacacagtgtcactgatccctgatgcccacgtgggtgttttactttagctaatgctgcagagataatgcagacagagaaatgaggccccagcgctgagcagcccaatcacctggttgtaagcagcgagtgtttctggctctgctcctgggccccaaaccactgtgggctcacgaagaatctttcagagttggagtcagaatgtcagggtttgagtgtagtctccaccccttaatgaccttgcattgataattctattccccgagcctcattttacccatctataaaatgaggacaaat

SEQ ID NO: 250429 - DNA, 461 bp, Homo sapiens
atggaaaacacttgtgtttgggaagttgtgttggaccataaggcatatatgatcaggaaagtggtgttacaaacaggaaatgtaatttggcataagatggaagagaaccctgaaatatcaagttagggtaaggaataaattctttttctcttttgtttgagatgaggtcttactatgttgcccaggttgaaatgcagtggctattcacaggcgtgatcatagcacactgcactttgagctcctgtctcaagcaatcctctcacttcagcctccaagtagctggaactacaagtgcatagcactgaatctggataaattctttttcttaaaaaatcatttgtaaaaatcaaaagaaaacaaaaagttgtaaagcatggtaaaacatggtaaaacgaattgccctgaacctatcattcgacttaagaactagaacataaccaataccttggcctctttccctt

SEQ ID NO: 250430 - DNA, 567 bp, Homo sapiens
cagctatctagtttagtcttggtaaagagctcataaggataggaatggagagtggaactaacttcaaactagccagaggcaggggaaataaatatatactgaaaggtacctcctctttcctgtgccatgcaaaggctaaaccagtcagcacttgcacatcaagaaacaattgtttgggtggctgtttattgttcctttacttcatctcctctagcttcattaattcccccagctcttcctccatttctcctatcttttctgcactagacttccttatttactataatgatttgaaaaacctacaggttgtggaaaggggactagtctggtaacattactcttctgccagggtttgctgtattaccaaagtgccattaatgtattctaggttcctcctgtgggcacatgctagtgctgcagagcattgcccaagtgaggggcagggcttcttcataccccagctacctatcctgtgagtgcttgtcaacctcaggttccacattaaaacatcatgtgtagactcagacttagaagtgaggattagattggattagaatggaaagaatt

SEQ ID NO: 250431 - DNA, 357 bp, Homo sapiens
aaaagtatgcacatatccacaaagattttcaaattctgctattcagtggccactaaggtctcctgtgacccttcatcaaaagaagcaacacaagcaacaagcaatgatttttaaaaagacactatgagcagaaggtctaaatactgttctgagagactagcaacaggacactagggctgagaaagccagtatggcacggaggcaggaagtgactggaggtgctcttggcccaaggtagctcaaaaaaagtatgaagattataatttttccaaaaactttctgggaattactatcttgatactcagggctaatttcaccttttaatgcaattgtgtaaagaagtacaagcttataaac

SEQ ID NO: 250432 - DNA, 714 bp, Homo sapiens
tgaaaaccaggtaatccctctcacccagagtatcacacattcccatcctggaccctctttatgagacaggggccggaggtagcagttgctaggcaacaccaaccaccccacagcttctcaccagccccatagaataccatcagcatcccgattataagaattaggtattctgtcccattaatttgcccaaagatggaagaaatcctaaatgactatctcaccctcaaaagtagtagttacctcacttccttcaattccttgctcaaatgtcaccttctcaacaaggtcaaccctaaccactttatttaatactgcaatctgctccctccttctaactcctctattgcactctactttttttctatagaaaataaaacattatataatgtatttatttaggaagtttactgtttattgtctgtctttacctcctagagcgtatgttccacatttaacagtaagagtttattgctcacacatctgagctaatgggctatctgttctgctgatctgttctgcctcagctagaatgactgggatgacttggctttccttcatgtgtcactcaaccaggttggcctgggtatgttctcatggtgttggaagttgtccaagagagtaagtcccaaatgcaagcccatttcaagcctctgcctcaccggatgtctgttcatatggttgagcccaaagtcaacaatcagcgcaggtcacctc

SEQ ID NO: 250433 - DNA, 521 bp, Homo sapiens
tcaaatcaactagggatgaaaaacacttgtattttaaatgttttttgtttaagtcaagggctattgaggaaactggaagttggtaaatcagagaagcatataaaatatgggaaagagattgcggggtcatttatttctttgctgttgaaatagttgtcatgatattaatgttctagtcgtacttagagaaattcagcaaaaaagtgcttctgatcatggtttcttagcacctcctgtattagtatttaaaacctctatcatgtcttccttgggatttaagacgtttgtgttttatgggtagttaagaactaaaatagataactgcttgagaaactgaccatctcctgcgcatattcagtttaggagtgatctggaaaccacaaggatcgtagacttgaaaataaccccaaggtgacaaagcaatctctgagtaccagtagcatgtgaacacacctcagaagagtcaaatatcctaatattttaagtctttctagaagccagctgttagtagaagtgttaga

SEQ ID NO: 250434 - DNA, 737 bp, Homo sapiens
gatgaaggtagcttttcctacagaaagtcgtgcgtttttgggttcttcgttggctgcttttgtgattgtgtaggctgtacatgcagattcgtttcttgctcatgatttataggtgcattttattcgatgaggaccccttactttgctagatttcggatatgaatgtctctgcacttgttacttttccccctccacctcctgattcagtcatctgaaattctgtattgttaagcaaggtctaagtattccttttagttatatgttccccatgttttttcttagaggaaatgtttgatagtttctcctaaaaaattaataattggcacaaaagactagttttgtgtcaaaagtagttttgagttttatctaaagactgacattggcttgaagttgggctttccagattcaaaaatctgccccagatgagatttagatgcagagggttagtgtccttttccccagggggatggcgtgatgatttgttcaagattgtgttatagtagctgccccttttaaggcagctgtgtgtgtgtgtggtggggagtgggcagtgtgtattccacatcaacatcctagaaagaacgaataaacatttagtgatctcactgtttctacttacatttggtataatgtactgtttttattggtgctattacctatgttaatagggcactttacaaaattttcaagaacgtttttattaaaattatttcaaagacttctttcttaaaatatga

SEQ ID NO: 250435 - DNA, 386 bp, Homo sapiens
ttgagacagagtctcgctctgtcacccaagatggagtacaatggcaagatctcagcttactgcaacagagtgagactccatctaaaaaataaaaataaaaaataaattaaatttctattcaggaggactggttagagcataatttttatcaaataaataaggaaatcaagacaggagaaaggaaccatggaaaggagataaaagtacctgccccccaaatcttttgttttaatgacctgagctaaactgctatttttttcaattaattatttattaagaggagttaaagacttattcttaaagttatcttgattccaaaagcatttcacaaactggcagagataatctaatacaattaggacagaacacaagaaaataggtgtcac

SEQ ID NO: 250436 - DNA, 827 bp, Homo sapiens
gcctttctatattttgacacactgaatcaccatgtccgagtttgttccattatgtatgatggctcatgtttggggatgatgaatcatgattttttttttctgagcccctgcctcccggcagggcctccctcctctcctatttgggtttgagctttgctaagcaccacccctgctctgtgttgggtgctggggcatctcccagaatgccccaccatctgtgaccccataggaggaagaaggggctccggggctctcatttgctgaggccttcagaggcatgagctcatgccatccttgcaaacctccagcaaaatgagtgtcgtatttctgtttacagatgaggaaacagagaagttaggtgccttgttcaatgccctagaggtagtaagtggcagagctgggattcaaacctagaaacacctgtctccttgtagcatgcaccatgtcagactctggagaagccttttgtggattgtctctgccatgagacctcacagaccctaggagagagatgctgtttgctacggtctgaatgtttgtccctccaaaactcatgttgaaatttaattgcccttgtagcagtatgaagatgtgggggcctttaagcgatgattaggccacgagggctctgcctgcagggatgggattaatactgctataaaaggccaagttcagtttccttctgtctctctttgcccttctgccttctgctgtgtgctgatgcagcaagaaggccctggccagaggttggggtttggggttaggaaggccttggactttccaagccccagactgtgagaaaataaatttctgttcattaaagagta

SEQ ID NO: 250437 - DNA, 1101 bp, Homo sapiens
  misc_feature (68)..(68): n is a, c, g, or t
  misc_feature (72)..(72): n is a, c, g, or t
  misc_feature (75)..(75): n is a, c, g, or t
  misc_feature (79)..(79): n is a, c, g, or t
gccagaggaaaagcacacatcatatacacaggaggtataaaatgaatcacagctgacttcttaccatnaacnatnaagnccaggtccacgcgcggtggctcatgcctataatcccagcactttgggaggccaaggtgggcggatcatgaggtcaggagattgagaccatcctggctaacatggtgaaaccccgtctctactgcaatagaatgtggctgccatgctggctttgcaacttcaagagatcctctgcacccttacacttctcagccaatttgtggaagaagtggccagtgccttccagtgccacatcattgtggtcaaaatagaagcccagaatgagagagatgtaggaggcctacagatacaaattgaccaggcgattgacagctgcctccaactcgatgaaataattctgatgagtctagtttgcaagaaggagctaaccacaaaaacagtgttggctggtctcagaagcaggagatggccgagaagatggtcctggaggttgcaagtggagaggacagtggagggcagttggaggctggaagagagggagtccctgggtttgttccatccaaatactattgaagcaagagacagatgggtgggactgtcaaatgcactgccagaacatccatgaacagctcatggttcaagaagtaatttcaacttttaaggcttattatttaggaaatacattttataagactatagctgccatagatagtgagtagagtcaattaaaaaccttctggaaaggagtcaccattctagatgccattaagagcattcgtcattcataggaggaggtcaaaacatcaacgttaacaggagtttggaagaaattgattccaacccttatggatgactttgaggggttcagtacttaagtggaagagttaactgtaaatgtggcccggccagtaagtggtatttttttaagaatttcattttccaactgtttcttgctagtatttgaaatacaattgatgtttatatatttttcaagcttgctaaactagcctgggaaacatagcaaggccccatatctacaaaacatttctaaaagttaattgggcatggtgctgcatgcctata

SEQ ID NO: 250438 - DNA, 525 bp, Homo sapiens
tcagaacagactcccactaactagaatcatcacaggcagctctgggaatgagaatgtgacgtgttcggtcaggctggaacagctttcctccctcccccacttcctcgctgggggcattcgggaaatctgatcattaactagctggggacacatggagaacaggcatgcagatgatgatccgttgtcttcccctgtggcagtctcccgagtggctttcaccacaggtccgatgctccgttttgctgcccaaggaattctgccttgtggccttgtggggcacaggctctctagtttctcttcttcatgttgttttttgttgttgtttttgagatggagtcttgctctgttgcccaggctggagtgcagtggcacgatctcgctcactgcagcctctgcctctcgggttctagcaattctcctgcctcagcatccggagtagctgggattacaagcacgtactatcacacctggctaatttttgtatttttagtagagacagggtttcgccatgttggccagggtggt

SEQ ID NO: 250439 - DNA, 559 bp, Homo sapiens
gccctgatgttgaaggttcaagatcaatggaaattacttggattaagatggctgactgggttcctctggcaggaaaaaatatcaagtacccctaaagaaaatccaccaaaagggaagttagagggagtgatctgtcaaccgtaatttggaatcatcactcactgacactgggcaagcatgatttcagcaaagttggcaagactcagctatcctggtagaatagtcatgctttgggaaaagcagctaaccatatgatggaaaaccgtcacagtagtgctcttgagacccaagcagggacatggtgcaaggttttgaacccaaaaaagcacataaccatgaggctgcacaggactggcattcaacagtgccaccatgtggcaggaactggagtatagcagcagtggactgatgagcctctcttgtcctctctgtacttgatgctgaactgatgggtctgaaatgaataatatcccaggtttttggataattacaggtggcatgggaaggtcttacaaggaagacccctgccagtgtggctaagtgaagtcttgagtaacga

SEQ ID NO: 250440 - DNA, 330 bp, Homo sapiens
agatgcttttctgcagttacagcacctcatggcagctgtggtctgtggctgtttggggcattgctgttagagccggccacggcagaattgtagggacagtgacgtttgcttttggtcttgccccctccccacaagtgcttcctcccttctcaccctaccatcccgtaatacacagcactcctgtcctactgccctgtgtttggttattctcaactgtctgttccccagccccggcaaaagggtcagttccggggttcttaacctttatgactcaggcctcttctccaaatactgtttaaatgcatgtataaatacataggattacagaag

SEQ ID NO: 250441 - DNA, 504 bp, Homo sapiens
tgggtacctccattctgctcatgaaagtcacagaggggaccggggaccccaggcccctagcgataccagcaccccacacaatgcctttctgggatacacccccccaacatggcctgcccaaggcatcaggagctgtgtagaggagtcagctgggggtggcagagccccagggaacaatcatgggtcgctggcagataagccatgcgcccacacagcacaggccctcacccctgcagctgggggagccctccttgggagcgggcccaggatccgggcaaaatgacacagaccggatccaggagcagactgagcaaaagtggcaaaagtattctccaggttaagggaatattttcaccaattgagagaccagctgtccctccagacccaagggttccacatccctggaggcaaccaagccagatgcaaaatatttgaaaaagaaaaatgaaaaaaagaacaatacagcaataaaaaagaacacaaataaaaaatacagtatagcta

SEQ ID NO: 250442 - DNA, 1051 bp, Homo sapiens
gagggggtaccccgaggtgctccgctggagactctgctcattctgggggtgcggttgacggctggtcgtgatctttcccgtaatctgtcccctcttacggaacctagtcttcgttctgtccatggccttcttctggacactgctaggatccagaagagtatgttatcaattctcaagcctaggagaagtcaggagtggagaacagctctgagaagatactgttgtccaactgatctccaggcaccacggagtccggtccctccaatcaggaaggtcggaatctctgatgtcatcgttcatgccaacctggcaaccagtttgaaaaaaaacacatgtaactgccaggctgatctcttgtcctggagatcctgggtgaatggtatctcctgccactgtcccaacctcagaccattgtccaaaagcatcttcagggactccacatccctgtgttccctgtcccagcagaggctgtgtcctctccactcaaagcctgaagcatgttggggtctcttcatctctgtacatgcccatttcagagtccagtctggtgggagagggaacagagtgggaaagaaaactagggtaagcagaaatgatgaaaccttataagagtgagattatcatgtacaagagtgagattatcacgtacaagagtgagattatcacgtacaagagtgagattatcatgtacaagagatcccaggaatactgacttgatgaaaaagtcacatcagagcactcagtttggcagagcttttctgccgaatgtttactcacattcactgtccgagattctatactgggggtacacacgtcctctgccctaaggcaattttgagtccaagagacattttgaggcctaaagatcataggaaactgcccctgagctcacacatatttccaatggtgtccccaatttcagggaatccatggattacctaagccagcccctccagtttggctaagaaactctagtctatatatcaagttttgtatcatatgtattgctctgaactcagaaatttcccttccatttatggattctatgaat

SEQ ID NO: 250443 - DNA, 451 bp, Homo sapiens
  misc_feature (392)..(392): n is a, c, g, or t
caaataggccaatcattaaacgtagacttgtatgcaagactgcatatattctgtagtgatttttggattctagttccattttccatcactcctctacaagcaaaaccaaaccccaaactcttatctcaatgctattttgttcttctgcttggaaagtccccacctcccccatgcctgtccaccttggaggatgtgaccagtgtcactgctacaacgaggtccttgcttcactgtcaccatttttcatgtgacccgctctcccatgtgcctggcttatttcacttagcataataacctccagttccctctatgttgttgtaaatgacagaatccctttttttttttccttttttttggactgaatcttgctctgttgcccaggctggtggttncgataataactagtatggggataaggggtgtaggtgtgccttgaggtaatccgtgaggg

SEQ ID NO: 250444 - DNA, 441 bp, Homo sapiens
tattcctttatagcaacaccaaacagacgaagacaatgtatatagaacaaaaacaaagacaacaaaaaaagctgaaagtagagaacaactatagagactgagcatataaaatacttttatgatcaagtaattttacaaggggggcattatttgcacgatattaaataatcccatagatcatgcacttgatagtgattatgaagaaagcattttttttgtaatatagactatttttctcaggcaatgccaatgacaaatttctagaaacatttctttccaatttttcccttgacctatgatatttttaactttcaacaatattacagaatttggggtggggtggggactgtatttccattttcaggtaacaggtgaaagaacggacattataaagatattgaatcagaagaaaaataattcatgcttacaggtgattacaaa

SEQ ID NO: 250445 - DNA, 222 bp, Homo sapiens
aaggtgccccaaagctttcaggtcaagccacagtgaaatctctgctgcatagttggtcacatggaggacatcttcagggcttcctcttggactcttcaaattcttctaccacctggggcattttgagcagtggggaaaaaggaaactaaatttatattcctccttagacgcttcctgaagaaaaggaaaaataaataaatactggaaaatgcttgtgaattt

SEQ ID NO: 250446 - DNA, 435 bp, Homo sapiens
gccatgagttcataatgatactttaaataatctcactggtcgtctaaaggttgctaaggcaccaactcatagtatgctaactgataaatgaaagaaatcaagcatcaatactgccatttctttacagactcatttcaggggaatcaaagctgatgagggaaagttctatatggaacaatcacagacaatatatacaggaagaataacagaaatggataattaatccttaatgaaaaaatagctatcagcaatgatcaatggctgctaaaacaattaggtgaaagtttgatgaagaccatattggatgaatcaggctgacaaatgctgaaaccactgatccatcttaacagcattaaaagtgggacagacattatatgcctcatgtgatgccacaggaagcacaccactttataatacaggcttgcaaaaaaaaaa

SEQ ID NO: 250447 - DNA, 750 bp, Homo sapiens
tatgacaattgtaaataaatttattaatataaatatatatatgtatccaacaacggagcacctaaatatataaagcaaaaattaataggcctaaaatgagacataggctgaaatacaataataataggggacttcaacaacacatttgtagcatttgacagaccattgagacaaaaatcaaccaagaaacatcacagttaaatggcactgtagagcaaatggacctaacaggcagttacagaacattccatccaacagctgcagaatacatattcttctcaacagcacatggaacatctaagatagatcatatatgataccacaaaaaaagtcttggtgattttttaaaaatcaaaattatattaagtatcttttctgaccacaatggaataaaactagaaatcaacagaaggaactttgaaaactgtacaaatacatgaaaattaaacaaccatgctactgaatgactaatggatcaatgaagaaattaaaaagaaaaatttaaaaattattctgataaagggaaatgaaaacacaacttttcaaaacctatacatacaacaaaagcagttctaagaggcaagtttatagcaataaatacctacgtctaaaaggtggaaagatctcaaaacaaaaaaaactactctaacattgcacctcaaggaactagaaaaatgagaacaaccgaaatcccaaattagtagaataaaggaaataataaaaatcaggcagaaataagtgaaatagaga

SEQ ID NO: 250448 - DNA, 1177 bp, Homo sapiens
gagtttagctcttattgtccaggctagagtgcaatggcatgatctcagctcactgcaacctccacctcccaagtttaaatgattctcctgcctcagcctcctgagtatttgggattataggcgtgtgccacagcatccagctaatttttgtatttttaggcaccctaacatggtgaaaggccaggctggttggccaggctggtctccaactcctggccaggctggtctccaactcctggccagcctcaagtgatccacccatcttgacctcccaaagtgctgggattacaggtgggcgtgagccaccgcacccagccacctttctttttgtcctcgtttgcaaatacagaatggacctgagtctgcaaactcagaagtgcgagacatgtatttttatttttataaaattgaactggactcctaccaaaagcccccaatgcagagtggcagaaactttatcggagtccattttggatcatcatttcccttgggcttgtaccagggcctggaaccttctgtgaggcccacccagtagacacttccacaccacagagagactgagcatgagaaggtccgtgcttgaaaaaggcctaacagtgggatctcggtgcaaggatgggagagtggaaaccgagtggtgaagagatgactgtggcacttagcagggaattcctgggagggtgaggcttcgggaagtttccagggagacaaaccctgttaagaatggctctagggccggacgtggtagctcatgcctataatcccagcactttgggaggccgaggcgggcagatcacgagatcaggagttcgagaccggcctgcccaacatggtgaaaccccgtctctactaaaaatacaaaaaaattagctgggcatgatggcggatgcctgtaatcccagctactcgggaggctgaggcaggagaatcgcttgaaactggaagtcggaggttgcagtgcgatggttcaaagcagttttgggggaagtggtggggaccagagtggaatagtgggctcaggagagaatgagaaaggcaagtgattgaatctgccaaagacagatcaccttttagagggcaggagagaatgatcagtggactgaatgtccccatggggatgaaggatggttggggtcagggtcctagagggagggctggaaggagggaaggagatggc

SEQ ID NO: 250449 - DNA, 530 bp, Homo sapiens
gagatgactcaatgtttcatccaaatgcatgttgttcacttttctagtaaaagggaagagagcatgtgtgatgtatattatatataattttttactcctggaacccataaaagataaaattttaaagcacgtaacgtcattggatgtcagacattctctgaatttacatatattatctgggtgctgacaatacctctttactctacacatgaataaactgaggattatagggcacacatgtcttgcctgagctcagatggttatgaaactagcaatgaagctgggctgggattctccttctcgatgtttgaaagcagagtgtgtactctaagctacacacaatagaagacccttgagaatcacaaaataccaattatttcaattgataaatttgtgcaatgtgctcacatacatcactggcaaatatatccgttgggataatttctaaattgcatctagtaagaaagagttcattaaacttttcattttgttacattaaaatccatttttcttccttgcattactcatga

SEQ ID NO: 250450 - DNA, 459 bp, Homo sapiens
tatttgagcaataagtgaagaaatgggtaagagaatgttaggagaatgttaagagaaagttaagagaaaaaggcaggagaaaagaggtgattgccacagactcgcacagtgcctttgagacctgagtatttcataggccagactgtgtggttggccttgcaggagtcttatagttacttgaagtctggaatcttcctgagaagaaaccagatgggctgcattctgtgactgtgtttgcctcgctatttggattccttaaactctgcatgatgatcccgtttttctagatcagtatatttttcatgccgtcatatctcagcatcccactagagttgtctggaagttgttaggttctgctgccggctttgcttgttatccttggaacttggtttccttatctctaagacagatggttgagacttactggtttccagactgtggtgtttgagccctacttca

SEQ ID NO: 250451 - DNA, 876 bp, Homo sapiens
caggaaattgggacacagacacaaagagaaaacaatgtcatgtgaagacagaggcaaagagtggagtgacagatgtacaagcgaagaacctcaagagcgccggcagttaccagaagcttagagttagggaaggatcatcatctgaagcaagtcctggcctgtcaacatgttgatttcagactactagactccagaaaaccatgtagaacacgcctacttccctttcaccattcaccatgaatgtaagtttcctggggcctcctcagccatgcttcctgtacagcctgcagaacaccatgaaagtggacaatgggaattccagctttgggacatcagacaaggcttgttttcactaaactaactggacacttgtcattcgtaaattgacaatatatgtataggactatttctagacaatgtgttttgttttattgatctctatgttaattcttacaccaatttcacattgtctttattagagttccttgacagaaagtctcaatatcaggtatgagtccttaatatttgttattttttatcattgtaatggatatttgcattttttaattttcccatttaaatgttgaaatcagattgtcaatttctggcaaaatcatcaactggaaatgtggtttaaaatatttaaaatccataaatcaacttgggaccatataaaatgttaacataataaaatttttgattcataaatgcaacaaatatcttcatatatttagttttttctcaattttcccatcaatttttatagattttagtatacacatttttcttataatctgttatacttatgcctaagcatttcatattttattctattgtgaattatgtcatttttaacttttagttttctgttgctca

SEQ ID NO: 250452 - DNA, 780 bp, Homo sapiens
caggaaattgggacacagacacaaagagaaaacaatgtcatgtgaagacagaggcaaagagtggagtgacagatgtacaagcgaagaacctcaagagcgccggcagttaccagaagcttagagttagggaaggatcatcatctgaagcaagtcctggcctgtcaacatgttgatttcagactactagactccagaaaaccatgaaagtggacaatgggaattccagctttgggacatcagacaaggcttgttttcactaaactaactggacacttgtcattcgtaaattgacaatatatgtataggactatttctagacaatgtgttttgttttattgatctctatgttaattcttacaccaatttcacattgtctttattagagttccttgacagaaagtctcaatatcaggtatgagtccttaatatttgttattttttatcattgtaatggatatttgcattttttaattttcccatttaaatgttgaaatcagattgtcaatttctggcaaaatcatcaactggaaatgtggtttaaaatatttaaaatccataaatcaacttgggaccatataaaatgttaacataataaaatttttgattcataaatgcaacaaatatcttcatatatttagttttttctcaattttcccatcaatttttatagattttagtatacacatttttcttataatctgttatacttatgcctaagcatttcatattttattctattgtgaattatgtcatttttaacttttagttttctgttgctca

SEQ ID NO: 250453 - DNA, 463 bp, Homo sapiens
caggaaattgggacacagacacaaagagaaaacaatgtcatgtgaagacagaggcaaagagtggagtgacagatgtacaagcgaagaacctcaagagcgccggcagttaccagaagcttagagttagggaaggatcatcatctgaagcaagtcctggcctgtcaacatgttgatttcagactactagactccagaaaagtaagataaaaaatctttaatatttgaaggtgcccaatttgtggtaatttgttcctgcagcctgagcaaactaacaagctcactttcagttcaatttcatggaagaatagaacaatcttttggtcccataacacaactcctcagtggagaactctgagtgattttaaaaagacataccaaatattgtcccttttatgctcaaaatgatccagtatttctatgtcattcttaaaataaaaactaatataatgtctacaggcttata

SEQ ID NO: 250454 - DNA, 535 bp, Homo sapiens
ggtgtggctgaagcctctgcagggaggtcctccccagtgaggaggaatggattggggtcctgcttaaagaagcagtctggccatgatcggatagagcagctatgctctgttggtgggggaaccttccttgtctggactgtttggactctccaaagctggcaggctggaacagctgagtcgaccaatctgcagagatggtggccaccctcccccggaagccctgtcccagggagagatcggagctctgtccttataaccctgactggagtggctaaagcttccacagggataagtgtattttttgcatctaaataagtatgtccttttcatatataatctatttattattcatttactgtctaagtatttgagtgactatgttttcccttctggggatatattagtttacaatattaagatcttttctcttgtgcaggttaaattttagcaggggtagcgtgcatagggagacagacaataagtgatagacatatgtaaattgagttacatgtcaagaagctgagaaatgctatgg

SEQ ID NO: 250455 - DNA, 681 bp, Homo sapiens
cttgtactttttatctgcatactctactaaatttacttcatatttattcagggtctttcatatcccagcccctgggtgtttgtttttcttcagtttctctgatgggtcgagcttgactttccatgtagtgagaactagaaagtaatcttctgtagataagatcatgctttaaatcctacagccttgaatggctgttggtttttctaggccctccattgaccctatgtgtagagacttccctctccgtgcctttgaagagggactccaggacccacgttggggcggttcttgcttattgcttttgttgcattttcgaaagtgttgtgggaaatggagagtaaaaatgggaaatgtagaataaaagtgcttcacggctacattttcccttgcagttttatccactacgagtttggtggccccacaactttgttggaaagagctcactatcgagattcttagagtccctagaaaaataaaataatgagacataagaacgcaggagaaatgtgcaagccaggtcagaggacaaactgcagaacaaggctcaaagatgagactgctcatcaaacctccaggtgacgaagcacacacacgcgctgccacatcggagcgacggatgaagggagcggttatctgggggaaacagaaccaggctggcttaattttctcttcctagtttgg

SEQ ID NO: 250456 - DNA, 177 bp, Homo sapiens
cgatatttgaataatatgtaagtattggggcaagattttcttcaatgctatttgtgataagtgtggtgtaggtgagagtaagaccaatgtcttgcttttgcaggaaaaaagaaaaacacactgactgggatatagcagtcctgaatgccaatttgagacaaattccagcaagcaatg

SEQ ID NO: 250457 - DNA, 650 bp, Homo sapiens
cgctcagtctgctcagtcgatgtgaggactgtgaggaagggttcccaacaggacagtccgaaggacacccaaatcctgagggctacagaataacagaaaggagctggaatcagcaccaggagagcaggagagcgacctggctgtgatctcaggtcaagcccaaaatcacaaaagatagcatcttcccatgtccagatggactgctctatatgcctggtcctcacctgggtgacattttgtgaccagaagagaaaggccaagagaaacgaacatcagcttctctaacctatttatagccaggatgatagaatcacaagattttcaaggtttataggtgatgggctgctctcaaaaggagctttgttgtgaaaacgtaccaaaagaaaatggatgagtgattctccaatacgttgcttttcaatcctatgacatcctcacctctgccctatgggtagattctttgatgtctgaaaagtttctgtacataaagaggaacattcattactattgtttaatgccccatttgttaactgtgtgactttattaaaaaattatttttgaaggagtaaaccatcactattttaagtattcacatagtactttcaaaactaataaatatagacttggaataaaacaaattagatttacta

SEQ ID NO: 250458 - DNA, 394 bp, Homo sapiens
aggtatatggcttaccacaaactacctaccacagagtgctctttttgtggagcaggactcaaaaccattattctctgaaagtgtggccaacaattagaaataagagcaagagccgggcgcggtggctcacgcctgtaatcccagcactttgggaggccgaggcgggcggatcacgaggtcaggagatcgagaccatcctggctaacacggtgaaaccccgtctctactaaaaaaatacaaaaaattagccgggcgtggtggtgggcgcctgtagtcccagctactcgggaggctgaggcaggagaatggcatgaacccaagaggcggagcttgcagtgagccgggatagcgccactgcagtccagcttgggcgaaagagtgagactccgtctca

SEQ ID NO: 250459 - DNA, 968 bp, Homo sapiens
agcacatactgtagttatttctcgttttgctttggttttttaatccaatctgaccacctctgcatcttgattagattgtttaattgttcacacttaacactattacccactgttattttgagagaaatttcttttgtgtttctaagttctaaggcccctttcaaagttatggcatttttttctgcttcttttgagaacaaattcctctggggcttacctgatgcagatactgaacaagcaaaggagagaacaaaagctcagggacaagcacaagagtgggctgcatgaggagtgaaagttggaaggacagactcagccacacatttttggctgagatactatttaagtacttccggttaggattctctcaagttggttttctctgccccatgtcatcctcctctgtcttaatagttgagaatcttggaggtggggaacttgcagttactcatctgttcttcagttaaaatctctgtgatctatcttgtgatattcctttctagtcactaagggagaaaccagggtctttgattttacatagctttgagaggagctacagctttaaattggaatgcttttccaaaatttaatagctgcctgccctaaggggcagaacttcatgaaggaatgatttctagattctcattgaagacaactgaaaatggatgcaccctggattcagagcaagcactggaagtggcccccagcctcagttcttctcggatctgatgtttaatggggaagagaaagggtgagatggaagctttccctcgccactgaaaggcccatctcatccagggcctgcaaggatgctgattaatcatgatgagtgagtggggtggaaatgcatggcccatgggccaaggcgagaagcaaaggtggaaccagtcctgccagtggattcattggcagagcttggccgggagggcactcttctggagaaaagagaagagggaatgacaggaaaa

SEQ ID NO: 250460 - DNA, 781 bp, Homo sapiens
tggcagacgggcacacagccttgttccgttgcaaaacaagtgagagatggtattggtgtaacatgtaaaaatgcaaatacttaatttttatcaattcatgtgtggggaaaagctgaagatacgcgtgggaatggtgtggtcacttctaggggtgtcggagggtagaacttcaactgttttgctttaaaaagtaaggatcgcatggcagaactagcatctgttcacctgttgatcctgataccgtggattacgagaccccccctcttttctgtgtggttcagaaacaagcccctcagacaggacacagtgcccaggggcagtgacctgcaggcccacccactgccatctccgctggtctcggggttgccacatagcctgccagctgcggctgcttcctgggtgccctccagggagagcaggggatcgtgggtccccggcggtgggtgtttccttctccggggagagcaggggatcgtgggtccccggtggtgggtgtttccttctctaaggtttgctgctgtttccaggcctttctgtggggcctgggtcctgtcctggggccaagccacggggtcatcctcagctgcactgggcgtgccaaccacaaacgagtcacttgctacaagcagcaccatgcagcctcctgtctggacgagaccctgccccccacagactggagacgcaccccgatttcccaggtcacagggggaagtgtggatctgataagggactaaatgtggcgtctttcatatgtttctcttacatattttattttaaaatg

SEQ ID NO: 250461 - DNA, 674 bp, Homo sapiens
ggctcggtactacttttccacgggggaggaaggtcatgtttggttggaatatattgaatttgagatacccattatctgtacaagtggtgatgtggaggaagtgtttggataagggagttgggagttcaaaggaaaggtctgcagcttgagatatgttttgtgagttttcaaggtgcagaatgtatagtggatgaggtcactggcaactggggttctcaaccctggcctctggatatttggagaaagatctttagggcaaagggattaggaaataaaatacaaatcagcgattatgattcatttggaatggagtgggtccaaggtatcagcatcctttagaagctccctatatgattctaatttgaatgcaggattaagaactcttgcccagaacatagataaagtgcaaaagtactccaaaaactaagccctgggccattatgccactgtagaaaatgaagagaaactatcaaaaaagtgaggaagagtagctagtaatggagaagggataaagaggggcagcttggaaaccaaatgaaggaagtattttaaaacagagggagtgatcatgtgtccaaagctactgagaaatccagtaagatgaatgagaagtgacattgaaattgtcacgtacaaattcatggtgacttcgccttttgtgttgtgacgggcag

SEQ ID NO: 250462 - DNA, 382 bp, Homo sapiens
acttgaaaaccgtaatcttaaaattagtgagctcattgctactgactttgtccttaatctaggccctttcaaaggaaagagctagaaaaagtgtgtgtatgtgtgtgtgtgagagtgtgcgtgtgtatgtttaattttaagactaaatacatcaggagctcacactaatacttcctattaatatacaacccaacaggattttaatttagtcacataaatcttgtatcatatcaatgtcctttcttcccagctgaccatcctacaatcttaattcttaatgatagtagcgtacttatttgcttatgctacaaatacacttataacaggctcagaataataataccaagactactaccatcagtagtgatgtacacatcctgtg

SEQ ID NO: 250463 - DNA, 323 bp, Homo sapiens
cttttcctcaagagggaacaggaggagtggaacaggtacatccatagaaaaggtctgggagaccccaagaatccatatccaggctgattggtgaaggtatttctctccagagatgataaattctacaggaagttacatcttcaccaaatgaaaagactgtaatgaaagactgcattgaacacaaaaactcaaggaaacataacactatgacagaacataatagttttccactaaccaacctgaaaatattagagatctatgaaatatctaaaaaaaaatcaaaataattgttttaaggaagctcaagatgctacagaaacaca

SEQ ID NO: 250464 - DNA, 403 bp, Homo sapiens
agctgctgagtcccctggggcggccgggcactggggaatggtgaactcgccgtgccgcgcctctgccacagtctcccgtgggtccccactgccgggagttttacctacctcccaccctcagccacgagcacctgcaggatgcggtgccatcctcgccggtgcccgctccccttccggaggctctctccaccctcactgacgcctcctcgggaaagcccccgctccttccccgacctcacagcatgccaggtctggggcttccgctggggggcttacctgttttccacccctgctagactgggagctccagggcaaggccgtagctgccttgcggattgttacgttgtccagcttgtctccacacgtgatacccagcaggtgcctaataaacttgtgtagaaag

SEQ ID NO: 250465 - DNA, 710 bp, Homo sapiens
gttctctctaaatactgaaaaacacaagagaggagactaaggagacatgatgacttaatgcattgtatcctagattggatcctggaacaaaaatggggtattagtaaatagctggtaaatttctttctttcttttttttttttttgttttctttttctttgagacagtctggctctgtcgcctaggctagagggttgcagtgagccaagattgcgcacgctactgttctccagcctggtgacagagccagactctgtctcaaagaaagaaagaaattaatgtaaattttcattttagatcatctagcaaaaaggttttaaaactgaattttggagaaaataatatatggctaggtagtttatcaaacatttttatcttgaaatgtttatattcttgtatttaagatactctgtttctttattataatttttaaaaaacagaactttaatttgccctgcttttataggaaaaaatatagcaaatattgaaaacagtggccataaattctggaaatacagggaagtatacacattagtttaatgttacaatacttggtaagattgtagctatcatatgatgtattcagcatgttgtccctcattagcaaagatggctcagtacacaagttcaaattgcaagagcactgcattaatataacagtttcatcaatctctatacatgcatgtatgatttactgtctcagatgattt

SEQ ID NO: 250466 - DNA, 700 bp, Homo sapiens
  misc_feature (1)..(1): n is a, c, g, or t
ngccggtccatttccctcgcgtgccgcgctcacccacccgcggcatgagcagcgcccccgcgccgggcccggcgcccgccagcctcacgctctgggacgaggaggacttccagggccgtcgctgtcggctgctaagcgactgtgcgaacgtctgcgagcgcggaggcctgcccagggtgcgctcggtcaaggtggaaaacggcgtttgggtggcctttgagtaccccgacttccagggacagcagttcattctggagaagggagactatcctcgctggagcgcctggagtggcagcagcagccacaacagcaaccagctgctgtccttccggccagtgctctgcgcgaaccacaatgacagccgtgtgacactgtttgagggggacaacttccaaggctgcaagtttgacctcgttgatgactacccatccctgccctccatgggctgggccagcaaggatgtgggttccctcaaagtcagctccggagcgtgggtggcctaccagtacccaggctaccgaggctaccagtatgtgttggagcgggaccggcacagcggagagttctgtacttacggtgagctcggcacacaggcccacactgggcagctgcagtccatccggagagtccagcactaggctccacggccccagacaccttccctgaggacactcaataaaggttcctgaatcttcctgcc

SEQ ID NO: 250467 - DNA, 894 bp, Homo sapiens
  misc_feature (1)..(1): n is a, c, g, or t
ngccggtccatttccctcgcgtgccgcgctcacccacccggtgaatgccctctgctggggtggggaagggaggggagcgcgggaagactgcgagcccctggcagccgggtccagagctaggccgggtccagcccccgggttcttcatccgctacccaggttgggcaggctgtgtgtggctcgaaacggggctcttgagacgctgagcgcgtggtgccacccttcctgtccgcagcggcatgagcagcgcccccgcgccgggcccggcgcccgccagcctcacgctctgggacgaggaggacttccagggccgtcgctgtcggctgctaagcgactgtgcgaacgtctgcgagcgcggaggcctgcccagggtgcgctcggtcaaggtggaaaacggcgtttgggtggcctttgagtaccccgacttccagggacagcagttcattctggagaagggagactatcctcgctggagcgcctggagtggcagcagcagccacaacagcaaccagctgctgtccttccggccagtgctctgcgcgaaccacaatgacagccgtgtgacactgtttgagggggacaacttccaaggctgcaagtttgacctcgttgatgactacccatccctgccctccatgggctgggccagcaaggatgtgggttccctcaaagtcagctccggagcgtgggtggcctaccagtacccaggctaccgaggctaccagtatgtgttggagcgggaccggcacagcggagagttctgtacttacggtgagctcggcacacaggcccacactgggcagctgcagtccatccggagagtccagcactaggctccacggccccagacaccttccctgaggacactcaataaaggttcctgaatcttcctgcc

SEQ ID NO: 250468 - DNA, 676 bp, Homo sapiens
  misc_feature (1)..(1): n is a, c, g, or t
ngccggtccatttccctcgcgtgccgcgctcacccacccgcggcatgagcagcgcccccgcgccgggcccggcgcccgccagcctcacgctctgggacgaggaggacttccagggccgtcgctgtcggctgctaagcgactgtgcgaacgtctgcgagcgcggaggcctgcccagggtgcgctcggtcaaggtggaaaacggcgtttgggtggcctttgagtaccccgacttccagggacagcagttcattctggagaagggagactatcctcgctggagcgcctggagtggcagcagcagccacaacagcaaccagctgctgtccttccggccagtgctctgcgcgaaccacaatgacagccgtgtgacactgtttgagggggacaacttccaaggctgcaagtttgacctcgttgatgactacccatccctgccctccatgggctgggccagcaaggatgtgggttccctcaaagtcagctccggagcgtgggtggcctaccagtatgtgttggagcgggaccggcacagcggagagttctgtacttacggtgagctcggcacacaggcccacactgggcagctgcagtccatccggagagtccagcactaggctccacggccccagacaccttccctgaggacactcaataaaggttcctgaatcttcctgcc

SEQ ID NO: 250469 - DNA, 341 bp, Homo sapiens
ccagacacagtagctcatacctgtaatcttggcactttgggaggccaaactgggaggattgcttgatacagcctaggcaacatagggtgtttttttagagatctctaagcctcccaaaatgctgggattacaggcattagccaccatgtctggcctaccagagatctctaaaaaaaaaaaaaaaaaaaaaaaattagccaggtgtggtggtgtgcacctgtagtcccagctacttgggaggcttagataggaggatcgcttgagcacaggaggccaaggctgcagtgagttatgatggtgccactgtactccagtctgggtgacacagtaagaccatgtct

SEQ ID NO: 250470 - DNA, 688 bp, Homo sapiens
tataagtacacttataatacataatacttataatgtacaatacattacttatacacttataagtaatgtattaagacttgatagtctatatatacttaatatatattttatctctgcttattttctctaacttttctcatgctttttgttgttattgttgctgagatgtaacttttatgtagccatatcttttattttacttctttatggcctctgggttttattttgcttaaaatgtcttctaaactgcaagataataaaattagttttccagaaggttcatgtatgtgttatatgtgtgtgtgcttgtgtgtttgaatatacgttttcaaccttttgtctgtcaataattcatttttgcatgtcatgagatgcgaatctaactttatttctttgatatcattagcaaattattcctatggtatttgttgaatggtttatttttccctcctgaatggaaaataatctttataatagactaaatttctatgtttgcttgtattgtttctagattttttatctttttagagataatgcctttctctgtcacccaggccaaagtgcagtggcatgatcatggctcacttcaatctcaaactcctggacttaagtgatcctcctgctttagcctcccaggtagctgggactacaggcatgcatgtgcaccaccatacctggctatttattt

SEQ ID NO: 250471 - DNA, 341 bp, Homo sapiens
ctgatgtcaatagcaatggggggcagtggctgccttcccacaatctacccattttctgggctgggaggggtgaagtcaccacccgtccctgtgtgcctgaggtggtggtcagccacaggagctgacattctgctgtgaatctggatgcggggtggcagggtacccaggccacaccctggtgggctgcagggctcaagaggcagctgcgttgcttgtatttaaagtcaaatgggagcaattagaaaagaggtaaacgcaagttctctcttgtaggtcgggctacaggtgactttttaaaagtctgaattatcctaaattttctataataaacattttaaata

SEQ ID NO: 250472 - DNA, 213 bp, Homo sapiens
tcaaatcttcccaaacatctttcattataatgtttaatcaattttcattctacaccagtctataagaccttaaccctttctatcatgttgactgttccttacacacaagtccatgactgcatggtttgaagcatgttttaggcatgtaaaaatcctttcttcagaagactgggatctcccagcaccccttccttcaccttttccccagaaccc

SEQ ID NO: 250473 - DNA, 452 bp, Homo sapiens
tgtaataatcataggtaataagtataattatcttttatacatgtagaaactaaagtttatgaaaacgaaatcatgtacccaaagtcatgattaataagtaaagttgaacccaacttttttttttttactttaaatcctgtgcttttatttatttttattttttatttttgagacaagttctctgtctcccaggctgagatcatgccactgcactccagcctgggggacagagcgagactccgtctcaaaaataaataaataactaaaaacaaacaaaagctaaccatggaaaatgatattgatggatccaagtgatacagtttgtttcaacatattgagatattggatccttttaaattctttgtactgctcatgaccagttgccatacaccgcagaatgtcaattgcctacaaggtaaatttcacatcggtcgacttaccctcctgtcact

SEQ ID NO: 250474 - DNA, 287 bp, Homo sapiens
atttgcttttaattttacccagtcaaaaccaaaacaaaagaatattcatctcattgtctaatcttttcattcccatctcaccaaatcttagagcagagagaaaccttgagaatgctctagtttcaccttctgcccatgacaggccccaggctcatccaacctctggttgactacacttggtgacaagtactttactaaattgcaatataattcattccattgctaaagagctgtagcattgaaaaagtttactttcaataaactttaacagtaaaaagtttaaaata

SEQ ID NO: 250475 - DNA, 614 bp, Homo sapiens
gagagatccctgaatctttcaggcattataccctgctcctgacttacataacctacctcattagtgctgttctttgcctttctttacatggatcactgtatttcttacttcattatggtaacatgaattggatgctttccttgctgatactgtttctcaatatttcagtcatcttaagtcagcttagaaatgactataagaacaagaagaaccagaacagcctctcttattagagttaaagatcttcgacctttcaagtccagaaagatgtaatctgaagagtatgtaatcttaaatctattcaacaatgttatttaataaaatatttttttgcaaataattacaggatatgcacattaaaggaaagtgcttaaagaattaagtttaagatatataaaatagagggaactaagctatgaagatgcaaaggcacaggaatgatacaatggactttgtggacttgggggaaagagtgggagggggcaaggggtaaaagactacaaatatggtgcagtgtatactgctcaggtcatgggtgcaccaaaatctcacaaatcaccactaaataacgtacttatgtagctaaatactacctgtaccccaataacttatgg

SEQ ID NO: 250476 - DNA, 420 bp, Homo sapiens
aagcttgatttacgccttttggttacgcatttgccgcaaggcccagagctgtgcgtgctcccgctgggcttcttgtgtgagatgcaccgcagccaggacagcctgggcacctgccactctggagcaggaagtgaagcctccagcccttggttcttggggctctgccgggagcgaacggggctggaaacgccaagtccaggctgctttcacacattcaaacaccacggcttcctgccatcacttaggcctcagtggccctgaaagttgctctaggacgtacagaagaggccgttttgtcgttgtaaaaatcccaaatgttttgtggattactattaattgttaacgcttgtcctgtgagtagctcgtcacctgaggccttgtcgtgaatattaaaatgcacgtctggtgtcccttttggct

SEQ ID NO: 250477 - DNA, 360 bp, Homo sapiens
gcaaagtgttctggatagggctaattgaagaaccaagagagaaaggcccccaaactgttgtaaattctaggcttaaaaggtttaagcccatcctgcagctagaggaggggttcctgggactcagagcagaccctttaagaccatggactacatttcccagcagccttcatgtcacattggcgtcctctactggtggagaggggagtccttccaagagagggctgtagagggcagagcagggcaggagagcagctgagaggagccttggctaatactattaaggaccaggatgacaaagaaaaccacttctttccccccgaaacaaaacaaaacaaaagaccaaaaaataaacaaaaaaga

SEQ ID NO: 250478 - DNA, 422 bp, Homo sapiens
ctgcgcttggctcattcctgggcccaagccttaccacttgctactcttcctctaaatttggatttcttcccctctcttgtcctcaaacccactgtcacttttgaatttgaagacatgttgctttgcacgccgctcctctttggggtacatctgtgagcacctgcatggctaagagggagtgctcagtgagaacccagtgaatgatgaaggtgtatgtgaatgacgattggatgggagaggctgcccaagtggaaaagcggtatttgcttttcagtacaggaaaatttccgtgatatttttctggcacacaataaagaaaatgctatattgaagcaaattaatatattttaactttgtgtagatgcagtgggaattactttttaaatggtgtatggaaataaaagaactggttgaaaagaaca

SEQ ID NO: 250479 - DNA, 563 bp, Homo sapiens
tttgagactcagtctcgctctgccacccacgctggtatgcagtggcgtgatttcgactcactgcaacctccgcctcccaggttcaagcaattctcccgcttcagcttcccaagtagctgggattacaggcacgcgccaccatgcccagctaatttttgcacttttagtagagtcggggtttcaccgtgttggtcaggctggtctcgaactcctgacctcaggtgatccacccgcctcaatctcccaaagtgctgggattacaggcatgagccaccgcacacagccttgcagtacctttaatagttctgattatatgggaaaccccaattctcttaacctagaaacacaagtggacaacccatgctttaaaaatctaatgagtcagtgctttttttctgttttgacttggctcatgcccttaagctactcttaaataacacagtaaggaaacctatttataccaccacaagcagctgcagcttgtcaaaaaaaatcaatgaattttctaaaaacatttctttggcttggtttcagttttcagttcatcttagaaggtcatcagc

SEQ ID NO: 250480 - DNA, 347 bp, Homo sapiens
tttaaagtatcaggagcccagtgcagtggctcatgcctgtaatcccagcactttgggaggccgaggcaggatgattgcttgagcccaggagtttgagactagcccaggcaatatagtgagctcttatctcttcaaaaaattaaaaaattgacctagtgtggtggcacgcacccagctgctgggtagggtgcggtgggaggatcgcttgagcctgggaggcggaggttggctgggtgacggagtgagaccctatctcaacaaaagggagctgggggatgatcaggagcccttgatgtggaaaaaagtaggatcagatttctaataaaacgctttcagccatgacatac

SEQ ID NO: 250481 - DNA, 142 bp, Homo sapiens
ccttttcttcattttctccaactgacttctctgaagttattggtgaggaacactgccttgggcttcctatcacaattcattaataaaggtaaagcactattctaggaattagaacaggccacctcccattccacacattgca

SEQ ID NO: 250482 - DNA, 332 bp, Homo sapiens
agtgacaaggtttgggttcattgtggggtcctgagtggggcactcactctgcaaggataatagttgcagctgtatttattttgtggactcggagatcatgcacagggcgaccttttaagattgagtatgtagtgcactgcacaaaagcatcacaccaaaggacgcgtttacatcatagatagtgtagaaatggatgtttactctgaccatttttcagcagatggcaaacaagggtgtgaggatgggccccttattctaatttgcacaagggcatgaaacaggctcctgggtggccctaaatctggcactaaagctgagtgactgagtgaaca

SEQ ID NO: 250483 - DNA, 442 bp, Homo sapiens
aggtcacaggggatatgttggcttagcttgggctcaggcctgacagtcttagactcctgacctcaagtgatctgcctgccttagccttccaaagtgctgggattgcaggtataagccactgcgcctggcctgctttcttgataatgttattttacgttgtatatgtatatccccccaaaatattgtttgcttatgcatatttttaaactttatataaatggcatcatgctatgtggactttttttcctgcaactttttaaattagttactaagtttcatccatgtttttcttcaaaggtaagaatttctctggaatatacatctaggattggagttgttgtttgtcaggtgcgtacaccagtaactactagatacaaattgctttccaatgtagctgtacggttttattgtcctacaagcagtgggagagttcctgttttta

SEQ ID NO: 250484 - DNA, 443 bp, Homo sapiens
gcaagacacatagtatttaagcctagattcattattcaaagatatgaaattttaaaatgcatagcattactttttaaaaatagcagaatggctattaaatatctgttctcccaaccctcactttctttatttccaacacaactttaaaaaatagatcagtttctaaaattacatgctagcttaacttgcttttcatcaggggaagtgaaaatgctaaatgagaagtacatttaggttgctaaaatcagtatgctttctttctttcttttttttcccaaaaaatgaagaaataaggactctgaggctatttaggtatttgcagaacctgggtaaaattttacttaagaagtagtgtgggcagggcgcggtgtctcacgactatagtcccactactttgggaggcttggcctacatggtgaaaccccatctctactaaaaataca

SEQ ID NO: 250485 - DNA, 757 bp, Homo sapiens
atgctgtagctttcaaaaataaatattcacatctttccattcactgtgttaaatctgccttgtttgtggtcataaattgatattggtgtgtaacggatacatcagtaaagttcctagcagtgaatcttgacagttgctcagagaatctgcttgaactgaggtaccctatctacaaggatcaccttttatttaagtgttattttctccagcacacgataaatatcataaatctctaggtgtcctaaggtgaaagatttagaaggaaaatatgctttctaggttttcctaactttgctatccaaaggaacttggagcgtccctacttgttctctaccatggcagtaaattattatgaataaattacattttttgatgtgtttctcctgctcctccacgtttttggggatgttgaattaggggcaagaagtgtagctgtggcttagatcagcatccttctgtcttttctcagtggtttcattgtgtgctttcttcttaaatcagagcctctcaggaagggcagcctaacatctactggttcattagattgcagttaattctcttttttttatttatttggttaattaattaattaatttttgagatggagtctcactctgtcgcccaggctggaatgcagtggcctgatctcggctcattgcacctctacctcctgggttcaagcaattctcctgcctcagcctcctgagtagctgggattacaggtaccctccaccacacctggctaattttagtattt

SEQ ID NO: 250486 - DNA, 374 bp, Homo sapiens
ggccctaatttttaggaggtagtggaaatgatattttaagatactagaaatcttattgaaacacgttgtagctatccttaaaaactgtggccgggtgcagtggctcatgcctgtaatcctagcactttgggaggccgaggtgggtggataacctaaggtcaggagttcgagaccagcctgaccaacatggagaaaccccgtctctaataaaaatatacaaaattagccgggcgtggtggcgtatgcctgtaatcccagctacttgggaggcttaggcaggagaatcacttgaacccaggaggcggaggttgcagtgagccaaaatcgcgcacttgcactccagtttgggcaacaagagcgaaactcccttcgta

SEQ ID NO: 250487 - DNA, 410 bp, Homo sapiens
agaatacagatggccaaaggaaacaccatttttaaatagttactttaaaaaaatcctttcagatgaaaaaatctgctatggttgatctttctggtgttggtgaaaggaaagagaaatctccgtgtggggaggccctgggcagcgttcagggaccgagccctgtggagcggaaaggctcgagactggacctatcttgcaaaaacaaggctcctgttagcagaatcgaagtccattgaggagctggaagaagacaggtcccttctctaaagcactgtgattagctcaagctcgttggatttgcacttttggagaagatgtgttcagtgagggctgtggaaggctaggcaggctggacgcccggctagaggccaagcctgcagacggcagaaaggcgaatgcaccttccagat

SEQ ID NO: 250488 - DNA, 209 bp, Homo sapiens
caaagtcatgtaagacgtgttttctcaattgttatccaaggctgagaaccaccctatccaagctattctcttcattggttctgatttcagcttttctcctgaggtaaaatcatttctgtattttccattcatactagactctgcttcaaccaaattctcacaatgttgtcagacatcttgtgttcaataataaaatatccaaaggtcta

SEQ ID NO: 250489 - DNA, 823 bp, Homo sapiens
gcatcctgaagtgagaagggaaatgaagctagtcatagccttgaggccctccaacattcaatggatgtgtagaggatgaaactgccaaggatagtgacaactggagagaggcaggaagaagaaaagaggctacttgaaaaagaagtggtagggtatcatgtcaaaagacacacaggaagaactcaacaaatgtttgatgaatgaaataaaaaatgaattaatgaataaatgagacttgcttcagattacatggccaggaaagctagacctgggagtcaaaccccggtcatctttaattctctgcactttcccttataccgtgctgactttcacgtccaaaatcttacattgaaagaggggacccttcttagaaaaggtggggattgaactgaggttttgaaagaaggtttggatttgcagagtggagtgggtatttcatttggattcgatggcactgccaaagacttggagctggaggtgagaaaagcatgctgacccttacgcctttgctttcctccttctcgtcctcaacttctaaacccttgttggctcttccatttgttacccccattcccatatgtgcttctttccatctaccacttgactctggtcctccctatgccagatcaactgcctgtgacccttgactgctccgcttggacaagtggtctctaaacttacttcctgctttatcttatgctcgtttttaaacattagcccatccagaagctgcaatattcattcattaattattcatttatttaacaagtggtaatgaatgcctgatacatgtcaggcactattctagcttcttggcatgcat

SEQ ID NO: 250490 - DNA, 347 bp, Homo sapiens
cattgacaaatcctacgatggacctgaagaaatagaagctgacggtctgtctgataagagctctcactctggccaaggagctctgaattgtgagtctgcccctcaggggaattcggagctagaggacatggaaaataaagccaggaaagtcaaaaaaacgaaagagaaggagaagaaaaaggaaaagggcaaattgaaagtcaaggagaaaaagcgcaaagaggagaatgaagatccagaaaggaaaataaagaagaagggcttcggcgccatgctgagatttggaaagaagaaagaggataagggtggaaaggctgagcagaaaggtactctgaaacatggtggcc

SEQ ID NO: 250491 - DNA, 406 bp, Homo sapiens
ccggccaggcagcctgaatcaattaatttgaaagcctcgaagagcatggaccttgtgccagatgaaagcaaggttcactcattggctggacaaaaatcggacggtctgtctgataagagctctcactctggccaaggagctctgaattgtgagtctgcccctcaggggaattcggagctagaggacatggaaaataaagccaggaaagtcaaaaaaacgaaagagaaggagaagaaaaaggaaaagggcaaattgaaagtcaaggagaaaaagcgcaaagaggagaatgaagatccagaaaggaaaataaagaagaagggcttcggcgccatgctgagatttggaaagaagaaagaggataagggtggaaaggctgagcagaaaggtactctgaaacatggtggcc

SEQ ID NO: 250492 - DNA, 511 bp, Homo sapiens
agaaggctgctggctgcagtaacgggccggaagagggaggcaggggtgctcttagcagattgacagagcctgatctaaaggaaagacatgaaggactgagctaggggcgggataagagctcggccactagtctctaaggaatctacctcataaatctaaagcagcaaatcctgtcccctcagttctccacttttgctcaatgcttattcattaggggccagctctttccaggctatgcacgccgtgaggactgcacagataaaggtggcgtgggccttgccgcattacagagtgtcactgcttagtgggcagtgggcatctccagttattccttcttcatgtgatattgttttaaatgcccttagcttttgcgtttttcctccgtggagtggtctagttgatattccccttaactggtcgtgtcttgaaactgaattgcaggctctaggtaatggtgtgagcaatgtggactagggcccgggctgttaccttctttctgtgaagacggcct

SEQ ID NO: 250493 - DNA, 715 bp, Homo sapiens
aggttacaaaactaacacacctaatggtgaaattggcgaacacctacaagctccaacggaaaagttccggtggggggtggtgggggggcggacgccaggttttctacctacattaactgcttgactcaagaattatgagagcagctaattgctcttattacttccttagcctgaaaagtccctccctcttccctccactggttcccactcaatctccggttcatccttatagtcccatcgcacacgctgcctccaaatggcttttctgacctcttgttccctccacggcaaccgagacacatccagtcaaaacttagtcccctcccccgactctttggggcttccctttaacagtagtgttctgaaaggagcctgagctttagaacctcggttagggacaatgccagactacactaactttctagcgttaatgacaagttacctatcctccctgagcctacctggaatttttggaagggttgttaatatatgtgactgccctgacatattaaaacgtcctgaataatgtcagctttatttctccttggacttcctttaagtaccctgcaccatattttaataatttgtgtgcgtcttagttcagctcatactcccagctccttgatgacagagactcatcataagtcttgctcatcttggctttactaaaatgaccagcacagagctctgcactcaataaacgctttttggattg

SEQ ID NO: 250494 - DNA, 257 bp, Homo sapiens
gtcccctcacccccagggccctccagggtggggcagcagcagcgtggggggtcctgtcctgccctgtgtgcatctcaagacgaacccttggaggcccatatgggaaggcactgagccccaagctccacctaggaggacctggtgctgggcagctcacgcctggaccacgtctgtccctgtggtcggcctggttctgctgcccacagtgggagggagcctgggggccacgccgatgcagaccctgcctccccatttac

SEQ ID NO: 250495 - DNA, 182 bp, Homo sapiens
gatagaatgcttttctgaaaggtaaatctgattgtatcactttcctggtcaaaacctccattagcttccctttacatttagagtgaaattcagtttcttaccatgtttgatgaaggtttatgtgccattttctctacatctgatgtatgtaaaagcatgatcaatgttgctgcactgccttt

SEQ ID NO: 250496 - DNA, 395 bp, Homo sapiens
caaaatgtggtatatccgtacaacagaatcttattcagccttaaaaaggagtgaaatattgatacatgctgcaatatggaagaacctcgaaaacattaagggagagaagtcaggtaataaaggccacatattggatgattccatatatgtgaaatacccagaataggcaaatctgcagagacagaaagcagactggtgtttgctaggggctacaggaaggaaggaatggggagggactggtgaacgggtacaaggcttccttttgcagtgatgaaatattctggaactagatggggtgatggttgcataatattgcaaatgtcctaaaggccactgaattctatacttgtgatagttaaaatggtgaattttatattttgtgtattttatcacca

SEQ ID NO: 250497 - DNA, 371 bp, Homo sapiens
tcttttttaaccgcaactaaacattcagactcctaagactaccaaaattcaccagtttactggtcctgagaaacttacaggaaatgttgtgtcagcaaaggattgtcaggcatttttcaatacacttgttttttttccttgcagcagtccataaattttcattattagcagataataaaatgatctacttagaatactcaagggaattaatgtagaattattaaaattcgttaacaggccagacgcagtggctcccacctgcaatcctaatgctttgggaggctgaggaaggaagactgcttgagcacaggagttcaagaccagcctgagtaacatagcaggacctcatttctattaaatattaaaaaaaa

SEQ ID NO: 250498 - DNA, 295 bp, Homo sapiens
tcctcatatcttccctttcaactcaagctaactaagtgtctcatatttgcaaagcaaaatgttccaagtacatgacttaagctccagctacagtgccctgaataagggtgggataatcataatagtaaatttccaagtggccaagtcttaactttgccttggccacactaatgtggtccatgtggtcatttccaggctcaactttctgaagatgatggtcaagagacagaagtctctgaggaagaggaggtagctgtttagaaatgtttaaagggttgccatgtataagtcaaag

SEQ ID NO: 250499 - DNA, 439 bp, Homo sapiens
ggaggcaggaggatgggggagatggaggccaggcctatcctggcccttgccccttgctctggtctctgatctgggatgttctgtacgcccaggaccagaactgacagaagggctccttgtcccatcttatcacttggacatcctgagcctcctcagagagtgcagaccagctttagctgggcccccaaaaaaggtcaaaaggagagcagcagggtggacatcagtaggactgaagtggagccacacagaggggctagataggaggtcgtgtggggtcagaaagggtcatctgtaggggtcaaggccaacatctgagcctgagtagtgcacctgccctacaaggctctgagaatcttccctgagtgatagagccaggaagagggccacaagcccctccgaaccccttccccacagccctggaggccctagctcaatgcat

SEQ ID NO: 250500 - DNA, 514 bp, Homo sapiens
agtggttggggggatcacaggtctactgtctgtctgccaggtagtgctcttgtcatttatagcttgttacataagaaagagtagtaaataattgtaacctataactcattcatttaagagcacatttctgtccctcagacaggagaataactgtatgcaactcagttgctcagaaaaaaggagtaatcagccagggactcagctttttgttgttgttttttgttaccaaaaaccaaaagttcgtttgaaaagtcatctttgaagccagaagttttttcgaaacacttcctgccgttgcacagaaccctaatgagcagtatttctgcttcttgacaaagtcatggattctaaaggttgccttaccatgtgacggtcattctccaggaatctgcagcatagctgaggtttttcacaaagatggttttaaaaccttgcttacaagggtgattgaccttgccttactctttatgtaaattatggcattttgttattaaactacgattgggtccaactg

SEQ ID NO: 250501 - DNA, 486 bp, Homo sapiens
ccatgactatgctattgtaaatagtgctgcaataaacatatgagtgcaggtgtcttctgtttttatttttttaatctgtcgcaggctttaaaaattaaattttaatttgtgtgggtacctagtaggtttatatatttgtggggtacatgagaggtttcagtacagccatgcaatgtgtaataatcacatcatgtaaaatgagggatctctaccatcaaacattaatcctttgtgttataaacaatctaactatactcttttagttatttaaaaatgtacaattattattaactgtagttaccctgttgtgctagcaaatactaggacttatgaatactttctacttttttgtacccattaaccatccccaccttatcctcctgccactcttctagcctctgatagccagccacccttctactatctatgtccatgagttcgattgctttgaattttaggtcccacaaataaatgagagcatgcaat

SEQ ID NO: 250502 - DNA, 688 bp, Homo sapiens
aatttagaagtatcaggcaagcataggacagactcagaatcaatgaagtttgtatattatttacatcaatgttatgttgcatatttgttgttgacaaccgaaagtatagaaaagcataggaaagagaacaaaaactatccataatccctcagtatggatttataggcaaatgttaattgtggacatttctccccatccaatcttttttcatatatatattcttttctaatatatatctatattatatatattatatgtaatataattatatgtaatatatataatatatataatgtatattatatattatatataatatataattacatataattataatatatattttctacatatatatgtagaatatattatatattatatatagaaaaatatatatttttttctaatatatgtgtgtgtgttttaatattattgaaatctttatatattctgctttttgtcatattggttatttttatgatgaaatatttcaaacataccaccaaagaataatataacaaatatcagtatactcatcacccagtcacccgtacttaatatgaaagtgggagcttattaaatacaacgggtgtacgttaaatggcaacattttttaaaataaagctaataagtctaacttttactgggatagagtcaccagattagacaacacattcaacgcaag

SEQ ID NO: 250503 - DNA, 741 bp, Homo sapiens
aatttagaagtatcaggcaagcataggacagactcagaatcaatgaagtttgtatattatttacatcaatgttatgttgcatatttgttgttgacaaccgaaagtatagaaaagcataggaaagagaacaaaaactatccataatccctcagtatggatttataggcaaatgttaattgtggacatttctccccatccaatcttttttcatatatatattcttttctaatatatatctatattatatatattatatgtaatataattatatgtaatatatataatatatataatgtatattatatattatatataatatataattacatataattataatatatattttctacatatatatgtagaatatattatatattatatatagaaaaatatatatttttttctaatatatgtgtgtgtgttttaatattattgaaatctttatatattctgctttttgtcatattggttatttttatgatgaaatatttcaaacataccaccaaagaataatataacaaatatcagtatactcatcacccagtcacccgtacttaatatgaaagtgggagcttattaaatacaacgggtgtacgttaaatggcaacattttttaaaataaagctaaaaattgggaatttattattggagttgtattagggactatcatatgcttttctttaagtctaacttttactgggatagagtcaccagattagacaacacattcaacgcaag

SEQ ID NO: 250504 - DNA, 456 bp, Homo sapiens
agacggagtcttgctctgttgcccaggctggagtgcagtggtatagtcttggctcactgcaacttctgcctcctggttcaagagcttctcctgcctcagcttcccgagtagctgggattacaggtgcttgccaccacgcctggctaacttgggagcctgaggcaggagaatcgcttgaatctgggaaggcggaggttgcagtaagccgaggtcacaccattgcatgctagcctgggcaacaagagcgaaacgctgtctaaaaaaaaaagaacttacatacttaaacatcgaattgctttaagtctttggcattcactgttcccgtgcatgccagcagcttcttactgcaaacacctgagacttgctatagagcagctggactatgttccgcccacacacaggacagggagctgacaaccaaggaggggggtgggatcaatactccagctttcccct

SEQ ID NO: 250505 - DNA, 516 bp, Homo sapiens
ataattgatggtgcaagaaaccagaaaaggaaaagtagatgggaagggggaaaggggtgagcaaaaagtcagagaagtccgcctcttcctacaagatttaaagagtgcataaagattgaaatattttgaggtagggaggcatgcatgcttccatggatcagctgcctggattaccctctacaatcatccttagggcagctggggtcactgtcctttaaaatttaagtacaattgactccaaacctgtgtaccacttaagaaacccagcatacctgccaatatctccagagtttcattgggaacttacatttctcctaattatctcaggccctaatttcttgtttgcaaaaaatattgtgctctttggaagatttgtcaccatatcccagatattagtccatttatattacctcaaaatattgcaccctacctataagcaggaaaaatgcccaatattatattattatattatagttatatgattgttaaataaactagagtttgtggccattaaaa

SEQ ID NO: 250506 - DNA, 402 bp, Homo sapiens
cactaacatcatagaattggcatgtagtgtcaattattcaccaaaaaagaaacttaagcaatgactaatataccacaacattagatgttgatttgaaaagatgatgcatagatgaagtaattgttaaattaatcataagggaaaatattgaggcttgaaataaatttgttaggttagcataaatcctgaggctttttgaaggcatcgtaaactacttttgcatttgctttaagttcattgttgaggggcataaggagagctcagagcccatctgtgcccaactgctgtgtggtcttgggaaggtcagcctgtcttctagctgattaatctgcaaaatgagagggtcagagagacactgtcccccgcctcatgttgaaaacagattacactcttggatttgtt

SEQ ID NO: 250507 - DNA, 618 bp, Homo sapiens
gatgttttcaaactccggacctcaagcaatcctcccaccccagcctcccaaagtgctgggattacaaacatgaaccactatgcccagccaaacgacacccatgtgaagtgttcagtgtgctgagttcagggacccctcctggcacatgaagctggcagaccttgtccttgccctgcccctgcctgcacagagcttatagtcctggtggggaccaagaaggacaagggatctggacaggactttttgagaccagacttggagaactcccagaagaaactgcacccaaactgaagcctgcaaggaaagggtaagaagaggagaaagcaggccaggcacagtggctcatgcctataatccgagcactttgggagacagaatcagatagatcacctgaggtcaggagtttgagaccagcctggccaacatatcgaaacaccatctctaccaaaagtacaaaaattagctaggtgtggtggcacgcgcctgtaatcccaacacttctggaggctgagacaggagaatcgcttgaacctgagaggtggaggttgcactgagccgagatggcgccaccgcactccagcctgggtgacagagtgagactgcatctcaaaaaaaaaa

SEQ ID NO: 250508 - DNA, 506 bp, Homo sapiens
agaggagccagcgaaggcttagagggtgaaagactaggtgaggcgtagccagggacagcaggctgttgagaagaacattgtgacattatccaacaaatgagtactttgtcggcatgagtacacaaagtgaacagtgttctgggccttgatcttcccctagtcctgttgattatggcctcaggtcaggacacacacactcaccgccctgcccagcctcggataagctcatgttattttttagattttttttttctctttcttgttgccatattcatattcaggactttgatgagagaagaatgaggtagaacatgctcattgcatctgagcccacactgctttgatccttttcttctcaccagaaacagttcattaacctagaataagtcacttttaagcttgttttaaattgtgacaattctgatttaaacaaatttttctttttaggttagctataaaactcaccagtagaagttgaaaataaaaataattctatgccattgaat

SEQ ID NO: 250509 - DNA, 461 bp, Homo sapiens
gcagaagctgttatttctttgctacagatcaaatattctgatttgtttctccttacttctttgcacagaataagtaattgacttattatgaagtagtaccctggttttggagacaagttcccggaataataaaaatccagaattatttgcccagtttcagatttgaggatcagaaccctgtagcaatgatataagaatcagaagcaagaatacatttcatctacatttgttctatttcctgccatttagtttctaaaatggaagccatttcttgctgggaaaacaaaggatctttccatcctctaatggagaatcatgcagtcttagagttggatatgacttgagtaaagttcttccaactcatgtgccacaacacaatggtgtactctgaaaaggttagaggtgagtggagagagctttccagccaccaacagggagtgggatgggctgagcttcagcca

SEQ ID NO: 250510 - DNA, 469 bp, Homo sapiens
ggcccgggtgctcgctggtgcgcacgagaagcctgcgcccaacctgcctcccgattcaaggctgcagacgctaacgtgaggtgcctggccaatcactcaagccagagaaactcttggtgcattctgttaagagagaatgatgggctaaataataagtccatttattatactctataaagaagtatcaggccagggtgcagtgactcacacctgcaatcccagcactttgggaggccaaggtgggcagatcacctgaggtcaggagtttgagaccagcctggccaagatgtcgaaatcccatttctactaaaaatacaaaaattagccaggcgtggtggcgggctgtaatcctagatacttgggaggctgaatcaggagaattgcttgaatctggaaggcagaggttgcagtgagccaagatcataccactgaactccagcctgggcaaaagagcaaaactacatctcac

SEQ ID NO: 250511 - DNA, 426 bp, Homo sapiens
cagcatggcacatgtatatctatgtaacaaacctccatgttgtgcacatgtaccctagaacttaaagtataataataaaaaaaaagtctcagcaaggtttgaaggaatgttatctcttgcagctgcaagcaatgcaggtttttctgcaatgcagatttttttgcatgcaagcaatgcagttttttttgcatcataaacatatccttgcaacagttatttctaacaaaaaaaaatcgtgaaagatttctctttttttttttttctttttttcttttttataaaattttagttttactgatctttctattgttttctggtctctatttcatctgtgtcttctctgatccttattatttctttcttgtactaactgtaggtttaggttattcattttttaaatttcttgaaatgtaaggtaggcttttt

SEQ ID NO: 250512 - DNA, 266 bp, Homo sapiens
gctatatgtgtgtctgtttagttcattcccctttcctcctttccctcttttcttctgtgttagtttaaagcaaatagggatattttattacataatcataatgccaataacacttctttggtatagtgtgttatctagactataatcaaattgatgtgattatccaaagcatctttttacatttggattgtttggattggaattcaaatacagtctgcacattaattgcattccagcctgggcaacaagagtgaaactccatctca

SEQ ID NO: 250513 - DNA, 117 bp, Homo sapiens
aacctgtagcttccctgtcacttctctggctctcctctcctgctaagctttgtttcctaattaaaatcttctgccactgccatagctactgctgctactggaaccacaatagccact

SEQ ID NO: 250514 - DNA, 463 bp, Homo sapiens
atcctttgactgtgctgtaacagtgagggcttcagagtgttaagtatcttctcatctaaacagtacattgctgaaacatgttagagctctcattgagttttactcttaggttttgatcaagtcatggtaaaatgttagttatcatgtatatatgcggctgtggtagtaattgattctggaataaatgagcaccaataaagaataaaaattaaatgcttcattggtttctaaagggatagctggagtatgaaaaatgattctgatggggtgcctttggaattggagagtaacttgatgggctcacaaataaggcagtattgagagcaattgtgtaagtgacaatcttgcaatctgtgaataagtttaagactattgcttgtgattgttatgcttataatgtggagcctgctgtccatttcaactctcatctaagaattcccttgtcacgtggtcacctttatgt

SEQ ID NO: 250515 - DNA, 614 bp, Homo sapiens
agctaaagtttgttaagatatgttcatgcctagaaatagatgtggatctcagtaaggagtgacatatgtggcaatgatacctttccatactgtggatatcattggcacagagtaaatactgaaagaggggagtgggggacctcaatgattggaaagttttcattgcgcaaaaagtgtgatttggtcataagtaagactccatgtcctgtgcacattatgaatgatgtaaggcaacttaacaattgtcagctatttcttttcattgttcttattttgggaaatgggtgaaatgtcagtaagttgttggaagaaaaaacatacccttttagatcaatatgacatttgcaatgattagacctgattacagttgaaaatgttgctatggttacacattgtcgacatagtgttctgtaatttagatggacaacttttagggtttagagcatatagtcttttattttgttcagtatccatagttggcagagtagtttttaaattaggaaattatcttaatatcaaattctgtactggaagttttaatatttcaaattatattttccccttgactataaaatattatatattagttgtgaaaaatatagaaaatacagaaa

SEQ ID NO: 250516 - DNA, 322 bp, Homo sapiens
cacaccacccaggatggtcagcccaaggggaaaggacctgtgaggtggtccccctccaggttcactgtgtggaccttcaccatttgatagacccacctatgcaccagagcatccaatctgctttttatgcctcacttttaaatatgagcagacagacaaggatcctcaaggtttgggaatggcttccaggacagacagtgtcagagaccagattaaagaggaaaaaaggcacaccggagaaacagtgacagtgcatggggcaggagaaaataaaaacaaacaacaaccttctccttacagagagaagaaagctttgtgcatg

SEQ ID NO: 250517 - DNA, 555 bp, Homo sapiens
atcttggcgtgagacagcgctattccgtgggtgctataacaggttccagcagtacttgggtgttgatgtcccacccctgatgctgtgcagcgcctgaaacccagcgagctcggaaggtgtccagaagaatttcagtatttgctacagtaacctcatcagcctgccaagacagcagtgcaagcggccaagagggcgagcattcgacttccacctgaagtaaatcagatattgtatataagaaatttgccatacacaatcacagctcaatcaatgtatatttgggaaatatggacctattcatcaaatcagagtggaaaacacacctgaaactagaggaacagcttatgtggtctatgaagacatctttgttgccaagaatgcttgtgatcacctatcgggattcaatttttgtgacagataacttgtggttttgtactataatgccaacagggcatttcagaagatggacacgaagaaggaggaacagctgaagcttctcacggagaaatatggttgtcaagatagatccaccaaaatcaatgttttctacatttt

SEQ ID NO: 250518 - DNA, 527 bp, Homo sapiens
taattctatgcaaagtgatgctaaataatgccataactactttaatcagtgagtacattatctttataaaagtgataaagtttggcagttttgctagtagattaaaaaaacaatcaaagaaacagccatgcatatggaaatgattatttaacttgtggctgatgtacttaggggttgctgctctctgttgttttataataggcagggttagccagtatattgattggtagaataaatactcaaaattatcttgataggctgaaatgaggcaccagaatccaagagataacatttaggacattcttttatttatctgtggagaaagaaagcagcttacaaagtataagatagaccagcataaaaagaaggatgtaactatgatctaaggttagtgctttggtaaatcacttatatgtacacatatcttcacagtgagggtactttcacactctttgggaaaaagatagaaacactttatttgttcataagtttggcagccaacagtgcaatataacagctttttatta

SEQ ID NO: 250519 - DNA, 268 bp, Homo sapiens
gaaagggaaactggagtctcacagtaagaaagttctcaccacagatgaaggtcaatgagcatgaggtgagaagagacattcattactttggaactgatgagaaatattgattcctgaccacaggagtagtggccgagtttgttttgcgtggagtgtggcataaattccgtccctgttctgcatcttactacttctctaaatgtctttgctattttcaaaactgattctgcttgatctcataattcattaaagcaagttgatctcatgc

SEQ ID NO: 250520 - DNA, 402 bp, Homo sapiens
ggcttccccagagcagacgggttgcactctcctgcccctcaggcccactctgtcatccaacaagctcactgcaactggcccatcttaaaaacaacaccggctggtcacgctggctcacacctgtaatcccaacgctgtgggaggccggggcggggggatcacttaaagtcaggagtttaagaccagcctgggcaacatggtgaaacccgagctccactaaaaacacaaaaacaaattaaggcaccctgagtggtggtgggtgcctgtagtcccagcgactcgggaggctgaggcagaattgcttgagcccaggaggtggaggctgcagtgagccacgatcgcatcacgcactccagcccgggcaacctggcaagaccctgactctaaaaagaaaaaaacaac

SEQ ID NO: 250521 - DNA, 131 bp, Homo sapiens
ctgtgcagtgattggcccttaccttgctctctggtctctccttccaccaccggcttctgagaggttcgcagtcttacatcttgaaaaccactttcagtttgtgaaatggaccaggattcttctttttcttt

SEQ ID NO: 250522 - DNA, 401 bp, Homo sapiens
tagaacatttaggttatttgtactctattatcaggaaagattggggaaaagtggagtggcaaagagaaataaagaagtattaattggaaaccacctcaaacatgagaaaaatagcctttatttatttcattctgcatctgctagtctctgggcaatctaaaaaaacagtcttcagaattatagccacatggtgatttttttcctctccagaattacaagaaaattggctcccacactgtggaactaaaaagaggggctatagggtgctgcttctctctcttgacattttacttggttttcaaaggaattcgtgactaagaatctcatggaatctaaatgcggtcactgatggaaatttaggtttccacaaagagtgcaggaagaaatttacatggcaaaaa

SEQ ID NO: 250523 - DNA, 623 bp, Homo sapiens
gctgcatatgggaagatctgaagtcaacaggctttagccctgcaggtggagggaggcctccaggaggtgggcccaggactcaggaggactcagggctgccctgctggcgatcttcctgttctgtaacactacaggtctagcagtccagctgtcacagaaaagctaggacatgcagtatgcttctttggatattctgagtaacatttggactgttacccattggctaccagcatctcccaagtgagaatacatagattacccccagtgccctgaacagcactcggtcctaacacccgtgtccatggaaagcacgccgcgtctggagaaagaagcctggctttgtcacttactagccatgtgattttggaaagaaacttaacattaattccttcagctacaatggaattcttgggaggattaaatatggtgacaacgcctaatattagatggcctgtattccacactcaatcttccttccctcttcttccttctttgtagagctataatgaaaagtatcatgtgggacacagaagaggttgcagtctggggtctgcagggcttagcggccaggcagattagctttcttgaggaatcctgacagtgggtggaagggtatgatgatg

SEQ ID NO: 250524 - DNA, 393 bp, Homo sapiens
gtattaagcctagggccttgtaaatagtaaatgctcagtagatgtgtattgactcactcaaagattaaaaaaaacacctttcacttctgttcttgtataaaattataaaccaaatgttaataagtgagctccttgagcatacacccatggctttttcgtctgttaacatgaacaaatgaacttgtgaaagaaaatgttcttttccatatacaaacaaaatgttatttccatatacaaacttgagacaccgtggacactaaggataggggccatatttcattcatgttcatacctccagctcttagcacagtatgtagcacgtaatagcacttgctaaatgtttgctgaaataaaattcaagaagctacccacgaatcactctatgttacctca

SEQ ID NO: 250525 - DNA, 293 bp, Homo sapiens
aaaaatttttaacagctttatttagatgtattcgaaataaaaaaaacccctgcatatacttaatgtataaaagttgatgggtttgaacatatatatccacctgtgaagccatcactcatgatcaagacaataagcatatccatcacctctaaatgtttccttgtctcccttacctattttttaaacctttaacgacttctcgtttcatttagaatgcaatacatattctaacaggtcttcaaggttctttgcaatctggccctttcttccttcccaacttaatctcaggctca

SEQ ID NO: 250526 - DNA, 444 bp, Homo sapiens
caattagtgatgttgagcatttttcatatacttattggtcatttttatgtcttcttttaagaaaggtctattcatgtattttgcccatttttaatgaattatttatgttttgctattgagttgctttagttccttatgtattctgaatatcagttccttgtcaaatgaatagtttgtaaatagtttctttcagtcaaccatgtctcttttgattgtttgctttgatgtgaaaaagctgtttggtttaatatactccaatttctctatttttgtttttgttgtctatgcttttgaggacttagccgtaaaatctttgacgagttaacgggtgcagcccaccaacatggcacatgtatacatatgtaacaaacctgcacgttgtgcacatgtaccctaaaacttaaagtataataataataaaatttaaaaaaagtctttgcctag

SEQ ID NO: 250527 - DNA, 428 bp, Homo sapiens
gggacacgggtcacgctttgaagagggcgtgacaaaggggctgttctccgacactcgcatggcagggaatttcttggtccgctggtccctcaatgacacaatcaatgagtaaagggggatacctttactcatcacctcagacctgagcacgccctgggccccatttgggcagagctttgctctttgcttttcttttaaagtaaagggcccatctgctgcagctagtgacctggccaaaaaagacacagactgctgtgaaatgattgagggcagtgactcccctcccaccccaggagccagagccgacagagccaagagcaaggcaggaattcaggtccccaaaagcaagccagaagcaccacctccaagcgccctgccacttcctttgttctttgttaattgcaaaataaacacaaccctgcccaccg

SEQ ID NO: 250528 - DNA, 437 bp, Homo sapiens
aggtatcatttgaaggtcatggttgaatgtgtttagcaaagtaaggagggtaggtgctaggtacccattttgcagattagaaatgggaagtcacaggtggaaagtcaaaggacttgcctctgcagaaattaagatttcttccatcattctcagcaaactatcgcaaggacaaaaaaccaaacactgcatgttctcactcataggtgggaattgaacaatgagaacacatggacacaggaaggagaacatcacacaccggggcctgttgtggggtggggggagggggaagggatagcattaggagatatacctaatgctaaatgacgagtaaatgggtgcagcacaccaacatggcacatgtatacatatgtaacaaacctgcacgttgtgcacatgtaccctaaaacttagagtataataataaaaaaagtacaaaa

SEQ ID NO: 250529 - DNA, 487 bp, Homo sapiens
tggatcgtgggggtgggtctttcatgaatggtttagcaccatccctttggtgctgttctcatgatggagttctcatgagatctgattgtttaaaagtgtgtagcaccgccccccactctctctcttcctccgctctggccacgtcggccgtgcctgctgcccgttcaccttctgccatgattgtaagtttcctgaggactccccggaagcagatgctgtcatgcttcctgtacaacctgcaggaccatgagccaattaaacctcttttctttataaagtgcctcttgggtattttttacagcagtgcaaaatggactaatacaatatccatgggaggacatacaagaaacaaacacaactggtgccttaggaaagagtaactgtgtgttagactaggaaagagacattttttactgtatacacacttacttttttctgaaaccaagtattatcaattcaaaataaatttgaccaaaaagaaaattcc

SEQ ID NO: 250530 - DNA, 628 bp, Homo sapiens
gtggggacatggctttagtttcagctactctgaaaggtgagatggaaggatcacttggacccaggaagcagaggctgcagtgagctattatcctgccattgcacccagcaacagagcaataccctgtctcttaaaaaaaaaaaaaaaaaaaaaaagtacagtgctctgttttcagaaatatcaaggtaattcaaatgcaaataactgaaaattaactatattggtagggcatttggcccaaagaagccttcctctttttgaaaagaaaatacattgcattgcatgcatttgctcttctccccagagaaaggatgttgggctgcttcagacctctgacaatggatgcacccccaggattagatcagaaagatggacctgccaggggaaagcatcagaggcttctgttcctaccatcagtaccatggatgcgctgcgagtgtggagtctgtatggaaatgccccactgatttcacagtgtctaaagctgatccttgaggactaatagagaagaaagatgaacagaccagtatcccttgtttctaatactgaactggcctttactgagcttttctgtcgcgcagctgagattgaaaaggaagccacaggagcagaagcgaatgcaagctaa

SEQ ID NO: 250531 - DNA, 485 bp, Homo sapiens
aacacattttctttgccttctttggtggcctaagatggcaacagtagaaagactctgctagttttttgttttgggtcacgtttggtatgaagaacagctccatatcatctaaatatgatgtcaacagtattcttacttctcaaaatttactcatgagatggacactacaattcatttgctggtcctgagtgggtctggacaaacattagaaagagcaagaccggaaaagtactattgtaatcattttgatttaaaaaagaggaattggagtaagcactagaagtagaaatggagaaatacgaattccagggctattaggacacagcaataaattttgacaggcctatttaatatagaagccataggaaagggaggaatccagaaagactcccaagtttcaggctcaaggtgactatcttttgaatgggaaaaaaatgatgaagaatgcaaaataaaaagtttgttgatttatttatgcatccaag

SEQ ID NO: 250532 - DNA, 537 bp, Homo sapiens
agcgtaagaacccccactgggaatgacatttttggacttcccaaacactacctttttgttatggttggattgaaagtcgttccagtattccctctaaacatctcccctactcccccagcttagttaaaccctgcgtttggaccttcctgcctgcagctattagtagaaagtaaaacatatttccatatttcccttcacctaacattttattttttggaagcgttatcagtcctatttggttagtgagaaccatgttccccttattcccgctaagttgctgctgtttactaccttagattctcatttgttttctctttctttcctctccttccacattaattattagaacataagttgatcaggaaaattaaatgagactttagtattttggcacttcctaattgacaccttgggagactgcaggaagggaaagagaatcaatgatcagttatttgtgtgtgtgtgtggttttttttttttttttggaagacagagcctgggcaacagagcgagactgtctcaaaaagaaaaaaaaag

SEQ ID NO: 250533 - DNA, 2269 bp, Homo sapiens
ttgggaccgttagctcggcaggctggcaggctccggggcgctactccattggcggccgggatggagactatgcgagcgcagcggctgcagcctggtgtgggcaccagcgggaggggcactctccgagcgctgcggcccggagtgactggggccgcggctgccaccgccacaccccctgcgggccccccgcctgccccgccgcctcccgcaccgcccccgccgccgctgctcctgtctggggccccaggactacccctgccccccggcgccgccggcagcccggcagtgctgcgagaggccgtggaggccgtggtgaggagcttcgccaagcacacgcagggctatggccgagtgaatgtggtggaggcacttcaggaattctggcagatgaagcagtcccgtggtgctgacttaaagaatggggctctagtggtttatgagatggttccctccaacagccctccttatgtctgctatgtcaccctgcctgggggaagctgctttgggagtttccagttttgccccacaaaagctgaggcccggaggagtgctgcaaagattgcgctaatgaattctgtgtttaatgaacatccttcccgaagaatcactgatgagttcatcgagaagagtgtctctgaggccctggcatcttttaatggcaacagggaggaagctgacaacccaaatacagggattggtgccttccgattcatgctggaatccaacaagggcaaatcaatgttggagttccaggagctaatgacagtttttcaactgctacactggaatggcagccttaaggccatgagggaacgacaatgctctcggcaggaggtgttggctcattattcgcaccgggccctggatgatgatattcgccaccaaatggccttggactgggtgagccgggagcagagtgtgccgggggcactgtctagagagctggcctctactgagcgggagctggatgaagcccgactggcaggcaaggagctgcgcttccacaaggagaagaaagatattcttgtgctggctgctgggcagttgggcaatatgcattcttccaactgctaggcatccacccacataactccccaggctttccacagcctttttttatgtctcctttctaagatttaggatgattttttgtacatactttctcatttttatactttaaaaaatatatatgtgtataaattctacacctagattcctatttgctaagagatcccttttcttactaccagtttttggatgtagttttatttgaaacatcttcagtccactttacaacaaagagcagcttgtctttgcagctttgttagctcttaaacttccagattaactgtgtagccatttcagtagcactaaaagattaactctagtgttcatgtgtccttcttttcaaatatcaggtaacttgaataaggattatgtgccccacccttactctcattcctgcttcctcttggactcaaacagggtatgagtatgaagattttgcctttagttcctgaactgaacctgcttgctatccctttcctccccaccactaccttattccttctctgcctccaaattgccactttgttttgaggcttccttccctaccttattattctgaaggaagtagagatcttgcttctgaaacccctcctaagaaactgcccagggacaagataaattacaaacaattcatgggagtttactacctaagttgcttctagggcatatgtataccatactagtagtctagatttctggatatactctacagtagatgggggttatggttgaaactgattctctttcagtattccctctaaacatctcccctactcccccagcttagttaaaccctgcgtttggaccttcctgcctgcagctattagtagaaagtaaaacatatttccatatttcccttcacctaacattttattttttggaagcgttatcagtcctatttggttagtgagaaccatgttccccttattcccgctaagttgctgctgtttactaccttagattctcatttgttttctctttctttcctctccttccacattaattattagaacataagttgatcaggaaaattaaatgagactttagtattttggcacttcctaattgacaccttgggagactgcaggaagggaaagagaatcaatgatcagttatttgtgtgtgtgtgtggttttttttttttttttggaagacagagcctgggcaacagagcgagactgtctcaaaaagaaaaaaaaag

SEQ ID NO: 250534 - DNA, 962 bp, Homo sapiens
  misc_feature (23)..(23): n is a, c, g, or t
tgaccctagaggatcccacacgntaacgccttccagattaactgtgtagccatttcagtagcactaaaagattaactctagtgttcatgtgtccttcttttcaaatatcaggtaacttgaataaggattatgtgccccacccttactctcattcctgcttcctcttggactcaaacagggtatgagtatgaagattttgcctttagttcctgaactgaacctgcttgctatccctttcctccccaccactaccttattccttctctgcctccaaattgccactttgttttgaggcttccttccctaccttattattctgaaggaagtagagatcttgcttctgaaacccctcctaagaaactgcccagggacaagataaattacaaacaattcatgggagtttactacctaagttgcttctagggcatatgtataccatactagtagtctagatttctggatatactctacagtagatgggggttatggttgaaactgattctctttcagtattccctctaaacatctcccctactcccccagcttagttaaaccctgcgtttggaccttcctgcctgcagctattagtagaaagtaaaacatatttccatatttcccttcacctaacattttattttttggaagcgttatcagtcctatttggttagtgagaaccatgttccccttattcccgctaagttgctgctgtttactaccttagattctcatttgttttctctttctttcctctccttccacattaattattagaacataagttgatcaggaaaattaaatgagactttagtattttggcacttcctaattgacaccttgggagactgcaggaagggaaagagaatcaatgatcagttatttgtgtgtgtgtgtggttttttttttttttttggaagacagagcctgggcaacagagcgagactgtctcaaaaagaaaaaaaaag

SEQ ID NO: 250535 - DNA, 1072 bp, Homo sapiens
tatgagccggacctcataggtcgcaggctagagatcccttttcttactaccagtttttggatgtagttttatttgaaacatcttcagtccactttacaacaaagagcagcttgtctttgcagctttgttagctcttaaacttccagattaactgtgtagccatttcagtagcactaaaagattaactctagtgttcatgtgtccttcttttcaaatatcaggtaacttgaataaggattatgtgccccacccttactctcattcctgcttcctcttggactcaaacagggtatgagtatgaagattttgcctttagttcctgaactgaacctgcttgctatccctttcctccccaccactaccttattccttctctgcctccaaattgccactttgttttgaggcttccttccctaccttattattctgaaggaagtagagatcttgcttctgaaacccctcctaagaaactgcccagggacaagataaattacaaacaattcatgggagtttactacctaagttgcttctagggcatatgtataccatactagtagtctagatttctggatatactctacagtagatgggggttatggttgaaactgattctctttcagtattccctctaaacatctcccctactcccccagcttagttaaaccctgcgtttggaccttcctgcctgcagctattagtagaaagtaaaacatatttccatatttcccttcacctaacattttattttttggaagcgttatcagtcctatttggttagtgagaaccatgttccccttattcccgctaagttgctgctgtttactaccttagattctcatttgttttctctttctttcctctccttccacattaattattagaacataagttgatcaggaaaattaaatgagactttagtattttggcacttcctaattgacaccttgggagactgcaggaagggaaagagaatcaatgatcagttatttgtgtgtgtgtgtggttttttttttttttttggaagacagagcctgggcaacagagcgagactgtctcaaaaagaaaaaaaaag

SEQ ID NO: 250536 - DNA, 246 bp, Homo sapiens
gtattttggcacttcctaattgacaccttgggagactgcaggaagggaaagagaatcaatgatcagttatttgtgtgtgtgtgtggttttttttttttttttggaagacagagtctcacacttttgcccaggctggagtgcagtggcgtgatctcggctcactgcaacctctgcctccagggttcaagcgattctcttgcctcagcttcccgagtagctgggattacaggcacacgccacaacgcc

SEQ ID NO: 250537 - DNA, 413 bp, Homo sapiens
aagattattctagaccctgtgaaagaagtctccactgggcgccggccacggcattggggtgcgcgcctgctctgcgagaagggtcccccaggccgcgcgggggaacgcaggagacgcctgtccccgggggaaccagcggaggattgtttcatttcaaagtgaaaatctgcaggctttgggaaacgatattcaaaaaagtatataatctccatatgccgctcaatggaggatcctcataatttacagcggcagataaggctagagggtgtaataaaaaatctgaagccctcccctcccccctcgccgcctccccggaattgcaccttgggcagcggagcagaatccggaatgtgaacttctcccgacatatgtttcccgcagataagtaaacaatctggacgtgaaatggaaat

SEQ ID NO: 250538 - DNA, 466 bp, Homo sapiens
ttccaataatttttttgcaaaagtagaaaaaattaattctaaaatttacatagactatcacaggactccaaatagccaaaatgatcttctaaaagaagaacagtgttggagatttcacacttcctgatttcaaaacatactacagagctacaccaatcaaagcagagtggtacagatagacagacacagagacaaatagaatagaattgagcacccagaaagaatctcttagttatatgatcaaatgattttaaataagggtagcaagaccattgagtggggaaaggacagactccataaaaaatgtttttgagaaaactggatatccacatgcaatgtggaaatggataaaagacccaaatggaaaagccataactgtaaaaatcttaatagaaaacactaggaagaagtttaacaacattgggtttggaaatgatttcttgtatttgacgccaaaagcacaaga

SEQ ID NO: 250539 - DNA, 490 bp, Homo sapiens
ccagaaagaagagagagggagagaaggaaggaatgagagaaagagggaggaggttggttttctctgcatctcctgcaaaagagagaaagaaggaggagcctagtttgctctttgcatctcccactttccaagcatagtcacatgatatatagagagatatcatttatcaagtcatgaataagcatgcttcattaggttataactcttaactactactgtgctgcagcagaagtcttttggagacggaggaacagcaactttatgggcatggtcctctttctaggtggagaattcacctttggctttccttggtggacctcccttgggcaacatattgccaggacagtgcaggacatcaagctccctgacagtgatcctgtacacagatgaggaagacattcttctgcctgaaataaaacaacaggggaatactgatcacagaactcacttttcctacgctctcagtgtctttatattttctttttttaaa

SEQ ID NO: 250540 - DNA, 552 bp, Homo sapiens
ccttggttcagtgaatcctctgttaaaaggcaccaagactgtcagatcaatcttctgctacagcaaatatcatagcagtgactattctagaacacacgtctttgtacacattaacaaatatattctaaagacaaattcttaggactggctttctcgggtcaaatttaagatacatgtattcttaactgtgatagatattgctaattgtctgctataaactgaattatatttccccaaaatacagatgtcaaagccctaaccctcaatgtgactgtgttttgcaggtagggccttaaggaggtaattaagatgaaatgaagatgtaaaaatgggtccctaatctaataggactggcccctataagaagagaaagagactccagagatctctctctctaccctgagcacagaggaaaagccatttgaggacacaacaagaaggtagctgtccgcaagctaataagagagacatcaccaggaaccaagtttactggcaccttgatcttggactttcagcttccagaactgtgagaaaataaatttctattggtta

SEQ ID NO: 250541 - DNA, 398 bp, Homo sapiens
cgtgatgcctccagtctcattcatcagtctgaagaccacaatggactctgacctggatcatcatttaaaaatcatcagctggtcttttgcccaggctatgttacgcctttcaagtagttctgacaaggaagatgattattctaaccagcattatgatgttgtttgtttggcctgagtcgctctgcatcataatattcagtagcatttataaaagctgtctagttagctctttaaaaacttttgtcctgcaaaatgtttgttagtcaacacactactttgtgtaaacaactattatgtttccttgggaccatcacaagctctttaacaaacacaaggactcaattcattcagcaggtggggattaaagaatcaaagcccagtagcaaaaccaaaactga

SEQ ID NO: 250542 - DNA, 368 bp, Homo sapiens
gaagaccatatgaggacacagggagaagacagccatctacaagcaaaggagagaggcctaaggagagaccacctctacagacacctagatctcagatttctaatccccagaattgtaagaaaatcaatgtctgttgttatccagtctaaggtactctgttgtggtagcccaagcaaattagtattaatacaatctacctgtcctgtggcccagcaaacccatcctgagtatgtgtcaccagagatgcataaatatgttcacccaaagacgtgtccagttatagtcagagtagtcccaaactggaaactacttaaatacgagaattatggaatgcataaataaactgtgggatgctcacatgttgaaca

SEQ ID NO: 250543 - DNA, 608 bp, Homo sapiens
aaagactttcctctgcccaccaaatgcccagaactattttcatgacaatttccttcttgctcctctgctcattataaccccagaggggcacccacccccaatccactgcagacttctatggctgtattgatcctctgggagaaggaggcagatatgagtcacttcacttgcacagggaaattggaagagaccagagaggagattggcattctaaggccacatgacaatttcccaggaagccaaagagttgcattggagcattgagaaaatttagtgtgtgtgtatgttttctacctttccaaggggctgtttgtatctcttttatttatttgtgcagccaataagcaatgccttctattaggcattaggtaaggtataaggagatagaaatgacagaaactcctggacaacatagtgaaaccctgtctctactaaaaatacaaaatttagctgggcatggtgatgcatgcctgtaatcccggctatttaggaagctaaggcaggagaatcccttgaacccaggaggcagaagttgaaatgagccaagatcgcactgctgcactccagcctgggcgacagaacgagaccccatctcacaaaaaaaaaaa

SEQ ID NO: 250544 - DNA, 579 bp, Homo sapiens
ctggtcatatctctttcttcatctgagtgatgctgacagggataaatacagtttgtaaagctttatcatttgccaacctatctatgcacattaagtgcatattatactgaaatatatttttaaagtaaaaatagccctttgtgtaaacctccacattttattcccttgttctgaagaactgttaacagcttggtatttccttctagatatgtttctatttgtttatactgataggttgaccaatgtaagcgagtggatggatggatagatagatggatagatagtagctagctaaccagacagactgagtttgtttgtttgtggtgttttttgtttgtttgtttttgtttgtttgtttgagatggagtctctctctgtcgcccaggctggggtgcagtggcgtgatctcgactcactgcaacctccgcctcccgagttcaagtgattttcctgcctcagctacttgggaagctgaagtgagaggatcacctgagcctaggaaggtcaaggcttcagtgagccataatcacaccactgcactccagcctaggtgacagagcaagaccttctctcaaaaaa

SEQ ID NO: 250545 - DNA, 593 bp, Homo sapiens
ttgaactcctcgcctccagaactgtgagacaatatatttctgttgttttaagccacccagcatgtggtacttggttacagcagccctggcaaacaaatacaggtttgtaggactgtatctttagagatgaaaaggagaacctcaagcggaaggaagagcatgagcttactggggtaagaatatgtatttatatattgagtgcattcagcagttcggttctactggaaccacggtctgtaaaggagccatgtatgggaaggttattgtggccaagtaacagaggctttgaatgctggaaaagacatctaaattttggagccaggcacggtggctcacgcatgtaatcccagcactttgagagaccgaagcaggtagatcacgaggtcgggagatagagagtatcctggccaacatggtgaaaccccttctctgctgggaatgcaaaaactagctgggcgtggtggcatgcacctgtagtcccagctgcttgggaggctgaggcaggagaatcgcttgagcctgggaggtggaggttgcagtgagccgagattgcagcactgcactccagcctggtgacagagcaagactccatc

SEQ ID NO: 250546 - DNA, 675 bp, Homo sapiens
cttatccctagccaaaaacaaaacaaaacagtaagccttctcatactctttgaacatatttgcctgcatctgaaatatcacaataacactcaaataatattattgccatctaaagatgtattcaggcactacaccaccagcaattataaaacatcccttttttgttagtttaagaagtttgcatgcaggtgttaagattatgggaaatcggtggtgaaatatacaatcaggacctacatttttttaaaaaaatatataaattcttgtaaactatgatttacctgtgacagcagagatcttttctctgtctctcagaatagtattgtcatttcttttttggcaagaagaagaggcccctcctcttctctctaagtgttaggctaatacttaggtttgcagtgtatgtttttataactttcagatggtgtgaccatcggaaacagggcaggcaaaaccatggagttaaaaggagaggagtcactaatttaaaggtgttggaggcattctttgaattggagcagtcctaccatgggccccaggggcatgatgtccttgcctagcctgcctcttggtgggaagaagcttctacatctgctcttggctgcagaaaagtaactttcctcattggagggacctgaggatacttaaacatccctaaaggcagcagccccagag

SEQ ID NO: 250547 - DNA, 362 bp, Homo sapiens
tctttgtaaatctatgtgctgcttttaggaaaatggagggcagagagttttcccacatctgcttcttcttgattgtctttagctcagtaattctttatattttggggaggcatattccggtctcccacaatcatatacattatagcttaagtatatgttcttaaaatttgaaatattgtattataaattttcaacaagtggaaatggttaagtaatttacaaggtatctactcagtgaaattttaaggagttattaaaatgtttctgacaaagaggtattaacaggaaaatgtgtgcaattatagcagatgaaacagtaaagtgaacatttttttgatatagtgtgaccttaacattgtaaa

SEQ ID NO: 250548 - DNA, 180 bp, Homo sapiens
cattgtcttttagaagaaacagagatgttgatatatgagaaatgtggtatggcaggccaaataatggcttcccaaagatgttcatgtctaaattcctagaaactatgactatgttacattatatggcaaaggagaattaaggtagtaaatggaattaaggttgctaatcagctgacctta

SEQ ID NO: 250549 - DNA, 352 bp, Homo sapiens
actctgcctttccatccccatgaaacactgagatgatttatatgaatgaaattgctggtgattttccaggtccaacatgagttagttagtaaatcttacgcaccatggcaggtggagatggagagatgatccttaggcagacccaggttgaccctagagttagaaaatattatttttccccatgcacacacacacacacacacacacacacacacacacacaccactagacaattcctcataaccttgacatgaaaatgccacagagtgagtggtaaaaatagaaaaatgcctgctttctgtagctatagaacatatgggaaaataaaatccttaaaatgacattagacgac

SEQ ID NO: 250550 - DNA, 444 bp, Homo sapiens
attttgttttttcgtagagacagggtttctccatgttggccaggctggtctcgaactcctgaccttaggtgatctgcctgcctcggcctctcaaagtgctgggattacaggcatgagccactgtgcccagctaggtttttttttttttttttttacctgtttagtcatgtcttaaataaacagtaagtgagaacttaacgaccttcagccttagtgccaactcgtctgtctgcatggtctcatacagtgcaaagaggatggggttcgggagtcagtctgatctgccttgttcactggttcctcagcctctctgagatcagtgttttcatctgtaaaatgaggatgaacacttaccttatattattttttgagcattgaaggagattgtacatgtagataagtagcacacgctcatcgagaaaagtttccatttttcctatcttt

SEQ ID NO: 250551 - DNA, 281 bp, Homo sapiens
tgctttcaatttggcatctgcaaaataagcattatgctaggtgtcgtgggagattcaaacaagtaaagatctagtcctttttcttgataaactaggctaggtgtggtagctcaaacttctgagagtttgacaacagtctgagaaacacagcgagaccccatctctaccaaaaaaaagtagctgggcatattggcatgcacctgtggtcctagttgcttcgggaagttgaagtgggaggatggcttgagagcaggagtttgagattacagtgagctgtgatc

SEQ ID NO: 250552 - DNA, 418 bp, Homo sapiens
gggactttaatattgtaccacagttagagaagatgtcaccattgggccgctgggagaagctgagtaaacagtaaatgagacctctctgtactatatttgtaacatcctgtgaacctacaattacttcaaaagaaaaagaaaaaaacgaaacaaaacaaccaaaaccctactctacacgtctatcaatagtaggcattcaataactattttattatatcatgagtccacctgaatttttctgttttctatagctttttttgagttgtcatcttgtgttgagtggatttccaccatgaaaacggttggccatgagttaataactgttataaagctggatatacagaagttcatttttacaattctttctacttttatatgcttacaactttccctagtaaaaatcaaagtaataaggcca

SEQ ID NO: 250553 - DNA, 485 bp, Homo sapiens
cagtgggaggagctcagggctgagccattaacaagacgaatgaaactgtcccctggctgcagagacctggggcccctttcaaagcgggctgcgtgggcagggacccaggggagtcatggccccatccccatgacccaggacaccccacaccctgtggtgaccctcgcccctcacggcttccctgcactccagagttggtccaggccgagagcctcatacccgggctcctgtggtcagagatgcagtccggcaccaagaaggcgggactcaggacactccagggcagtgcgtggttctgggcaagacaccctggactcagctccacagtgacatgctcacccacgacagacacacgcagagacagagacatgcagagacacacagagagatacagagatgcacacagatacacagtgagctgagatcacaccactcactgagctgagatcactccagcctgggcaacagagccaaactccggctca

SEQ ID NO: 250554 - DNA, 515 bp, Homo sapiens
tgcctatagatctttggaagctgaaacaactttctcctgatattgggagcttcaaatcaatgtgttccttctgtctggcaaagggtcactcagatttcagtggcagaactttaacttcaacctctgcttttgtagtcaagatgatgttgcgacattgaaatcactcttttaaggaaaatgcactatagtttcatgatctttaaggccaagtttacctaagaccaggaattggaaatatcacagcctcatccagtagaactttctgtgaaaaggaaaatctatatctgctctgtcttatatggtaactactagccacatgcagcaattgaacatctgaaacgtggcccatgtgatggaggaattgaattttaattgtttccttttaattaatttaaattcgaatttaaatagtaacatgtctcttgactactatattgaaccactgttcacagctcttaatatatatttatctgcaggtgttataccaggcaattaaaaatgtttgttttaattac

SEQ ID NO: 250555 - DNA, 798 bp, Homo sapiens
ccccgggtgaagaaaaaaaaaattaccttttgaaaaatccccgggagggggccaaattttagatgcgccttttatggaaatggaaagtccaataacctttctatatttctttgtttctgtttcattactaagaagagcttccctctgtgccatttagttgaaattcaatagagagggtctacgactggcccattcgccaagccacaccatacaagtccaaggctgctgaggagattgtggattagctacttatagatcagctgtccaggcatggtccatttagctatgggacagatagggccctgtcctgtgatacggaataagggccttcaaggcatccttgagatgaataagtcaatgaatgaataaatatcaaagcaatctggacagggcaggcaataacagggatctctatcacatctgctttctctccatcagcaagcagcattttataagagcctgtctcccctggatctcccttacactcaacatgtaatctgaaaaatcctttctgtggcctgcatttctttgcaagactcagttcatttggaacattagtgttctgacagttgtttttgtttccttctttctagttatatatcaacctttcgaaatctaaacccaatggcgtatgtcagtacaaccaggcaggtttttggtaggacttcactatcaaggtggcattatgactcttgtaagccctaggaacttttactttcataagccccatcctcaattaaaaaaacattacgactatgttggtataaggacaaatataatacaaaatagacagataca

SEQ ID NO: 250556 - DNA, 484 bp, Homo sapiens
cttctgtccagctagcaagaatggcacaggaggctcagggtacacttctcattacaaggccttaagggaagtgctgcttctccacacagagcagataggacaaaaattgggtgtttgcacaaagggagcaatgattccataaggaggtgaaagtaacacatagatttgtcaccttatttacattttctatcttcttgtctctaggcaaagggggtaacagaaacctgcttagtgtttttataaagtaaattctgcctagtatcattgaatttcctttagcacatccatagacatacaacagaacagataggagaaagaaacataaataacaggaagtgctgggcgtggtggctcacgcctgtaattccagcactttgggaggccgaggcgggcagatcacttgaggtcaggagtttaagaccaccctggccaacatggcaaaaccccgtctctaccaaaaatacaaaaaattagctgggcgtgg

SEQ ID NO: 250557 - DNA, 541 bp, Homo sapiens
caagagtttgctttctgttgacctttatcagtggaagaatttctcaatgctgagagcaatttttccaatactcttagatctaaaaatgctactgactggattattcatgtttgaacatgtaaaaatattttcttgttaaattaagtttaatcttatacttaaagttcgctgtgttatggagagaactttgaagcaagaatcagaaatcaaataacactaatgcttcctaattagagaaatctctattcaatgcaaactaaaaatatattggctggtgttctaatcagctgtgcttaattctaagcactaaattctgaacactgtgggtaaaacactttgttcatttcagaaatagctagacttttcctaaactctcattaggaaaaatagaagaaattaagaaaataaagctgggcacggtgacttacacctgtaatcccagcttctcaggaggttgaggcaggagggttgcttaaggccaggaattcaagactagtctgggcaacatagcaagatcccatctctaaaaacaaaaacaaac

SEQ ID NO: 250558 - DNA, 269 bp, Homo sapiens
gcctttttcaaatcaaacccaattttcagtctagttggatcacagtggggttaatccatagtgagaattaaaaggaaaaaaagcagcaaaaaaaaaaaatcagcataatcttgatctgtaatactgctgccagagtaatgtttcttagtgttacttcctatggttgttgttttgtttctttgtttgggatttttttttcttgaataaaaggtcagccagtttccctacacaaaaaaaggagatggaaagacgtataccagaggttacaa

SEQ ID NO: 250559 - DNA, 557 bp, Homo sapiens
tctttgtaagaggaaaaagtaaatgcagtccgaaaggatctgtagccacaccctagaaaaggtcctggtttactgctctgtgacagacttagaatagaccctgggcacactttcctgacagagagctgcaaagttatattgccctgctcacaatacacagataagccctcctacttcctgaaatagagcaaagcaggagaaaaggaagaatgcagtgaaggaccagcacagtgattcatgcctgtaatcccagcactttgggaggcccaggcaggtgggttacctgaagtcaggggttcgagaccagcctggccaacatggcaaaatcccgtctctactaaaaatacaaaaattagccaggcacggtggcatgcgcttgtagtccaaggtactcgggaagctgaggcacgagaattgcttgaacccaggaggcagaggttgcagtgagccaagatcacgccactgcactgcagcctgtgcaacagagatagactctgtctataaataaatacccaggagttccagaccagcctgagcaacagtgagccctcatctct

SEQ ID NO: 250560 - DNA, 488 bp, Homo sapiens
ggtgctctgcatctgccaccgtgcagattgttacagcaactcaccagaccacaacttgcagctcacaacacaacaggaagcttaaagatgctttgcttgctaaagtggaaggctgaaaggagcagaaccagaagagtgctggagagatggatgtgggtggcgtttgttttatgtacttacaaaagaagagctgcaagtagcatatgaatctccggttcaattagacaaacttgtagagaagaaaaagaacttcctcaagaaactgaccaccaccctggagtggttaagaattgaccactcaacaacgctggattatagcaaataaattttcacgttagattgttaaaaaaaaatagtgaacccttacacagcatttgttatgtgtcatgagtttttctgagtttttcatataatagcacagttaatctgtatcaaatctttgagttaggtactgtatatgatctctattttataaatgcagtaacggt

SEQ ID NO: 250561 - DNA, 380 bp, Homo sapiens
tatattcaacatacattttataatcagaaaaataatatatactatttcttaaaaattagttttggggctgatgacaaacatatttataagtcacatatttatttctgaaggttttaagtgagtaaacctggactttaaaaaatgttgggccatgtgtggtggctcatgcctgtaatcctaacacttggggagggtgaggagggaggattgcattaatccaggagtttgagaccagcctgggcaacacagtgtgacaccttgtctctacaaaaaactaaataatcagctgggagtggtggtgcatgcctgtagcccccgctattaaggaagctgggatgggaggattgattgagcccgtgaggttgaggctacagtgagct

SEQ ID NO: 250562 - DNA, 825 bp, Homo sapiens
tacaaaatcagtgtagcaaaataagtaacatttctaacatgcaagtgtgagattatcaacattataataagacagatagctgagagatttaatctctcccaagtcagcctccttctgacctcctatttttctctgaatggcaccatcaggtagcttctcttctgttgtttcccacatgaacacaccactcatagcctaattattccaatgttattatctttcacatgagtatttatttcaaactagacagccacagatagatgagaactgtgaaatacatagcatgagagattctaaaatatgtgggaaatgtagggcaggaggtagacagatgctgagcaatgcatacccagtattttttcctcattcttgatggtgaagaagtgagtaatgggctagctttgttattctgacagaggtccctccacatggaaacatgaaacaaagtaaaaacaggtttacctataacacaacagtgcttctactataaggaattccctcccgaggactttgtactcccttcccgtggcacaaagacccctacacttagggaatgataagtattttaaaatcattttttaactaaaatataaggagcatagcttaataaaaagaagaaataatttcaacactaaaggaaagagtacttctgactaggaggccagaaggttgggttttaattctggttctgcacttaaccactttgagtcttgtctcagtttcttcatctgtaaaacaaggagactggtagcatatctttaaagtttcttccaacttaaaatcctgtgattttgtgaaaagcaagtgaagaatcaatttatttaa

SEQ ID NO: 250563 - DNA, 218 bp, Homo sapiens
gcagtcttttcaacaaatgatattgttaaaatctgggtatccacatgcaaaaaattgaagttggagccttaccttacatagtactgatcttgaactcctggcctcaagcaatcctcctgactcatcttcccaaatgctgggattacacacatgagccactgagcccagccagaatccaggttttcatgtgagatctcatttctaactgttggaattaa

SEQ ID NO: 250564 - DNA, 516 bp, Homo sapiens
aatgggggtcagcgcggcggaaccgagtggcagaccgaaaagccaatcgagatagagtactgggatgatgggcgggataaagaagcaatcacagaaaagcagtcggacctagtcaagccggagcagccctctagcgtcccaaacgaggggttcctctccgccccgtggttcctatggatgctgtttcccctcccccgggccaggtgtgagcacccaactggattgatgtctgccgcctgaaatacacttgatctgcgtttccgaagccaagcctcgcaccctgcaacaccgcggttcccgccctcttgggagccggagcgaggaggcggcagggtgctggatcacagtccctgcacctgcagaatgcggatacctctcgctccagatagggcgactgcccccgacctgtgctgtaccctaagttggcccgtctggcctctgtgctccagccctcttattttgggaaacaggagctacttaaataaaagctaaagggacctcagaggttctgaagta

SEQ ID NO: 250565 - DNA, 416 bp, Homo sapiens
ctctttagggaaaataagaggtattagtgctatacattttaacaacacagcacatgatacttttcaacttattttctgagttcagcataccaaacctgacaatatactataagaaaggaaaattacagaccaacatctgtcatgaacatagacacaaatatcctagagaaaatattagcaaatgtccagtgatacatgaaatacataatcattcatggccaggtagtatttattccagaaattcaaggttgatttaccattggaaaaatcagtttaattgatgttagtagaatgagggaggaaaaaactctagatgattagctcagtagagaaagtgttctgttacttagttacattaaacactctgcaaaggaggaatagagaaaaactgttttaatttgatgaaggaaatctgc

SEQ ID NO: 250566 - DNA, 586 bp, Homo sapiens
ggggagaggacggaaggacagtcagtgtccagcttggttggtagatgggtaggtcagatggagatgagaaagaccttttcccctcatcactctcacgcagttaatccagagccccttagagaggtttacaactggagctgctatttaaaggcctagatgagaatgtaatagtaataatgatcctcatttttattctcagctgacagagcaagggaatgtgtgtgaatgctaatccatgcacatacatgtctataaatattctgcatggaaccatctgtgtctatgtcaagctaaactggggttcataccagggtctccaaccatagcccatccccactggggtccttccagctcactcggcttctggatgtacgactcccacaggtggaggaaggcccccagagaagtctgctgaaaattgttattcatgaatggaggttggacttcttcagatacacttcccgagtctgttaacatggtgatgtgacgtttgcccttcatgttactcatagggactattctgttagctaccaattctgctgctttaaataaaaacaccattaaaaaacaaaaggaaacaaaaaaa

SEQ ID NO: 250567 - DNA, 476 bp, Homo sapiens
tggggaaaagggggaacctgctaaaacccgagagataatgggcttgtaaaaaccagaggggtccgcttatgagtttagctccggttatagacaacagtgtcaggtaagctgatcagaaagacagacggcctctccctcaggtttgccgagggagggttcagaaaagaaacagggagcgccttcagcagtctatgcggttataggccattttcttgttttattagcgtttaaattaaactatgagaagaaagtctcatcttccctccctcgccactttgtctatttgttttggaaagagggtagaagaagcccctctgtcttcccgaaaagaagaaaggggaaaaaaattacctggtaggtccaggggcagagggctccctcccaaaacccaagcgcgatttgcatccaagctagtgggaaagcgcgcatctcatcatctgggactgttcctgattaaaactacagtaaaaataaat

SEQ ID NO: 250568 - DNA, 462 bp, Homo sapiens
catatcacaaaggttttaatatacttaaaatgtaacaagtctctaaatatagggaagaagactaccaacaatcacatgtaagcatgttagagacgtgaacaaacaatataaaggaaaaaacagaaatggcttttaatctcattgaaaaaattttaaaaatcacctcaataccactttagagacaaaattttagaagtttcacatgtaactatgttagtgtggctgtacacacattgttgctaagaaagccccattaggcacttgtggagaggaatttggcaacatttagcaaagttgcaaagcagtaacactttgacctacaatccaacatcttaaaatccatcctgaaggagactggcaaaaattgaaaagactggtgcacaagaccattggttgcaacattagaaaatgtagagcatacttctaaacttgaatgtcaataaaaatcataatgcaattaga

SEQ ID NO: 250569 - DNA, 551 bp, Homo sapiens
gtccacctctgccctgcccaccagcagccatgccagccagtgagctgtgggtgaaaacactgctgattgcaaaggaccactcaaccgtcaggaaagctctcggctcatagctttgtcttttgtccagctgtcctggacatcctatctttcctctagcccctagccctgacagagagcctcaaagttgttttcatcttatctgctgaggatctgactcaccccatcagacttctgggagggagagagcgagcgcgcctcgagcccggaggggagaaacccttagtgttgtcacggtttaggcacacgctcatagaaatccttgcagctcgagctcttcaaaatatgattagaccaattttacatgtctagtcactgaggctccagtagattgggactatttctatatgtgcaaagtgaagtggataattgaggcaattatcttcaggcaaatgaatctgggcactgtaatcagtccatcctgataactggggagaaatcggcgtcattcactgtagcattgctttgcgttaaagagaattctaaggtaaaag

SEQ ID NO: 250570 - DNA, 572 bp, Homo sapiens
ggctttgatgtcatgcagaataaatacaaaagcaatcaaaaatcatcatattttctaaaaacagttttccatttactccttcttatctatcctctatccttctcaaccctgctctgtgctctggaaaaacagtctttaaagaaaggcattaacaggctcccatgtcctctggcttctggtagagttagaagaattgggaaggccttaaatatagtagcttagtttgaaaaatgtgaaggactttcgtaacggaagtaattcaagatcaagagtaattaccaacttaatgtttttgcatgggactttgagttaagattattttttaaatcctgaggactagcattaattgacagctgacccaggtgctacacagaaggtggattcagtgaatctaggaagacagcagcagacaggattccaggaaccagtgtttgatgaagctaggactgaggagcaagcgagcaagcagcagttcgtggtgaagataggaaaagagtccaggagccagtgcgatttggtgaaggaagctaggaagaaggaaggagcgctaacgatttggtggtgaagctagg

SEQ ID NO: 250571 - DNA, 465 bp, Homo sapiens
aaagggatggacaaggaaaggggcagggataaggtgctgtgagacccgggaaaagctagactctcaggagaggtggggaaagcctggggagactctgaggcaaactcagaactggtgaataggcaggacaattgtcccgagggttttggccacctgccacctgcctggggcagcacagcttggtgcaagagccactgtttgtggccaggtggaacccctgccctaccacctaccagctggtgaccttagcaggggatagcctttgcagagaccattcccctttctgagaaatgaaaataaccccttcctcacgctgatatggtgatggtaaatggaataaaatatataaagttgtatgaataaattaatttttaataaatatttatatataaataaatatatacagttccagtttagccccaaatagttgctgccatcccccaggaagcagagcatctcacaggg

SEQ ID NO: 250572 - DNA, 397 bp, Homo sapiens
ctttgtgtggtcactagtcagatggtttaaaggcaaatggaaaataggtgttaattttgatagttcattaaatcaagattggttaggaattatttttggtgttttataaccctcattaaaagttagataaaatgaaacagagagtttaagtagcatattcaaggacaaacaggtagtaaatagcaaatcaaaaagcaaacccaacccactagcaagagcccagccagcatccagctctttacatctgatggtgttctccaagaaagggaaggagggctcctggagaaatgactggttccagttcagaagcagaaaactcgcaagttgagcctggagcaccatttgccagaaattcagaaagtattcacaaaacaaaaaaatacaaggcaaatacaaa

SEQ ID NO: 250573 - DNA, 591 bp, Homo sapiens
tttatgagctacatgagtgtcattgcacgtatggggtggagtgaagggtgctcagacgcatgctaacacatacgttgcatgatcagaaaatggcagataagcccctccctgggtgaggactttagtattatcataagaccagggtcattctcctggccttgtgcacaagcaggtgatggagtcaactcccgtcagtaagacttatggcgggatgctgcttatcttagtttatttcagacagttggcaaggtctggccagcgagtatggcacctggagggtggtgctgcaaggtctagtggtcagcgggcacgtatggaacaatacgttagtgggggtgggccgagtcccatttatactctctcagcagggccatgctccctctgaaggcactagggaaggattagtttcaggcctctcttcagcttctgttagtttcttggcttgtgacaccaaagctgtaatctttcttttgttttgtttttgtgacggagttttgctcttgttgcccaggctggagtgcaatggcacaatctcggctcactgcaacctcctcctcccaggttcaagcaattcttctgcctcagcctttg

SEQ ID NO: 250574 - DNA, 602 bp, Homo sapiens
attctgattatcttggtggaatcttggaaaagctaagcagcttcactcttaataaacagaccttgatcagcaacaagtagtgcagagggagctccttacaactcgaccagtgaacccaatttgagaactgaaggagaaatcaatatctatgcagatcagttccacagggaagacatcctatggggactgtttcttcctgggatgagtagaatggaagccctatgcataattcagttcgtggagaagagcaaaggctggactcatggtcccaatttggaggtgaagcatggtgacaaacgtcaatgggaagcatacacattgcaaagtggcttctctcagcgtctgctgtaaacaccgggtcgtgagttgtctgtgagtgtatgaatgaaaacattccatagagattgtgtggccataatacacaaggagctggactccagcaaatggcccagatcaacattctgaaattgaacttagaaaactatcagatatctggaagtgaagtaaagcttatgaagaaaaaagcagtgtggaactgcagtgatttaaaagaaacaagatgggacccatacactcagcattaaaacatataaatctgtaaa

SEQ ID NO: 250575 - DNA, 320 bp, Homo sapiens
gctgatgctggaatgcttttctcaggactgcttcctgccatcttcctccacttcaatctcacaggtttagagcaggcagtgacatcttctttctgatgcaactgaaatgatcttaagatagaggctgcatttcagcaaaagtaccagacctcgaaagaagacagggcatacctagcatcatttggaagaacttagaaaactatcagatatctggaagtgaagtaaagcttatgaagaaaaaagcagtgtggaactgcagtgatttaaaagaaacaagatgggacccatacactcagcattaaaacatataaatctgtaaa

SEQ ID NO: 250576 - DNA, 141 bp, Homo sapiens
gcagaataaaaataaattttattaatctcagtgacttctaaaaaaataagtatttgatagatagatgagtaaagagtttgcccagctttcatagaatgatcaacaaagcaaaaagaaaggaggctgttgctgctctaccac

SEQ ID NO: 250577 - DNA, 694 bp, Homo sapiens
tatctctaacattatggtacagtgtggtacttaaaaaaaaatttttccccccaaagaaatgtccgtaacatttgagtaaacttatttttctcaaggatctgggagtataacctgaagactcaccttaaagaaatcctgttttgcactttatttcatgataaatctgtcgtgttttaatgttaaaatgtttttaatgaggataccctaatggttaagagtgtacgttttgagtctcacgaacctgatttgagtcctatttctcccattttttagtaatatagcttctaaaagtactagtacctatcttaataggattattgggaggattaaatggctgtttaatgtgctacctgatacacggtatgcctttgataaatgttaactattaactactgttgttactatcaagtaaagtatatgttcaggaaaggtgatgtttttattttttatttatttatttttttgagatgaagtctcactcttgtcccccaggctggagtgcaatagcacgatctcggctcactgcaacctccgcctcctgggttcaagccattctcctgcctcagctactggggaggctgaggggcagaggatcccttggacccagtagatggagattgcagtgagccaagatctcactgctgcacaccagcctgggtgacagagtgagactctgtctcaaaaaaaaaaaaga

SEQ ID NO: 250578 - DNA, 400 bp, Homo sapiens
ggattatacagtagtattcagtgaaaatgtaaatgtctccctccattttcttcccagagttaaccagcgctgtttaatggtctcgaactcaaagggaagtaggctttgctctgtattggatactgtcaagaagagggcatatgaagctgggtgcagtggctcatgcttgtaatcccagcactttggggggccaaggcaggtcgaattgcttgaggccaggagttcaagaccagcctgagcaatggcatggtggtacacacctgtagtcccagctactggggaggctgaggggcagaggatcccttggacccagtagatggagattgcagtgagccaagatctcactgctgcacaccagcctgggtgacagagtgagactctgtctcaaaaaaaaaaaaga

SEQ ID NO: 250579 - DNA, 533 bp, Homo sapiens
gtaacagggcctgttgcaatgtttgtattcaatacataaggtgaatatactttcacagttggaaaacgacatcaatctgaactttgttttatagctcctgaattaatatagagctactggctaaggaaagaaacagattttactattttatgcctttgtggaatgcacaagatcattctaaaggaacatttcaaccgcagtgtttaggatcaagtcagacattactgaagctgcatgagcacagacttcgctcccctcccccacgaagaccccggctcttctttgctgtttcctacaattttcttagaattacgtgctgcaaagtctcctcaaaagtcacaaagcactaagtagccaaaggagtcttcccatacccttgtttttctcagtttgacagggatcacagctccattcctccagtaatatccatccaaagttacagcttatttaaaaataccccattgaaagagatgcactttagtaatcaacacaagtgtgactgattccaaaggacttcgtagatgcctaccgta

SEQ ID NO: 250580 - DNA, 295 bp, Homo sapiens
ttgctggatggttttgctattattggttggtgggccctttgcctgtggaatgtatttcactcattctctcctgcacgctgttaggcagttctttcacctgcatgcttcttcttttacctttttgtctacctcatagtccctctctcccctcctttaaaagaattataaatattaggaaagcttgttgttataaattaaaagtttacatatgtatcttgagttcttcataggggaagtgttattttaaaaaattctaaaaatgaaataaatattgttattttattgagcatgaaac

SEQ ID NO: 250581 - DNA, 1008 bp, Homo sapiens
accctgtaggctaggggagaggcctccggatagctggagacaggagtcggccgcgaagaagttgaggtcgggaaggaaaggtgaatcctggcgccccgagaagacgtcttctgcagaaaaaaaggcgtttccccaaccagcttccaaaatcagccatagggagagaaagagagagagagacagaaaaaaaaaagacgctgttagcggccaggcctgaaccccagtgggatattctacttccccatcccaggaatggagggggactccagcgaaattacagggaattcgtggtcacgggaccggcctccgccaatcgctcgtctgggcctggtggaaaacagagagcattatttggtttaattgattcaaaaacaccagaggaccacgaccaggacaccatgagcccccattcctacaccagtgcctcacatgctctctccccaatgcctccgtttctccagaaaagctagaggaaccttttcctcatccccttcgaaggaaaagatgagtgaggatctccgcgttggaggaagagggagtcgaaagaggcttccactctttgaaaaagacccaatggtggttgggcttcgggtcacgtgacaccttctttgtggctccggaagaggattgtgaagtttaggtttcgtggaagaaaccgataattgaggaaaaaaaaaatcaagatttggggggaattacctacaaagatgtaaggtgtgttaatttgggcgcttcttggattctaccctgaggaggaggcgcgtggtgagaggagagatcttgatctgccgctcgctgaggttcagcaggttggccatctctacacggcgaggccggcacaggtagcggttaaaatggaactccttctccagctccaccagctgcgcgctcgtgtacgccgtccgcgcccgcttggacgccgccgccaccacagccctctgctggatccgagggggaggggtgggaaggggagaaaatgaaataaaagataattactgaacacgccga

SEQ ID NO: 250582 - DNA, 1002 bp, Homo sapiens
accctgtaggctaggggagaggcctccggatagctggagacaggagtcggccgcgaagaagttgaggtcgggaaggaaaggtgaatcctggcgccccgagaagacgtcttctgcagaaaaaaaggcgtttccccaaccagcttccaaaatcagccatagggagagaaagagagagagagacagaaaaaaaaaagacgctgttagcggccaggcctgaaccccagtgggatattctacttccccatcccaggaatggagggggactccagcgaaattacagggaattcgtggtcacgggaccggcctccgccaatcgctcgtctgggcctggtggaaaacagagagcattatttggtttaattgattcaaaaacaccagaggaccacgaccaggacaccatgagcccccattcctacaccagtgcctcacatgctctctccccaatgcctccgtttctccagaaaagctagaggaaccttttcctcatccccttcgaaggaaaagatgagtgaggatctccgcgttggaggaagagggagtcgaaagaggcttccactctttgaaaaagacccaatggtggttgggcttcgggtcacgtgacaccttctttgtggctccggaagaggattgtgaagtttaggtttcgtggaagaaaccgataattgaggaaaaaaaaaatcaagatttggggggaattacctacaaagatgtaaggtgtgttaatttgggcgcttcttggattctaccctgaggaggaggcgcgtggtgagaggagagctccaccagctgcgcgctcgtgtacgccgtccgcgcccgcttggacgccgccgaccccggggggctcttgtcccctcccccgccgccgccgccaccgcccccgctgccaccactgcctccgccgccgccgccaccgccgccgccaccacagccctctgctggatccgagggggaggggtgggaaggggagaaaatgaaataaaagataattactgaacacgccga

SEQ ID NO: 250583 - DNA, 578 bp, Homo sapiens
actgagcccggagctggaactagaaactttctgtcagtgtaacatctgcacccaatggtggttgggcttcgggtcacgtgacaccttctttgtggctccggaagaggattgtgaagtttaggtttcgtggaagaaaccgataattgaggaaaaaaaaaatcaagatttggggggaattacctacaaagatgtaaggtgtgttaatttgggcgcttcttggattctaccctgaggaggaggcgcgtggtgagaggagagatcttgatctgccgctcgctgaggttcagcaggttggccatctctacacggcgaggccggcacaggtagcggttaaaatggaactccttctccagctccaccagctgcgcgctcgtgtacgccgtccgcgcccgcttggacgccgccgaccccggggggctcttgtcccctcccccgccgccgccgccaccgcccccgctgccaccactgcctccgccgccgccgccaccgccgccgccaccacagccctctgctggatccgagggggaggggtgggaaggggagaaaatgaaataaaagataattactgaacacgccga

SEQ ID NO: 250584 - DNA, 425 bp, Homo sapiens
cggggggctgccggctggagatgggccccccgacgacgaggccaatcccttggccttctggtccttcttgtacttcatgcgccggttctggaaccagatcttgatctgccgctcgctgaggttcagcaggttggccatctctacacggcgaggccggcacaggtagcggttaaaatggaactccttctccagctccaccagctgcgcgctcgtgtacgccgtccgcgcccgcttggacgccgccgaccccggggggctcttgtcccctcccccgccgccgccgccaccgcccccgctgccaccactgcctccgccgccgccgccaccgccgccgccaccacagccctctgctggatccgagggggaggggtgggaaggggagaaaatgaaataaaagataattactgaacacgccgaaattgaat

SEQ ID NO: 250585 - DNA, 175 bp, Homo sapiens
ggctctaagagaaaataaaatagaaaaggattcctgtgaacctatttggattgtttttcagaacacaatccaaataggtttttcttaagtgaaaaagaaaaaagacaaagtgcaaaagaatatctattatgtgtcaacttctatgaaagagagaccaaaaaaaaaagaaaaagaa

SEQ ID NO: 250586 - DNA, 639 bp, Homo sapiens
atgaaggcatttaacattcataatttatattttaaaagtaaaatactcctggatataaaaaaaggaaaaaagatataaaaacaaatgagagaaaaggaaggaaatggattactcacaatatctaaggtatggaagcaacctaagtgtccatcaacaggttaataaataaagaaaatgtgatatatttgcacaatggaatgctactcagccctatggggtaaataagacggcacagaaaaaaactttcataatatcatttctatgtagagtataaaaaggtttaaactcatagaagcatagggtagaatgatgattgtctggggctgggagtggaggagatgttggtcagaagtaatggggctgattttgtgaagagacgaagactgagcggttgtggccacgttgccgacctcgagcagcagttggcttctccacgtagaacctgggagtaggagactcagaatcgaatctcttctccctccttcctcctgtttttggctttgtgggaaccttatcaaacacaatggccagcaatgttaccaacagaacagatcctcgctccatgaactcccatgtgttcactggaaatctcaacactcttgtggtcaagaagtgtgatgtggaggcaatcttttcgat

SEQ ID NO: 250587 - DNA, 339 bp, Homo sapiens
gctccgaccggggaaagagaggcagcggctggacaccagcacatgtaactgaccgcccagttgtcctctttcgccccaggatccccgtggcaggaagggttagctaactgctcgctttagcttacccagacctgccattgactgagggaccgacctcagtgaatgattaatgacgtgcgcgctggatttcaacctcaggaaacccgagaagggaaaatttccttgagaacagagaatttccctgtacgggcaacgtccccagactgttatttatctgggaaatacacctgacttgcatgcttggaatgtttctgtctaaaaacatatttgaaactttaa

SEQ ID NO: 250588 - DNA, 438 bp, Homo sapiens
ataacaaatagagaaactgcacaaaagtacagcttaatgaattatatataagtttacaaaggttaacacccttgtaatcactgcccatgtcaggagatggttcctggccagccagttcagaagcctaccacatttccctaccaattgcttccccatcagaggacctgcagtcttggcttttatggtgatcattttcttatttaacctaatggtttcattccttgatgatcattgcctcaatcagttatcttattaggagttgcaaaatggtgattttctaatttcctccctatcacactgaaatttcttctgtaaaaggaactttttcttcatcctccaagactgcttgatcaccctgatgtacagtttgtatagtaaaggcaagataattttttttctttttaatggacaatttttgtaaaaaggagttggcggtct

SEQ ID NO: 250589 - DNA, 420 bp, Homo sapiens
ataacaaatagagaaactgcacaaaagtacagcttaatgaattatatataagtttacaaaggttaacacccttgtaatcactgcccatgtcaggagatggttcctggccagccagttcagaagcctaccacatttccctaccaattgcttccccatcagaggacctgcagtcttggcttttatggtgatcattttcttactttatattttgtcattcacgtatgtaaacagtatttggttttgcctgtcttaaatctccataggctcctcttttatctctcttttttatttattttttattttttgagacggagtcttgctctgtcgcccaggctggaaggttgcagtgagctgagatcgcaccactggactccagcctgggtgacagagcaagactctgtctcaaaaaaaaaaaaaaaa

SEQ ID NO: 250590 - DNA, 363 bp, Homo sapiens
attccttgacaaatctatattttgtgatgaggaggaaaatagttctaaactttactatttatttggggaacctagaagcaagaactgttaatgaatcaaagtgcttggtggtgtgtgtgggccagggggagggtggattattttgtaagccattaaaagcactgtgtccagcagcttgggaactacctatctataaaagttagaaataaaatgcagctgacacccagcttctgtgtaatgaagaagtaaaaattaaacaagacctgtaaccccggcactttgggaggcttgaggcaggcggatcacctgaagtcaggagttcaagaccagcctggccaacatggtgaaaacccgtctctacta

SEQ ID NO: 250591 - DNA, 368 bp, Homo sapiens
tagaattatagcaagtatagcttgacctggtacctgatacacaggtgctcaataaatacgaattattattttctacaaatattttataatagcaaaaactgagtaaagtataaatgtagaatttgcaatctctgcttatgaaaataattttcaactaggtgacaagcctgagtgtgactcattgcactcagaagggtcaaatgtttgctatgttatttgtatggttttttattaactattacttaacttctagatggccttaacaatctgtttcttaatatccgaaagctgccaactatttagtcttcctcttatttcccattatattaggcctagatattaacaatacaagtgtataaaagacaaaa

SEQ ID NO: 250592 - DNA, 724 bp, Homo sapiens
agtgtccagaaggaaagttagccgccacattgtccgagaggaagaggctgctgtgcctgctcctggtactactggcatcacatcccatgggcacatctgtgctccaggtgctcctgctcagcaggtgtacctgcaagagactgggaactggaaggagggccaagagcagttgctcagataccagctggcaggccaaaatcagctgctgctgctatgcccagacttcagacaagagaggcagcagttgccagggcaaagtcggctgagtaagcaaagtggcagcttggggctttcccgagagaagaaagcctcctgcggggccactgaggcattctgccttcattcagtacacccggaaactattcaggagcaactgtgatcagggaagttgggggcatttggcctgaaaggcagaatgttcccagtatttctggataataagctggggaagtgaggactgtcctgctgggacaactaagaagagagaatgtggactctgaatccctttttcaactttaaaatggaaaacagtcatataaatgcttacagactgaaaaatgtctcatacatattttgcagctatcatgatcctagttcaatgctaggcaaataatggcacttgttaattatttaccagtttttaacttaagcctgattttaacaacttgataatggtgtaatactgacttataccagcaggggttattattaagcattctctgga

SEQ ID NO: 250593 - DNA, 554 bp, Homo sapiens
agtgtccagaaggaaagttagccgccacattgtccgagaggaagaggctgctgtgcctgctcctggtactactggcatcacatcccatgggcacatctgtgctccaggtgctcctgctcagcaggtgtacctgcaagagactgggaactggaaggagggccaagagcagttgctcagataccagctggcaggccaaaatcagctgctgctgctatgcccagacttcagacaagagaggcagcagttgccagggcaaagtcggctgagtaagcaaagtggcagcttggggctttcccgagagaagaaagcctcctgcggggccactgaggcattctgccttcattcagtacacccggaaactattcaggagcaactgtgatcagggaagttgggggcatttggcctgaaaggcagaatgttcccagtatttctggataataagctggggaagtgaggactgtcctgctgggacaactaagaagagagaatgtggactctgaatccctttttcaactttaaaatggaaaacagtcatataaatgcttacagactga

SEQ ID NO: 250594 - DNA, 231 bp, Homo sapiens
agatcacacgtgggcttggagaatgaatgcaaggttttattgagtgaaagtagctctcagcagatgcgggaaccagaaggaagatggttttcccctggagtctggctgctcggtggaccgggttctcccccagctaccctggccaaactccacctcgttctgctggtcgatggcctgctggcatgctggcatctgtcagtgtgcttttccgctggcatgctcccctcgatg

SEQ ID NO: 250595 - DNA, 589 bp, Homo sapiens
gatgtgaataatctttgacccagcaattccatgtttaaacctctacatagtctctcctcgtgtttcaaggagatacatatgatggtccattgcagaactgtgagaatgagaagttgaaagcaatctaaccattaggttaaatacaagatagaatgcaaactaaaatgaataactagagatatttctgtcaacatgggtaaacctcaaaaatagtattaatgaaattgaactacagactattttatataatacagtataacgtacaatttcaaaacatgcaaattagtgttatgtatttttgtcatggctaaatactatataaaaaggatctaaaagaattaataaaataatcatcagattcagaacagtggtgacctgcagggagaaagacaactgagattggggaaaggatgcaaatgaaaatacctttaattattcatttcttttaaaaataagcaaatactgtatagccaattcttaaaatttgataaagctggctgtgagtatatgagtcagttcttactctctgtatctttctgtataaactatttcataatgcaaaaaaataaagaatatttaaatgaaaaaa

SEQ ID NO: 250596 - DNA, 300 bp, Homo sapiens
cccacctcctagattcgagcgattcttgtgcctcagactcccaagtagctgggaccacaggcacataccaccttgcctggctaaattttgtatttttagtagagatggggtttcaccatcttggccaggcttgtcttgaactcctgacctcaagtgatccactcgcttcagcctcccaaaatgctgggattacaagcataagccaccaacacccgccctctgtaatgtgaacctatcttacctagacctgaagactgtattcagagatattttccagcaaataaaaccttcagaaatctt

SEQ ID NO: 250597 - DNA, 490 bp, Homo sapiens
gtctttttctttctttcccttaatatgagattacatagattttcgtaccatggaccatacttgaattccaggagtcaatcccacttgttcatggggtgtaatcctttaaatgcactcctttggtttgatagtattttgttgaagatttttgcattagcattcataagggatattggtctgtagttttcttgtggtgtctttttctggcttttgtatcagggtaatactggtgtcatagaataagtcaggaagtattacctcctcttcagttttttgaaagagcttgagaagacttggtggtaattctttaaatattggtagaattcaccagtgaagccatctggtccagggcttttctttgttgggagtttgtttttcttttcttttctttttttttttttggattaccaattcagtctctttgctgaatctctttgctaaatagatttatttaccttttctgtttcttcctgattcaatcgtggtaggt

SEQ ID NO: 250598 - DNA, 435 bp, Homo sapiens
cctgtaatcccagctactgaggaggttgaggcaggagaatcgcttgaacccaggaggtggaggttgcagtgagctgagatcacgccactgcactccagtctgggcgacagtgagactctgtatatataacatatatataatagtaagcttgagataccatatatatatgttatgatctgatgacgctaggtaatctagtaggtctcccttctacatacaagacatctaagggatttatacagggcaagcagcatttgttgccaaagctttatcatctggggccatctacaaagataaaacatttctgagattgcagtcagtacatcccacagaacttcaaagcttttacagcaatctgaggtaggagttttgtaatgattattttcttcagttacaagattaataaacattttgattagaacttaatggttgcag

SEQ ID NO: 250599 - DNA, 235 bp, Homo sapiens
tagattgaaaagttttttagaagaaaagtaccataggaatcttaccaacaacaacagaaatgtcccagtattggtggaaacaagtttctcagtgaactgagttaataggaaaaaaggagcatgtaatatttaaaatcatatttggccaccccgcccagccaggtttctttttattgttgttgttgagatggagtctcgctctgttgcccaggctggagtgcagtggcacaatcta

SEQ ID NO: 250600 - DNA, 292 bp, Homo sapiens
ctccctcctttggagcctacagtagcttgttcattgccaggaaatggtctacataagtctgtctgaaccatcagattaggagtgtctgcagggcgggttatgtgtcaccagtatgtagcacccagcacaggtcctccacactgtcaggcctcagaaaatgtgggtggatggaacgggatggaggtgggacaggggtcttctttgcccatgtgacagatgagcacatgggcccaggaggcaggggagggggacttccaaatgcagagcactgggcaggcattccctccgttcg

SEQ ID NO: 250601 - DNA, 554 bp, Homo sapiens
tgtgagctccagttctgggatgaaccctgaaaaggacagagtgagccacacgtggtggccggaccatgggtaaggggtgagcactgctgggctccattctgctggaaggacggacaatctccttctgcacaataactggtgtgagggggccggacgctgtgagggtcaggaaggggagggtccacccaaagtaggctaatggagcagttggtgaccccatttccccagctttcagccagagatatcccagatgtcatgggagagccattggatgctctcagctctgaattttcatgcctctgccacggttagcatcagagcagtgatttccatccaacatagcaaaaaacttttcatgggagaccaaaagcttgtggcttcagaatgaatccagaaaaaaaaaaaaatccctgtcatgagggtgaaaggagctgccagcctcaacagggctccttggagaagacatttgagacttacattccaggcaaagtggcacttcacattctgggttctgaccttcttggaataaatgtctccacctgcgggcagaacta

SEQ ID NO: 250602 - DNA, 515 bp, Homo sapiens
gttttaaagaatggtacaaagccactgtggtgaaaaaaatcggccaacacaacacaaaataaacaggaactgagaaagtttctaggttctgccaccacaagacaacgtgcagccgttcaaaaagtacacgacgcaaaatgtcaactagcttccaatgttaatgaagtgttttattttacaaagaagtatctggctttttatttttcggttaggaagtgaatcctaacaactgagaaatattaaggaaagactgacccaaaccaaaaccaaagcaggcacagcgctcttcaagaatccaagactgaaaacacggacgtcataactggttcagtcttcacctcccagtgggagggaaagagagaatggatcgtccccttgaaatacttggcggggaaagaaaatcaagtctaggtgaggaaagcaggaagagcagagcaggaagagctggcacgcagctgaaagtcttccctccccagagccgaacgagtccttccttcctcgcccccggcggccgc

SEQ ID NO: 250603 - DNA, 334 bp, Homo sapiens
ttttcaattataaatttataatgcataatttttgaaaatgcttttggctcaaaacttatgttaactctatgactatgatataattggactgtctacatcactcaaatttaatttttaacttttattaagtgaacataagtccctagaaaaggttctcttatacaagttaactttaataaatccaaactcaaacatttaccagctggataaaaattgatatgtgtaacactggaatacatagaaatttcagcctcatcttccagcctgggcagccgagattgcaacactgcactccagcctgggtgacagagggagactctgtctcaaaaaaaaa

SEQ ID NO: 250604 - DNA, 606 bp, Homo sapiens
tcatttttcagtctattttaatttataaaaactaatcttgacaatttgaagaatccacctaagtacaagtttgtaccacactggtgactagtgtttttccctagttaacaagtgaaagatcatgtatacccagcgggcctgggcccagccccaccatcccgagcgcacagcagcagtgttctgtagctggactgcctggatttgaatccaggtctagcacttaactctgcagccttgagcaattacctttctgtggctgtttcctcttctgtaaaatgggaacagtaccacctagattgtagtgttggttgatctgataaacacacaaaaggcttactctggctgggcgtggtgggtgacgcctataatcccagcactttgaggggccagaggcgggtggatggctagaactcaggagttcaagactatctggggcaacaaggcgaaaccctgactctaccaaaaataaaagaaactagctgggcacggtggcgtgtacctgtagtcttagctacccaggaggccaagttggaggggaggtaagaggttgcagtgaacccaaacgacaccactgtactccagtgagacctgatctcaggcaaaaaa

SEQ ID NO: 250605 - DNA, 839 bp, Homo sapiens
atagtacctagcacatgataagcctccacgtttttgttgaatgtgaaatataaagaattaagcagctgggcacagtggctcacacctgtaatcccagcactttgggaggtcgaggggggcagatcacgaggtcaggagttcgaaaccaggctgaccaacatggtgaaaccccgtctctactaaaaatacaaaaattagccagatgtggtggcgcacacctgtaatcccagctactcaggaggctgaggcaggagaattgcttgaaccccggaggcagaggttgcagtgagccgagatcgcaccgctgcactccagcctgggcaacagagtgagactctgtctaaaaaaaaaaaaaaaaaattaggtatgggtgtgattcaggtgaacatagaaatagcttgagttagggcacaatttcatagccatacaaattcatattgaagcaagtcagccaacgtggtgcatttcagatgaaacctcaacgtgaagatatatcagttttagaccaaagcagaagtttatataaaggatataagctcttgccctgtatactcaggaattaaactaaaaagaaatctacaaattcatttatagattatttcaatttgaggcctatagatatgtgagaaaggtttctttaaggtttaatgaccaagttccatgtgagctcttacttgggaaacaaaattctcacatggcattaatatactataaattgtgatttatcaaaacattctcatatcctatctagggtgaaatttaatattgccaataaactttccactcgaaaaaagtggtaaaagtgtgcatgctaagcatgttttgttttggaaaaaaaa

SEQ ID NO: 250606 - DNA, 393 bp, Homo sapiens
aaaattaaaacactgtcttcttctcttccattatgatctgtagcttttccccacactcagttgatgcgcctcagggtctgagcctttctttctctcttcccctcactccttcacctccagtgcacaacataatttttggctcattgcactatcatctttggtcaatgcataaccctcttttattcatgtgttcatgtatgtaattagctatatatttttgataatgtaacacctacgagatactgtccaccacaaaaactgggaccttaccaatagcccacaactgtattccaccccatcctttccactcatctcattctgactttgctgggctctaagcactttgtctttgtgagtcccttcctttattaaaaattatatttatatgcataa

SEQ ID NO: 250607 - DNA, 439 bp, Homo sapiens
gctttatcaagttgttcttccctgggcaccttctgaactttcctttagaatgtctaattctgctgtttttccctgttgtcaccgtaactgtcccttagattcaccttcctgtttctacatatccttacttaaattttttcttcacttgtttccattctatatttgtacttctgtatagttcttgtgaaaactgtcttgatccctaaaatacttgtgtaaatatctgtttaccaccatagaactgagaacccctagaaggtatttactggttttcttatttttatatttcctacatttcttagtatagtacattatatatcattggtgctctataaatagttgtctaattgattggaaaaatagaccttttggggagatgggaaagtggttctgcagtttttgtaaaaatgaaatgtttatcataaaattcaaaaaaaaa

SEQ ID NO: 250608 - DNA, 377 bp, Homo sapiens
agtttctgatacctagctaaggaatttagactttgctgtgagccatagaatgctcagagtgggggagtcaagtgatctgacggtttttggaagaccacccaagccactgtagggtggggagtgcagcaacagagaagagactgttgagatggaattgttgagcgaagaaaggctgactcagggagggtcaggacagcagccgctggggaggccaggtaaacatgagttggtgtaaagggttagatcaccaggggagggaaagaggcagtgagagaggaaaggtctggtgagcacagaataccaggtccttaatcagtgcagggagaagcaggctcatggtggaggggagatgcagagatgaactagctctgttaggc

SEQ ID NO: 250609 - DNA, 719 bp, Homo sapiens
tagtcggtcattgtttgtgtatatgaagctattggtttctgaaggttaattttatacccttttatattattgaattactttattgtttgagttagttttatcatttaacctcttgggttttacaggcatactaccatatcatctggaaatgtacatagttttacttctgctctttcaattcttatgcttcaaattgcttccttctgcctaactgcattggctgataccttctatactgtgttaaatagtagtagatatacttggcatccttgccatatgtctgactttagtgagaatgtcaccaattttttccaattaaataaaaagttggcttttgacttaagtatttttattatgttaaccatatatccatcctcctattttattaagaattttttatttgaaatgagtgttgatgtttatcaaaatccttttcaacttttatagaaattattatataactgttcttacattaatatgatgaattattttaatgaatttgctaatatcaaaccattcttgcattcctgaaataaactctacttgatcatgatgtatttctaaatgaggtattagattctgtttgtgaatgtttcatttgtttttttgcatcaatatttgtaggttagaatgatttatatttgtgtgtgcatgcactgtatttgttaggtttaagtataaatgttaatcctgctttataaaaaatttagaagcctttt

SEQ ID NO: 250610 - DNA, 225 bp, Homo sapiens
ccacagcctgcctgtctgtatgctcccctagaagtttgagcagtggggcactgaagaagtgagccactcccccatcgcacaccctgagagagggacaagggaacctttcctgtttcagaatcatcctttaaaccatagctctatttgtaggtcttctttctcaagccaccactatagaagtccattttctcatccttgggcgtagctttagaatccagtttggag

SEQ ID NO: 250611 - DNA, 521 bp, Homo sapiens
tagatcagttcagttaaacagctgtttcccatatcaggaggtggcattgcacacgggctaggcctctatacatgatgaagacaaacagatttttaatacgaggcatttctatggaaatataagaaaaacaaaagttaatgttgggcacaatttatccagatgtgaaactcaaaatacctttagttatagagcaggaaggcagtggtaatctgacatgtttttgccacctatattaaaagaataagcttcagcttacagggcctcaggaaaaaaggtagtagcaattttattgagtccaagtcagaaaagtggaagaaaaatgtgaaagcattagtttggaaaacattagtttggagcattagttaggtaagcttcaggacagccatagttaaaggtgtagtcaacaagaaaaactggttatctctgtgacacacaatttttaaaatctggtttaatttttttgaaacagggtctcactctgtcacgcaggctggagtgcagtggtgtgatcacagctcact

SEQ ID NO: 250612 - DNA, 453 bp, Homo sapiens
ctatgttcttaagagtgctagtttaacaggaaatctccaatgcattattatctagactcatctcaaaggctcacttttcatttgcatgggcccttgctatttgtagggtaggaggcagcacctcgttctggtggctgccaccttcatgaggagacactccttgttaacaggatggttagcccacggctcttcccagcccccttttccacacccagtaaattgttttagtttatggccctcagctgcagttgcaatcatcatcaaattccagttttgaatttaaaggtgaataatgaatgcaatgaactttctagaatttatgaagggcagtgatgttcctttttatctaataattctacatgtgtagcctttcagtatgctattctgtggactgaatttacaaattgtcatttgtttaatgaactgttaatataacatgatgactaactgaaa

SEQ ID NO: 250613 - DNA, 393 bp, Homo sapiens
ccagggaggccaggcttgtttatccattcattgtttctgtgcccaacatgtgtcaggcattgtgctgggtgctagggatgctggcacaagtaagactgaatcccgggagcaggtgctcccagccatgtgtatcctcacaatgcaatgcaggaaataccttggagggctggtggagggtgtgcgcacacagggaggatgcactggcgctggaaggctttcctgagggggtgaagatgttgcaaaccgcgcattttggactgatcactgtaaaattccccttggacaggtagaggcagctaggactctggggtcaggtgtgaatctgccctcccgttgagtggctctgtgtcctgacagtcagttccttctgaaactgtgtcccaaagagttaaa

SEQ ID NO: 250614 - DNA, 877 bp, Homo sapiens
tctgtgacaaggaaactatgatcttgtttttcttatgtcttaaaactggtatttgaagtcagttttgtctggaaaggattgatctgaggctttcaaggagaaccagaggaatgtatagtgtctcagaagccaagagtttggaattttaagatagagcatgatccccaaatgcacagaatcagtatcacctgggaaattatgaaaatgcatattctcaaactccacgtcagacttacagaatcagattctggaaatgggacctaacaatatgatttttttaaacagtccttcaaatgagtctttgagaaacccctgaggtaaaggaatccacctaaagtaacatgttaagaaatttttatggaatgaggactgaaagaatactgttaagggtggcatttaaggtgttaagagtggcatttaaggtgtttagtgaccattggcatggtagggaaagttaaaggtctgccaaatagttgaaagatattcaataaggtaaaattcaaataagcttgcagttaagagaaaggcttttcttgggtaagaggaaaccagttaagagggagagaatgaaggaagaattgaaaaataagggtgagtctcattaaacaacatctcggaaagttgggaattcaagcatatatatgaatacagttacattgagaacagtatataagagaacaaaaagaaggatgaagatggagaaaaattaataccgatttggatctaagacagtggtgctcaaccaagaaagattttgtgattgtcactatttgtggggaacatgctactggcatctagtgtgtagaggcgagagatgctgataaacatcctgcaatgtacagggctcaaacataccccgccctcaaccaagagaaag

SEQ ID NO: 250615 - DNA, 3904 bp, Homo sapiens
cgatggccctgcccagtcccagacagaacctactacgtgcggcggcagctggggcgggaaggcgggcgctgggggcgctgcggccgctgcagcgccagggtccacctggtcggctgcacctgtggaggaggaggtggatttcaggcttcccgtagactggaagaatcggctcaaaaccgcttgcctcgcaggggctgagctggaggcagcgaggccgcccgacgcaggcttccggcgagacatggcagggcaaggatggcagcccggcggcagggcccggcgaggagcgcgaacccgcggccgcagttcccaggcgtctgcgggcgcgagcacgccgcgaccctgcgtgcgccggggcgggggggcggggcctcgcctgcacaaatagggacgaggggggcggggcggccacaatttcgcgccaaacttgaccgcgcgttctgctgtaacgagcgggctcggaggtcctcccgctgctgtcatggttggttcgctaaactgcatcgtcgctgtgtcccagaacatgggcatcggcaagaacggggacctgccctggccaccgctcaggaatgaattcagatatttccagagaatgaccacaacctcttcagtagaaggtaaacagaatctggtgattatgggtaagaagacctggttctccattcctgagaagaatcgacctttaaagggtagaattaatttagttctcagcagagaactcaaggaacctccacaaggagctcattttctttccagaagtctagatgatgccttaaaacttactgaacaaccagaattagcaaataaagtagacatggtctggatagttggtggcagttctgtttataaggaagccatgaatcacccaggccatcttaaactatttgtgacaaggatcatgcaagactttgaaagtgacacgttttttccagaaattgatttggagaaatataaacttctgccagaatacccaggtgttctctctgatgtccaggaggagaaaggcattaagtacaaatttgaagtatatgagaagaatgattaatatgaaggtgttttctagtttaagttgttccccctccctctgaaaaaagtatgtatttttacattagaaaaggttttttgttgactttagatctataattatttctaagcaactagtttttattccccactactcttgtctctatcagataccatttatgagacattcttgctataactaagtgcttctccaagaccccaactgagtccccagcacctgctacagtgagctgccattccacacccatcacatgtggcactcttgccagtccttgacattgtcgggcttttcacatgttggtaatatttattaaagatgaagatccacatacccttcaactgagcagtttcactagtggaaataccaaaagcttcctacgtgtatatccagaggtttgtagataaatgttgccaccttgtttgtaacagtgaaaaattgaaaacaacctggaagtccagtgatgggaaaatgagtatgtttctgtcttagattggggaacccaaagcagattgcaagactgaaatttcagtgaaagcagtgtatttgctaggtcataccagaaatcatcaattgaggtacggagaaactgaactgagaaggtaagaaaagcaatttaaagtcagcgagcaggttctcattgataacaagctccatactgctgagatacagggaaatggaggggggaaagctggagtattgatcccgcccccctccttggttgtcagctccctgtcctgtgtgtgggcggaacatagtccagctgctctatagcaagtctcaggtgtttgcagtaagaagctgctggcatgcacgggaacagtgaatgccaaacacttaaagcaattcgatgtttaagtatgtaagttcttttttttttagacagcgtttcgctcttgttgcccaggctagcatgcaatggtgtgacctcggcttactgcaacctccgccttcccagattcaagcgattctcctgcctcaggctcccaagtagctaggaccaggtgcgcgccaccacgcccggctaatttttgtattttgtatttttagtagagatggggtttcaccatgttggtcaggctagtctcgaactcgtgaccgcaagcgattcacccacctcagcctcccaaagtgctgggattaccggcttgagccaccacacccggcacatcttcattctttttatgtagtaaaaagtataaggccacacatggtttatttgaagtattttataatttaaaaaaatacagaagcaggaaaaccaattataagttcaagtgagggatgatggttgcttgaaccaaagggttgcatgtagtaagaaattgtgatttaagatatattttaaagttataagtagcaggatattctgatggagtttgactttggttttgggcccagggagtttcagatgcctttgagaaatgaatgaagtagagagaaaataaaagaaaaaccagccaggcacagtggctcacgcctgtaatcccagcgctttgggaggctaaggcaggcagatcacttgagaccagcttgggcaacatggcaaagccccatctctacaaaaaacacaaaaattagctgggcattgtggcgcacacctgtattcccatctagtcaggaagctgagatggaagaattaattgagcccacgagttcaaggctgcagtgagtcgtgattgtgccactgcactccagccggggtgacagaagagaccttgtctcgaaaaggaatctgaaaacaatggaaccatgccttcataattctagaaagttattttcaactgataaatctatattcacccaaataatcaagggtgaaggtaaaataatacatttttagacaagcaaagactcaggggttacctccatgtgccctttttagggaagctgttggagaaaatactccagcaaaatgaaggagtacacaaaccagagaatgacatgaatccagcaaataggatccaacacaggcaatattccagctatggagctagctttaaaaaggaacagtaaaaatattaatcggttagctgggtggaatggcccatgcctgtagtcccagctactcaggaggctcagcagcaggacgacttgagcccaagagttccagaccagcctggccaccttagtgagatcccttctcttaaaaataataacttattgccagatttggggcatttggaaagaagttcattgaagataaagcaaaagtaaaaaaaaaaaaaaaaaaaacaaggggaaagggttggttaggcaatcattctagggcagaaagaagtacaggataggaagagcataatacactgtttttctcaacaaggagcagtatgtacacagtcataatgatgtgactgcttagcccctaaatatggtaactactctgggacaatatgggaggaaaagtgaagattgtgatggtgtaagagctaaatcctcatctgtcatatccagaaatcactatataatatataataatgaaatgactaagttatgtgaggaaaaaaacagaagacattgctaaaagagttaaaagtcattgctctggagaattaggagggatggggcaggggactgttaggatgcattataaactgaaaagcctttttaaaattttatgtattaatatatgcattcacttgaaaaactaaaaaaaaacaataatttggaaaaacccatgaaggtaactaacggaaggaaaaactaagagaatgaaaagtatttgcctctggaaagaacaactggcaggactgttgttttcattgtaagacttttggagccatttaattgtacttaaccattttcatctatttctttaataagaacaattccatcttaataaagagttacacttgttaataa

SEQ ID NO: 250616 - DNA, 873 bp, Homo sapiens
agagttagggaacaggaatagcagatcctaataaaggaattacaatctgccacacattgtggaattagggcagtatagtctccatcaatcaaacagaagcagagaacctgtcactgtccagggcacataatttcagttatgttctaaacagcttcagattgtatttttgtcttttgcttacacaagaaatgtgataccaaatgtaagtcttgcaaaaaattcttaagaaatttcctattagctgggtgatagagtggaaagatacacagggaaactgctgactggtttttgagagaatgaggaatccaaaggaaacaaaaaaggagaaattacactttttgttttctaactttctatatagtttacagtttttttcttaccatttgcatatgtagtatactagcatgatatttatccaacttgacagtggcttaccattgtgaagaaaaaagggaaaccttttatttgctttatgcactattgatgcatttaaacttgagaatcagggaagctgtgtttttaatggacacataatttaattatatattttttcttacagatacccaggtgttctctctgatgtccaggaggagaaaggcattaagtacaaatttgaagtatatgagaagaatgattaatatgaaggtgttttctagtttaagttgttccccctccctctgaaaaaagtatgtatttttacattagaaaaggttttttgttgactttagatctataattatttctaagcaacttgtttttattccccactactcttgtctctatcagataccatttatgagacattcttgctataactaagtgcttctccaagaccccaactgagtccccagcacctgctacagtgagctgcca

SEQ ID NO: 250617 - DNA, 3622 bp, Homo sapiens
  misc_feature (3561)..(3561): n is a, c, g, or t
  misc_feature (3568)..(3568): n is a, c, g, or t
  misc_feature (3576)..(3577): n is a, c, g, or t
  misc_feature (3585)..(3585): n is a, c, g, or t
  misc_feature (3590)..(3590): n is a, c, g, or t
  misc_feature (3592)..(3592): n is a, c, g, or t
  misc_feature (3595)..(3596): n is a, c, g, or t
  misc_feature (3598)..(3598): n is a, c, g, or t
  misc_feature (3608)..(3609): n is a, c, g, or t
  misc_feature (3616)..(3616): n is a, c, g, or t
ccagttggtaccccgggagtatggatatcgtcgaccacgcgcctcgccgccaaacttgaccgcgcgttctgctgtaacgagcgggctcggaggtcctcccgctgctgtcatggttggttcgctaaactgcatcgtcgctgtgtcccagaacatgggcatcggcaagaacggggacctgccctggccaccgctcaggaatgaattcagatatttccagagaatgaccacaacctcttcagtagaaggtaaacagaatctggtgattatgggtaagaagacctggttctccattcctgagaagaatcgacctttaaagggtagaattaatttagttctcagcagagaactcaaggaacctccacaaggagctcattttctttccagaagtctagatgatgccttaaaacttactgaacaaccagaattagcaaataaagtagacatggtctggatagttggtggcagttctgtttataaggaagccatgaatcacccaggccatcttaaactatttgtgacaaggatcatgcaagactttgaaagtgacacgttttttccagaaattgatttggagaaatataaacttctgccagaatacccaggtgttctctctgatgtccaggaggagaaaggcattaagtacaaatttgaagtatatgagaagaatgattaatatgaaggtgttttctagtttaagttgttccccctccctctgaaaaaagtatgtatttttacattagaaaaggttttttgttgactttagatctataattatttctaagcaactagtttttattccccactactcttgtctctatcagataccatttatgagacattcttgctataactaagtgcttctccaagaccccaactgagtccccagcacctgctacagtgagctgccattccacacccatcacatgtggcactcttgccagtccttgacattgtcgggcttttcacatgttggtaatatttattaaagatgaagatccacatacccttcaactgagcagtttcactagtggaaataccaaaagcttcctacgtgtatatccagaggtttgtagataaatgttgccaccttgtttgtaacagtgaaaaattgaaaacaacctggaagtccagtgatgggaaaatgagtatgtttctgtcttagattggggaacccaaagcagattgcaagactgaaatttcagtgaaagcagtgtatttgctaggtcataccagaaatcatcaattgaggtacggagaaactgaactgagaaggtaagaaaagcaatttaaagtcagcgagcaggttctcattgataacaagctccatactgctgagatacagggaaatggaggggggaaagctggagtattgatcccgcccccctccttggttgtcagctccctgtcctgtgtgtgggcggaacatagtccagctgctctatagcaagtctcaggtgtttgcagtaagaagctgctggcatgcacgggaacagtgaatgccaaacacttaaagcaattcgatgtttaagtatgtaagttcttttttttttagacagcgtttcgctcttgttgcccaggctagcatgcaatggtgtgacctcggcttactgcaacctccgccttcccagattcaagcgattctcctgcctcaggctcccaagtagctaggaccaggtgcgcgccaccacgcccggctaatttttgtattttgtatttttagtagagatggggtttcaccatgttggtcaggctagtctcgaactcgtgaccgcaagcgattcacccacctcagcctcccaaagtgctgggattaccggcttgagccaccacacccggcacatcttcattctttttatgtagtaaaaagtataaggccacacatggtttatttgaagtattttataatttaaaaaaatacagaagcaggaaaaccaattataagttcaagtgagggatgatggttgcttgaaccaaagggttgcatgtagtaagaaattgtgatttaagatatattttaaagttataagtagcaggatattctgatggagtttgactttggttttgggcccagggagtttcagatgcctttgagaaatgaatgaagtagagagaaaataaaagaaaaaccagccaggcacagtggctcacgcctgtaatcccagcgctttgggaggctaaggcaggcagatcacttgagaccagcttgggcaacatggcaaagccccatctctacaaaaaacacaaaaattagctgggcattgtggcgcacacctgtattcccatctagtcaggaagctgagatggaagaattaattgagcccacgagttcaaggctgcagtgagtcgtgattgtgccactgcactccagccggggtgacagaagagaccttgtctcgaaaaggaatctgaaaacaatggaaccatgccttcataattctagaaagttattttcaactgataaatctatattcacccaaataatcaagggtgaaggtaaaataatacatttttagacaagcaaagactcaggggttacctccatgtgccctttttagggaagctgttggagaaaatactccagcaaaatgaaggagtacacaaaccagagaatgacatgaatccagcaaataggatccaacacaggcaatattccagctatggagctagctttaaaaaggaacagtaaaaatattaatcggttagctgggtggaatggcccatgcctgtagtcccagctactcaggaggctcagcagcaggacgacttgagcccaagagttccagaccagcctggccaccttagtgagatcccttctcttaaaaataataacttattgccagatttggggcatttggaaagaagttcattgaagataaagcaaaagtaaaaaaaaaaaaaaaaaaaacaaggggaaagggttggttaggcaatcattctagggcagaaagaagtacaggataggaagagcataatacactgtttttctcaacaaggagcagtatgtacacagtcataatgatgtgactgcttagcccctaaatatggtaactactctgggacaatatgggaggaaaagtgaagattgtgatggtgtaagagctaaatcctcatctgtcatatccagaaatcactatataatatataataatgaaatgactaagttatgtgaggaaaaaaacagaagacattgctaaaagagttaaaagtcattgctctggagaattaggagggatggggcaggggactgttaggatgcattataaactgaaaagcctttttaaaattttatgtattaatatatgcattcacttgaaaaactaaaaaaaaacaataatttggaaaaacccatgaaggtaactaacggaaggaaaaactaagagaatgaaaagtatttgcctctggaaagaacaactggcaggactgttgttttcattgtaagacttttggagccatttaattgtacttaaccattttcatctatttctttaataagaacaattccatcttaataaagagttacacttgttaataaaaaaaaaaaaaaaaaaaaaaaaaaaaaanttgtggngggcggcnngggcccgnaaaangnttnnanaacccattcnngtggggngcgggg

SEQ ID NO: 250618 - DNA, 3172 bp, Homo sapiens
  misc_feature (3111)..(3111): n is a, c, g, or t
  misc_feature (3118)..(3118): n is a, c, g, or t
  misc_feature (3126)..(3127): n is a, c, g, or t
  misc_feature (3135)..(3135): n is a, c, g, or t
  misc_feature (3140)..(3140): n is a, c, g, or t
  misc_feature (3142)..(3142): n is a, c, g, or t
  misc_feature (3145)..(3146): n is a, c, g, or t
  misc_feature (3148)..(3148): n is a, c, g, or t
  misc_feature (3158)..(3159): n is a, c, g, or t
  misc_feature (3166)..(3166): n is a, c, g, or t
cgatggccctgcccagtcccagacagaacctactacgtgcggcggcagctggggcgggaaggcgggcgctgggggcgctgcggccgctgcagcgccagggtccacctggtcggctgcacctgtggaggaggaggtggatttcaggcttcccgtagactggaagaatcggctcaaaaccgcttgcctcgcaggggctgagctggaggcagcgaggccgcccgacgcaggcttccggcgagacatggcagggcaaggatggcagcccggcggcagggcccggcgaggagcgcgaacccgcggccgcagttcccaggcgtctgcgggcgcgagcacgccgcgaccctgcgtgcgccggggcgggggggcggggcctcgcctgcacaaatagggacgaggggggcggggcggccacaatttcgcgccaaacttgaccgcgcgttctgctgtaacgagcgggctcggaggtcctcccgctgctgtcatggttggttcgctaaactgcatcgtcgctgtgtcccagaacatgggcatcggcaagaacggggacctgccctggccaccgctcaggaatgaattcagatatttccagagaatgaccacaacctcttcagtagaaggtaaacagaatctggtgattatgggtaagaagacctggttctccattcctgagaagaatcgacctttaaagggtagaattaatttagttctcagcagagaactcaaggaacctccacaaggagctcattttctttccagaagtctagatgatgccttaaaacttactgaacaaccagaattagcaaataaagtagacatggtctggatagttggtggcagttctgtttataaggaagccatgaatcacccaggccatcttaaactatttgtgacaaggatcatgcaagactttgaaagtgacacgttttttccagaaattgatttggagaaatataaacttctgccagaatacccaggtgttctctctgatgtccaggaggagaaaggcattaagtacaaatttgaagtatatgagaagaatgattaatatgaaggtgttttctagtttaagttgttccccctccctctgaaaaaagtatgtatttttacattagaaaaggttttttgttgactttagatctataattatttctaagcaactagtttttattccccactactcttgtctctatcagataccatttatgagacattcttgctataactaagtgcttctccaagaccccaactgagtccccagcacctgctacagtgagctgccattccacacccatcacatgtggcactcttgccagtccttgacattgtcgggcttttcacatgttggtaatatttattaaagatgaagatccacatacccttcaactgagcagtttcactagtggaaataccaaaagcttcctacgtgtatatccagaggtttgtagataaatgttgccaccttgtttgtaacagtgaaaaattgaaaacaacctggaagtccagtgatgggaaaatgagtatgtttctgtcttagattggggaacccaaagcagattgcaagactgaaatttcagtgaaagcagtgtatttgctaggtcataccagaaatcatcaattgaggtacggagaaactgaactgagaaggtaagaaaagcaatttaaagtcagcgagcaggttctcattgataacaagctccatactgctgagatacagggaaatggaggggggaaagctggagtattgatcccgcccccctccttggttgtcagcccccatctctacaaaaaacacaaaaattagctgggcattgtggcgcacacctgtattcccatctagtcaggaagctgagatggaagaattaattgagcccacgagttcaaggctgcagtgagtcgtgattgtgccactgcactccagccggggtgacagaagagaccttgtctcgaaaaggaatctgaaaacaatggaaccatgccttcataattctagaaagttattttcaactgataaatctatattcacccaaataatcaagggtgaaggtaaaataatacatttttagacaagcaaagactcaggggttacctccatgtgccctttttagggaagctgttggagaaaatactccagcaaaatgaaggagtacacaaaccagagaatgacatgaatccagcaaataggatccaacacaggcaatattccagctatggagctagctttaaaaaggaacagtaaaaatattaatcggttagctgggtggaatggcccatgcctgtagtcccagctactcaggaggctcagcagcaggacgacttgagcccaagagttccagaccagcctggccaccttagtgagatcccttctcttaaaaataataacttattgccagatttggggcatttggaaagaagttcattgaagataaagcaaaagtaaaaaaaaaaaaaaaaaaaacaaggggaaagggttggttaggcaatcattctagggcagaaagaagtacaggataggaagagcataatacactgtttttctcaacaaggagcagtatgtacacagtcataatgatgtgactgcttagcccctaaatatggtaactactctgggacaatatgggaggaaaagtgaagattgtgatggtgtaagagctaaatcctcatctgtcatatccagaaatcactatataatatataataatgaaatgactaagttatgtgaggaaaaaaacagaagacattgctaaaagagttaaaagtcattgctctggagaattaggagggatggggcaggggactgttaggatgcattataaactgaaaagcctttttaaaattttatgtattaatatatgcattcacttgaaaaactaaaaaaaaacaataatttggaaaaacccatgaaggtaactaacggaaggaaaaactaagagaatgaaaagtatttgcctctggaaagaacaactggcaggactgttgttttcattgtaagacttttggagccatttaattgtacttaaccattttcatctatttctttaataagaacaattccatcttaataaagagttacacttgttaataaaaaaaaaaaaaaaaaaaaaaaaaaaaaanttgtggngggcggcnngggcccgnaaaangnttnnanaacccattcnngtggggngcgggg

SEQ ID NO: 250619 - DNA, 2763 bp, Homo sapiens
  misc_feature (2702)..(2702): n is a, c, g, or t
  misc_feature (2709)..(2709): n is a, c, g, or t
  misc_feature (2717)..(2718): n is a, c, g, or t
  misc_feature (2726)..(2726): n is a, c, g, or t
  misc_feature (2731)..(2731): n is a, c, g, or t
  misc_feature (2733)..(2733): n is a, c, g, or t
  misc_feature (2736)..(2737): n is a, c, g, or t
  misc_feature (2739)..(2739): n is a, c, g, or t
  misc_feature (2749)..(2750): n is a, c, g, or t
  misc_feature (2757)..(2757): n is a, c, g, or t
cgatggccctgcccagtcccagacagaacctactacgtgcggcggcagctggggcgggaaggcgggcgctgggggcgctgcggccgctgcagcgccagggtccacctggtcggctgcacctgtggaggaggaggtggatttcaggcttcccgtagactggaagaatcggctcaaaaccgcttgcctcgcaggggctgagctggaggcagcgaggccgcccgacgcaggcttccggcgagacatggcagggcaaggatggcagcccggcggcagggcccggcgaggagcgcgaacccgcggccgcagttcccaggcgtctgcgggcgcgagcacgccgcgaccctgcgtgcgccggggcgggggggcggggcctcgcctgcacaaatagggacgaggggggcggggcggccacaatttcgcgccaaacttgaccgcgcgttctgctgtaacgagcgggctcggaggtcctcccgctgctgtcatggttggttcgctaaactgcatcgtcgctgtgtcccagaacatgggcatcggcaagaacggggacctgccctggccaccgctcaggaatgaattcagatatttccagagaatgaccacaacctcttcagtagaaggtaaacagaatctggtgattatgggtaagaagacctggttctccattcctgagaagaatcgacctttaaagggtagaattaatttagttctcagcagagaactcaaggaacctccacaaggagctcattttctttccagaagtctagatgatgccttaaaacttactgaacaaccagaattagcaaataaagtagacatggtctggatagttggtggcagttctgtttataaggaagccatgaatcacccaggccatcttaaactatttgtgacaaggatcatgcaagactttgaaagtgacacgttttttccagaaattgatttggagaaatataaacttctgccagaatacccaggtgttctctctgatgtccaggaggagaaaggcattaagtacaaatttgaagtatatgagaagaatgattaatatgaaggtgttttctagtttaagttgttccccctccctctgaaaaaagtatgtatttttacattagaaaaggttttttgttgactttagatctataattatttctaagcaactagtttttattccccactactcttgtctctatcagataccatttatgagacattcttgctataactaagtgcttctccaagaccccaactgagtccccagcacctgctacagtgagctgccattccacacccatcacatgtggcactcttgccagtccttgacattgtcgggcttttcacatgttggtaatatttattaaagatgaagatccacatacccttcaactgagcagtttcactagtggaaataccaaaagcttcctacgtgtatatccagaggtttgtagataaatgttgccaccttgtttgtaacagtgaaaaattgaaaacaacctggaagtccagtgatgggaaaatgagtatgtttctgtcttagattggggaacccaaagcagattgcaagactgaaatttcagtgaaagcagtgtatttgctaggtcataccagaaatcatcaattgaggtacggagaaactgaactgagaaggtaagaaaagcaatttaaagtcagcgagcaggttctcattgataacaagctccatactgctgagatacagggaaatggaggggggaaagctggagtattgatcccgcccccctccttggttgtcagctccctgtcctgtgtgtgggcggaacatagtccagctgctctatagcaagtctcaggtgtttgcagtaagaagctgctggcatgcacgggaacagtgaatgccaaacacttaaagcaattcgatgtttaagtatgtaagttcttttttttccagaccagcctggccaccttagtgagatcccttctcttaaaaataataacttattgccagatttggggcatttggaaagaagttcattgaagataaagcaaaagtaaaaaaaaaaaaaaaaaaaacaaggggaaagggttggttaggcaatcattctagggcagaaagaagtacaggataggaagagcataatacactgtttttctcaacaaggagcagtatgtacacagtcataatgatgtgactgcttagcccctaaatatggtaactactctgggacaatatgggaggaaaagtgaagattgtgatggtgtaagagctaaatcctcatctgtcatatccagaaatcactatataatatataataatgaaatgactaagttatgtgaggaaaaaaacagaagacattgctaaaagagttaaaagtcattgctctggagaattaggagggatggggcaggggactgttaggatgcattataaactgaaaagcctttttaaaattttatgtattaatatatgcattcacttgaaaaactaaaaaaaaacaataatttggaaaaacccatgaaggtaactaacggaaggaaaaactaagagaatgaaaagtatttgcctctggaaagaacaactggcaggactgttgttttcattgtaagacttttggagccatttaattgtacttaaccattttcatctatttctttaataagaacaattccatcttaataaagagttacacttgttaataaaaaaaaaaaaaaaaaaaaaaaaaaaaaanttgtggngggcggcnngggcccgnaaaangnttnnanaacccattcnngtggggngcgggg

SEQ ID NO: 250620 - DNA, 3939 bp, Homo sapiens
  misc_feature (3878)..(3878): n is a, c, g, or t
  misc_feature (3885)..(3885): n is a, c, g, or t
  misc_feature (3893)..(3894): n is a, c, g, or t
  misc_feature (3902)..(3902): n is a, c, g, or t
  misc_feature (3907)..(3907): n is a, c, g, or t
  misc_feature (3909)..(3909): n is a, c, g, or t
  misc_feature (3912)..(3913): n is a, c, g, or t
  misc_feature (3915)..(3915): n is a, c, g, or t
  misc_feature (3925)..(3926): n is a, c, g, or t
  misc_feature (3933)..(3933): n is a, c, g, or t
cgatggccctgcccagtcccagacagaacctactacgtgcggcggcagctggggcgggaaggcgggcgctgggggcgctgcggccgctgcagcgccagggtccacctggtcggctgcacctgtggaggaggaggtggatttcaggcttcccgtagactggaagaatcggctcaaaaccgcttgcctcgcaggggctgagctggaggcagcgaggccgcccgacgcaggcttccggcgagacatggcagggcaaggatggcagcccggcggcagggcccggcgaggagcgcgaacccgcggccgcagttcccaggcgtctgcgggcgcgagcacgccgcgaccctgcgtgcgccggggcgggggggcggggcctcgcctgcacaaatagggacgaggggggcggggcggccacaatttcgcgccaaacttgaccgcgcgttctgctgtaacgagcgggctcggaggtcctcccgctgctgtcatggttggttcgctaaactgcatcgtcgctgtgtcccagaacatgggcatcggcaagaacggggacctgccctggccaccgctcaggaatgaattcagatatttccagagaatgaccacaacctcttcagtagaaggtaaacagaatctggtgattatgggtaagaagacctggttctccattcctgagaagaatcgacctttaaagggtagaattaatttagttctcagcagagaactcaaggaacctccacaaggagctcattttctttccagaagtctagatgatgcctttgatgttgttttatttcaaaggaagccatgaatcacccaggccatcttaaactatttgtgacaaggatcatgcaagactttgaaagtgacacgttttttccagaaattgatttggagaaatataaacttctgccagaatacccaggtgttctctctgatgtccaggaggagaaaggcattaagtacaaatttgaagtatatgagaagaatgattaatatgaaggtgttttctagtttaagttgttccccctccctctgaaaaaagtatgtatttttacattagaaaaggttttttgttgactttagatctataattatttctaagcaactagtttttattccccactactcttgtctctatcagataccatttatgagacattcttgctataactaagtgcttctccaagaccccaactgagtccccagcacctgctacagtgagctgccattccacacccatcacatgtggcactcttgccagtccttgacattgtcgggcttttcacatgttggtaatatttattaaagatgaagatccacatacccttcaactgagcagtttcactagtggaaataccaaaagcttcctacgtgtatatccagaggtttgtagataaatgttgccaccttgtttgtaacagtgaaaaattgaaaacaacctggaagtccagtgatgggaaaatgagtatgtttctgtcttagattggggaacccaaagcagattgcaagactgaaatttcagtgaaagcagtgtatttgctaggtcataccagaaatcatcaattgaggtacggagaaactgaactgagaaggtaagaaaagcaatttaaagtcagcgagcaggttctcattgataacaagctccatactgctgagatacagggaaatggaggggggaaagctggagtattgatcccgcccccctccttggttgtcagctccctgtcctgtgtgtgggcggaacatagtccagctgctctatagcaagtctcaggtgtttgcagtaagaagctgctggcatgcacgggaacagtgaatgccaaacacttaaagcaattcgatgtttaagtatgtaagttcttttttttttagacagcgtttcgctcttgttgcccaggctagcatgcaatggtgtgacctcggcttactgcaacctccgccttcccagattcaagcgattctcctgcctcaggctcccaagtagctaggaccaggtgcgcgccaccacgcccggctaatttttgtattttgtatttttagtagagatggggtttcaccatgttggtcaggctagtctcgaactcgtgaccgcaagcgattcacccacctcagcctcccaaagtgctgggattaccggcttgagccaccacacccggcacatcttcattctttttatgtagtaaaaagtataaggccacacatggtttatttgaagtattttataatttaaaaaaatacagaagcaggaaaaccaattataagttcaagtgagggatgatggttgcttgaaccaaagggttgcatgtagtaagaaattgtgatttaagatatattttaaagttataagtagcaggatattctgatggagtttgactttggttttgggcccagggagtttcagatgcctttgagaaatgaatgaagtagagagaaaataaaagaaaaaccagccaggcacagtggctcacgcctgtaatcccagcgctttgggaggctaaggcaggcagatcacttgagaccagcttgggcaacatggcaaagccccatctctacaaaaaacacaaaaattagctgggcattgtggcgcacacctgtattcccatctagtcaggaagctgagatggaagaattaattgagcccacgagttcaaggctgcagtgagtcgtgattgtgccactgcactccagccggggtgacagaagagaccttgtctcgaaaaggaatctgaaaacaatggaaccatgccttcataattctagaaagttattttcaactgataaatctatattcacccaaataatcaagggtgaaggtaaaataatacatttttagacaagcaaagactcaggggttacctccatgtgccctttttagggaagctgttggagaaaatactccagcaaaatgaaggagtacacaaaccagagaatgacatgaatccagcaaataggatccaacacaggcaatattccagctatggagctagctttaaaaaggaacagtaaaaatattaatcggttagctgggtggaatggcccatgcctgtagtcccagctactcaggaggctcagcagcaggacgacttgagcccaagagttccagaccagcctggccaccttagtgagatcccttctcttaaaaataataacttattgccagatttggggcatttggaaagaagttcattgaagataaagcaaaagtaaaaaaaaaaaaaaaaaaaacaaggggaaagggttggttaggcaatcattctagggcagaaagaagtacaggataggaagagcataatacactgtttttctcaacaaggagcagtatgtacacagtcataatgatgtgactgcttagcccctaaatatggtaactactctgggacaatatgggaggaaaagtgaagattgtgatggtgtaagagctaaatcctcatctgtcatatccagaaatcactatataatatataataatgaaatgactaagttatgtgaggaaaaaaacagaagacattgctaaaagagttaaaagtcattgctctggagaattaggagggatggggcaggggactgttaggatgcattataaactgaaaagcctttttaaaattttatgtattaatatatgcattcacttgaaaaactaaaaaaaaacaataatttggaaaaacccatgaaggtaactaacggaaggaaaaactaagagaatgaaaagtatttgcctctggaaagaacaactggcaggactgttgttttcattgtaagacttttggagccatttaattgtacttaaccattttcatctatttctttaataagaacaattccatcttaataaagagttacacttgttaataaaaaaaaaaaaaaaaaaaaaaaaaaaaaanttgtggngggcggcnngggcccgnaaaangnttnnanaacccattcnngtggggngcgggg

SEQ ID NO: 250621 - DNA, 1282 bp, Homo sapiens
cgatggccctgcccagtcccagacagaacctactacgtgcggcggcagctggggcgggaaggcgggcgctgggggcgctgcggccgctgcagcgccagggtccacctggtcggctgcacctgtggaggaggaggtggatttcaggcttcccgtagactggaagaatcggctcaaaaccgcttgcctcgcaggggctgagctggaggcagcgaggccgcccgacgcaggcttccggcgagacatggcagggcaaggatggcagcccggcggcagggcccggcgaggagcgcgaacccgcggccgcagttcccaggcgtctgcgggcgcgagcacgccgcgaccctgcgtgcgccggggcgggggggcggggcctcgcctgcacaaatagggacgaggggggcggggcggccacaatttcgcgccaaacttgaccgcgcgttctgctgtaacgagcgggctcggaggtcctcccgctgctgtcatggttggttcgctaaactgcatcgtcgctgtgtcccagaacatgggcatcggcaagaacggggacctgccctggccaccgctcaggaatgaattcagatatttccagagaatgaccacaacctcttcagtagaaggtaaacagaatctggtgattatgggtaagaagacctggttctccattcctgagaagaatcgacctttaaagggtagaattaatttagttctcagcagagaactcaaggaacctccacaaggagctcattttctttccagaagtctagatgatgccttaaaacttactgaacaaccagaattagcaaataaagtagacatggtctggatagttggtggcagttctgtttataaggaagccatgaatcacccaggccatcttaaactatttgtgacaaggatcatgcaagactttgaaagtgacacgttttttccagaaattgatttggagaaatataaacttctgccagaatacccaggtgttctctctgatgtccaggaggagaaaggcattaagtacaaatttgaagtatatgagaagaatgattaatatgaaggtgttttctagtttaagttgttccccctccctctgaaaaaaataccatttatgagacattcttgctataactaagtgcttctccaagaccccaactgagtccccagcacctgctacagtgagctgccattccacacccatcacatgtggcactcttgccagtccttgacattgtcgggcttttcacatgttggtaatatttattaaagatgaagatccacatacccttca

SEQ ID NO: 250622 - DNA, 1161 bp, Homo sapiens
  misc_feature (1079)..(1079): n is a, c, g, or t
  misc_feature (1147)..(1148): n is a, c, g, or t
cgatggccctgcccagtcccagacagaacctactacgtgcggcggcagctggggcgggaaggcgggcgctgggggcgctgcggccgctgcagcgccagggtccacctggtcggctgcacctgtggaggaggaggtggatttcaggcttcccgtagactggaagaatcggctcaaaaccgcttgcctcgcaggggctgagctggaggcagcgaggccgcccgacgcaggcttccggcgagacatggcagggcaaggatggcagcccggcggcagggcccggcgaggagcgcgaacccgcggccgcagttcccaggcgtctgcgggcgcgagcacgccgcgaccctgcgtgcgccggggcgggggggcggggcctcgcctgcacaaatagggacgaggggggcggggcggccacaatttcgcgccaaacttgaccgcgcgttctgctgtaacgagcgggctcggaggtcctcccgctgctgtcatggttggttcgctaaactgcatcgtcgctgtgtcccagaacatgggcatcggcaagaacggggacctgccctggccaccgctcaggaatgaattcagatatttccagagaatgaccacaacctcttcagtagaaggtaaacagaatctggtgattatgggtaagaagacctggttctccattcctgagaagaatcgacctttaaagggtagaattaatttagttctcagcagagaactcaaggaacctccacaaggagctcattttctttccagaagtctagatgatgccttaaaacttactgaacaaccagaattagcaaataaagtagacatggtctggatagttggtggcagttctgtttataaggaagccatgaatcacccaggccatcttaaactatttgtgacaaggatcatgcaagactttgaaagtgacacgttttttccagaaattgatttggagaaatataaacttctgccagaatacccaggtgttctctctgatgtccaggaggagaaaggcattaagtacaaatttgaagtatatgagaagaatgattaatatgaaggtgttttccaaagttttaaagtttggnttcccccccttcccctcctggaaaaaaaaaaaggttaagggttaaatttttttaaacaaattttaagnnaaaaaaaaggggg

SEQ ID NO: 250623 - DNA, 3994 bp, Homo sapiens
  misc_feature (3933)..(3933): n is a, c, g, or t
  misc_feature (3940)..(3940): n is a, c, g, or t
  misc_feature (3948)..(3949): n is a, c, g, or t
  misc_feature (3957)..(3957): n is a, c, g, or t
  misc_feature (3962)..(3962): n is a, c, g, or t
  misc_feature (3964)..(3964): n is a, c, g, or t
  misc_feature (3967)..(3968): n is a, c, g, or t
  misc_feature (3970)..(3970): n is a, c, g, or t
  misc_feature (3980)..(3981): n is a, c, g, or t
  misc_feature (3988)..(3988): n is a, c, g, or t
cgatggccctgcccagtcccagacagaacctactacgtgcggcggcagctggggcgggaaggcgggcgctgggggcgctgcggccgctgcagcgccagggtccacctggtcggctgcacctgtggaggaggaggtggatttcaggcttcccgtagactggaagaatcggctcaaaaccgcttgcctcgcaggggctgagctggaggcagcgaggccgcccgacgcaggcttccggcgagacatggcagggcaaggatggcagcccggcggcagggcccggcgaggagcgcgaacccgcggccgcagttcccaggcgtctgcgggcgcgagcacgccgcgaccctgcgtgcgccggggcgggggggcggggcctcgcctgcacaaatagggacgaggggggcggggcggccacaatttcgcgccaaacttgaccgcgcgttctgctgtaacgagcgggctcggaggtcctcccgctgctgtcatggttggttcgctaaactgcatcgtcgctgtgtcccagaacatgggcatcggcaagaacggggacctgccctggccaccgctcaggaatgaattcagatatttccagagaatgaccacaacctcttcagtagaaggtaaacagaatctggtgattatgggtaagaagacctggttctccattcctgagaagaatcgacctttaaagggtagaattaatttagttctcagcagagaactcaaggaacctccacaaggagctcattttctttccagaagtctagatgatgccttaaaacttactgaacaaccagaattagcaaataaagtagacatggtctggatagttggtggcagttctgtttataaggaagccatgaatcacccaggccatcttaaactatttgtgacaaggatcatgcaagactttgaaagtgacacgttttttccagaaattgatttggagaaatataaacttctgccagaatacccaggtgttctctctgatgtccaggaggagaaaggcattaagtacaaatttgaagtatatgagaagaatgattaatatgaaggtgttttctagtttaagttgttccccctccctctgaaaaaagtatgtatttttacattagaaaaggttttttgttgactttagatctataattatttctaagcaactagtttttattccccactactcttgtctctatcagataccatttatgagacattcttgctataactaagtgcttctccaagaccccaactgagtccccagcacctgctacagtgagctgccattccacacccatcacatgtggcactcttgccagtccttgacattgtcgggcttttcacatgttggtaatatttattaaagatgaagatccacatacccttcaactgagcagtttcactagtggaaataccaaaagcttcctacgtgtatatccagaggtttgtagataaatgttgccaccttgtttgtaacagtgaaaaattgaaaacaacctggaagtccagtgatgggaaaatgagtatgtttctgtcttagattggggaacccaaagcagattgcaagactgaaatttcagtgaaagcagtgtatttgctaggtcataccagaaatcatcaattgaggtacggagaaactgaactgagaaggtaagaaaagcaatttaaagtcagcgagcaggttctcattgataacaagctccatactgctgagatacagggaaatggaggggggaaagctggagtattgatcccgcccccctccttggttgtcagctccctgtcctgtgtgtgggcggaacatagtccagctgctctatagcaagtctcaggtgtttgcagtaagaagctgctggcatgcacgggaacagtgaatgccaaacacttaaagcaattcgatgtttaagtatgtaagttcttttttttttagacagcgtttcgctcttgttgcccaggctagcatgcaatggtgtgacctcggcttactgcaacctccgccttcccagattcaagcgattctcctgcctcaggctcccaagtagctaggaccaggtgcgcgccaccacgcccggctaatttttgtattttgtatttttagtagagatggggtttcaccatgttggtcaggctagtctcgaactcgtgaccgcaagcgattcacccacctcagcctcccaaagtgctgggattaccggcttgagccaccacacccggcacatcttcattctttttatgtagtaaaaagtataaggccacacatggtttatttgaagtattttataatttaaaaaaatacagaagcaggaaaaccaattataagttcaagtgagggatgatggttgcttgaaccaaagggttgcatgtagtaagaaattgtgatttaagatatattttaaagttataagtagcaggatattctgatggagtttgactttggttttgggcccagggagtttcagatgcctttgagaaatgaatgaagtagagagaaaataaaagaaaaaccagccaggcacagtggctcacgcctgtaatcccagcgctttgggaggctaaggcaggcagatcacttgagaccagcttgggcaacatggcaaagccccatctctacaaaaaacacaaaaattagctgggcattgtggcgcacacctgtattcccatctagtcaggaagctgagatggaagaattaattgagcccacgagttcaaggctgcagtgagtcgtgattgtgccactgcactccagccggggtgacagaagagaccttgtctcgaaaaggaatctgaaaacaatggaaccatgccttcataattctagaaagttattttcaactgataaatctatattcacccaaataatcaagggtgaaggtaaaataatacatttttagacaagcaaagactcaggggttacctccatgtgccctttttagggaagctgttggagaaaatactccagcaaaatgaaggagtacacaaaccagagaatgacatgaatccagcaaataggatccaacacaggcaatattccagctatggagctagctttaaaaaggaacagtaaaaatattaatcggttagctgggtggaatggcccatgcctgtagtcccagctactcaggaggctcagcagcaggacgacttgagcccaagagttccagaccagcctggccaccttagtgagatcccttctcttaaaaataataacttattgccagatttggggcatttggaaagaagttcattgaagataaagcaaaagtaaaaaaaaaaaaaaaaaaaacaaggggaaagggttggttaggcaatcattctagggcagaaagaagtacaggataggaagagcataatacactgtttttctcaacaaggagcagtatgtacacagtcataatgatgtgactgcttagcccctaaatatggtaactactctgggacaatatgggaggaaaagtgaagattgtgatggtgtaagagctaaatcctcatctgtcatatccagaaatcactatataatatataataatgaaatgactaagttatgtgaggaaaaaaacagaagacattgctaaaagagttaaaagtcattgctctggagaattaggagggatggggcaggggactgttaggatgcattataaactgaaaagcctttttaaaattttatgtattaatatatgcattcacttgaaaaactaaaaaaaaacaataatttggaaaaacccatgaaggtaactaacggaaggaaaaactaagagaatgaaaagtatttgcctctggaaagaacaactggcaggactgttgttttcattgtaagacttttggagccatttaattgtacttaaccattttcatctatttctttaataagaacaattccatcttaataaagagttacacttgttaataaaaaaaaaaaaaaaaaaaaaaaaaaaaaanttgtggngggcggcnngggcccgnaaaangnttnnanaacccattcnngtggggngcgggg

SEQ ID NO: 250624 - DNA, 3463 bp, Homo sapiens
cgatggccctgcccagtcccagacagaacctactacgtgcggcggcagctggggcgggaaggcgggcgctgggggcgctgcggccgctgcagcgccagggtccacctggtcggctgcacctgtggaggaggaggtggatttcaggcttcccgtagactggaagaatcggctcaaaaccgcttgcctcgcaggggctgagctggaggcagcgaggccgcccgacgcaggcttccggcgagacatggcagggcaaggatggcagcccggcggcagggcccggcgaggagcgcgaacccgcggccgcagttcccaggcgtctgcgggcgcgagcacgccgcgaccctgcgtgcgccggggcgggggggcggggcctcgcctgcacaaatagggacgaggggggcggggcggccacaatttcgcgccaaacttgaccgcgcgttctgctgtaacgagcgggctcggaggtcctcccgctgctgtcatggttggttcgctaaactgcatcgtcgctgtgtcccagaacatgggcatcggcaagaacggggacctgccctggccaccgctcaggaatgaattcagatatttccagagaatgaccacaacctcttcagtagaaggtaaacagaatctggtgattatgggtaagaagacctggttctccattcctgagaagaatcgacctttaaagggtagaattaatttagttctcagcagagaactcaaggaacctccacaaggagctcattttctttccagaagtctagatgatgccttaaaacttactgaacaaccagaattagcaaataaagtagacatggtctggatagttggtggcagttctgtttataaggaagccatgaatcacccaggccatcttaaactatttgtgacaaggatcatgcaagactttgaaagtgacacgttttttccagaaattgatttggagaaatataaacttctgccagaatacccaggtgttctctctgatgtccaggaggagaaaggcattaagtacaaatttgaagtatatgagaagaatgattaatatgaaggtgttttctagtttaagttgttccccctccctctgaaaaaagtatgtatttttacattagaaaaggttttttgttgactttagatctataattatttctaagcaactagtttttattccccactactcttgtctctatcagataccatttatgagacattcttgctataactaagtgcttctccaagaccccaactgagtccccagcacctgctacagtgagctgccattccacacccatcacatgtggcactcttgccagtccttgacattgtcgggcttttcacatgttggtaatatttattaaagatgaagatccacatacccttcaactgagcagtttcactagtggaaataccaaaagcttcctacgtgtatatccagaggtttgtagataaatgttgccaccttgtttgtaacagtgaaaaattgaaaacaacctggaagtccagtgatgggaaaatgagtatgtttctgtcttagattggggaacccaaagcagattgcaagactgaaatttcagtgaaagcagtgtatttgctaggtcataccagaaatcatcaattgaggtacggagaaactgaactgagaaggtaagaaaagcaatttaaagtcagcgagcaggttctcattgataacaagctccatactgctgagatacagggaaatggaggggggaaagctggagtattgatcccgcccccctccttggttgtcagctccctgtcctgtgtgtgggcggaacatagtccagctgctctatagcaagtctcaggtgtttgcagtaagaagctgctggcatgcacgggaacagtgaatgccaaacacttaaagcaattcgatgtttaagtatgtaagttcttttttttttagacagcgtttcgctcttgttgcccaggctagcatgcaatggtgtgacctcggcttactgcaacctccgccttcccagattcaagcgattctcctgcctcaggctcccaagtagctaggaccaggtgcgcgccaccacgcccggctaatttttgtattttgtatttttagtagagatggggtttcaccatgttggtcaggctagtctcgaactcgtgaccgcaagcgattcacccacctcagcctcccaaagtgctgggattaccggcttgagccaccacacccggcacatcttcattctttttatgtagtaaaaagtataaggccacacatggtttatttgaagtattttataatttaaaaaaatacagaagcaggaaaaccaattataagttcaagtgagggatgatggttgcttgaaccaaagggttgcatgtagtaagaaattgtgatttaagatatattttaaagttataagtagcaggatattctgatggagtttgactttggttttgggcccagggagtttcagatgcctttgagaaatgaatgaagtagagagaaaataaaagaaaaaccagccaggcacagtggctcacgcctgtaatcccagcgctttgggaggctaaggcaggcagatcacttgagaccagcttgggcaacatggcaaagccccatctctacaaaaaacacaaaaattagctgggcattgtggcgcacacctgtattcccatctagtcaggaagctgagatggaagaattaattgagcccacgagttcaaggctgcagtgagtcgtgattgtgccactgcactccagccggggtgacagaagagaccttgtctcgaaaaggaatctgaaaacaatggaaccatgccttcataattctagaaagttattttcaactgataaatctatattcacccaaataatcaagggtgaaggtaaaataatacatttttagacaagcaaagactcaggggttacctccatgtgccctttttagggaagctgttggagaaaatactccagcaaaatgaaggagtacacaaaccagagaatgacatgaatccagcaaataggatccaacacaggcaatattccagctatggagctagctttaaaaaggaacagtaaaaatattaatcggttagctgggtggaatggcccatgcctgtagtcccagctactcaggaggctcagcagcaggacgacttgagcccaagagttccagaccagcctggccaccttagtgagatcccttctcttaaaaataataacttattgccagatttggggcatttggaaagaagttcattgaagataaagcaaaagtaaaaaaaaaaaaaaaaaaaacaaggggaaagggttggttaggcaatcattctagggcagaaagaagtacaggataggaagagcataatacactgtttttctcaacaaggagcagtatgtacacagtcataatgatgtgactgcttagcccctaaatatggtaactactctggcactgtttggactctgggcactgtttggactctg

SEQ ID NO: 250625 - DNA, 3632 bp, Homo sapiens
  misc_feature (3571)..(3571): n is a, c, g, or t
  misc_feature (3578)..(3578): n is a, c, g, or t
  misc_feature (3586)..(3587): n is a, c, g, or t
  misc_feature (3595)..(3595): n is a, c, g, or t
  misc_feature (3600)..(3600): n is a, c, g, or t
  misc_feature (3602)..(3602): n is a, c, g, or t
  misc_feature (3605)..(3606): n is a, c, g, or t
  misc_feature (3608)..(3608): n is a, c, g, or t
  misc_feature (3618)..(3619): n is a, c, g, or t
  misc_feature (3626)..(3626): n is a, c, g, or t
gggtaaaggctgatacttcccaggacgcggaggcacgtaaaaaaatttgaagaagggcgccaaacttgaccgcgcgttctgctgtaacgagcgggctcggaggtcctcccgctgctgtcatggttggttcgctaaactgcatcgtcgctgtgtcccagaacatgggcatcggcaagaacggggacctgccctggccaccgctcaggaatgaattcagatatttccagagaatgaccacaacctcttcagtagaaggtaaacagaatctggtgattatgggtaagaagacctggttctccattcctgagaagaatcgacctttaaagggtagaattaatttagttctcagcagagaactcaaggaacctccacaaggagctcattttctttccagaagtctagatgatgccttaaaacttactgaacaaccagaattagcaaataaagtagacatggtctggatagttggtggcagttctgtttataaggaagccatgaatcacccaggccatcttaaactatttgtgacaaggatcatgcaagactttgaaagtgacacgttttttccagaaattgatttggagaaatataaacttctgccagaatacccaggtgttctctctgatgtccaggaggagaaaggcattaagtacaaatttgaagtatatgagaagaatgattaatatgaaggtgttttctagtttaagttgttccccctccctctgaaaaaagtatgtatttttacattagaaaaggttttttgttgactttagatctataattatttctaagcaactagtttttattccccactactcttgtctctatcagataccatttatgagacattcttgctataactaagtgcttctccaagaccccaactgagtccccagcacctgctacagtgagctgccattccacacccatcacatgtggcactcttgccagtccttgacattgtcgggcttttcacatgttggtaatatttattaaagatgaagatccacatacccttcaactgagcagtttcactagtggaaataccaaaagcttcctacgtgtatatccagaggtttgtagataaatgttgccaccttgtttgtaacagtgaaaaattgaaaacaacctggaagtccagtgatgggaaaatgagtatgtttctgtcttagattggggaacccaaagcagattgcaagactgaaatttcagtgaaagcagtgtatttgctaggtcataccagaaatcatcaattgaggtacggagaaactgaactgagaaggtaagaaaagcaatttaaagtcagcgagcaggttctcattgataacaagctccatactgctgagatacagggaaatggaggggggaaagctggagtattgatcccgcccccctccttggttgtcagctccctgtcctgtgtgtgggcggaacatagtccagctgctctatagcaagtctcaggtgtttgcagtaagaagctgctggcatgcacgggaacagtgaatgccaaacacttaaagcaattcgatgtttaagtatgtaagttcttttttttttagacagcgtttcgctcttgttgcccaggctagcatgcaatggtgtgacctcggcttactgcaacctccgccttcccagattcaagcgattctcctgcctcaggctcccaagtagctaggaccaggtgcgcgccaccacgcccggctaatttttgtattttgtatttttagtagagatggggtttcaccatgttggtcaggctagtctcgaactcgtgaccgcaagcgattcacccacctcagcctcccaaagtgctgggattaccggcttgagccaccacacccggcacatcttcattctttttatgtagtaaaaagtataaggccacacatggtttatttgaagtattttataatttaaaaaaatacagaagcaggaaaaccaattataagttcaagtgagggatgatggttgcttgaaccaaagggttgcatgtagtaagaaattgtgatttaagatatattttaaagttataagtagcaggatattctgatggagtttgactttggttttgggcccagggagtttcagatgcctttgagaaatgaatgaagtagagagaaaataaaagaaaaaccagccaggcacagtggctcacgcctgtaatcccagcgctttgggaggctaaggcaggcagatcacttgagaccagcttgggcaacatggcaaagccccatctctacaaaaaacacaaaaattagctgggcattgtggcgcacacctgtattcccatctagtcaggaagctgagatggaagaattaattgagcccacgagttcaaggctgcagtgagtcgtgattgtgccactgcactccagccggggtgacagaagagaccttgtctcgaaaaggaatctgaaaacaatggaaccatgccttcataattctagaaagttattttcaactgataaatctatattcacccaaataatcaagggtgaaggtaaaataatacatttttagacaagcaaagactcaggggttacctccatgtgccctttttagggaagctgttggagaaaatactccagcaaaatgaaggagtacacaaaccagagaatgacatgaatccagcaaataggatccaacacaggcaatattccagctatggagctagctttaaaaaggaacagtaaaaatattaatcggttagctgggtggaatggcccatgcctgtagtcccagctactcaggaggctcagcagcaggacgacttgagcccaagagttccagaccagcctggccaccttagtgagatcccttctcttaaaaataataacttattgccagatttggggcatttggaaagaagttcattgaagataaagcaaaagtaaaaaaaaaaaaaaaaaaaacaaggggaaagggttggttaggcaatcattctagggcagaaagaagtacaggataggaagagcataatacactgtttttctcaacaaggagcagtatgtacacagtcataatgatgtgactgcttagcccctaaatatggtaactactctgggacaatatgggaggaaaagtgaagattgtgatggtgtaagagctaaatcctcatctgtcatatccagaaatcactatataatatataataatgaaatgactaagttatgtgaggaaaaaaacagaagacattgctaaaagagttaaaagtcattgctctggagaattaggagggatggggcaggggactgttaggatgcattataaactgaaaagcctttttaaaattttatgtattaatatatgcattcacttgaaaaactaaaaaaaaacaataatttggaaaaacccatgaaggtaactaacggaaggaaaaactaagagaatgaaaagtatttgcctctggaaagaacaactggcaggactgttgttttcattgtaagacttttggagccatttaattgtacttaaccattttcatctatttctttaataagaacaattccatcttaataaagagttacacttgttaataaaaaaaaaaaaaaaaaaaaaaaaaaaaaanttgtggngggcggcnngggcccgnaaaangnttnnanaacccattcnngtggggngcgggg

SEQ ID NO: 250626 - DNA, 3572 bp, Homo sapiens
  misc_feature (3511)..(3511): n is a, c, g, or t
  misc_feature (3518)..(3518): n is a, c, g, or t
  misc_feature (3526)..(3527): n is a, c, g, or t
  misc_feature (3535)..(3535): n is a, c, g, or t
  misc_feature (3540)..(3540): n is a, c, g, or t
  misc_feature (3542)..(3542): n is a, c, g, or t
  misc_feature (3545)..(3546): n is a, c, g, or t
  misc_feature (3548)..(3548): n is a, c, g, or t
  misc_feature (3558)..(3559): n is a, c, g, or t
  misc_feature (3566)..(3566): n is a, c, g, or t
taaattcggtcacggggcctggagctatgcgtgtgctcgttagtcctcccgctgctgtcatggttggttcgctaaactgcatcgtcgctgtgtcccagaacatgggcatcggcaagaacggggacctgccctggccaccgctcaggaatgaattcagatatttccagagaatgaccacaacctcttcagtagaaggtaaacagaatctggtgattatgggtaagaagacctggttctccattcctgagaagaatcgacctttaaagggtagaattaatttagttctcagcagagaactcaaggaacctccacaaggagctcattttctttccagaagtctagatgatgccttaaaacttactgaacaaccagaattagcaaataaagtagacatggtctggatagttggtggcagttctgtttataaggaagccatgaatcacccaggccatcttaaactatttgtgacaaggatcatgcaagactttgaaagtgacacgttttttccagaaattgatttggagaaatataaacttctgccagaatacccaggtgttctctctgatgtccaggaggagaaaggcattaagtacaaatttgaagtatatgagaagaatgattaatatgaaggtgttttctagtttaagttgttccccctccctctgaaaaaagtatgtatttttacattagaaaaggttttttgttgactttagatctataattatttctaagcaactagtttttattccccactactcttgtctctatcagataccatttatgagacattcttgctataactaagtgcttctccaagaccccaactgagtccccagcacctgctacagtgagctgccattccacacccatcacatgtggcactcttgccagtccttgacattgtcgggcttttcacatgttggtaatatttattaaagatgaagatccacatacccttcaactgagcagtttcactagtggaaataccaaaagcttcctacgtgtatatccagaggtttgtagataaatgttgccaccttgtttgtaacagtgaaaaattgaaaacaacctggaagtccagtgatgggaaaatgagtatgtttctgtcttagattggggaacccaaagcagattgcaagactgaaatttcagtgaaagcagtgtatttgctaggtcataccagaaatcatcaattgaggtacggagaaactgaactgagaaggtaagaaaagcaatttaaagtcagcgagcaggttctcattgataacaagctccatactgctgagatacagggaaatggaggggggaaagctggagtattgatcccgcccccctccttggttgtcagctccctgtcctgtgtgtgggcggaacatagtccagctgctctatagcaagtctcaggtgtttgcagtaagaagctgctggcatgcacgggaacagtgaatgccaaacacttaaagcaattcgatgtttaagtatgtaagttcttttttttttagacagcgtttcgctcttgttgcccaggctagcatgcaatggtgtgacctcggcttactgcaacctccgccttcccagattcaagcgattctcctgcctcaggctcccaagtagctaggaccaggtgcgcgccaccacgcccggctaatttttgtattttgtatttttagtagagatggggtttcaccatgttggtcaggctagtctcgaactcgtgaccgcaagcgattcacccacctcagcctcccaaagtgctgggattaccggcttgagccaccacacccggcacatcttcattctttttatgtagtaaaaagtataaggccacacatggtttatttgaagtattttataatttaaaaaaatacagaagcaggaaaaccaattataagttcaagtgagggatgatggttgcttgaaccaaagggttgcatgtagtaagaaattgtgatttaagatatattttaaagttataagtagcaggatattctgatggagtttgactttggttttgggcccagggagtttcagatgcctttgagaaatgaatgaagtagagagaaaataaaagaaaaaccagccaggcacagtggctcacgcctgtaatcccagcgctttgggaggctaaggcaggcagatcacttgagaccagcttgggcaacatggcaaagccccatctctacaaaaaacacaaaaattagctgggcattgtggcgcacacctgtattcccatctagtcaggaagctgagatggaagaattaattgagcccacgagttcaaggctgcagtgagtcgtgattgtgccactgcactccagccggggtgacagaagagaccttgtctcgaaaaggaatctgaaaacaatggaaccatgccttcataattctagaaagttattttcaactgataaatctatattcacccaaataatcaagggtgaaggtaaaataatacatttttagacaagcaaagactcaggggttacctccatgtgccctttttagggaagctgttggagaaaatactccagcaaaatgaaggagtacacaaaccagagaatgacatgaatccagcaaataggatccaacacaggcaatattccagctatggagctagctttaaaaaggaacagtaaaaatattaatcggttagctgggtggaatggcccatgcctgtagtcccagctactcaggaggctcagcagcaggacgacttgagcccaagagttccagaccagcctggccaccttagtgagatcccttctcttaaaaataataacttattgccagatttggggcatttggaaagaagttcattgaagataaagcaaaagtaaaaaaaaaaaaaaaaaaaacaaggggaaagggttggttaggcaatcattctagggcagaaagaagtacaggataggaagagcataatacactgtttttctcaacaaggagcagtatgtacacagtcataatgatgtgactgcttagcccctaaatatggtaactactctgggacaatatgggaggaaaagtgaagattgtgatggtgtaagagctaaatcctcatctgtcatatccagaaatcactatataatatataataatgaaatgactaagttatgtgaggaaaaaaacagaagacattgctaaaagagttaaaagtcattgctctggagaattaggagggatggggcaggggactgttaggatgcattataaactgaaaagcctttttaaaattttatgtattaatatatgcattcacttgaaaaactaaaaaaaaacaataatttggaaaaacccatgaaggtaactaacggaaggaaaaactaagagaatgaaaagtatttgcctctggaaagaacaactggcaggactgttgttttcattgtaagacttttggagccatttaattgtacttaaccattttcatctatttctttaataagaacaattccatcttaataaagagttacacttgttaataaaaaaaaaaaaaaaaaaaaaaaaaaaaaanttgtggngggcggcnngggcccgnaaaangnttnnanaacccattcnngtggggngcgggg

SEQ ID NO: 250627 - DNA, 1382 bp, Homo sapiens
cgatggccctgcccagtcccagacagaacctactacgtgcggcggcagctggggcgggaaggcgggcgctgggggcgctgcggccgctgcagcgccagggtccacctggtcggctgcacctgtggaggaggaggtggatttcaggcttcccgtagactggaagaatcggctcaaaaccgcttgcctcgcaggggctgagctggaggcagcgaggccgcccgacgcaggcttccggcgagacatggcagggcaaggatggcagcccggcggcagggcccggcgaggagcgcgaacccgcggccgcagttcccaggcgtctgcgggcgcgagcacgccgcgaccctgcgtgcgccggggcgggggggcggggcctcgcctgcacaaatagggacgaggggggcggggcggccacaatttcgcgccaaacttgaccgcgcgttctgctgtaacgagcgggctcggaggtcctcccgctgctgtcatggttggttcgctaaactgcatcgtcgctgtgtcccagaacatgggcatcggcaagaacggggacctgccctggccaccgctcaggaatgaattcagatatttccagagaatgaccacaacctcttcagtagaaggtaaacagaatctggtgattatgggtaagaagacctggttctccattcctgagaagaatcgacctttaaagggtagaattaatttagttctcagcagagaactcaaggaacctccacaaggagctcattttctttccagaagtctagatgatgccttaaaacttactgaacaaccagaattagcaaataaagtagacatggtctggatagttggtggcagttctgtttataaggaagccatgaatcacccaggccatcttaaactatttgtgacaaggatcatgcaagactttgaaagtgacacgttttttccagaaattgatttggagaaatataaacttctgccagaatacccaggtgttctctctgatgtccaggaggagaaaggcattaagtacaaatttgaagtatatgagaagaatgattaatatgaaggtgttttctagtttaagttgttccccctccctctgaaaaaagtatgtatttttacattagaaaaggttttttgttgactttagatctataattatttctaagcaactagtttttattccccactactcttgtctctatcagataccatttatgagacattcttgctataactaagtgcttctccaagaccccaactgagtccccagcacctgctacagtgagctgccattccacacccatcacatgtggcactcttgccagtccttgacattgtcgggcttttcacatgttggtaatatttattaaagatgaagatccacatacccttca

SEQ ID NO: 250628 - DNA, 504 bp, Homo sapiens
ttttttcagttatctgactggatcaagattggagatctgacttccaaaaattgtcatctttttgtaaaccttcaatcaaaaggcttaaaagggggaggtcgatttggtcagacaacgccaccacttgttgattttctcaaggacattttgagaagatatccagaaggaggacagattcttaaggaattaattcagaatgcagaagatgctggggcgacagaagttaaatttttatatgatgaaactcaatacggaacagagactctttggtcaaaagatatggcgccatatcaggggccagctctctatgtgtacaacaacgcggttttcaccccagaggactggcacggcattcaagaaatagcaagaagcaggaaaaaggatgatcctctgaaggtcggaagatttggaattgggtttaattctgtctatcatataacagatgttccttgtatctttagtggtgaccaaatcgggatgctagatcctcatcaaacacttttt

SEQ ID NO: 250629 - DNA, 357 bp, Homo sapiens
ttttttcagttatctgactggatcaagattggagatctgacttccaaaaattgtcatctttttgtaaaccttcaatcaaaaggcttaaaagggggaggtcgatttggtcagacaacgccaccacttgttgattttctcaaggacattttgagaagatatccagaaggaggacagattcttaaggaattaattcagaatgcagaagatgctggggcgacagaagttaaatttttatatgatgaaactcaatacggaacagagactctttggtcaaaagatatggcgccatatcaggatgttccttgtatctttagtggtgaccaaatcgggatgctagatcctcatcaaacacttttt

SEQ ID NO: 250630 - DNA, 351 bp, Homo sapiens
gccacagacagggactgttgtgattttgcagatgaagaaactgaggcacagagaggggatactcacttgttgagggtcccacagccaggactttcaggggtgggcttggatcccagggagctggccctgagcctgtacttgtgagtaccacatagggctcctcagacctgctcagcttcctccaggctgatggccagatgcatcccaggctgttaacgacaggcgtgtcttcaacccacatagttcctaagagcatggctgataatcatggtcatttggggacagtggctttggccaggacaggagtgcatggccacattattttagttttctgtattaaaacaacttttc

SEQ ID NO: 250631 - DNA, 569 bp, Homo sapiens
tttagaatggaacattttaaatttttagcctcctttttaaaaatgtagagcatcttttaaatcttaaatatatttcagccagttccaaaagttggactgtttaagtatttttagtagataacactcaaaatatcagaagtgatgtgaaaatcaagaatttctaaagtgctgtgtatgtattatatcttagtaagttcattgcctcattctcattactttctgtgaatgctaaactgattcttttagtctttcacctgtatcatccacagttccttccatttaatgttgcccaattctggttctgccttatccatgaaactagatatgacctagtatacccattgtatattaggtgcatataaacttactaaatgacaggcagtaactactctggtaatacccaccttcaaacaagaacaaatccttcttccaaaagaaacaagttcttaaatgccaacctacatctttggcctgtgttttttactcccatgatctatttattgcaattttcttatttaaatatagaataagcttaaatatagagcaattttgtatatctttcctatagc

SEQ ID NO: 250632 - DNA, 401 bp, Homo sapiens
aagcctttgacttctctcttcctgcctctcaggcgagagtgaaggacctggcctgaggcaatgatgtaaatgaccagctacttatcaaaacaggcattggctactgaatcctgtgcataaaaacgtggtatccccaggtcctttgctaagccagtacagttcaggggaaaagttagttgagcccctgccagacacatcagggagtgatctggccacccagagagcaaatggaaagcagcagttcacaacaatgacttttcctcttttatatatattttggtgtccttattttgctatgggagagctaccatccagctacttcaaccaatacatatttgattagcatctaactagacatcattatcctagtgattttcaaaactaataaatatggggccaag

SEQ ID NO: 250633 - DNA, 242 bp, Homo sapiens
ttttatgagtgcctactatctacaaggcttttaaataggtatcacagaaaggcgtgtgtaagtgcattctaacctgcaaaagtgtgtagagattcaaggcaggactacagtataatgaaatactggatgattggtcttgtttcttcactcatttactattgcagaattatacttccacatcctttgctgtgggtttgcagtgcctccccctagggcatgtagaatataattctccatctatt

SEQ ID NO: 250634 - DNA, 301 bp, Homo sapiens
ggtaaataatagagcaaagggaggcagtatgttctagggcagtggttttcaaatgttggcatgtatcagaatcacctatagggcttattaaaacagattgtgaggccccctacacccagagtctctgatttagaaaatatggagtaggccttgagaattcgcatttctaacaaattcccaggtgatgccagtgctgctggcccagggaccatacttttgagaaccactcctgaaaagccaacaaaggctttggagtcagtcactcccaggtctacactctagctgtatgactgactgctgt

SEQ ID NO: 250635 - DNA, 372 bp, Homo sapiens
ttaacttagggaaaataacatctactctctagcattgttttgaaatgctgaaatgttcacctgaaatatctaggactagaaaaaggcctggaaatcattccctttatatcaatacttcttaattttcattcctacttttcagttaaaaaataactcagtgataagaatccatgaggaaataacacttaaaagtttacaactcagcagttatacaagaacaaaacaatccacaaaagtaaacctaaccgtaattgtaaaaatatatttaaaaagcaataggagtagaaattggaaaccatgatgaaggaaggaaggaaggaaggaaggaaggaaggaaggaaggaaggaaggaaagaaaagaaagaaagaaag

SEQ ID NO: 250636 - DNA, 423 bp, Homo sapiens
gcaaatggcaggttcttattaggccatgctccaaagtcactgtccggtttctaactgtgatggtgaagcatggtcacattggtgaatttgaaatcactgattatcacagagctgggaaaattgttgtgaacctcacagacaggccaaataattgtggagtgatcagccccaaatgtgacgtccacctcaaagatccagaaaaatcacaaaataatctgctcccatcctgccagtttggttttattgtactgacaacctcagctggcatcatggaccatgaaaaaggaagctgaaaacacacaggagagaaaatcctgggattctttttctagagacgtaatacatattgacaaataaaatgtctcagggacagaaaaaaaatctgaaaaaaccccaacatatacaggagtatgctgaaaactg

SEQ ID NO: 250637 - DNA, 372 bp, Homo sapiens
tctgtaatctgttaccatcacagatttttttcttccataagagaaatcagatgggtgggaagttgcattccatgtgattctttgccaaactggagaggcattgagcgtttggatgatctcttttatactctgaaatacataatcccaagaaggtttaaatcaatgtgttaattggtaagtgatactgtaattatatgcataatcagggaaaatttgaatccagattatttgcttgctctcagaaaattaatctgcagaggtcatatattagattgcttgtttattaagtggaacccctgtagtttcaaagtgccgactggctctgccctctacgaagcattcttctagatgttcccagcaggtgtcaacggc

SEQ ID NO: 250638 - DNA, 361 bp, Homo sapiens
gacggagtctcgctgttgccagactggagtgcagtggcacgatctcggctcactgcaacctccgtctcccaggttcaagcgattctcctgcctcagcctcccgagtagctgggactgcaggctgctccaccacacccggctgatttttgtatttttagtagagatggggttttaccatgttggccagactggtcttgacctccagacctttggtgatccgcccacctcggcctcccaaattgctggaattacaggtgtgagcccccgcggccggccagtgtttattcttcctttcctgtcttcctagaatcatcttgctgcttccctcagtacggtaaataaatcttttgacacatgctca

SEQ ID NO: 250639 - DNA, 148 bp, Homo sapiens
ggaggaacttcttttcccttcagctggaaactgcctgggaaggttattagttattaggtgatggtagcggactagccgacggagggcaggcaggggagggggagaggactttacagaaaaggaattctcggtcgagctctgcctggag

SEQ ID NO: 250640 - DNA, 376 bp, Homo sapiens
aatgacagtaatcagttaacaatccattccccatggataagaaggctgtgatttttacaccaaaggaaaagtgtttaagtcatagtccctaccataggggcttcaacaaagtgatgccaaagaaagactactgtcctacgaagacagccatctggaggaggtcctaatggtatcacaagcgatgtgacaaaaatgaagtcccttcatttctctcagcctttccttacctgtaaacagggcaagaatggaaggctgaaatagccagaggttccaaacctcaatggtaatgaagaaacacaacctgtgcattgtattctgaaaggcctcggagaaactgtgtccttatccacagacgcacagagcggtgttggagaaa

SEQ ID NO: 250641 - DNA, 428 bp, Homo sapiens
tcttaaatcacaaaattagcagctcccacagtgtgttctgtttatcacacaactaccattactgcttgttctccccttttaagtaatctctaggcagaggatcagagacctaggcttgcttctaaaatatattttctcttgacaattcagttgattaaaatgtttaagatcaggttttatttatttgtttacctgagaaatagatcactgtttctggggactttgagacatcttccaacatccctgactcttagtggttttaaaatagaaatgtttagtaatcctatcttaacattcacctattttattcttcaaaaggccagtttcttatcctctggacattttctaaatgcctgcttatatgactttttgctgtattaccttcttgatctaataaacactccaaaatgactcctactaatgagaac

SEQ ID NO: 250642 - DNA, 210 bp, Homo sapiens
ccctcatggaacttaacagtttagcagggaaacagactttcttaaaataatctatcacttaaacaattgtgaaactaccgctgtcactgtaatggaggattttgagtggatcaggggctttctctgaagatttggctaggattcatccctgtctcttcttaagcctttctttcactctttgcaacagatctgggcaacagggaagagggg

SEQ ID NO: 250643 - DNA, 453 bp, Homo sapiens
cagcttttgatggtcattagtacatctttttttatttgagacagggtcttactctgtgcccaggctggcatgcagtgatgtgatctctggtcactgcagccttgacctcctgggctcaggtgatcctcccacctcagcctcctgagtaattgaaacgacaggcacaagcttccaagcccaactactttttttttgtatttttgtagagacgggttttcaccgtgttgcccaggctggtctcaaactcctgggttcaggcagtctgcctgccttggcttcccaaagctctgggattacaggcatgaaccttccatgaatttttaatttgatttttgtttccaagtaaatctctaaaagaatactcattaaaaatgaatctttcaaatccttagtatttgtattgctaacatttacactccaggatgattttctattaaaatgtattgtcaagta

SEQ ID NO: 250644 - DNA, 362 bp, Homo sapiens
cacggctaatttttgtattttttgtagagatggagtttcaccctgttgcccaggctggtctcgaactcctgatctcaagtgatccacccacctcgacctcccaaagtgccaggattacaagcgtgaaccactgcacccggccttggcttgtgttgtttctaataagaaatctgaggtgaatcttattttggttcccttgtacataacacatttttttccctctgattgcttttaagatttttctcttcaccactggttttgaccagtctgctaataatgtgccctgatagagttgctcacgtgtttcctgtgcatgcagttcatcaaacttgttggatctatgtcttcatgatttttatcaa

SEQ ID NO: 250645 - DNA, 323 bp, Homo sapiens
aacagcaagctgacccaacgccctgctcgctgactcctttatgccggcaccggcaccgagtgccacgctgcgtttgcaagctattgttcagcaggcagattttctgctgggggttaacaggtgagagcagtgatccaagagcaaaatagagaggatgcttttagttaagctgccaatgcttagcaaacacttctgaaaatatcacagctcaatattgcatcattcatgaatggaagagctgcagggtggggggtgcttgtttcaaaatgatttaccaaagtaaggagagagtgcagaaatgcagaaataaaataatgtggctc

SEQ ID NO: 250646 - DNA, 696 bp, Homo sapiens
atttggcttctggtctactttccttagataaattccatgtgtaaatagacataatcaaatattttgtcaaaacatagcttgcaggcctggaaagtatgatcttctatatactggcttctgggcttcaccaatcctccctactaacttaatggtagctactttggggcaattcaaaattataggtttgggtaaaatgggaatgtaaccagtttccctttaggtttgctgtatggagaaggtgactgagaaatcctaggtacattgtcctgctaaaactatctctatttcttttataaatgttttatgattttcagtttacaagtccttcagctctgtggttaaatttatttctaaatatcttaatttatttttcatgctcttgtaagtggaatggtttccttgatttctttttcagatagtttgtttttagtgtatagaaacaccactaatttttgtatgttagttttatctcctgcagcattactgaattggtttattagttctaacaggtttttggtgaagtctttaggttttctctatataagatcatgttttctaccattggcaatctaacttctttcattttgatttggaggcccttgaattctttttcttgcctagttgctctggattaacagtgttatgttgatagcaatggtgagagtgggcattattgtcttgctcctgatcttaggg

SEQ ID NO: 250647 - DNA, 619 bp, Homo sapiens
aggaaaggtaatcctgttgacactagtggtctctaaagtactttcacattcatggactccccgcagtgggaggaagataccaccagaactgggacagaggagcatgctggagtccccacagccaccagcactcaggctgcgttctcagggcaggaacaccaggaccatcttcccttgttatcataagcccctggctggctgggacaagcctttgtttttcctcctgattgattgattggcattttacacttgtgtgtaactgggaaccatcgggctctaggtcacaaaacagggactgagttaaacccccacgagtaacaccctcatccatggaaatcacagaccaagcccttagcacctgcatcgtgtgcccagccagtgccaggctcaaggagatgcccaacaaatggtgctgaaataggtaagtgacccacaggggaaggagacttagatctgcgtagagatgctgaaatgctgacactattaagaaaagtttggagaaatagtggtttatcttaaacttatttgtatatatttagaaattcaacatggggactaccagaaaaatctgggataaataacatttccctttttttcctaattaaaaagtcttcagaaa

SEQ ID NO: 250648 - DNA, 297 bp, Homo sapiens
aaaccaggcaagtttttaataaatatgatcttatcattttgttaattataacaaaataagcaatgtagagagaactgggctgaataagaacaaggcagaaaatactcaagcatggattatattagtaggcagtagtcaaatacacattttccttcatccctgctctcctaagataacccagaaaggagtggtcatatactttggaggatagccatatagatacttatcagtggcctgtgattctttcctccagccccattcttcctagatgattggaaaaacacttaagggagcatt

SEQ ID NO: 250649 - DNA, 597 bp, Homo sapiens
atccagtctctcaagattctactgtttcccaagaggagaactcaaaagaggataaaatggtcactgtttgtcccaatactgagtcctgtgaatctataacattgaaggatgtagctgtgaacttttcaagaggagagtggaagaagctggagccttttcaaaaggagctatataaggaagtgctactggaaaacctcaggaacctagaatttctggactttccagtttcaaaattagagttgatttcccagctaaagtgggttgaattgccatggctgctggaagaagtctcaaaaagctcccgactagacatacatggagcagtaaaaaagatgcagatgttctctgaggctgaataagaccatgctctgccttcttgtttcaactgttacacagagatgaccagaggatggggccactgcagtgcagttcaagaggctctggttcggggaagagctggatggagtatgaatcccaactctgggggtattagctagtggagtggccataggcaagttacttaacacttctgaacctccttttgtctttcataaaataaaagctactaggatgagttgttttaaggatttcagatta

SEQ ID NO: 250650 - DNA, 399 bp, Homo sapiens
gtcttacagggtgatacaaccttttgtaattcttaaggagacttgaatttttgaggcaaatgttgagtctatacgtggacatttgttgtgtaagagtggaagtggaagtcaaaattctgaacaaggttgctcccaataagatctgtcagctcacaagattgcttccctaggcttgaaatgtttcaagcacaaattcaattcataaggaaaatgagaatcatgaaaatgattatgaaatagcaagcagtctggaaagaggatgtagacgaatgccaaagcttctggaatttatgaaatatttccatttatggggccaggtgaaataagttgttctttcagaaatgtgtgacatggctattatatattatccccctaaaactatttgatcataaaacaaaa

SEQ ID NO: 250651 - DNA, 715 bp, Homo sapiens
gaatgacagaaactcaaagacatatgtgactatgaagacagcacaacctatgaatgacatgctaaggacaaaaaacaaaaataatggaaactgagagtggcactaaagccccgagttttggttacactgtgacctatgtaagaacttaaccaaacggggaattttttaaagaaaactattggaggccataattctggactgagcttatgcactaggtccaaacaaaccaaaccaaaatgagtcactcatgctggatgtgacataattaaactaaaaatttaaggcaacaggtagattctaaaactggccaggttttgtttttcttctctaaatagcagatttcaacacaaggaggtcccctgtactctaacactttaaaaaacaaataaaaataatttcaaaataataagctgaagtttttatttccactttacaaacccacagttctgctgtttcacagtgagattcgagtctaaataagtacatttttgatggtgacaaagtgatattaatgtctaaagttttggtctcaaacttgagaagatgacaaaagggagaaattgttaaattagttgtagcctaaagcttccctcttatgtttaattttggctaataggatttgttttttgttttttgtttttttacatagtaaacttaatgttcaaatgggacatatcttaagctgtaataaatctggctgtttctgtacctcact

SEQ ID NO: 250652 - DNA, 452 bp, Homo sapiens
agcggcgggtgagacgctgcgacgggaggcgctcggcgcgctggtacccgggaggggagggtccagggcaggccggaggcgtaggggtcctcgtccctgcgcccggggctggcagctccccaagctgtgggcgtcccgcaccccgagcccttcctggagctcccgcatccgaggctccgaggccggaggacctcggagctccttcctactcccaggggcgatgccccgggctgggggccgggcctgcccgcggcgctcccggcggggccctccattagcgtgggctttaacgggggtagtaaatggggtcggcatttgcggttctcgctgacagctttgctcctagttcatttttgttgggaggccgagtccttaagagacccgaggcgcccacagcccatacttaaagtctcgctgtgttcagagaactgacgcctcccggaattgaactg

SEQ ID NO: 250653 - DNA, 753 bp, Homo sapiens
atctatttatggggtacagtttgatgtttcaatacatgtgtatgttgtatagtctaatctgggtagttatttccgtcacctcatgtgtttatcatttcttcattcgaaaacttctaactattttgtaatatataatacctcattgggaagattgcttgagcctaggaggtcaaggctggaagctatgattgcaccagtctactccagcctgggctacagagagagaccccatctcgaaaacaaaacagaaaacaaaagacatttaacctggcccagtaggataagacaagaatgatgttgtttaatgactgatttccatttaacaagttgtactccttaatatagatgtttggtgtatttggtaaggggatatcagtttcagaaacatttacctcaaagtggagagaagccgactaggagctgctctggtttaatagcaggtattctactcccaacccctccaggagattcttgccccacccccttctgtcttcagctaggattcccattttcctatgaagacaggacagttttgttgttttaaaggaagaagctgctacttcctaatcaggatctcaggctggggaagaacagtgtgggaccacgttagcatccgcagatttccagcaaggctgtcctgcgtggacgctactccatggaccggcttcaaaccacacactgccctgtgcgcacctggggctctctcaccctctagctagtagttaattagggcagagccctatttacagtcac

SEQ ID NO: 250654 - DNA, 807 bp, Homo sapiens
atctatttatggggtacagtttgatgtttcaatacatgtgtatgttgtatagtctaatctgggtagttatttccgtcacctcatgtgtttatcatttcttcattcgaaaacttctaactattttgtaatatataatacctcattgggaagattgcttgagcctaggaggtcaaggctggaagctatgattgcaccagtctactccagcctgggctacagagagagaccccatctcgaaaacaaaacagaaaacaaaagacatttaacctggcccagtaggataagacaagaatgatgttgtttaatgactgatttccatttaacaagttgtactccttaatatagatgtttggtgtatttggtaaggggatatcagtttcagaaacatttacaaaagtgagtattctgggagatcttattacctggtaaccttagcatgctttgatctcaaagtggagagaagccgactaggagctgctctggtttaatagcaggtattctactcccaacccctccaggagattcttgccccacccccttctgtcttcagctaggattcccattttcctatgaagacaggacagttttgttgttttaaaggaagaagctgctacttcctaatcaggatctcaggctggggaagaacagtgtgggaccacgttagcatccgcagatttccagcaaggctgtcctgcgtggacgctactccatggaccggcttcaaaccacacactgccctgtgcgcacctggggctctctcaccctctagctagtagttaattagggcagagccctatttacagtcac

SEQ ID NO: 250655 - DNA, 336 bp, Homo sapiens
cgtcttcctggacgatctcgtcattttttttgttagagggggctcctcttatgtgttttatgaaaatagcccacctttatcctgaagccaaatctctcacctcaacttgttctcttctgtctcaccttacatatccaatgggtcaacaagttctaatagttcttcctccaaaacgtctttctatcaacagctttcaaggaagaaagagaaaaagagagagaaagagagaaagaaggaaagatggaaggaaggaaagaaagaaagaggaaagaaagagagagaaagaaagaaaagaaagaaaaaaaagaaaaaaggaaagaaagaaagaaagagaga

SEQ ID NO: 250656 - DNA, 255 bp, Homo sapiens
tttcaagtatgagcaagatgcaaagaaatgatgtgacaactatgaatacaccacaaatacaacacaaaacatgcaaaagaaactagttcataataaaacaagaaaacatcaaccaacgtgctatgatttgaatgcttgtcctctccaaaactcatgttaaaatttaactgccagctgggcgtggtggcttcgcttcacacctgtaatcccagcacattgcactccagcctgggtgacagagtgagactccttctc

SEQ ID NO: 250657 - DNA, 301 bp, Homo sapiens
tgcaggcagcaggattgctgagcctgagagcccccacccctctgaaccctcaaagaaagatgcaggtctgttcgttgcctggtctcccaggcttactgagcctgcgctggggtcacccctctaccagcagccctggggccacactggggccaatacaggcactcagggcccagaggctgccaggaagctctgtcaccaacatcttcccgaggcaggccggccccaaatgagtaaggacagggctcagcttttttctcccctgtgctaagcaagggaggttcacttccctagtgagaacaat

SEQ ID NO: 250658 - DNA, 429 bp, Homo sapiens
tagaagatgagtaataacatggaagttaagattttattttcctaacagaaatcatcaaggaagttctgaggttgaagagatattcttaagagacaaatatatctccatgaaaaaaaataagactttgaggcccatttcctcttcctgtctctgctgcaaaccttgatgattaaaatatttaggaagtaaaagatttcacgactgtgagacttcttgatgacctatgaaatcaagacgtccgagagctaaataaaatttaaaaatcatgtcttgcatcacctgaagggtgtcctccccaccctttaaccctcaatcagatcttgaatgctagctagagttttaaaaattggtggatggagctgtgtgttgtttcatcatttgcaccccaactgtatatccatctgatgaagcttggaaaatatacttgtt

SEQ ID NO: 250659 - DNA, 322 bp, Homo sapiens
gacttcatccttctcaccaaaactttcttgcccttcctcctgttttcctcctttatattaacagcatccgtatcttccagccacccacagtggagactttggggtctcttccagggactctttttcactccctacttctaaatgatcaccaggacttgccaattctaacttgaatgtcattcaagtctgtcacttcttcccagtttccagtgctaccacccttgtttgggctctcatctgtgctcaatttaatgcctagcagtctcctcctgactggttttcctgactgaatctttccttctttaaaccacccacccaaccc

SEQ ID NO: 250660 - DNA, 740 bp, Homo sapiens
ccatgttggtcaggctggtctcgaactcctgacctcgtgatccgcctgcctcggcctcccaaagtgctgggattataggcgtgagccaccacgcctgacctaatttttgtatttttagcagagatggggtttcaccatgttggccaggctggttttggacttctgacctcaaatgatctgcctgcctcggcctcccaaagtgctgggatgacaggcgtgagccaccacacccagcctgagactttttattggtctataatatatatggcctgaaatatacactacaatgaggagaaaattttaagtcatcatttatgaaaccaagtatttaggttctggataacattgtctctaatctcatacaagattttaaaaagtaaataagtggtaaaaacctcatgaatcttatctaaaattatatgtacacttccctctctactttctaacttggctaaacaatagaagaaaacttgaaatgtacagcgctcaataaaggaaaggcagtttagagggaatggcattgactattaagagcaaagaatatgataatttagttcaaagtcagttcattcagtgaaataaccaatcttttaatacaactgcattaattttctacttaagaagaatttgaacgctcttaatgtaatgaaacatcttggtcttattaagtgcaatactgctaagacttggaaaaaattggtttcctcctccccattccctggcttaatagaaaaaaaaaa

SEQ ID NO: 250661 - DNA, 794 bp, Homo sapiens
ccatgttggtcaggctggtctcgaactcctgacctcgtgatccgcctgcctcggcctcccaaagtgctgggattataggcgtgagccaccacgcctgacctaatttttgtatttttagcagagatggggtttcaccatgttggccaggctggttttggacttctgacctcaaatgatctgcctgcctcggcctcccaaagtgctgggatgacaggcgtgagccaccacacccagcctgagactttttattggtctataatatatatggcctgaaatatacactacaatgaggagaaaattttaagtcatcatttatgaaaccaagtatttaggttctggataacattgtctctaatctcatacaagattttaaaaagtaaataagtggtaaaaacctcatgaatcttatctaaaattatatgtacacttccctctctactttctaacttggctaaacaatagaagaaaacttgaaatgtacagcgctcaataaaggaaaggcagtttagagggaatggcattgactattaagagcaaagaatatgataatttagttcaaagtcagttcattcagtgaaaatatcaactggttttccttatcacatcaacttggtagctctctgaatttacaaataaccaatcttttaatacaactgcattaattttctacttaagaagaatttgaacgctcttaatgtaatgaaacatcttggtcttattaagtgcaatactgctaagacttggaaaaaattggtttcctcctccccattccctggcttaatagaaaaaaaaaa

SEQ ID NO: 250662 - DNA, 483 bp, Homo sapiens
gaacttaaaaagcaaaaaacaagttaaaaaatgggcaaaggaaatgaacagacacttctcaaaagaaggcatacatgtggtcaacaaacatttgaaaaaatgctcaacatcactgatcatcagagaaatgcaaatcaaaactttaatgagataccatctcacacaagtcagaatagctattattaaaatgacaaaaaacaacagatgctggtgaagctatgaagaaaaggaatgcttatacactgctggtggaaatgtaaatcagttcaaccactgtgatttctcaaggaactaaaacagaactaccatttgactcagcaattccattctcaaggaattaaaacagaactaccatttgactcagcagttccattattagatatatatccaaaggtaaataaatcactgtataagacacatgcactcgtatgttcattgcagcactattcacaatagcaaagacatggaatcgattaggtgtcc

SEQ ID NO: 250663 - DNA, 913 bp, Homo sapiens
tgcaccttgttgggtcacgtggcttaacttaaaaaaattttaatcactgtggtgcatatgtagtgattattaatgattatctcataattttattttcttgatgattaatgatgttgagtgtattccatttgtattttagtttgcaaatgttcaaattcttcacccgtttttaatgaagacataagacttatttttgtgttctgaacataagttctttgtcacataaaatgtgctatgaatgttgagttttaaatactccaaatgaatggctagagaattactatttgtagaaatatttatatgtcaaagggatgctaacaatttactttattgctctaaaatagaaaagttgccagaatgctgtggagttttagtggaaaacatgatagctggtgttactgagtaaatttgagtgttaaatgtcaatgtaagctaacggccaagatagggaccactgcagggtggttacttgcagctatgactcaactggtccttcactgccaaacatacctggggttggatcattggcctgacgtttgcaaattgaggaaccttagggcaaatcagtgaacttctgaactgccttcgtcttcagttatatggggatttccccacttttgagatacttgtaaggattatatgagatgaagagatgagacaaggtatataaaagtcctagcacagagcgtgtcatataatatggcttcacaagtaccctcatctcctttccagtcgtttttttttttttttttgagaccatctcactctgttgcccaggctggagtgcctcttcatttttatttctttattcagcaagtattgatcaaatgtgctttgtaccaggtactgagctctacgttgggatataatggtgatcaaggagattgtagattctggcagggaaaactgacat

SEQ ID NO: 250664 - DNA, 815 bp, Homo sapiens
ggccagcactttgagtaacatgggtttaaagcagtctgttattagaaaaattaaattcgattacattaaatgaatttaccaaacactagttaacgcaagaaaaaattagcacctatgtctacattctattactttgggcattgaatagtaactataaatgcagaataaaaatatctatggattgaatgggaaccaactaattgaacatgaagccaaggaaatgatttctttatgagtgttggctgcagaagattaaagtacttttgcagacggaatcgctcttttcttaaattactcttgaaattcctcagaggagaaaaatactaacaataatttttggtcatgtctatccttttgctcaacattttaaaggaagtggtcttaaatctcccacatatctacatcacaataacaacctctattcacaaaccgattcctattaaatacatttccatttacattacagagaattatgagactccttatttctagctgaacatcatttgttattttcaactcgacattttgaattatagaagcacctaacataagtactttttcagcatatattctaaccatggactagtttgcaattttctaagagctttcaacaaatgttactcttcgactaatttaaaagtatggatgttaaaaagcattcaaaaagtccatacaagcctagtttgtaaataactatggaattgatttcccaaagaaaatacaaacttttccccataagaattcatactttaagaaaaacttacttccatttaaatttactgtatgaagtttggctcatgaaggctttttcctaa

SEQ ID NO: 250665 - DNA, 564 bp, Homo sapiens
caatagagaattctctattgttgagtgtctgtgagtcccagtttttgctattgtaaattatgctaaacaaaaatctgtgtgcataaatctctgagtttaagattatttcgttaagatagacttctataacaagaattactaggttcatataatacttctaatgcttttgaaatatattgtcgtattgattttagcagttttcagtccaagcagcaatagatgaagagagctgttctctcctaatgcctctagtcatagtgactgataccacagccaaaacaaaaaaaaaaaacaacaacaaaaaaaacaaatcttttctaatttgataggctaaagaaaagatcttgttgttttatttgtattttgggagggctactgccattgaacagcttttccagatgttcattagccattttctcttttgtgaactatctattactgtcctttgcctgtttttctattgaggccttaatttttttaactgtatttatataaaccccacgtatcagccctttgttgtaattgtggcagttttttcccattttactttttgcattttaatgt

SEQ ID NO: 250666 - DNA, 701 bp, Homo sapiens
agatattattacttctgtaacatcttcaaagaaacaaaatgttatttatttcttctcttagagaccctacacttgtagaatatatactgggcaaaaaaagcaataagacaacgagagtctcactgctgaaagagagagaaaaaaatagccaaagattacatatgaaagagacagagggaaatacaggaagaatacataggtattaaaagtttatacatccatatatctaatagatattcatagatatagataaggtcataatgtgattaattttttactaaaatatgtgaatgtgtccatctattttatatagctccattctggaatgcaaatattgttttaatttttactcaatactgaggcataaaatgctataaaatttttacaaagttgttttgaagttttaaaaagtatcaatagcactattcaaatgtttaatgtgcattaaatagtacttctatgcaatcattttgtatttctagtagatttaacatgtagtatgcttagagttatgattcttccagacatactattttcttgaagcaattcctttggttttaaaacattgttttccaataataaaaatggaaaactttttttttgtttcctataatttacaatttccaatctggcatttaaatagggatacacaattcaaaatatgttctcattacatggtttaggtttcaagtataagccgt

SEQ ID NO: 250667 - DNA, 391 bp, Homo sapiens
ctgcgccagaggcaggatctgacagcttttcctgaactcatgtggtcctaatcagctcaagaagaaaagccaccttggtgccagtttgaaaggatttttagtgtgtaataaattagagaacttgaaaaacacagaaaaaacttttttgattctcttcaatccagtggctgttgttttttattttcaagttttaggtttaagcagtgagaaaggagagaatatttgaataagtttatttcataaaattccttttgcgggaataacaaaaataagcaccacgtgagttacttgatatgaaagtccttaaaaagagttaattgtcccttgaaaagagatagatactcatcacacaatgagcttaggagtaaagtcataaccatgtctacaaact

SEQ ID NO: 250668 - DNA, 455 bp, Homo sapiens
gcagtaaaaaaaagtaaacagaagaacgaatgtgacaatagacaagggggagacaagtatctctctcattgtgaaaacttttacaggcataacttgttccactttggaaggccagcgatgtctgtgtttaaagtttactttactgtttgtcttgagtgggatcagtgttgtagtgaataatttatagccagcatgaatgagctcattagtcaccttttcagactttaaatgagttttgtggttgtcattactcgagccttctgttcagccgcggagcaaaatgacagtttggcagttgttgctggggccgcctgttccccttcaggtctgtgttggcttttgtatttcgttgaatccttccctggctaacccttcgctggtccaggcagcaactctcccacttcacatgccttttgcaccccaagtttaaatgagaagtttttcaggcttcaaaa

SEQ ID NO: 250669 - DNA, 856 bp, Homo sapiens
atcagcagataggacaacaaacacacagtttttatccattagaaattggcccatttgaagcaaggggctagaaaatgtatacattttaatggcccccacaggcattctgtgaaattagcctttgaatatgaccttttagctacctaataaaatgtaaagatgaaatcaagtattattcatgccaggcttattaaatttgctgttcacgttactgttagaggatttgtaacaaaataaaataaaaccattacctattgtgaggtggttttgatgaatgtacaagcacaattccatcttcaatgttttgctttcccaggtttcaaggaaaggcattttcaaacccgaaacatttcagattctcagttctgcagcacaaatttatcctactaaagggctgtgaccttcatttcctatagtcagtcttgcatgatagttgaaattgaattcccattttcctcttctttatcagctttcactttttagcatattcttttaaactgtagcatgtgaatctctttagcaacatattatgaaattatggggctgcagtgaaagcctctatttgcatatcttctttccccgttgtattagaatacttgcgggtttataatctgaactgataatgatctttaattgtaggcattgttttaagacaaaacagactataatctatatggtggtttcccacaccaggtttctagaatgtgccttggggctgctatagagacacagtcttacagactggggtctcagcccggtaccttttctcccaccagagcaagtctgcatttgttgattttatataatggagatctatattcactattctgtgaaaaaagagtccctcttattacca

SEQ ID NO: 250670 - DNA, 472 bp, Homo sapiens
tgtttttttctcttttgagacagaatcttgctctgttgcccaggccagagtgtggtggcatgatcatgtctcactcactgcagcttaacctccctggctctagcaacccccccacctcagccgcccacgtagctgggcctacaagtgcatgccaccacacctggctaattttttatttgcttgtaaagataggttttccctatgttgcccaggctggtctcgaattcctgggctgaagccctcctcctaccttgacctcccaaagtgctagaattacaggcatgagtcactgtacctgaccctgggggcattcttttacatgcagctgaaactgtcctagctgagaaggctttccaccatgcacagtctttcattgcccaataatgaactgcattcagcataccccaatgcagccatcacccctagttctcttactttgtttctgctttgaatccccttcttgaaatttctc

SEQ ID NO: 250671 - DNA, 2923 bp, Homo sapiens
agctaagagggtcagggctagagccgtgagtgtcagcctgggatgggctacataaggcccagctctggcaccagagcttcattctttgttgcacagcaaactgcagaggtcactccaggctgtggctccacatcccgaggaacaaaagcgggcctgctcagctgtctgcaaggacggccgttccagaccaagtggcctgctgctccgaggacccagctcgctccaggctgtgactccacatcccgaggtcgctgcctggcgaccgggcagcgaggaccggccaccccagacttcctgtcccgcagccccaaagacagagctgcgaccgctgggacagcgacgcctgcacagctctggtgagatggcggcagggtccactacgctgcacgcagtggagaagctgcaggtgcgtctggccactaagacggagccgaaaaagctagagaaatatttgcagaaactctccgccttgcccatgaccgcagacatcctggcggagactggaatcagaaagacggtgaagctcctgcggaagcaccagcacgtgggcgactttgccagagacttagcggcccggtggaagaagctggtgctcgtggaccgaaacacccggcctggcccacaggaccctgaggagagcgcttcccgacagcgcttcggggaggctcttcaggaccaggaaaaggcctggggcttcccagaaaacgcgacggcccccaggagcccatctcacagccctgagcacagacggacagcacgcagaacacctccggggcaacagagacctcacccgaggtctcacagtcgcgagcccagagctgagagaaagtgccccagaatagccccagctgattccggccgctatcgggcctctccaacgcgcacagctcccctcccgatgcccgagggccctgagcccgctgcgcccgggaagcaacccggaagaggccacactcacgcggctcagggcgggcctctgctgtgtccaggctgccagggccaaccccaggggaaagccgttgtgagccacagcaaggggcacaaatcgtctcgccaggaaaaacgcctcttgtgtgcccagggagattggcactcccctactttgatcagggagaaatcattcggggcctgcttaagagaggaaaccccaaggatgccctcctgggcaagtgccagggacaggcagccttcggacttcaagacagacaaggaaggggggcaagctggcagcggccagcgtgtccctgccttggaggaggctccagacagtcaccagaagaggcctcagcacagtcactcgaacaagaagaggcccagtctagacggccgggacccaggaaatgggacacacggcctgtcgcccgaggagaaagagcagctttccaacgaccgagagactcaagaggggaagccaccgactgctcatttggacagaacgtccgtgagctccctctctgaggtggaggaggtagatatggctgaggaattcgagcagcccactctgtcatgtgaaaaatacctcacctacgatcagttgcggaagcaaaagaaaaagactggaaaatcttccaccactgcacttggagataaacaaaggaaagcaaacgaatccaagggcactcgtgagtcctgggattcggctaagaaattgcctcctgtccaggaaagccagtcagagaggctgcaggcggccggcactgattccgccgggccgaaaacggtgcccagccatgtcttctcagagctctgggacctctcagaggcctggatgcaggccaactacgatccgctttcggattctgactccatgacctcccaggcaaagccagaagcactctcttcaccaaagttccgggaggaagctgctttccctggacgcagagtgaatgctaagatgccggtgtactcgggctccaggcctgcctgccagctccaggtgccgacgctgcgccagcagtgtgcccaggtgcttagaaacaatccggacgccctcagcgacgtgggagaggtcccctactgggttcttgaacctgttctggaagggtggaggcccgatcagctgtatcgcagaaagaaagacaatcacgcactcgttagagagacagacgaattacggaggaatcattgtttccaggacttcaaggaagaaaagccacaggaaaacaaaacttggagggagcagtacctgcggcttccggacgccccagagcagcggctgagagtaatgacaacgaatatccgatctgcacgtggaaacaaccccaacggcagagaggcaaagatgatctgtttcaaatctgtggccaagacgccttatgatacttcaaggaggcaagagaagtctgcaggagacgctgaccccgaaaatggggagatcaagccagcctccaagcccgcgggaagcagccacactccctccagccagagcagcagcggcggtggcagagacagcagcagcagcatccttcgctggctccctgagaagcgggccaacccctgcctgagcagcagcaatgagcacgcggcgcccgcggccaaaacccggaaacaggctgccaagaaagtggccccgctgatggccaaggcaattcgagactacaagagaagattctcccgacgataaactcaggacttgccttgcagataaaatctggggggatttttgcattggcaaagtcaatgcgggttggggaacgaaacttccaatggacaccagaacctttaacttggtgcaaagttgagcctttgaattctgcaggtgtcatgtgctggccctgtgattttgcctcccacacccagccactacctcccagcttggagaacacctcagaattcagaagatatgaacgcattgggaacaattctattttggatgttcactgataatttttaaaaacaccctagttgtaattataaataagga

SEQ ID NO: 250672 - DNA, 186 bp, Homo sapiens
aaagtatggccagtggccaggactggcctgctgcctgtttttgtttaacccgtgagctaagaatagtttttacctattttaagtagttgaaaaaaaaatcaagagaagaatactatttcgtgatatgtgaaaaatcacatgaaattcaaatgtaagtgtccataaataaagtcttactggaagaca

SEQ ID NO: 250673 - DNA, 911 bp, Homo sapiens
agaccccaggaagcaacccagggactcgaacacacgaacagcactcctccgcgcactgcgcaggcacgcctgcgtccggctcaccctgaaacatcgcgagatccggcttcaaggccgggctgctgcctttacgcctaaagactatgtttcccggaagacactgcggcgccggccctatcatggcgcagcatcggtgtgctttgtgcgtctgcgccatcttccggctgcgcacggcgaatccaccggtaccgtggtggaagcgcgccctgggctgccgggggcgcggccgcggtggcacttggacccgaggaggcggcagctctaccgtcgcaggactctgcccttccccaagagaggaaccagaaggaggacctatcagcccttgaaattctaaaagtcatgtcccttgggtcagaattgttcagggatgtggccatagtcttctcccaagaagaatggcagtggttggcacctgctcagagggatttgtacagagacgtgatgttggagacctacagcaacctggtctcactgggtcttgccgtttccaaacctgatgtgatctccttcctagagcaaggcaaagagccctggatggtggagagagtggtgtctggaggcctgtgtccaggagctaaagggcagaggggcagagatgctggctgtgcttgctgtaaaagaacagaacagaaccccggtcaattatggaaaatgactgagtctggcctgtttttcatgcactaaacatgtgggaatcccactgttttttccagattatactgtgtatgtagacagtggagagggctaacctcattaagggtgcaagaggggctggttttacagggggcctctactacgaaggcctaatggttttgaaaatgaactcaaataaaagattattaccaaaaaga

SEQ ID NO: 250674 - DNA, 1133 bp, Homo sapiens
agaccccaggaagcaacccagggactcgaacacacgaacagcactcctccgcgcactgcgcaggcacgcctgcgtccggctcaccctgaaacatcgcgagatccggcttcaaggccgggctgctgcctttacgcctaaagactatgtttcccggaagacactgcggcgccggccctatcatggcgcagcatcggtgtgctttgtgcgtctgcgccatcttccggctgcgcacggcgaatccaccggtaccgtggtggaagcgcgccctgggctgccgggggcgcggccgcggtggcacttggacccgaggaggcggcaggtgagaggttccggagctttccaggcgctctggggtccagcaggagctggtgcccgggccggttgggtctcaggcctgagaagaacgcagacgtctcgcctcatcgtcgctctgtggctttaccggcgtgagactacatttcccgccggccctcgcggcgtgcgctttctggcgccccctttctgcttccagcctcatagcccaggtgcatggaccccttagctctaccgtcgcaggactctgcccttccccaagagaggaaccagaaggaggacctatcagcccttgaaattctaaaagtcatgtcccttgggtcagaattgttcagggatgtggccatagtcttctcccaagaagaatggcagtggttggcacctgctcagagggatttgtacagagacgtgatgttggagacctacagcaacctggtctcactgggtcttgccgtttccaaacctgatgtgatctccttcctagagcaaggcaaagagccctggatggtggagagagtggtgtctggaggcctgtgtccaggagctaaagggcagaggggcagagatgctggctgtgcttgctgtaaaagaacagaacagaaccccggtcaattatggaaaatgactgagtctggcctgtttttcatgcactaaacatgtgggaatcccactgttttttccagattatactgtgtatgtagacagtggagagggctaacctcattaagggtgcaagaggggctggttttacagggggcctctactacgaaggcctaatggttttgaaaatgaactcaaataaaagattattaccaaaaaga

SEQ ID NO: 250675 - DNA, 943 bp, Homo sapiens
agaccccaggaagcaacccagggactcgaacacacgaacagcactcctccgcgcactgcgcaggcacgcctgcgtccggctcaccctgaaacatcgcgagatccggcttcaaggccgggctgctgcctttacgcctaaagactatgtttcccggaagacactgcggcgccggccctatcatggcgcagcatcggtgtgctttgtgcgtctgcgccatcttccggctgcgcacggcgaatccaccggtaccgtggtggaagcgcgccctgggctgccgggggcgcggccgcggtggcacttggacccgaggaggcggcagctctaccgtcgcaggactctgcccttccccaagagaggaaccagaaggaggacctatcagcccttgaaattctaaaagtcatgtcccttgggtcagaattgttcagggatgtggccatagtcttctcccaagaagaatggcagtggttggcacctgctcagagggatttgtacagagacgtgatgttggagacctacagcaacctggtctcactgggtcttgccgtttccaaacctgatgtgatctccttcctagagcaaggcaaagagccctggatggtggagagagtggtgtctggaggcctgtgtccagtattggagtccagatatgataccaaggaattatttccaaagcagcatgtttatgaagtcgaatcaccccaatgggagataatggaaagccttacaagttatggtcttgagtgttcaagtttccaagatgattgggaatgcagaaaccagtttgacagacaacagggaaatccagacagacatttccatcagatgatcatcagacatgaagaaatgcccacttttgaccagcatgcatcccttactttttatcagaaaattcatactagagaaaaaccttttgggtataataaatgtagaaaagacttctggc

SEQ ID NO: 250676 - DNA, 1165 bp, Homo sapiens
agaccccaggaagcaacccagggactcgaacacacgaacagcactcctccgcgcactgcgcaggcacgcctgcgtccggctcaccctgaaacatcgcgagatccggcttcaaggccgggctgctgcctttacgcctaaagactatgtttcccggaagacactgcggcgccggccctatcatggcgcagcatcggtgtgctttgtgcgtctgcgccatcttccggctgcgcacggcgaatccaccggtaccgtggtggaagcgcgccctgggctgccgggggcgcggccgcggtggcacttggacccgaggaggcggcaggtgagaggttccggagctttccaggcgctctggggtccagcaggagctggtgcccgggccggttgggtctcaggcctgagaagaacgcagacgtctcgcctcatcgtcgctctgtggctttaccggcgtgagactacatttcccgccggccctcgcggcgtgcgctttctggcgccccctttctgcttccagcctcatagcccaggtgcatggaccccttagctctaccgtcgcaggactctgcccttccccaagagaggaaccagaaggaggacctatcagcccttgaaattctaaaagtcatgtcccttgggtcagaattgttcagggatgtggccatagtcttctcccaagaagaatggcagtggttggcacctgctcagagggatttgtacagagacgtgatgttggagacctacagcaacctggtctcactgggtcttgccgtttccaaacctgatgtgatctccttcctagagcaaggcaaagagccctggatggtggagagagtggtgtctggaggcctgtgtccagtattggagtccagatatgataccaaggaattatttccaaagcagcatgtttatgaagtcgaatcaccccaatgggagataatggaaagccttacaagttatggtcttgagtgttcaagtttccaagatgattgggaatgcagaaaccagtttgacagacaacagggaaatccagacagacatttccatcagatgatcatcagacatgaagaaatgcccacttttgaccagcatgcatcccttactttttatcagaaaattcatactagagaaaaaccttttgggtataataaatgtagaaaagacttctggc

SEQ ID NO: 250677 - DNA, 1090 bp, Homo sapiens
ctccagtttgagagaggaacaacagaacagtgtcgtgctagaagacttgttggaaaacatggaggcagacacctttgcaaccctgtgcagccaggagctgagactggcatcgtacctggcgaggatggccatggtgcccggggccacgcttcgccggctcctgagtgtggtactgcccacagcctcacagcctcagctgctggccctgctggattcggccaccgagagacatgtggaccacgcagctgagagcgatggcggagcggagcaggccgacgtgggcaggcggaggaaacaccagagctggtggcaagccttagatggcaaactgcgaggagatctgataagcagaggattagaaaagatgctgtgggcccgcaagagaaagcagagcatattaaagaagacatgtctccctctcagagagaggatgatattctctggaaaaggaagttggccacacctgtcactggagcccattggcgaactggcccctgtacccattgtaggggcagaaaccattgatctattaaacacaggagagaagctctttatattcagaaatccaaaggagccagagatctcactgcacgttcctcccaggaaaaagaagaactttttgaatgccaaaaaggccatgagggccttgggcatggactagcccaagggaaagacctgcgggagcatctgaagagagaagggatgattttctcctgcccgccggtgtttgtgtgtttataatgcacaactcgcaaatataaattgcacatgcagaaggcacagaccccgtagcgcatgccaacttgcagggactcggtttaatcttgtctcatgaatttccagatggcccactctcttccatatcacaaggacataaacactccttctttcagccccacctccccagggccctggaggagacccccaccctgcaatccacaccccatcctctgctgcagaagctatggtctgtgtggtgacagccagattctctactcttatgttttgtatttgttacatattctatttttataaagggaatttaaaaaaataaatgtgttttgcacaaagctgtttattacaaaaccca

SEQ ID NO: 250678 - DNA, 469 bp, Homo sapiens
cagagttagtgcgagaaaagcagatccataaggtctgttcaatttatatttctaggaggatgagctgggtttggattccttctaacatgtaacttggatatattgttctataaaactttactgaaattgggggaagtctttccaaattaggtaaagtgttttagagggcttagtgcttaaatttcatgaattggtctcagtgctgatctgtgctttagtggcatatgataactacttcaggcattttctatggccagaattgatgttgtatgtgcttctgtgatttgtagtgttatgtcatatcactggattacaggtaattcatttcccattgaaatatgtagccatgaccaaccacagtggctcatgcgtgtaatgccagctctttggaaggccgaagcgagcagattgcttgagctcaggagtatgaaaccaacctggccaacatggtgaaaccctatctctacta

SEQ ID NO: 250679 - DNA, 806 bp, Homo sapiens
agtctgggccggggcgctggaagtcttactcacttctcaagaacccgcaagggatcaggcctgaccctttgcaagtgacagaatccaaagctttgagctcatgggaaagtggctggaaagaaggtcactgtagggccgcacaggtctctggcgaggctacccaagaacatttaaatccctgcccagagaagaagaggctccagctgtcctgcaccttcctgggaactggcagtccctccgcgcaggggttctgcagcgaccggcagcgcgaggagacaaggatggtggccagttaacagaaaatcaaggcagcgggaaaggtctggaaaacaccacctactatcacctctggagcctgggattatgggataagttttcgatttttaaatgtattgtcaaatagctaaagtacacggaaagtgcgaaataatagtaaattgaacacctgtgtattcaccacacagcttaagcaataacattagcaatatttgggtacccagctggtctcattccctcattccacttgtcccctactcacctgatagccagtacaattttatgaatttaaagttactaattcccatgcaactgtttatacttttagtaaatgtgtttatgtccctcatcaacacatgacactgattcaacacatgtatatgcgtttaagctgcatgtaaatggcatcatgttggccaggtgcagttactcacgactgtaattccagcactttggaaggctgagagggaagacggcttgaggcccagagtttgagaccagcctgggcaacatagcaagaccctatctct

SEQ ID NO: 250680 - DNA, 296 bp, Homo sapiens
cagggtgaaggaggtgggtgtcctacacatgcatatgaaaaaaaatatggcaaaatggcacagctggtgcaggaaaatgaaaaaggaatagcattccagttctccgtgaagcagctgaattctctatctgcagcagcattcccattatcttttccatcactaagaaaaaaaaatgggctgggcacggtggctcatgcctgtaatcccagcactttgggaggctgaggcgagaggatcgcttgagcccaggagtttgagaccaccctggccaacatagcaggacttcatctctccca

SEQ ID NO: 250681 - DNA, 352 bp, Homo sapiens
aagaaaatgtagtggttgggtcaggctaacccaaagcataaaaggacattgccacctgtgatcagaagggaggttagccacatgcttattgttttgcaatttagaaaaagagcttggaaagaagtgtgttttctgaattggctactattggtggtagttggcaagatgctgtagaggtgaattgagcggggaaaaagttaccagctagcaattagaaatcaaaaggggccaggcgcggtggctcacgcctgtaatcccagcactttgggaggctgaggtgggcggatcacaaggtcaggagatcgagaccatcctggctaacacggtgaaaccctgtctctactaaaaatac

SEQ ID NO: 250682 - DNA, 435 bp, Homo sapiens
ttgtgtgcccaaggcccatgctatatgagcttgacttctggaaggctggagactgagtaaattcaggagttaagttcagtcacccaggcaccatggacaccagcattcagacgagattacctgtttggcactactttgcacatgctggcacacaccatggtgggaagaattaagtgctgttgccatgcaattctaatggaaggggaaaactggaagcttgtgcctcgtctctcctggactttgtccagtgccttctcccattgttcattgttgcctgcatccttcgccttgagtttgagtatggcagctcttctggatcccaggagtccttccagcaaatcattgagcctgagtggtcctggagaccagtggcacacctttgttcaagataatggttcacttctcaatcaataaaaatgtacttgtagacgcatt

SEQ ID NO: 250683 - DNA, 227 bp, Homo sapiens
agtaggtttaaattcctaatggcagctgatcacagggattacattcaccccagtccctcagccttggcaagtgctggtcccaggaatccaggcttggccataccacaacagttgccatcagcctcccctacatcaagtggaggaccagcagctcagaccctcactctcacataaatgtatacaggttttactggtgaattatacctcaataaaactgcgggaaaaga

SEQ ID NO: 250684 - DNA, 401 bp, Homo sapiens
ctattacaaaggtcatctctttaattcacatccaataactgatagtctcttgactaatctacatcctctcattctctcctaattcacctttcatactgttgccaggtgacttttcctaaaagacaactttcatgatgtcactctacttcataaattcttataatggtttctttttgcttttagtccaaactcctcaggttcgttttcaaggcttttcataattgaatttcttttatatacctaagatgatttctctgtgttcccaaatgtacaattgacagtccttcctcctgatgttctctccagtaggaaatgtttgctctatgtaaattcagtatagcttttagtctctattcaagttctaccttcttcataaacttctcctgaatagaatcagccta

SEQ ID NO: 250685 - DNA, 439 bp, Homo sapiens
tgcatttctcaccccacacacaccttccatttcccagtggctacatacatcatgtgcgattatgcctgtctttcatgacctgcctctgaccagaaatccctgagtcatcttccctaaacccactccttcaaatccaccttccaaatcctggtgaatggactgctgtccctgctccagaggactgtgtgcctcaaacagggctccccacagtgggcctgtattagcagggattccccagtgcatgtttcctgccttggagaccatgaactccagggaggctggagagctgtctgctctgctttctgtcttctgcctgcccaagacagtactttatgtaggtgttaatttcctaaaaatatgtctaacatgcttgaattgctgatagctattgattaaagcccagcttctaatataaatatgcatttctgatgaatctcac

SEQ ID NO: 250686 - DNA, 386 bp, Homo sapiens
ccttaaaatgcacttatggttttgtcagggagttttaaaatataaattcaacagttctgtctagtttgaatgtttagaatgtgtttaatgtgattttctcctgctaagaatgttctttatttcgccaagtacatggcagattttccataatataaactattatatagtgaaactttgtattttcttacaggttcttgagaaatctacatgaaaaaatggatagacaatagtcctaagataataatgttcctataacattaaaaaaatcccctttaagccattgtaagatttactttattgttaacaactagttgtttcattaattattgaatacctatcttttatatggagtataagaaattataaattgttactttaaaaactta

SEQ ID NO: 250687 - DNA, 484 bp, Homo sapiens
caaaacagataaacaaggatgagggctgagtttacctgtgggatagctgaatggttggtgattccattagccaagaaagacaacaatcccagcagtttggggggtgggattagttcactttggacttgtcaggtttgtggtacctactggacatttagagagcattgctctgtagttaatttttctttctttctttctttctttctttctttctttctttcttctttctttctttctttctttctttccttctttctttctttctttctttctttccttccttccttccttccttccttcctttctttccttccttccttccttccttcctttctttccttctttctttctttacttctttctttctttttttgtagggaggacagaatcttgctttgtcacccaggctgcagtgcaatggtgcaatctcaactcagtgcaacttccacctcccagggttcaagtgattctcctgcctcagctt

SEQ ID NO: 250688 - DNA, 408 bp, Homo sapiens
tacttttttctagcaagcttgttgaatatccataatctacaggccactggggaaagaggctagggattctgttattaattaaatgttacatttaattatagctcatcctaggagtgagttttctcttttctgaaagtaagtgactcattcttacacatggtgaaataaagctatttagcatatgttacaggcataagtggcccaaagagcaagatcgtatttgttttgagagctccttttagcatcactttaacaaatttgaatatttatattcttttttcttttctttaccttttttttttttttttttttttaaaagacggagtctcgctcttgtcgcccagcctggagtgagctgagatcacaccactgcactccagcctgggtgacagagcaaaactcagtccc

SEQ ID NO: 250689 - DNA, 598 bp, Homo sapiens
aagccacgaggagactcctcttgctcgtcatgtctggccgcggcaaaggcgggaagggtcttggcaaaggcggcgctaagcgccaccgtaaagtactgcgcgacaatatccagggcatcaccaagccggccatccggcgccttgctcgccgcggcggcgtgaagcgcatctccggcctcatctacgaggagactcgcggggtgctgaaggtgttcctggagaacgtgatccgggacgccgtgacctatacagagcacgccaagcgcaagacggtcaccgccatggatgtggtctacgcgctcaagcgccagggccgcaccctctacggtttcggtggttgagcgtccttttctaccaataaaaggcccttttcagggccaccctaaaaaaaaaaaaaaaaaaaaaaaaaaaaaaaaaaaaaaaaaaaaaacaggcgcagcaagagagaagaggaaaaaaagggaaacgaaacagcaaaagagcaaagagaggcacagacaaaagaaagaaaggaccaaaggagaagaaaacaaagaaaccacaaaaaagagacaaacaaaaaaacaagaaaaaccaagacagacagagaaaagaagag

SEQ ID NO: 250690 - DNA, 385 bp, Homo sapiens
aagccacgaggagactcctcttgctcgtcatgtctggccgcggcaaaggcgggaagggtcttggcaaaggcggcgctaagcgccaccgtaaagtactgcgcgacaatatccagggcatcaccaagccggccatccggcgccttgctcgccgcggcggcgtgaagcgcatctccggcctcatctacgaggagactcgcggggtgctgaaggtgttcctggagaacgtgatccgggacgccgtgacctatacagagcacgccaagcgcaagacggtcaccgccatggatgtggtctacgcgctcaagcgccagggccgcaccctctacggtttcggtggttgagcgtccttttctaccaataaaaggcccttttcagggccacccta

SEQ ID NO: 250691 - DNA, 384 bp, Homo sapiens
caagggcgaaaagtctgtccaaaaaaaaaaaaaaaaaaaaagcaacagcttttgggcaatgatctaccattactacacctcccttcccttcattttcaaaaaaaattttcatgcatttaacaaacattattaagattacattctttcttctcatgttaagtctttgaaatctggggtatattttatacttaaaagcatgtcttaatttggactagacacatttcaagtgctcagtagctacacgtggatagtggtcactgtattagatgcatagcactagtatgtcccaaaataactgttgaggctggacacagtggcttacacctataatcccagcactctgggaggttgaagtcagaggatcattccacgctgcagtgagct

SEQ ID NO: 250692 - DNA, 622 bp, Homo sapiens
taaataatctaatgatgggaaccattcttccattccctggtccaaagtataagctcgtgagtgcacaaaccatgttttcttccttttcacatagtgtaacaaacattgtttattacattgaataattgaaagatgattataaaactggttctggtgccctcctttaaaaacttagaattctttatagaggaaccattcgtggagtcagtcatcagacatgatttcccccaaaatgttaaccactaaataattctgtgctttctgtctttaagagtaggaaaataggatgggaagggtagagtttctctcttagagcttctttgttgatgcatttcatagattgtgtcttgtgactggtatcagatggttttaggattaggctggaactataagtttcctgtttccgatgccccctcgccatcgactctgccccacttctctaagctcccagctacctgcatgcccctcagcctggtcactaaggctgcctccctggcagtcgttctcccgtggatattggatgggtcagatgagcaggatgcatgagaggcacagtcagccctccatctgtggcctccacatctacgggttcaaccacaccatcaatatattttaaaaaaaa

SEQ ID NO: 250693 - DNA, 750 bp, Homo sapiens
tgttccaaatagaagtaaaatagaagttaattagttaatcaagccaatagggttaccctactccagtctgacttggtgcccttattttttgagatagatcttgctctgtcgcccaagactggagtgcagttccactgaggacgcccaagcgggacagccggggatctcaccgcggcgggcccggctgtcccgcttgggcgtcctcagtggaaccgcacaccctttctcagcgcgccggtcgtttggtcctgtagggccgaggggaattcgtgcggtgttgagcacgcgggaagcacttaacgaaagggagctgcccctcagccctcgtgagtccgatgtaaaggagtgaaggagacgaagaactgaatcagtagttgaccgcctgtgagctggcgagctgtgccctggtagggccttaaatcccagccccagaagtcggaggcagggcaggcaccccaaagcgtggaagagatgcacctgcggagtgaaaatgctgctattgcttctagggtcagccttggttcctggaacaaaggagccgcatgactcgggtctggcgatgatgttgggctctgcagtgtcctcatccttccccctctctggttctggaggctgcaagcccaggttcaaggcatcagcaggtgtggtttcctccgaggcctctccccgtggcttgcagatggctgccttcttcctgcatcctcacgtggtccctcctctgcactccagcatccttaatgtctctttgtg

SEQ ID NO: 250694 - DNA, 1088 bp, Homo sapiens
atctcaggctccacgaatggagggaggagcgaacttctgcgacacggattggtcttttgcactgccaatcgtagccgcgctggccgcgcccattggttctgatcgttctggaaatttccacctctcccattgggctgccggactccatgtcggaaccgccttcagaatgagagcgattccaattgggcggagggttgccaactctttgcgctgattggtttaaatcgctgcccttcaaaaggccgggtttcgccccgcccctgatatatgggagtaccggctgcagtcggggtctgtagctgtgtcgccggcggctgcggggcctctgggttgctttccctctcgctcccgagtgccgcgagttccaggcggtccccgggatcgccagcggcacagggccccagcccttcgcccgcgcatcgggatgggggtcctagccggtgggagctgcctgtccctcgagcgccagctacccgcgttgtccagcgctccggcctcggcccggccctcctgcctcctggctgttaggttctgaatgttccggaaatgccacgtgaccgcgagggcgcttgggcttgggctggacaggccggggatctcaccgcggcgggcccggctgtcccgcttgggcgtcctcagtggaaccgcacaccctttctcagcgcgccggtcgtttggtcctgtagggccgaggggaattcgtgcggtgttgagcacgcgggaagcacttaacgaaagggagctgcccctcagccctcgtgagtccgatgtaaaggagtgaaggagacgaagaactgaatcagtagttgaccgcctgtgagctggcgagctgtgccctggtagggccttaaatcccagccccagaagtcggaggcagggcaggcaccccaaagcgtggaagagatgcacctgcggagtgaaaatgctgctattgcttctagggtcagccttggttcctggaacaaaggagccgcatgactcgggtctggcgatgatgttgggctctgcagtgtcctcatccttccccctctctgggtaatgatatcttcccagggtttaaagtgtgtcctctctgccagtaaaaagtc

SEQ ID NO: 250695 - DNA, 452 bp, Homo sapiens
taggggttcttattcccattctataaatgagttattccagaattgatgttgcagacggggcccctgctacctcaagcatccagaagtgaattgactggtaatgaaaacaatttgcccttttcattccggccaaccggaggatatgcaaaaaggagagcaaaatatcatctcaagtctgcgaaaatgcactgttccctgtaaacacagctatgcaacctctcaaaagaatgttccagcaggaggaaggctcaggactgtgattgaataagaataatattgggagtgcattcacttctctgcttctgcctggggccaaatagacaatgaaacttaccttctttatgtttcaactaattaaacccaagcatttggctgccccctcactgcaaaggtggctgaggggaaacccaggaggctctgaaagccttacttgcctggctgttgcttgtaat

SEQ ID NO: 250696 - DNA, 404 bp, Homo sapiens
gttctcctcaaacatggcgccaaggggagcccgttacctgccatgggagctggggcagaagcagcactgacggccgcggaaggctgtaccagaaaggccctcagcctagatgtgcacagctcccgctcagaaccgcaggcagccctgcgcctccgcccccaatctgcgcctgtgagggaggggaaggaggggcaggagtcgaaggagagagcctcctctgccagcatccacgctcggttgccaggttactgcttgctggtctccatgtcgcctggggttgcgttcccggcttacaaatccagggattctctaaaaagaagaaaaggaagaaacgtttttacaagatttgattgtcatgttattgagctttaccatttaagaaacaagtgtcattggttttcaaa

SEQ ID NO: 250697 - DNA, 368 bp, Homo sapiens
gttcctagagcaggcaacgcacgtgggaggcagaaggagtactggacttgggcagcctgccattgggccacttctctgaaccgcccttctacctaatcagcaagtggtgctgttaaggatttgcttctcaaagtgcagcgggagggaccagcagcatccccaccacctgggtgtttgttagaaatgcagaatattgggccccatcccaccctactaaatcagaatctgcattttaacaggatccctaggagacgtttctgcatattaagtttgaaaagcacttacctataccagagtgagtgaggtgatgcttatggaaacaacttctaaattaagcaccaatttaaaaataaatgtgatttttaaaa

SEQ ID NO: 250698 - DNA, 550 bp, Homo sapiens
taggtctccacctcaggccatctttctctcaaatgctgcctcctgtcatatacccaaagcttctgccacatggactctttggcccagtaacaacattttcttttgtgtttctttgcctttatacatcctattctgaccataatgtactttcttccctcagttccacaggaaaaattcctagtcatccttgtagaaccagttcactgttccattccctcctgaagcttccccacatcctccgtgctccccatcccccttcagcatttggtccccatctccatttcagaacaccttcgacggtgttctgaagataaatgccaaaaatttcagctcttattttaatggagtgttaaaattctgattcatatagtcttaaattatcaactccttaaatgtgcttttgaaccaatttgcagaagctcacatagcaagttcataaggttccaaaaaggaagcccatacataacagtggaggtgtatagtctaaccatcacaatgtttgagacttttttttaaacatttctgagttcgaaggttatactgacagatt

SEQ ID NO: 250699 - DNA, 476 bp, Homo sapiens
tctactgaatattctcccatgggctggtggtggagtgagagtggtgtattgtttttgagttgtcttgctgtttgggcaatgagtttgaactacttgttaaccaggtaaggagcagccaaaggtccatgccagagggaaggttcaaggccacactggtttggatgatataacatgaatgactttgagggggaaaatgtggatttgatgccctgcagctatcccaaatggcatcttcgagcaactttgaaaaagccactacttcctctagagccactctacccaacagagtgttccaccagcaacatctggctactgaacaattgaaatgcgactggtataaaatacacaccagatttcaaagacttgatacctttcgaaaggcagagaatatctcaataataattttatattgattgttcgttaaaatgataatacttttgatatattgagttaaagcaaatatatttattattaaa

SEQ ID NO: 250700 - DNA, 271 bp, Homo sapiens
agtggtattgtaaatgttctctattttaatttcaacttcgaattgttgattgctagtgtatatacataaattgatttttgtatattgatcttataacctgcaaacttactaaattttttctagtagcactttaaaatagattaaactggattctccacatagacaatcatgctgtctgaaaatacagttaaacctcttccttttgaacttgaatgcctttttttccttgactcactgtcgagcggccgcgaatttagtagtaggcggccgc

SEQ ID NO: 250701 - DNA, 335 bp, Homo sapiens
cccctgtaaaagttaacagttaaatctattaaggcttaagtactaacctgtgcatgtcacagatttgaattctgaagaaaagaaacccagagggcaagtctttgccttgaaagtagcacaataattttgccgtcactttaaaaattctgctttaaattattcagatttcaatattcttgtttcttttcagtttgtaattaccattaggattctatcaacaacaatattttagccaattatactactgaatgctgtgtttttaaaaaaacaattacagatggcaacccactttgcaaatctcctctgtaaaaataaaataatatttaatgttggtt

SEQ ID NO: 250702 - DNA, 548 bp, Homo sapiens
gtgaatcattgaccagtatttggtaatctttttgtcatagagatttatttttggtttaatcaacttccatcaacattaaaaaaaaataactaacatgggttgggcacttctggcatcatttaaatgctttatgagtattaactcattaacacactaaacactatgaagtttacagatgatgaaattgaggcacagaacagcgaaattacttggctcaaggtaataagaaagtgacagtcctaggagagtaagtgtttaactatagagcccaagtttttagccattacgtatgttgtgtgagtttcagtacagtttgaccagaaaagcactattatggtggtaaagtttctgtgtctgaggggaaagcatgtcatgttctattttgatttagaaaaagttgcttagtgaagttcccataatagtcatatccacatgtagttaagaaacagctggcttgtactcagctctgcagatgttttattgagcacatactgcaggccaagcagtgctttaggtgtcagggatattacagtagacaaaaaaaaaca

SEQ ID NO: 250703 - DNA, 482 bp, Homo sapiens
ccagaatgcaggtattcgtgttggtattatactttattattgttattacttatcataataagtgtttcaggttagtttttctatcatagaaaaactattagtgggagcctagttagccatatcttcagccccatctacaatactgattttcacataaaagttatttgctacaaatttggtacataggtttcaaataaggaaagatctatataagcacttagttttgaaatttttctgctctgtgtcttgaccgtttactcacaaacaagagaaaaggtgtttgtatctcctctgatgcaatttgtaaatgggaaagtgcatatttctatgtttcaaattttgtgttgctatctttatggtttgaattgttaaacatgatttatgacttaataaagctgcttttgaaaaatatacttagaaaaatagtatagctgtttcaaagtaaaaacaaatttaaaaataaaacttgctactattgatga

SEQ ID NO: 250704 - DNA, 433 bp, Homo sapiens
gcagggtgagaacccctgctttatggtgagtaggatggagtatttttctagtaggggttgctcccaaatgccagcccatggaagatttagtacctccatgtgggtggtcgtagtacccacatcttagcttttaccagacattctattccatttctttggataacagccttctctttttttcctagggaaagtacctgggtggttgtgttctggagagggagagggcagagagaatttgttgtaacagctttgtctgttttttgtagaattttaattcattctcatttatagccccatttctcacactgtacctaagcccaccctttagagcataacttcctttttgtctatcagaaatttgactcttaattcctgatgaatgcacttcatgcctcccatacacacacacacacacacacaaaacacaacacac

SEQ ID NO: 250705 - DNA, 738 bp, Homo sapiens
atcttctattttggggaagacatgaaagcgctgagctgagggacgaggaagagctggagcccgcagaagccgtccacagccctgcctcagtggcccagtgggcagaggccagggagtgcctcactattttgcaaatgccgaccctgtggcctgctgcccgccccccccccccacagtggccatacgggcacaggagaccttttatgggactttggccctggcaggacccagggcctccagacgtgcgggcggcacatgccttggggacatcctgccttcaggaccgtggggcctggtcagtctgtccatcctcggcaaggacacaacactgccccagagggtgggaccactgcaagctcgagaccttgcttggtgacatgtgccactttggccaccacccacagtctgtcaccacgtggcttgggaacttctggagccacagcaggcatcacggtgtgacgtgagatgcctgcgccagccccgagcccactggcagccactgccattccacccatggtccctcaccctgccctgccgacgagcttgtctctgcagccccaggtacccccttcctggatgctgctggccccaggagatagctttccggtgacagctgtggaacgcgtcagcaggacaaactggacacatggagttacagtgtgtacacggcagtcccgccacccagcccccttgtaaactctagtcactataaacacacccgtacgcctaaaatgtcca

SEQ ID NO: 250706 - DNA, 391 bp, Homo sapiens
tattaatacagctggtgctggagatagaataaaggaggtacaaacagactataatggagagaggatagagaaagagaagcttaggtaaaggcagaaagtggagggaggaagaaaagattgcaactagattcttcctgtgagacaaggactttggaagggttctcgggtctctgcattgtttgtaccttcaagaaaaatggggccttggagagggagttgctgaaaggtcacaaagcctgttggccagcaggtttaaaagtcaaatttccattcctggaccagcctttgaaccagcttggttgatggctgctcggtgggaggatcgcttgagtcccgaagtttgagaccagcctggacaaaatagggagaccctgtctctacaatttctggg

SEQ ID NO: 250707 - DNA, 472 bp, Homo sapiens
cagcctcttccagaggctgctggagtccccggcgacagcacttggtgactctggggccagcacccaggggacgacgttcaaccctagcctgaagggacccgctcccagctcagaagccgtctctgacttctcgtgcgtattttgaccctgatttcaatcttctacccttgggagttctggcgtttggcacaaagtcccctctgcctgtttggagctcagtgctagaccaggtcccctgccccgagctttgtttttggggttatttattgaaacaaagtgtggggagctggttgtgggtgtgagtgggggtgtggggtccaggctgggcccagtgaaaaggaggaaggggttcccatgcgggggaggctctggggctgaggggaacaattctcacgtgtttggtgcttagagacctgcccggggcgttgggcaggccctccgggggctgaattaaaaatgctttatttccaaa

SEQ ID NO: 250708 - DNA, 255 bp, Homo sapiens
gctttctttgcatagattattattgtatccttctgacaggttcacaaatgattccatcttttccttctgcaaattattccagagtcattttctaaaatacagatatgatctccatatatgtcagggtaaaactcaaaatcctcacttgatgtacaaggcctctaggagtcaagacttgcctgaggcttcggcctcatcggtctcactaaactactgcatatatcagagtgcaacattaaaccttttttgcagaaa

SEQ ID NO: 250709 - DNA, 503 bp, Homo sapiens
cactcttcacacagtgcttacgagtttctgaagtctttattggtactctgcacaccttcacacctccgtgagaagaaaacagtagatttatattagaaactgtattgaaaaatgtctacttcaaacacactcaaaggactttccggttgttttattgctatgccagaataccttcatgtaactgaagtaacttggactaagcaagagagaaaaacgttaacaggccaggcctgggtccaacagtgaagaacgagaagattgttcttgaggcctagtcaatatcaatgtaagcatcacaatgaaggaaaacatgactacataaaaaattaacaacaaggaggctgatttccttttgagaggaaaaaattttgaaaacctgaagaattgagagcatagaaagaaacccatgtaatcatgtaagtacagtgcctgccacaaagttaacactatctgttcaatccatactgaaagaaaaaataaatgttgagacagtatctttgaat

SEQ ID NO: 250710 - DNA, 399 bp, Homo sapiens
catatagaggtgccagcccttcactcaatgcctaatcaaaacagttccgatgacagagcctctcctcataggctttacatttgcaaaatgatttgctaagaccaagtagagttgatgcacgtgcccatgacctagcaattccactcccaggtattcaccgaagacgctctcccaactgtgcaccaggaagcacctgccaggatgttccaagcattatttgcacggaaaaacctgaaaacaatccaaatacacaccaaaaggaaagtgggcaaatcgtggtaatgccacataatagtgaaaaatgcatgaaccacagtccacatcatcatggatgaatttcagaaatgtaatactgagtccaaaaaaataaaaaataaaaccagcctcttacaaaggaaa

SEQ ID NO: 250711 - DNA, 1053 bp, Homo sapiens
ggcagcggcgcttcctggtggtcagggcgccatggcgctgtcctggctgcagcgcgtcgagcttgcgctctttgctgccgccttcctgtgcggggccgtggcggccgcggcgatgactcggacccagggctccttcagtggtagatgtcccctgtatggtgtggccaccctgaatggctcctccctggccttatcccgtccctcagcaccatccctgtgctactttgtagctggggcctctggcctcttggccctctactgcctcctgcttttgctcttctggatctacagcagctgcatcgaggactcccacagaggtgctatagggctgcgcattgcactggccatctcagctatagccgtcttcctggtcttggtgtctgcctgtatccttcgatttggcaccaggtctctctgcaactccatcatctccttgaacactacaattagctgttctgaagcccagaaaattccatggacaccccctggaactgctctgcagttttactccaacctacacaatgctgaaacctcttcttgggtgaatttggtattgtggtgtgtggtcttggtgctccaggtcgtgcagtggaagtctgaagccaccccataccggcctctggagaggggtgaccctgagtggagctctgagacagatgctctcgttgggtcacgcctttcccattcctgaagaataagcggagtgcttcctgcagccgaagactccatgcccaagtgcctgtaatcccccccctcaaggccctgtttatgttgggagtcttagttttcctttcgttggggggtgggggggaaacataatgacaggcccccctccacctcttcctgcagctgtttttgtaccaaaatattatattactgtcttcatcttagtagtgagtttttgatgttaaagtacaactagataggaggaaggagtgaaggctaagcagacatggactgaaacttagaggtactgttaggcagctgccctagggatgactgctcctttatttgttgttaatgaatcttgacctccttgtgtgaaaatggttg

SEQ ID NO: 250712 - DNA, 865 bp, Homo sapiens
ggcagcggcgcttcctggtggtcagggcgccatggcgctgtcctggctgcagcgcgtcgagcttgcgctctttgctgccgccttcctgtgcggggccgtggcggccgcggcgatgactcggacccagaggtgctatagggctgcgcattgcactggccatctcagctatagccgtcttcctggtcttggtgtctgcctgtatccttcgatttggcaccaggtctctctgcaactccatcatctccttgaacactacaattagctgttctgaagcccagaaaattccatggacaccccctggaactgctctgcagttttactccaacctacacaatgctgaaacctcttcttgggtgaatttggtattgtggtgtgtggtcttggtgctccaggtcgtgcagtggaagtctgaagccaccccataccggcctctggagaggggtgaccctgagtggagctctgagacagatgctctcgttgggtcacgcctttcccattcctgaagaataagcggagtgcttcctgcagccgaagactccatgcccaagtgcctgtaatcccccccctcaaggccctgtttatgttgggagtcttagttttcctttcgttggggggtgggggggaaacataatgacaggcccccctccacctcttcctgcagctgtttttgtaccaaaatattatattactgtcttcatcttagtagtgagtttttgatgttaaagtacaactagataggaggaaggagtgaaggctaagcagacatggactgaaacttagaggtactgttaggcagctgccctagggatgactgctcctttatttgttgttaatgaatcttgacctccttgtgtgaaaatggttg

SEQ ID NO: 250713 - DNA, 507 bp, Homo sapiens
ggcagcggcgcttcctggtggtcagggcgccatggcgctgtcctggctgcagcgcgtcgagcttgcgctctttgctgccgccttcctgtgcggggccgtggcggccgcggcgatgactcggacccagggctccttcagtggtagatgtcccctgtatggtgtggccaccctgaatggctcctccctggccttatcccgtccctcagcaccatccctgtgctactttgtagctggggcctctggcctcttggccctctactgcctcctgcttttgctcttctggatctacagcagctgcatcgaggactcccacagaggtgctatagggctgcgcattgcactggccatctcagctatagccgtcttcctggtcttggtgtctgcctgtatccttcgatttggcaccaggtctctctgcaactccatcatctccttgaacactacaattagctgttctgaagcccagaaattccatgacacccagagacacttgcattagaggggccg

SEQ ID NO: 250714 - DNA, 332 bp, Homo sapiens
aatagaactagcgctataccaggtcttttcccctcaaggccctgtttatgttgggagtcttagttttcctttcgttggggggtgggggggaaacataatgacaggcccccctccacctcttcctgcagctgtttttgtaccaaaatattatattactgtcttcatcttagtagtgagtttttgatgttaaagtacaactagataggaggaaggagtgaaggctaagcagacatggactgaaacttagaggtactgttaggcagctgccctagggatgactgctcctttatttgttgttaatgaatcttgacctccttgtgtgaaaatggttg

SEQ ID NO: 250715 - DNA, 1229 bp, Homo sapiens
aggatatacaaggcctgggtttactctaaggtttctgcacagagaccataacttgtgaggcttctctgaagctcattgcattctatattcattgcctattttctgatccttctggccactgccggtgtgattccccagcaggccctctccatcaatatccctgtcccagaaataggaattgacggtgcacaaataacttcctggaatgcaggaccattcctaagttatcactaacaccctaccaagagactgtatctagagacattaacctgaaatctaggactcagcagcttctctccacagggctccttcagtggtagatgtcccctgtatggtgtggccaccctgaatggctcctccctggccttatcccgtccctcagcaccatccctgtgctactttgtagctggggcctctggcctcttggccctctactgcctcctgcttttgctcttctggatctacagcagctgcatcgaggactcccacagaggtgctatagggctgcgcattgcactggccatctcagctatagccgtcttcctggtcttggtgtctgcctgtatccttcgatttggcaccaggtctctctgcaactccatcatctccttgaacactacaattagctgttctgaagcccagaaaattccatggacaccccctggaactgctctgcagttttactccaacctacacaatgctgaaacctcttcttgggtgaatttggtattgtggtgtgtggtcttggtgctccaggtcgtgcagtggaagtctgaagccaccccataccggcctctggagaggggtgaccctgagtggagctctgagacagatgctctcgttgggtcacgcctttcccattcctgaagaataagcggagtgcttcctgcagccgaagactccatgcccaagtgcctgtaatcccccccctcaaggccctgtttatgttgggagtcttagttttcctttcgttggggggtgggggggaaacataatgacaggcccccctccacctcttcctgcagctgtttttgtaccaaaatattatattactgtcttcatcttagtagtgagtttttgatgttaaagtacaactagataggaggaaggagtgaaggctaagcagacatggactgaaacttagaggtactgttaggcagctgccctagggatgactgctcctttatttgttgttaatgaatcttgacctccttgtgtgaaaatggttg

SEQ ID NO: 250716 - DNA, 950 bp, Homo sapiens
ggcagcggcgcttcctggtggtcagggcgccatggcgctgtcctggctgcagcgcgtcgagcttgcgctctttgctgccgccttcctgtgcggggccgtggcggccgcggcgatgactcggacccagctggggcctctggcctcttggccctctactgcctcctgcttttgctcttctggatctacagcagctgcatcgaggactcccacagaggtgctatagggctgcgcattgcactggccatctcagctatagccgtcttcctggtcttggtgtctgcctgtatccttcgatttggcaccaggtctctctgcaactccatcatctccttgaacactacaattagctgttctgaagcccagaaaattccatggacaccccctggaactgctctgcagttttactccaacctacacaatgctgaaacctcttcttgggtgaatttggtattgtggtgtgtggtcttggtgctccaggtcgtgcagtggaagtctgaagccaccccataccggcctctggagaggggtgaccctgagtggagctctgagacagatgctctcgttgggtcacgcctttcccattcctgaagaataagcggagtgcttcctgcagccgaagactccatgcccaagtgcctgtaatcccccccctcaaggccctgtttatgttgggagtcttagttttcctttcgttggggggtgggggggaaacataatgacaggcccccctccacctcttcctgcagctgtttttgtaccaaaatattatattactgtcttcatcttagtagtgagtttttgatgttaaagtacaactagataggaggaaggagtgaaggctaagcagacatggactgaaacttagaggtactgttaggcagctgccctagggatgactgctcctttatttgttgttaatgaatcttgacctccttgtgtgaaaatggttg

SEQ ID NO: 250717 - DNA, 1227 bp, Homo sapiens
ggcagcggcgcttcctggtggtcagggcgccatggcgctgtcctggctgcagcgcgtcgagcttgcgctctttgctgccgccttcctgtgcggggccgtggcggccgcggcgatgactcggacccagggctccttcagtggtagatgtcccctgtatggtgtggccaccctgaatggctcctccctggccttatcccgtccctcagcaccatccctgtgctactttgtagctggggcctctggcctcttggccctctactgcctcctgcttttgctcttctggatctacagcagctgcatcgaggactcccacagaggtgctatagggctgcgcattgcactggccatctcagctatagccgtcttcctggtcttggtgtctgcctgtatccttcgatttggcaccaggtctctctgcaactccatcatctccttgaacactacaattaggtaatgggagagggagggaagcctggctggggctgactaccttccctctgcagcggggtcctataatttccttttatccccatcagttgctctcaactcacagggcactgggcacaggtgtgcctcggatataaactatcacgctttctcacaactgtctctttgacctcacagctgttctgaagcccagaaaattccatggacaccccctggaactgctctgcagttttactccaacctacacaatgctgaaacctcttcttgggtgaatttggtattgtggtgtgtggtcttggtgctccaggtcgtgcagtggaagtctgaagccaccccataccggcctctggagaggggtgaccctgagtggagctctgagacagatgctctcgttgggtcacgcctttcccattcctgaagaataagcggagtgcttcctgcagccgaagactccatgcccaagtgcctgtaatcccccccctcaaggccctgtttatgttgggagtcttagttttcctttcgttggggggtgggggggaaacataatgacaggcccccctccacctcttcctgcagctgtttttgtaccaaaatattatattactgtcttcatcttagtagtgagtttttgatgttaaagtacaactagataggaggaaggagtgaaggctaagcagacatggactgaaacttagaggtactgttaggcagctgccctagggatgactgctcctttatttgttgttaatgaatcttgacctccttgtgtgaaaatggttg

SEQ ID NO: 250718 - DNA, 1485 bp, Homo sapiens
aggatatacaaggcctgggtttactctaaggtttctgcacagagaccataacttgtgaggcttctctgaagctcattgcattctatattcattgcctattttctgatccttctggccactgccggtgtgattccccagcaggccctctccatcaatatccctgtcccagaaataggaattgacggtgcacaaataacttcctggaatgcaggaccattcctaagttatcactaacaccctaccaagagactgtatctagagacattaacctgaaatctaggactcagcagcttctctccacagggctccttcagtggtagatgtcccctgtatggtgtggccaccctgaatggctcctccctggccttatcccgtccctcagcaccatccctgtgctactttgtagctggggcctctggcctcttggccctctactgcctcctgcttttgctcttctggatctacagcagctgcatcgaggactcccacaggtgactgcctaaccctgagggccaggggctgaggtaggatgagcctcacctccaccacaaggcttgttctctccctttcagaaggtgctatagggctgcgcattgcactggccatctcagctatagccgtcttcctggtcttggtgtctgcctgtatccttcgatttggcaccaggtctctctgcaactccatcatctccttgaacactacaattaggtaatgggagagggagggaagcctggctggggctgactaccttccctctgcagcggggtcctataatttccttttatccccatcagttgctctcaactcacagggcactgggcacaggtgtgcctcggatataaactatcacgctttctcacaactgtctctttgacctcacagctgttctgaagcccagaaaattccatggacaccccctggaactgctctgcagttttactccaacctacacaatgctgaaacctcttcttgggtgaatttggtattgtggtgtgtggtcttggtgctccaggtcgtgcagtggaagtctgaagccaccccataccggcctctggagaggggtgaccctgagtggagctctgagacagatgctctcgttgggtcacgcctttcccattcctgaagaataagcggagtgcttcctgcagccgaagactccatgcccaagtgcctgtaatcccccccctcaaggccctgtttatgttgggagtcttagttttcctttcgttggggggtgggggggaaacataatgacaggcccccctccacctcttcctgcagctgtttttgtaccaaaatattatattactgtcttcatcttagtagtgagtttttgatgttaaagtacaactagataggaggaaggagtgaaggctaagcagacatggactgaaacttagaggtactgttaggcagctgccctagggatgactgctcctttatttgttgttaatgaatcttgacctccttgtgtgaaaatggttg

SEQ ID NO: 250719 - DNA, 891 bp, Homo sapiens
ggcagcggcgcttcctggtggtcagggcgccatggcgctgtcctggctgcagcgcgtcgagcttgcgctctttgctgccgccttcctgtgcggggccgtggcggccgcggcgatgactcggacccagggctccttcagtggtagatgtcccctgtatggtgtggccaccctgaatggctcctccctggccttatcccgtccctcagcaccatccctgtgctactttgtagctggggcctctggcctcttggccctctactgcctcctgcttttgctcttctggatctacagcagctgcatcgaggactcccacagaggtgctatagggctgcgcattgcactggccatctcagctatagccgtcttcctggtcttggtgtctgcctgtatccttcgatttggcaccaggtctctctgcaactccatcatctccttgaacactacaattaggtaatgggagagggagggaagcctggctggggctgactaccttccctctgcagcggggtcctataatttccttttatccccatcagttgctctcaactcacagggcactgggcacaggtgtgcctcggatataaactatcacgctttctcacaactgtctctttgacctcacagctgttctgaagcccagaaaattccatggacaccccctggaactgctctgcagttttactccaacctacacaatgctgaagtgagacccaaggataggaggaaaaactgacataaatatctgtagctgtgtgggtgctcaccagtgtattgtgagcttggcctaccagtgagaggagctgaaggggttgtcagcttaaaattcagcagttcagagtggtgtgtgggtgggaaggactggatttgaaatggtcccactcctgacgatcc

SEQ ID NO: 250720 - DNA, 974 bp, Homo sapiens
ggcagcggcgcttcctggtggtcagggcgccatggcgctgtcctggctgcagcgcgtcgagcttgcgctctttgctgccgccttcctgtgcggggccgtggcggccgcggcgatgactcggacccagggctccttcagtggtagatgtcccctgtatggtgtggccaccctgaatggctcctccctggccttatcccgtccctcagcaccatccctgtgctactttgtagctggggcctctggcctcttggccctctactgcctcctgcttttgctcttctggatctacagcagctgcatcgaggactcccacagaggtgctatagggctgcgcattgcactggccatctcagctatagccgtcttcctggtcttggtgtctgcctgtatccttcgatttggcaccaggtctctctgcaactccatcatctccttgaacactacaattagacctcttcttgggtgaatttggtattgtggtgtgtggtcttggtgctccaggtcgtgcagtggaagtctgaagccaccccataccggcctctggagaggggtgaccctgagtggagctctgagacagatgctctcgttgggtcacgcctttcccattcctgaagaataagcggagtgcttcctgcagccgaagactccatgcccaagtgcctgtaatcccccccctcaaggccctgtttatgttgggagtcttagttttcctttcgttggggggtgggggggaaacataatgacaggcccccctccacctcttcctgcagctgtttttgtaccaaaatattatattactgtcttcatcttagtagtgagtttttgatgttaaagtacaactagataggaggaaggagtgaaggctaagcagacatggactgaaacttagaggtactgttaggcagctgccctagggatgactgctcctttatttgttgttaatgaatcttgacctccttgtgtgaaaatggttg

SEQ ID NO: 250721 - DNA, 1129 bp, Homo sapiens
ggcagcggcgcttcctggtggtcagggcgccatggcgctgtcctggctgcagcgcgtcgagcttgcgctctttgctgccgccttcctgtgcggggccgtggcggccgcggcgatgactcggacccagggctccttcagtggtagatgtcccctgtatggtgtggccaccctgaatggctcctccctggccttatcccgtccctcagcaccatccctgtgctactttgtagctggggcctctggcctcttggccctctactgcctcctgcttttgctcttctggatctacagcagctgcatcgaggactcccacagaggtgctatagggctgcgcattgcactggccatctcagctatagccgtcttcctggtcttggtgtctgcctgtatccttcgatttggcaccaggtctctctgcaactccatcatctccttgaacactacaattagctgttctgaagcccagaaaattccatggacaccccctggaactgctctgcagttttactccaacctacacaatgctgaaacctcttcttgggtgaatttggtattgtggtgtgtggtcttggtgctccaggtcgtgcagtggaagtctgaagccaccccataccggcctctggagaggggtgaccctgagtggagctctgagacagatgctctcgttgggtcacgcctttcccattcctgaagaataagcggagtgcttcctgcagccgaagactccatgcccaagtgcctgtaatcccccccctcaaggccctgtttatgttgggagtcttagttttcctttcgttggggggtgggggggaaacattatttctcctgggccattgatccatctacccttttaatccttttcttctaggggcgttgccctgttatccctattttgcctctttttctaagtctcctggtattactatttttcctcggtccattcatttttggtcatactctctcatttacctggtgttaactccccttgtgtatgaatacccctctactcatacgttgcatcttggcctggtccctttttttgcctctttggattctctcacacgtggtgtttcaaattcttctcctcattatctctccttcttttcctcaaatttaatacaattctcct

SEQ ID NO: 250722 - DNA, 1011 bp, Homo sapiens
ggcagcggcgcttcctggtggtcagggcgccatggcgctgtcctggctgcagcgcgtcgagcttgcgctctttgctgccgccttcctgtgcggggccgtggcggccgcggcgatgactcggacccagggctccttcagtggtagatgtcccctgtatggtgtggccaccctgaatggctcctccctggccttatcccgtccctcagcaccatccctgtgctactttgtagctggggcctctggcctcttggccctctactgcctcctgcttttgctcttctggatctacagcagctgcatcgaggactcccacagaggtgctatagggctgcgcattgcactggccatctcagctatagccgtcttcctggtcttggtgtctgcctgtatccttcgatttggcaccagctgttctgaagcccagaaaattccatggacaccccctggaactgctctgcagttttactccaacctacacaatgctgaaacctcttcttgggtgaatttggtattgtggtgtgtggtcttggtgctccaggtcgtgcagtggaagtctgaagccaccccataccggcctctggagaggggtgaccctgagtggagctctgagacagatgctctcgttgggtcacgcctttcccattcctgaagaataagcggagtgcttcctgcagccgaagactccatgcccaagtgcctgtaatcccccccctcaaggccctgtttatgttgggagtcttagttttcctttcgttggggggtgggggggaaacataatgacaggcccccctccacctcttcctgcagctgtttttgtaccaaaatattatattactgtcttcatcttagtagtgagtttttgatgttaaagtacaactagataggaggaaggagtgaaggctaagcagacatggactgaaacttagaggtactgttaggcagctgccctagggatgactgctcctttatttgttgttaatgaatcttgacctccttgtgtgaaaatggttg

SEQ ID NO: 250723 - DNA, 717 bp, Homo sapiens
ggcagcggcgcttcctggtggtcagggcgccatggcgctgtcctggctgcagcgcgtcgagcttgcgctctttgctgccgccttcctgtgcggggccgtggcggccgcggcgatgactcggacccagggctccttcagtggtagatgtcccctgtatggtgtggccaccctgaatggctcctccctggccttatcccgtccctcagcaccatccctgtgctactttgtagctggggcctctggcctcttggccctctactgcctcctgcttttgctcttctggatctacagcagctgcatcgaggactcccacagaggtgctatagggctgcgcattgcactggccatctcagctatagccgtcttcctggtcttggtgtctgcctgtatccttcgatttggcaccaggtctctctgcaactccatcatctccttgaacactacaattagctgttctgaagcccagaaaattccatggacaccccctggaactgctctgcagttttactccaacctacacaatgctgaagtgagacccaaggataggaggaaaaactgacataaatatctgtagctgtgtgggtgctcaccagtgtattgtgagcttggcctaccagtgagaggagctgaaggggttgtcagcttaaaattcagcagttcagagtggtgtgtgggtgggaaggactggatttgaaatggtcccactcctgacgatcc

SEQ ID NO: 250724 - DNA, 425 bp, Homo sapiens
gagaatcagttcttgagttaagaggctgtgtgcaggctacgcactcccagggtacggaatctttcgcacacaatgttctcagctgtcactcccgtggttggacacacatgtttctctctccaggccaccctctcctgtgatttgcagacatgcatattggtctcctgtgcatctccccctggaagccctgcaagaatctctcgctcaacacattcagaatgttcagcatctttcccaggaaatgtttcctcccatcttccaaacagtctgtaagtcagaaagcagggagtcagtctgagcttttccataaagctctccttatccttcaccatcttctcaaactcccattcccatgaaaacctttcaagacctaagctgtactagtccattctcatactgctatgaagaaatacccaagactgggt

SEQ ID NO: 250725 - DNA, 344 bp, Homo sapiens
tcctgaatcaggagtttgtagttccaattaagagtttttcaacagcttgtagttatagggacattatttgactatggttattatttgctttacctaaccactcacctggtacaacgacctccatcctggaagagggataggaaacaataatgatggtgctgactctcaccaggaaaggccatgggggacacgggatagaggttgtaaactgagtgagggtcaaaagtaacagataacttttgtgcacacggatggtaacttgtggtgtctttttttttttctttgctttgggcaaaggtcttcacagttcttaggatcaagtgcactttgaagatgaggatgta

SEQ ID NO: 250726 - DNA, 777 bp, Homo sapiens
  misc_feature (11)..(11): n is a, c, g, or t
  misc_feature (34)..(34): n is a, c, g, or t
  misc_feature (64)..(65): n is a, c, g, or t
  misc_feature (125)..(125): n is a, c, g, or t
  misc_feature (297)..(297): n is a, c, g, or t
gacagattatnatgaataaagttatataagcttncctaagcaggctatgtgtgaacattagttnncaactcagttgagtaaatgcttaggaacttggttactgcattctgtggtgaaactatgtntagatttataagaaactgtaaaactgtagtccaaagtggctataccattttaccattatttccaccaacaatgcatgaacgttcccatcactccactttcttgccaatatttggtattatcagtcttatggatttagctatcctaataggtatatactggtatgtcattgtnttaatttgtaatcccctaatgacatatgatgttaatattttctaccattctgtgacttgtcctttcattctcttaacagtattgtataaagcctaggaccatggttctcactttttgtgttaaagacatagttttgtataatgttagaatttttgatagtacattaaagaattaaaggtaaatgtcatttatttttaaaaaagcaagtttcagaaaattgaagaacctgttcgtgattatttacactattgttcaccctctggtgtgttactgtttgaacagtattgtttgcagccctgaccttgttctcttatatcctttgaggtaaagttcatatatgttcctctgaacatgcaatctttattttattttcagcaaattgtatcatgggcaatattttggcttagtgtctgatagaaatccctgtaaaattgtggattgttagttgaacaaaaataaattctatatattgtttaaaat

SEQ ID NO: 250727 - DNA, 428 bp, Homo sapiens
tgcatgggcatctcaaattcagatgttcatagagaatgtctgagcctgtaaggacagcacctagcccactagggcaaaggtgggaaaggggtgcttgtgagtgagcatcagccggaacagcatagtcagacatagaaagcagccgaacaaggagactctttgcttttgttttgcaaatatattatggaacaagaaaatacgaataaagcctctgcatagggaaggtagtattaatttgcttgcttaaccaaatatttattgggtacccattatatgttgagcactcttgtaggtataggagatgccataggtagcaaaacaaaaatctatccccatagaacttaaagggcatgaagaagcagtagaaaaaataaccatagtaaggaagtaaaattctttaactgttaggtggtggtggatgctatgga

SEQ ID NO: 250728 - DNA, 416 bp, Homo sapiens
tcacaaatttgatataaaacaatctatatatttaacaagctactccaaacaggataaacttaaagagatccaaatctagacacaataaccaaactgtcacaagagaagacaaagagaaaatcttcaaagcaacaatggagaacccactcattgtgcacaagggatcctcaaaaaggtcaatatctgatttctcatgagaaaccatgaaagccagagtggagcagggtgggaatagataatatattcaaagttctgaaattaaaaaagacaatcaaccaagaattctgtatgtaacaaaactattcaccaaaaacaaaagagaacttaagatattaccagataaatgaaaaacaacagtcctttgggttgaaatgaaaggacactgtacaacagctcaaatccacatgaagaaataa

SEQ ID NO: 250729 - DNA, 175 bp, Homo sapiens
cattgtagtacatacatttattagcatctctgatgattttcttaggataaattttgtaagtgaatttactaggtcaaagggtggtgaacattgatattctcttgactatgtcacctatttgttatggtttggggaatgctagtaagaagagttacaataaaaccttaaaaaaaaa

SEQ ID NO: 250730 - DNA, 953 bp, Homo sapiens
gactttagtgtactatctaagaaatatttgcctactccaaggtcatgaaaatattcaaaaaacaatttacaatattagcatgggtttatatatgtactttctatgctataccattgatctatttgtctacccttatgctggtaagattttgccttaaatatcatggcttaacaaaagtcttgaagtcaattagaaaagattggcttggattttctagattctttgcttttatacattatcttttcaaatcagtttgtcaatttcttcaagaaaaaactttaggacttttttttggatttgaattgaagctacagataaatttgggggagatgacaacaacattgagcttccaatctgttaacattgtatatctctccatttacttacatgtgtttaattttacccagcactgcttatagtttttagaagtcatgtacatctttcattaaatttattcctctccaaaaacctattgaaataaaaaatttaatttaattaaatttaaaaaataataaatttattcctagttattttattgttttggtgttactttaaatgataatgcttttcaaattccttattactattatatgaaaatataattggtttgaaacatattaaccatgaatttatggcattgctaaattcatgtagtatttctagtaaattatttatagatttcctttgtattttaaagaaaataattatatcatgaacaaatagactgacttactgtttctttccaaacaattacttctattttttggtctcatttcactggttaggagtttgaatacaatgttgaagagaagtgatgagagtggacttccttgccttatttccaatttcaaggaagaagcacttagcagcaccattaagtgtgatgtttgctatacctttatacatattcctgcgtctttctttccttccttccttctttcctttctaaaaaa

SEQ ID NO: 250731 - DNA, 580 bp, Homo sapiens
ctgaaggtgcagtgcagagggagatggaaatttaaacttctcagaaacacagtaatgataagtaaccaaggacttccaccaaagctcagtcccacgatgacgatggtcagccagtcacaaaaggacaaatactgtatgattctacttatgtgaggtactagagtagtcaaattcagagagacagaaagtctagtgctagttgccaggggctaggggtaggggacaatgagcagctattgtttaatgggtacagagtttcagttttgcaagataaagggttctggacattggtggtaatggtggcaacagcaatgtgaatgtacttaatgccactgagctgtacacttaaaaatgataagatgataaattttgtattctgtacattttatgacagttttttttttttaaacctcacttggtaaaggttagtaattggtcttgctcatatttctaacccaagagaaaagacaggatggaatctccacagccatgaatgattatggaatattctctcagtgacatgtaaggacctgaggcaatgaagttgcacagagctggaagacatgcctgctgcttcgct

SEQ ID NO: 250732 - DNA, 617 bp, Homo sapiens
gagagagaacctccatgaacccagtttctccaacaataaagtgcataaaaaagacaaagatggtgagattaagagaccataaattaaaaaggagactttgagttcacatcaatcaatcaatcgcaatgtgtggaccttgtaatagttgattccaggtgtcaacctgactggattaagggatacccagatagctggtgaaagcattaattatcctcagtggttcagacagcactgagctcgtccctcttctgctgaaaggaaaacccgggcggtcaggcatttgattagaatgactgggctgtcccagtgcctgtgagggtatttcctgaagagactggcatttgagttagtagactgataggggaagtttcactctcaatgtgggtgggcagcattcaataagctggggcccagatggaacaaaaagaggaggcaagagtaattcttgctgtcagaactccagattctatggtcttcggattccaggacttgcaccagcactgctgccctttccccccatgatcacgttggcaagtgtgataatggtatcgtgtttttaaaaagaattcctatattttaaataacatacatattcttaataacaaaaaagtaggaca

SEQ ID NO: 250733 - DNA, 740 bp, Homo sapiens
tgacttgatatgagaactaacccaatatggcaggaagccactgacatgtgggagccgtgcatggcagtggccagcgtccttgtcctgcgggggctctgtggacatcactcgccttcagaacactgagccctcctacctcctgatatccagggctgccgatgggaaatcccaggctgccgcggctcctgtgtgctttgaagggtgcgcgactctgctctcaagaccccctggaggcccgccccctgccccccaccagctcattcgttagatgattggaagtgactgcctacgtcttctttcaggataaagcctcaagtcctgcaactattccttgtgtgataacgtttcaaatcccttcctggttctggcaaagctcctcaaacatgctccagtgtgctggggctctgcatgtgtgagcctggggccagcagggcgcacgttcatgtcagggcaccagtatgatcctgatgacacatgactggtgtggagccccgggtgtttccacgggaactgctgtcggccggattgctgtgctctgcagctgtgcccaagtccccaagccaccctttcgttgctgctcgatgtcaccatttgcttttgttgttttttttttgtttttgagatggagtctcactctgtcgcccaggctggagtgcagtggcgtgatctcggctcactgcaagctccgcctcccgggttcacgccattctcctgcctcagcctcccgagtagctgggatt

SEQ ID NO: 250734 - DNA, 814 bp, Homo sapiens
tgacttgatatgagaactaacccaatatggcaggaagccactgacatgtgggagccgtgcatggcagtggccagcgtccttgtcctgcgggggctctgtggacatcactcgccttcagaacactgagccctcctacctcctgatatccagggctgccgatgggaaatcccaggctgccgcggctcctgtgtgctttgaagttttcaggatttttgtcaaacatccggggacccttagctggagaggatggcatgggtgacacgcagctggccagggtgcgcgactctgctctcaagaccccctggaggcccgccccctgccccccaccagctcattcgttagatgattggaagtgactgcctacgtcttctttcaggataaagcctcaagtcctgcaactattccttgtgtgataacgtttcaaatcccttcctggttctggcaaagctcctcaaacatgctccagtgtgctggggctctgcatgtgtgagcctggggccagcagggcgcacgttcatgtcagggcaccagtatgatcctgatgacacatgactggtgtggagccccgggtgtttccacgggaactgctgtcggccggattgctgtgctctgcagctgtgcccaagtccccaagccaccctttcgttgctgctcgatgtcaccatttgcttttgttgttttttttttgtttttgagatggagtctcactctgtcgcccaggctggagtgcagtggcgtgatctcggctcactgcaagctccgcctcccgggttcacgccattctcctgcctcagcctcccgagtagctgggatt

SEQ ID NO: 250735 - DNA, 1109 bp, Homo sapiens
tgacttgatatgagaactaacccaatatggcaggaagccactgacatgtgggagccgtgcatggcagtggccagcgtccttgtcctgcgggggctctgtggacatcactcgccttcagaacactgagccctcctacctcctgatatccagggctgccgatgggaaatcccaggctgccgcggctcctgtgtgctttgaagttttcaggatttttgtcaaacatccggggacccttagctggagaggatggcatgggtgacacgcagctggccaggtacgctctggggcactggggcatcttgagcaccttggtgcagtgtcgtgaagaagacactgtaaattggacttggtgttatcacaggggctttaggatcacggtgttggtagatctaggatgataatctccaaaacgcactccccaacccactgcagggatcctttctcttgtcacctcactttgtgatttagaatgcaggacctccaggacagcagcctctccgtggcacaacagctgttaggagaccttgcctagttgacgagaaagtcacttgtggtgcctttccatccagggtgcgcgactctgctctcaagaccccctggaggcccgccccctgccccccaccagctcattcgttagatgattggaagtgactgcctacgtcttctttcaggataaagcctcaagtcctgcaactattccttgtgtgataacgtttcaaatcccttcctggttctggcaaagctcctcaaacatgctccagtgtgctggggctctgcatgtgtgagcctggggccagcagggcgcacgttcatgtcagggcaccagtatgatcctgatgacacatgactggtgtggagccccgggtgtttccacgggaactgctgtcggccggattgctgtgctctgcagctgtgcccaagtccccaagccaccctttcgttgctgctcgatgtcaccatttgcttttgttgttttttttttgtttttgagatggagtctcactctgtcgcccaggctggagtgcagtggcgtgatctcggctcactgcaagctccgcctcccgggttcacgccattctcctgcctcagcctcccgagtagctgggatt

SEQ ID NO: 250736 - DNA, 439 bp, Homo sapiens
gggaaatcccaggctgccgcggctcctgtgtgctttgaaggtaactttcctttgctctcgcgctccttgggctcagcgccctttcagtctgatgagatctgggcggttttcttcaagccttctctgacaattccatcactgtcctcaccctcttcttttttttctagaactttggttagccagatacagactctcctggtttgattctgtctcttttcattctacattctagaagatactcttaactttatatttcagtcatgttaatgaatgtcttcttttaatgccagcaattgcatttttaatgtccaagctctctgtctcattagtagcattttttatttcgtaagtgcagtatcatcttgaatacttctgaagacaagtataacttaaaaaaattcctttctgtttctagagctagctcagtttctttcagcct

SEQ ID NO: 250737 - DNA, 411 bp, Homo sapiens
ctctggggcactggggcatcttgagcaccttggtgcagtgtcgtgaagaagacactgtaaattggacttggtgttatcacaggggctttaggatcacggtgttggtagatctaggatgataatctccaaaacgcactccccaacccactgcagggatcctttctcttgtcacctcactttgtgatttagaatgcaggacctccaggacagcagcctctccgtggcacaacagctgttaggagaccttgcctagttgacgagaaagtcacttgtggtgcctttccatccagggtgcgcgactctgctctcaagaccccctggaggcccgccccctgccccccaccagctcattcgttagatgattggaagtgactgcctacgtcttctttcaggataaagcctcaagtcctg

SEQ ID NO: 250738 - DNA, 400 bp, Homo sapiens
tttttgggggagtatcaattacttgtataaacagtgaaatgaaaacaattcttattcatctgaactacagactttcaaatttgggacacaagacttcaaaaacaaaaaaacaaacaaacaaaaaaaatcaaggcatgagagaatgaaactctggttcttattcccattctgcccttaaccaggcaaacttgtttgcccaagcacaagaaaaggaacttagacttagaacccttctaactctaaaatttgattctactttgccaaggaaaacgaagattgggaacataattttcaataatatggacagaaaatccttataattactctggagattaaagtctctaaagtctctaagcaactcactttcagatagatgctgccccagcaaaaaaaaaaaaaa

SEQ ID NO: 250739 - DNA, 307 bp, Homo sapiens
tatgaataaataataaaatgtgtgcaaactgaaaattgtgagatgcagcaaagagcattatgtgagagcaatctataagcttagttgtttacgctggaaactcagaaaggctgaaagttaattaagcatacaactcaagttagaaaaaagtagcatcagaataaatgcagataatgtaatggaaggataacagatgagaagagaaattgatgaaatagaaaataaggacaatactagggagaagtaacaaagccaacagttgttttccagaaaagtctaatacaaaagtcattagtgagatttatca

SEQ ID NO: 250740 - DNA, 339 bp, Homo sapiens
agtcccaggaggggagcaggtctagcaggaatgcccttgtgcctgtgcaggagagcagcaggactaggaggctgcagacagacagtgggtaactgaaaggtgaactttctactagacagcaaatccctggatgtcatcctgatggatctaagatgaaaaataccccaccatgaaaatgccttacgtggtcccaaccatgaagcgtaaaattgccttttcacctgaaaacgacctgcagcttggtttagcattttatgcttcggatgtcatctaacatccagaagcaataccctcccccgttgcaagtcaaggtaaaatcagaaaatgctcggtggaaag

SEQ ID NO: 250741 - DNA, 464 bp, Homo sapiens
tccattcttcaagtagcaactggaatgtgctagcagccactttcacattaatgggagaactgttatagcccttgagtgaaagcatggcttatttcacctagtttccctggtgccaggcttagagcagaaggtcaaaaagttagcagatcagaagttttgcttgtaaattattctgcttcttttttcatccagtcttagagccccccaaaatgcactcttggatctggtgcactgttgttggtacgaacagtaaatcacaggctctacctaaacagctaatgaatgaacaaaacatcttatataaaagctccatcttaacagaagtttaaaaaagttctgtgttggtgagagttggaggaaaaagtgtactcccaaacatattattggggaaatgtaaattgtttaagtcctgtgtaatttggcaatgaccattacaattaaaaatgtatataccctgtgaccca

SEQ ID NO: 250742 - DNA, 636 bp, Homo sapiens
aaatcttctgtaataaaataaccttccaactcttattccatctattagctaattcagaacaagtgaattaacatcaaacaaaaatgtggatagatattttgttcttaatgtaaggcaaatcttttgaattatttttcttgactggaggctaagtcagtgccattattttcataatttaaggactgtggaacatcctacacaatatttcatagaaattttatttgaccttgaaagatctgtgataatctggagcattttccctctgaaagtaaataaagatatgatatcattatagaagcatttatacatataaagatgtctctttgtataatgtttataaaaggcaatctctataaagatgtttttaatgaaaggcatctatcagtgtaactaaagattttgtgactggacttaagggtttaccaaaggaatcagagattacatattaaacacctaccctgggctgctcttacttgccctagaagaggagggagcatttttttttttttttttttggatacctagaacaacagttcctgacatagataatcaatgtttttaaaaagcatgaatgtgctgcacccattaactcgtcatttagcattaggtatatctcctaatgctatccctccccaa

SEQ ID NO: 250743 - DNA, 574 bp, Homo sapiens
aaatcttctgtaataaaataaccttccaactcttattccatctattagctaattcagaacaagtgaattaacatcaaacaaaaatgtggatagatattttgttcttaatgtaaggcaaatcttttgaattatttttcttgactggaggctaagtcagtgccattattttcataatttaaggactgtggaacatcctacacaatatttcatagaaattttatttgaccttgaaagatctgtgataatctggagcattttccctctgaaagtaaataaagatatgatatcattatagaagcatttatacatataaagatgtctctttgtataatgtttataaaaggcaatctctataaagatgtttttaatgaaaggcatctatcagtgtaactaaagattttgtgactggacttaagggtttaccaaaggaatcagagattacatattttttttggatacctagaacaacagttcctgacatagataatcaatgtttttaaaaagcatgaatgtgctgcacccattaactcgtcatttagcattaggtatatctcctaatgctatccctccccaa

SEQ ID NO: 250744 - DNA, 511 bp, Homo sapiens
gcttaggacctgtccccctgggtagctcacaacacctcaaacatagcagtcagaggccacccgcgaaggccctcccacgctccagccaacttctccgcacttcccaacatcagactttggtcccatcttctttgtttcctttcacttccctttcccctgcatcattcattcaacaggtacgtgttgagcatctattatgcaccaggtgctgtttaagatgctggtaatactggagtgaacaagacagacatggtctctgctctcacggagcttacattccagtgggaggttacagaccgaacaaataacccaataaattggatcattgcagattctcagaagtatttcgcagaaaatagacagccttggccgggtgtagcggttcacacctgtgatcccagcactgtgggaggctgaggcgagaggattgcttgagcccaggagtttgagaccagcctggccaatatagtgagaccctgtctctacaaaaaataagaaattagctgggtgt

SEQ ID NO: 250745 - DNA, 577 bp, Homo sapiens
gcttaggacctgtccccctgggtagctcacaacacctcaaacatagcagtcagaggccacccgcgaaggccctcccacgctccagccaacttctccgcacttcccaacatcagactttggtcccatcttctttgtttcctttcacttccctttcccctgcatcattcattcaacaggtacgtgttgagcatctattatgcaccaggtgctgtttaagatgctggtaatactggagtgaacaagacagacatggtctctgctctcacggagcttacattccagtgggaggttacagaccgaacaaataacccaataaattggatcacctgagccaaggaggtcgacgctgcagtgagttggattgtgacactgcacttcagcctgggtgataaagcaagattctgtgtcaaaaaaaaaaaaaaaagagagggaaggaaagaaggaagggaaggaagaaagaaaaagagaaagaaggaaaaaaaggaaagagcgagaaagaagaaagaaaaggaaggaaggaaagaaagaaaagaaaggaaagaaaaagaaaaagtgacacccagtcgaaagaagaaag

SEQ ID NO: 250746 - DNA, 369 bp, Homo sapiens
  misc_feature (46)..(46): n is a, c, g, or t
gaggattaatagtataatgtaaaagctggcagcactgaaaaccctngcacttacccagctttcacatcagtatttgggaaatattgttaagctcatttgtcaggcggggattctgaggctcagagcagttccagaactttctacagattattttgccttgtttgcacttcagcctgggtgataaagcaagattctgtgtcaaaaaaaaaaaaaaaagagagggaaggaaagaaggaagggaaggaagaaagaaaaagagaaagaaggaaaaaaaggaaagagcgagaaagaagaaagaaaaggaaggaaggaaagaaagaaaagaaaggaaagaaaaagaaaaagtgacacccagtcgaaagaagaaag

SEQ ID NO: 250747 - DNA, 224 bp, Homo sapiens
tgattgagatgaggaggagctggtttttattggggtgaaatataaagatattagttgagttttgagcatttgttagaggttcctatgggatattcaggtggaggtgcattttagtctggagttcagagagagcaggctggagttagaagtttgcatatagataagtaattaaagctacaagggagaatggaccagctcacattggagtaatgagtagaaaagaa

SEQ ID NO: 250748 - DNA, 345 bp, Homo sapiens
ggaacttctggaaataaaaaaaaattggatggtgttaacaacagattagatactgcaaaaaaaaaaggtcaatcaacttgaagacatagcaatagaaactatccaaaatgaagctcaaagagaaagacagatggcggggtgaaagtgaacagagcctaacacggtgaaaacccatctctactaaaaatacaaaaaattagttgggcatggtggcacgtgcctgtagtcccagttactcaggaggctgaggcaagaaaatcacttgaacctgggaggcagaggttgcagtgagctgagatcatgccactgtactccagcctgggcaacagagcgagactctgtctc

SEQ ID NO: 250749 - DNA, 534 bp, Homo sapiens
atgtagtcccttctttccaggtgtcttcctgaagagagaaaaatttgtagatcagagagatgcaattgggagctccgtagtgaatctagttagaaatgagtagcagaaaaaataggaaagacccgtctctcaatattatggttgcttcccaaaacaaaaccagttgatacagcatgaaggcaatttaaaatgatagatatggacatgctgccttacatttcatatcacctctttactaaatgagaattttttggatgcatagggaaagtttgcataatattgaaaagtttgactttctggaatctatgtgagctcaggaatatatttggggatcttagcagaggccagtggtagcctattaaatctaaaacaattggctttgtttttaaaaccagctgctattttgtagtttcatttaaagaaaaagtaccttctattcatttgcagaagttgctttattggattctatggtcattgtatatcataactatatcttttttgttacctgaaataaacatgtggcaattttcctga

SEQ ID NO: 250750 - DNA, 990 bp, Homo sapiens
ggtaaccaagctacttcactatttatagtactttataaatgatttagaattgttatgcagttttttcaaagaagtattcataaggtaaatttagaaaattattttaaaacgaaagtgatgcccaccagatggtgctatttcgcctgttttatctgcgacaataagtaggaaaaatgaatatagaacttcaaaaaagtgtatggaagatctagaatatttgggcattgtattttgggtgtagatgagctcagtggaaggaagcattcaaatattctaaacttgtgtttagtactgtatgtttatcttgataaaggtaaagatgaattcccagagttaatatgccagataaccttttatttagtctaaatgttaagtagattttttgaaaagttgacctatatgcaaattttattaacttcatagctgtatatgcatgaaaaatgaaattatttattagatatgtgttaccaaaatttgtttcaagatttctttatattgttaagtaaacaatattactatctcatttgagttacattgtgatttacaaattaagggaaacattttgatttttttatgtgtttgtaattattacccagaaacttaggcttgaattcactatttttacaaaggaaagagatgactcttctaaattaatttttgtattaggaagagggcaaactatgtggtacagtgttcacttagatgcagccattgaatgacgatccattagagtcaaaatggttagttagctaatgaaatacacttttcagtaaagctggaaagatttagccagctcttaaaagtgtttctaggattttaatgtagtctttttcccgctgattttattatcactctgtattcttctctggtcatgagattgaaccataaaagtcatgtagatgcttgttataagtatttgccaaagtcatcattgtcagtgattttattggcatgtgtgaaattagagattaaacttgcttttaaatcttg

SEQ ID NO: 250751 - DNA, 302 bp, Homo sapiens
atggttagcgtgctgggtatagatattatttcaaattcagtaagtctaatactgaactcattatctctctactcccaacttgttcctcaccctccttgctccacaatccaactcctactgatctttcacttttcagttcaaatattacttacactgggtgcagtggcttcacacctgtaattctagcactttggggaggccaaggcaggaggatcacttgagcccaggaggtccgggctgcagtgagctgatatatccccactgtactccagcctgagcaacagaacgagactctgtctcaa

SEQ ID NO: 250752 - DNA, 402 bp, Homo sapiens
caaactatagttcattggtcaaaagcacagataatgatctgcttcttgatactgatagtcttgtgggacggagcccttaacctgtggggtctgcattcactccagttagtgtcacaatcgaattgaattgtaggatacgcagctggaatcagttcctgtaagaaagcaccctcccgtatttggtggccggaagtgtgagtgtgagtatggaggagaagagctgatgtttcctcgactgggagaaagaaatttctgttgtttcggctactcatttgtggtattttgttatagcagcctgagcagattactacagtggcctacagcattcctctttctcattaacaatatattttggtaatattccatgccagtagcaagggatcaaccgtacttttttgcatt

SEQ ID NO: 250753 - DNA, 919 bp, Homo sapiens
atctcatattatggaaaattttttaaatccttggaaataaatgaacattctgaagcatctatatgccagatcctgtattcagttctgaaatgagaattctaatgccttaaattacaatggagcttacagaactgtccgttcagtgccatggtgacagcgggagtctctaaagcaaagatcgaagtggtttcacagcaacgattctcagacaattttccaattagttatttgattttttaatgatactatttattccttttcactattatagaattgactatactaaaatacatgtttctggccgggccgtggctcacgcctgtaattgggaggccaggtcaggtggatcatttgaggtcaggagttcaagaccagcctggccaacatggtaaaaccctgtctctactaaaaacacaaaaaaataagccgggcatggtgggacatgcctgtaatcccagctactcaggaggctgaggcacgagaatcgcttgaacccaggaggtggaggttgtagtgaaccaagatcatgccattgcactcccgcctgggtgacagaatgagaccctgtctcaaaaaaataataaaataaaataaaataaaaaatatgtttcttataagactttttaagggccctgggaagtgaaccttacaggcttttagtgatatacgttttaaagcataacacacccattatgacacatatgaccactaacacctacatttcagtctgcgcttatcttctacaggctcagtcctctgtcagaaatactttcctttaaggtcatacacttatgggaaaaaataattaaagaaatataactataaataaaataataatattcatttacatttattatggttaaaccacattactttccttttactctaggccttttgaccccttcccattactactttg

SEQ ID NO: 250754 - DNA, 800 bp, Homo sapiens
aggaaatcagatatttactgtttatgccttttgtatatgggcaggttaacgttggatgaatttaattacctatctatgctatggttagcatggataggagtttaagcatatcaggtgtttcagtttttcttcagtagtacagcaggcctcccagtgctgatgtaaatatttgagcagtgtttagtaccattcttagtgcatattaatttttttatatatccttataattttagttttttaagatctttgctttttcaaagtgttcagatataaaatggtgctaactgtaggatttataacaaggctataactgatgtccttttggatgttcagtatgagatatgcatgacatgttttgatagtcttttgcatttttaatggcttgattcatttgtgcttattaaaaatgttagtgattacgccaatgttaacatccaaaaatcatcagaatggcctgtgttatgcttttcatggttcctgaatagtgatttaaagaaagttacacttttgatcttctttcttcttgtgctagatattacatgtctttcttaaaaacagaaatatatgcattaaatataaagcactaggcagttatgcattactttgtacatttcttaggtaactgaatattttaaggttattgaggaaaactggaactcgatgtttacttgagtaatagttctaagttgagttctactttgattaaagaaatgatcttttaaagcaaaattgtttgctgtagccagtgacagcttatttaaagaaagtgtttaacttatttgattttagcatgttttagt

SEQ ID NO: 250755 - DNA, 204 bp, Homo sapiens
tggggaaaaggaaataaacatatattttggggatcaccatataacccattccaattgtatccagttccttctggaggctctagaggaggatccttcctgcctctcccagctcctgggggctccaggcatccctgggcttgtggccacatcactgcagtctctgcctctgtctacacgtggccttctcctctgtgtctgcgtctc

SEQ ID NO: 250756 - DNA, 616 bp, Homo sapiens
ctttgccagagaattcttagcaattcaactgtagtctaagcaataactcagggctaaattcagggaactgttagcccaatcagatatcactaaaaatgtacttcaccatctattttggagtttataattttggcatttgctaaaagtaggaaaaacagtaacatattactgtgcccagattctaataaatatagctcaattgaaaccaaaactgttacattaaacaaattacactctggcactatgctaaatcaccacagatgttttaggtgtttgatttccaagcaggatggtatatcatttgtttggttcaatatatgaggcaccatttgtagtcttttaggaaataaattagcttttatcacagatttaggaaacttgtctaaaaaaactgtgatcatcagttacagagggaaggaaacatattgaacacaaggcatcatagtagctggaggccttaaaaattatgcacgaccaaaaagaatgatttggtgagagatgtgtagctgattgacaattttagtgtgaattcatattcatttaacccagcagcaatctacataagctatgctttttcccgcctgtagaattctatttctaagcaaataagagaatc

SEQ ID NO: 250757 - DNA, 648 bp, Homo sapiens
  misc_feature (634)..(634): n is a, c, g, or t
  misc_feature (648)..(648): n is a, c, g, or t
ctttgccagagaattcttagcaattcaactgtagtctaagcaataactcagggctaaattcagggaactgttagcccaatcagatatcactaaaaatgtacttcaccatctattttggagtttataattttggcatttgctaaaagtaggaaaaacagtaacatattactgtgcccagattctaataaatatagctcaattgaaaccaaaactgttacattaaacaaattacactctggcactatgctaaatcaccacagatgttttaggtgtttgatttccaagcaggatggtatatcatttgtttggttcaatatatgaggcaccatttgtagtcttttaggaaataaattagcttttatcacagatttaggaaacttgtctaaaaaaactgtgatcatcagttacagagggaaggaaacatattgaacacaaggcatcatagtagctggaggccttaaaaattatgcacgaccacatattcatttaacccagcagcaatctacataagctatgctttttcccgcctgtatttatgtttcttagcttataaagtcccaatatattatatcttttgttgctttggcagttttaatttagagctctgcgttcacagagatgccacctatagcanaaactatctttaan

SEQ ID NO: 250758 - DNA, 2333 bp, Homo sapiens
ttttttatcaggaatggccgatgtgtatgtgatttgtaatcacaagtaatgattcatcaggaaatgtcaatcctgttggaaagattgcacctttacttgcagaagtgacccccacctgtgtcctgacctctccatttacaggctctctcacccatttcccccacctcctttaatttttgctttactgtcataaagtaggactaagattggtctaagcattgcatgttcttttgtgatggtaaatccaaaggaaggcctataagtattaacatttgaaataactgctaattcaggaaaatggaagaaaaaaaaattatttgaaacacagaacccatttcatggcctgcctgatatctgtgaaatcagggctggagctttacttaggattcacatggcctcctaggaaccatgggacaaatgggaaacaggttatcgggggattcatgaagtcagtgagagtaattgcttcttttttgcgggtgaactgaatgtatttcttcaccaaatcttgatgttaacaattaaaaagaagaaatgacatgcaagtaggtcttagcagaaaaatgcaggctgggcatgagtcatgttgttaccctcccacatgctcctacaatccacagagatgcctgtctgcaggttcttgaagttattgttagtatttggtatctcaaatttttcgtcactgttcacatgccactttctctgtgcacagtggtatcctcatttgctttttaacctacactgaggagtctttgtcaggttgcactgattttccaattctgcagtaatgagtaagctcacggcatggggaagaagacagtcagtccaatgaagttctctaaattattttaacattgcctttgaaggccttgactcatccttagctatttcaatgaagaaattcctaccatgaatttaaaaccctaaaaattctgtttcaaattctttgggcattggggtactcagatatcccattgtggaagaattttaagaataaatagaagtttctgttgagaaccatgagcaacatgtttcttacaatgagaattgctatgcattttaaaattgcaaatatatatgaaaattgaagacaagaggaaattgtatttctaacttgattctgatcactcacagaggtggcatattattatagttgggacatcctttgcacccttcataaaaaaggccagctgactgctcagcatcacctgccaagggccactagatttgtgtttacaggggtatctctgtgatgcttgtcacatcactcttgaccacctctgttaataaattccgacagtgcagtggcgatcggagtgtgaacttatgttcccagcatatggaaagctatcttaggtttaaggtagtagaaattgcccaggagtttgacagcaactttgtttcccgggtctaaaatcgtatcccactgaggtgtatgcagtggagcataatacatgcaaatacatgcaaaactccttttgtttcacctaagattcactttctatcttactttcccttcctgcctagtgtgacttttgcccccaagagtgcctggacagcattctagtttctacaaaatggtcctctgtgtaggtgaatgtgtcccaaacctgctatcactttcttgtttcagtgtgactgtcttgttagaggtgaagtttatccagggtaacttgctcactaactattcctttttatggcctggggttaaagggagcatggctcacactggtgaaaataaggaaggcctggtcttatcttgtattaataatactggctgcattccaccagccagagatttctatctgcgaagacctatgaaacactgaagagaaatgtaggcagaaggaaatggccacatatcacaagttctattatatattcttttgtaaatacatattgtatattacttggatgttttcttatatcatttactgtctttttgagttaatgtcagtttttactctctcaacttactatgtaacattgtaaataacataatgtcctttattatttatatttaagcatctaacatatagagttgttttcatataagtttaagataaatgtcaaaaatatatgttcttttgtttttctttgctttaaaattatgtatcttttccttttcttttttttaagaataatttattgttcaggagaaagaatgtatatgtaactgaaactatctgaagaatgcacattgaaggccgtgaggtactgataaactaaagaatttattattcaaaatactaagcaataagtaattgtgatttatttaaagttttgtccattttccatgaaagacatactgcaataaaaatgctactctgtgg

SEQ ID NO: 250759 - DNA, 101 bp, Homo sapiens
ttttgttcagcgctttgccaacaggtgttgacaacttcagaaagtcatggtattggcagcaaggccaggttcagattgagccctgccaccctgcctgttcc

SEQ ID NO: 250760 - DNA, 597 bp, Homo sapiens
ctacaggcgcccaccaccatacccagctaatttttgtacttttagtaagagacaagagtttcaccatgttggccaggctggtctcgaactcctgacctcaagtgatccactcacctcagcctcccaaagtgctgggattacaggcgtgagccaccgtgcctgccctgagacttactgttctaatgttcattgtgaacgttagaaattggtgtgctttttatttattttgttagtttgcccattctagttaaattctgaagtgtttttataccaggttaaaaaaaagaaccttctagtagtttagtaaggttgtttgtatgaaggaagaaaaactttatagagttggttggggaagtatttgaaaatatgcatgttgactttagaagaaaattgggccagatcagttttgatttggacctcaaaatcatctgttcaattgtatactaaaaaagaattaataatgtgttgggcatttagggctgtggttgcctattgtggatgtgtattaggacctagaaatgcattgtaagaagacagagcacagttgtggagacaaatctcagcaatatatgttggctgcttgttttataagcttgg

SEQ ID NO: 250761 - DNA, 516 bp, Homo sapiens
tagaagagcaaagttgacctctccaggtcaaatgtttattttactcatttaaaataaaaaattcatttagaaatatatttcatattttccatgttccttaagtagactctatggaatataattagatcctagcttaatgatttaccacccacaatagtactgtctggccagtatttatgcttgggtacaacaatcctcttccgtctaatgagcagtctctaactatacggcacatttgctgtcatctaagaaatcagataaccctgattactagaactgtatttaaagtaagagtcaacatgacatgagtacgtgtcttcgaaaataatgtaattgagttttaatgaatgagtttcacaactgttctttcagctactgaatggctctgggtcaaagttctcaaagaccctggtgaggctgagaagtctaaccttgaactgtgtgaagtatttctgtacctaaaaatacctattcaaatatatttgaaacaagttattaaagatattaaacataaaa

SEQ ID NO: 250762 - DNA, 431 bp, Homo sapiens
acttttgtccagcattatgaatgtgatgactgtggcatggcttttgggcatgtgtcacaacttactggacatcagaaaatccataaggtaggggaaacccacgaatatggtgaaaatacaaggggctttaggcatcgctcatcatttacaatgctccagagaatatgtacactatataaacactttgaatgtaaccaatgtggtgaaacttttaacagaccttcaaaggttattcaacatcagagcatgcacagtggactgaagccatacaaatgtgatgtatgtcaaaaggcctttaggtttctctcatccctctctatacatcagagatttcatgttggcaacagagtaaacctgactcggcatcaaaaaactcatactcaaaggaagcccttttcctgtaacttttgtggaaaaacctttcaccgttt

SEQ ID NO: 250763 - DNA, 585 bp, Homo sapiens
tctgactctacccccagcagcaagggagcttccccaccaaagcaggagatctggctctcagcattcactttactttcctgtgtgaccttgagcaagtggcccaccctctctgggcttccagagtctgtggcaacacagaggaaagtgaggtgcttgctcagagactcgccagctgtgactggccaggggtttgatcccagtcatttctgctctgtggtgggggacttgtcgggaggggcaggtagaggtgagctcagtagaaccaagagcccccaggacacagggcatccaggaggcctgtgcttccacagcctgttcactccttcatgcacccgcctccccctccccactgcactcctgcccacactgcccactccccaaccccctcctctctctagggctgaaagcaagaggctcccatgggggctggcccgatgattggcagagtcgataaaggccacttggaaaccctcctgctccaggtggttccccgctggcatttgtagctgggattccgaggccagagctgaacccagagatcatttatcacacagcctcaaatggaggcttttctggaaaaaaaaa

SEQ ID NO: 250764 - DNA, 774 bp, Homo sapiens
agactttcttagagccgtgtagagctacttagtagtgatttaaaagaaccaatgctttttttcataccacacaaaccttaaaaattctagttcagtggttttcataatttgttttagaagtggaaccctttcccagtcccccttccccaaagaaaatcttgtacacacacaatcccagaatatagaatagaagaacggagctatacttgtgtttaagggcagatctccactcaacatagcgttttcccttccatagctagaaatctacctatgtagtgtaggtttagattatattatgtaggtagtctttggacgtagtttgaaaactggaaatacagtgaattttttttctttttaagagatatgccccatgtagtatataattgcagtggggaagttagtgaagaaaaggaaggtcataaatcttggtagagacttttgggacttgttctagcagttctctaacaccaacccatgtggtccaaacatggatggctcctagttctttaggactcatttctgtttttgctaagtttgctgtgttcaggtagggaacaccaggtctaatatctttgtgtttagacgtgtgacaaggccacaatatcagatttcttcctagttttctggttttaatataggaaagtcttgcatcagattgatgagatcatgccaaaattatttgcgacatgattcccagtgtcttggtttgaggagagtccatcacagacataccgtgctgtgaggaggccactctcactagttctgcctgagccc

SEQ ID NO: 250765 - DNA, 354 bp, Homo sapiens
ggctgctgttattatccaggatacaaagcacctggcgcagtgcctgcacgtggaatcagggttgtatttatgccccgacgctcgggctgctttgagtcaatgcggaagctctccctgcactccttggggccctccaaccccacagcagtcagagctagttgtgggccagcgcagcggggaggaagtgtggccgtgtggcatggcagcagagcctctttcggttcctgggcctattttaagggttgtgggttccggcctctacccgttcctgggactggagcagcccaggaggccctctcctgaggctgagactctgtgtccttccggacggaacctgaggacgctggaccctac

SEQ ID NO: 250766 - DNA, 809 bp, Homo sapiens
aaagatttggatagccagatgaaaagaaaaaagaggggaaatgcaaaaattaaaggcactttctctttcatggaaaccttctcctcctttctctgctgttcctgctccctctgcttcccctgcatgtccttatgcttctttgcttctaactgactgtagtggctcccaggcaagggggaggtgatgatcttttagagaggtggctcccttcatgaatagatttccctgtaaagggagatgaaggtacaactttctaccgctacctgctgtatttgaggatacaagtttgtgtgcctggtggcctagctctaagtctactttatgttttagaccagattccacctccaggaggtcttatcatctacacaccacacaacacacaactagaaaggcagaaataataaagagacaggatcatgggatgattgagaacttggataaaagactgtgctttggtttgaatgtgtcctccaaatttcatgtgttggaaacttaatccccaaattcatatttgatagtatttggaggtggggcctttgggaggtagttaggattagataatttcgttagggtggggcccccatgatgggacgggtggctttataagaagaggaagagagacctgaactgacatgctcttactctcttgccatgtgataccttctagcacgttatgtcacagcaagaaggccctcaccagatgctggcaccttgatattgtacttcccagcctccagaaataaacctctgttctttatagattactcagtctgtggtattcaattatagcaacaaaaaattggctaaga

SEQ ID NO: 250767 - DNA, 1047 bp, Homo sapiens
tataaaagtttttaattttgattgttagtttattcttttttcccttacacttttggtgtgatgtctaacccagggtcacaaagatttactactatgttttgtaagtgttttgtagttttagctcttagatttaggtataattcgatctgagttcattttttgtatggtgtgaggtaggggtctaaaatcatccctttagagaaaaacaaagtcatccttttacgtgttgatagtccattgttccagcaccacttattgaaaacacctctttcccatcaaattgcattctaataactcttatcaaaaatctatgaccagctgtttttgtgccatcaaaatggtgcacattgaatgtcctgaccattgctcttaagagcatcaacaatgtcaaaacaagaggcaaacatcaggttcttagaaggctgtgcccagtgttattgtccagtttctgactgatgatgaagcatggttacaatggcgaatttgaagtcatttgagatcacagagctggggaaattgttgtgaacctcacaggcaagttaaacaagtgtgatcatcctcagatttcatgtgcaactcaaagatctagaaaagtggcagaattatctgcttccacgtcatcagtttggtttcattatactgacaacttcggctggcatcacagaccatgaagaagcaagatgaaaacacacatgagggaaaaccctgggattcatgttcttggggatataatacatgcaaataaaatgcctcaacagacaaaaacaaaaccaattgataataagtgtaaaggtttatttctgttctctcagttacattccgtgagccactgcgcacgccttggggtaaatttaagtttagttaccaaacttttttgacagcacataaatttgccaggtatttgggtgagatagattgttgggagatttatttatttgtgccaaagtgttttcctatttatttgtttggttccttagactttctctgagtggtagaagtgcaggcctggagaagcctgtatggacttttaggagcactaacagaaat

SEQ ID NO: 250768 - DNA, 399 bp, Homo sapiens
gcgagcactcaccccacgcgcacactcatgaaaccatcccgaacgtcacggcggcgagcactcaccccacgcgcacactcatgaaaccaccccgaacgtcacggcggcgagcactcaccccacgcgcacactcatgaaaccaccccgaacgtcacggcggcgagcactcaccccacgcgcacactcatgaaaccaccccgaacgtcacggcggcgagcactcaccccacgcgcacactcatgaaaccaccccgaacgtcacggcggcgagcactcaccccacgcgcacactcatgaaaccatcccgaccgtcacggcggcgagcactcaccctcaaaggtttatagtcttttattcaaagcagttggaacaacttaaaatgtgatagccttggataggg

SEQ ID NO: 250769 - DNA, 199 bp, Homo sapiens
cccattcctcaaaatggaactgaggaaatcagccttccttattagattcctggcttcagtttttatccacggctgggaaacgagcaacctgcaagactgctttaaacacccttcggcgtggcctgaagacaaaggcacgcccacactggagtgcagttgtctcaaatgtgaactcacttcctgagggcaggcacatcga

SEQ ID NO: 250770 - DNA, 264 bp, Homo sapiens
cagagcggaatgcatacttatgtgttgtctttcaaatgatgatcactctctttgtagaaacccctcagcaattcttttttttggggatggagtctcattctgttgtccaggctagagggctggagtgcagtggtgcagtcttggctctctgcagcctccgcatcccaggagaatcgcttgacctgggaggcggaggttgcaatgagccgagatcgccccattgcactccagcctgggcaacaagagtgaaactccatcttaaaa

SEQ ID NO: 250771 - DNA, 486 bp, Homo sapiens
gatgaaatctttcaagtgtggcgaataacacattgtaagctcctgaaccatgcatgaagtgaaaaataacatttttgctttttgaataagcaatatagttttattgtcaaaccagatatgaaatgctgcaccttaaaatccttgctattaagtaatcctccttactcaagtaatagtgacattgttttcaatagttggtaattgaaatcaacaaagcctgctagaatagactccactaacagctctgttgacatttttatgatatataatcatattttaccatcttaaaaccaagccatagtaaacattaattaggtaccttaattgaatatgccttatgttcatttatggctctgctgctcaaacttttccacaaagtatatagaggaacaaatcccacggggcctggcaccatagtccaaaacattcttcttcaagtgtgtagtgttcctattcgtatcttgaataaagtttgtgcttatgaaa

SEQ ID NO: 250772 - DNA, 671 bp, Homo sapiens
ccctccagcagctgtgtcaagcaggtattattaccctcattttgcagatgagaaaacaatgtcagagaggtcaggagactctcgcacaaacccaggtctctgtggctccaaagcccaggccttatcctgggctgagaaaacagctctgagtcaaggcaaagcagcgcctcctaatatggagacagctggcatgttgctgaggctgagcagtggggaacttcagggatcatgcaatcccgttctttgagaccgaaaaactgaggcccggggtcacgtggccggcttctgattcccagtctagtgctcttccaccacaacagtggtagtgacgctgttctgtaaaactccctcaaagaccactgcagacaggagaaggctgagagggtggaagtcactggggagggcagggcaagagagcaagcaggtgtgcctctgtgctctcatcctatttcaaaaatgcaagtctaatttggtttatttgatgcttctaaataggaattagattgcgtaaaagattctactacttgagagacagagagagaaagagagagagcacatgggcgaacacacccggggctcttcctagccctattgaatgggctgccccagtgggcatatttgtgtcatacaacttagcccttcccatcaaaactggccagccaatgaccaat

SEQ ID NO: 250773 - DNA, 664 bp, Homo sapiens
tattgccagggcatggcatattatgaatattggacgtatctctgggactgacacctaggggatgagaggttcctgccttggccctgcccacaggaggctttgtggcatgtctctggcctcattacctagaaagatgtgactcttctcttctacctgcattcttcccacagagaagattgtgacatcactggatccagcaattagaaaatgtttctctcctgcctgagccttgcccacaggaatattgtgacatatccttgggctcagcacccaggtgatggaactctgccacctgtgccctgtctacttaggctattgtgaagctggtttcaatacccaggtgatgtaacattcctgccaggccactgccttccagggatattgttacgtacctttgtgccaatcaccaaggtgatgtgaatcttttcacctgcctagtccttgttcactaggggataatgatatctattgctggtttcagcaccaagctgatgttacttgcctcttcttcacagattctgctcacagaaaaactaacacatcactaggcccatcagcgaaattattttgcctggccctgcccttaaaagacattgtgacatactacagtgcccagcatcaatgtaatttgtctcctgcctaaaccctgcctactgggggcatt

SEQ ID NO: 250774 - DNA, 421 bp, Homo sapiens
tctaccgttcagaaaagctggtgtgtccaaggaagaaaaaacaggctgtgactacaaacctaaaagtaaaggcaaacaactgccagacagaggcaggaaaacggggaagagcccttggtaaatattgcatgcctcctggggaccccatgggctttgactcaagggggagatgaagggaatttgttaaagaaagaagtcactgagacagacaaaagcttccggcacaggaagttagttcgactaaggataccgaaatgtaggaatttgaatgggttcctgggtgtgaggttgaagtgaaacttgattgaaaagaagctgctggtggtgagtctctccttaagctattcctggcttctgggtagttggtgtaaactctgtggtccttgaataaagtgtccttgagaaatttagaaggttaaat

SEQ ID NO: 250775 - DNA, 894 bp, Homo sapiens
atttttatgattcatgttcatcctgttttattccaaagcaccaaagcactttaccgaaaagccccttggcccagccaaaaagttcagggccaggagccaggacacctggactccagatctgcatgtggaagatttggaacgttattggtggggggggggtctcaagttctctgtaatgtggcaagtgccatctgtggaggactttacaattttacatacatcatctcatttggccttctgatccctggtgagagaagcaaattaaacaggattgctattctaactttacagatacgaaactgggaccagggaaggttaataaggcactcagattcacacactattaagaaggtggggaagttgggacttttgattccaaaccctttgctctttcctagtcaaaacaataaagtcagttctatgcctcacttttcctttttttttttttttttttgacatattataatagggggtgtgtgtgtttgtagaggcagcatcttgctatgttgtctaagctgatctcgaactcctgggcttaatcacttaagacctcctgtcttggtctcccaaagtgctgggattacaggtgtgagccagtgcgcctagcccaccatgcctcacttttagcgcagtgtgatcctacacaaattgccctgtgtatattccaagggacgatctgggtttgtagggccagaaacacgtgcagttctggggtagcggggaggtggtcggtggctcttttaacaaaaaaataccaaatgatgaaaacaaaattaagttcagggccttgggcaggtcctgcaagttaggggcctagaagctgaaatttcattaacatctactagtggtaaatccgcttctcctacatgccagtgccctctgggaaaaaaaaaa

SEQ ID NO: 250776 - DNA, 1012 bp, Homo sapiens
accatcatcatcgtgggactgactttggtggaagtccttggttacatgtcattattgcgtttccgacaagttataaagttgtcattaccctctggatagtttacctttgggtgtctctcctgaagactatcttctggtctcgaaatggacatgatggatccacggatgtacagcagagagcctggaggtccaaccgccgtagacaggaagggctgaggtccatttgtatgcacacaaagaaaagagtttcttcctttcgaggaaataaaattggcctgaaagacgtcattactctacggagacatgtggaaacaaaagttagagctaaaatccgtaagaggaaggtgacaacgaaaatcaaccatcatgacaaaatcaatggaaagaggaagaccgccagaaaacagaaaatgtttcaacgtgcgcaagagttgcggcggcgggcagaggactaccacaaatgcaaaatccccccttctgcaagaaaggctctttgcaactgggtcagaatggcggcagcggagcatcgtcattcttcaggattgccctactggccctacctcacagctgaaactttacaaaacaggatgggccaccagccacctcctccaactcaacaacattctataactgataactccctgagcctcaagacacctcccgagtgtctggtcactccccttccaccctcagcggatgataatctcaagacacctcccgagtgtctggtcactccccttccaccctcagcggatgataatctcaagacacctcccgagtgtctggtcactccccttccaccctcagcggatgataatctcaagacacctcccgagtgtctgttcactccccttccaccctcagcggatgataatctcaagacacctcccgagtgtctggtcactccccttccaccctcagcggatgataatttccaccctcagcggatgataatctcaagacacgtgccgagtgtctgctccatccccttccaccctcagcggatgataat

SEQ ID NO: 250777 - DNA, 384 bp, Homo sapiens
ctttattctgccttagtgtttctgaaatctggagtctcctttgcgctcctgctgaacagttgtaaaaactttttaatggtttttcagtctttgcttccagtggagttcagcttaagcccattctccatgatgaatgcaaaatcatccatctgaacgcaaatctgacctgtttaaaaccttcggtggctttacatttgcctcctacattgtaggaatactccaaggctggcaggggccccacaggtatatgaatgcttaacaaaagaataagacaattagtgcttgtattgcaaggaaacgtaactcccatctagttgtattcattgccttttccctattacatagaaaaagacaaaaataaaccactatcttggccagacaaaa

SEQ ID NO: 250778 - DNA, 256 bp, Homo sapiens
gaaaggtgaaccttagcagcagcaaggcagccatcacctttgctctctgaagcctgcggtagggatggatatgaattagctgtggcgggaggggctgagtaagctctgggaccacgtgactctgctggacacagcaggggaaggcagtggtccaggcttcccaaaaaccagccttgaggaataaagataacgctcccaattttcagaactgctctgctcactctgagtcagagtggaaaatactgactgctgcatc

SEQ ID NO: 250779 - DNA, 285 bp, Homo sapiens
cacccctccaccctaacctgtgccatggttttttccccttattgtttaagggaagaacagatttgtaagtatcccaaaaaggcttatttcctaaaggacaaaggtttatttttttgtttcacagaggtggaattttcaaaagataacgtttacaatagtttacaaaatatcaaatagtcaattctcagtagttgtaatagttatttctataaaattgccacacactctgaaagagctaatactgaaccactgcttctaggagaaatacaagtttagattgctgca

SEQ ID NO: 250780 - DNA, 427 bp, Homo sapiens
catcattataagtcttctccagatggttatttctcatgtaaaactaatggtagatattcatagaatttgagattctttcatatgtagtaaagtctggtcttttacaaaattattgtgtatattatattgcttagaattttccaacatgaattattatccagttatttaatatgtttaaaatcctaatgatttctttttccttctttttaatttagccttttatatttacataactaccataagatgttaacagatggattctttttcctgtgaaatgtctatcctcccaattatgttatttagagaatcatgagccagtgtttaaactagaatgttatccaaggtactgtctcactcgtactgtattttaaaagtagtttgaaaagtgtggaatatggatttgccaatagacttgggtctactaaga

SEQ ID NO: 250781 - DNA, 219 bp, Homo sapiens
tctctgtcatttaagttttcattctagaatgaagttctgatgtggattcccctctcaaactctatatctaaacctgtagtcccactactgtagtctcagctactcgggaggctgaagcaggaggatggcttgagcccaggaggttgaggctgcagtgagcccaaaaatcaggccactgcactccagcctgggcaacagagaccctgtttgaagaaaaaa

SEQ ID NO: 250782 - DNA, 340 bp, Homo sapiens
ggtaaaagtgccagcacgacgcagggcgcgaggattctggaagatgtagttcctctatgaggcgatgcctaagatggctgctccgggtcacagggtcacgtgacgggggaggcgctgggtcggggagtcccttcccttcagaggaatgcctcgaagccggctttcataacgttttgtttttgtttttaaatcaaatgaggtaataagcgggagggccgcaggaactgagactgccattcagtaagcgctcaatttattcttaccaaagtgtttgcttaatgagtaaatctcccaaaccatgtatacatttaatttagaaataaactgtacttttcctaag

SEQ ID NO: 250783 - DNA, 249 bp, Homo sapiens
tggatgtgtaaaagcatgtgacttttcatgcctcttctagatctaaacgctataatttgaatccaaatttattatctgtttaacgtataatcttctcagtgaagaagcatactcctaaggttaatttgttcagtaagaaaatgttaactctgcatttagcccagtaggtggcaccaaccacatccaggcttcaagtccacagagtggtaattcaggaaccatgaaatgctgtgggagagatcggtcttc

SEQ ID NO: 250784 - DNA, 444 bp, Homo sapiens
ttaaagtgagacaaaagacaatgggaaatgttatggacaaaaaaaaaaaaaaaaatgcttattggacaggggaaccagagagcagataatcgtactatcctcaactctgatgctgccaagtgatcctgtaagggaatcacaatttctcttcagtttctctactgacattatttgacaattagttgacagaatactttttaatctagggatataatcaactgttctgtacaataggggcggtcacagagaactcttattgcttgaccaacagtaggtttaacatttgaatgaacagtaagcattgaatcttgatagcatcaactatttcataatacttcaataaataaggacagtgacagtgattttatgtttgcataaaacagggaaaggctaggggttatctctcaatactttctcccaaaacatttaaaccacttctgtttg

SEQ ID NO: 250785 - DNA, 234 bp, Homo sapiens
acccagcctgtttctgattttagtgtcctatctaagaaactgtggcataatctaaagtcactaagatttatacttatgttttattctaagagttttatagttttcagtcttacatttaggtcttttaaccattttgagttacattcatttttttttacatgtggatatctagttgtcccagtgccatttatttaaaatactattttctaattgaagggtcttagtacctttgta

SEQ ID NO: 250786 - DNA, 407 bp, Homo sapiens
cttgtttatagagtggaaaaaggaggtcctgagtctgttgactacagtttcaattacgttagcgcaaagcccaagttagcatagggaaaatgatggctgtccactggaattaggaaacagccccccatagaggcaatttccagtctcaatgcactctgtttttttgttgtttcagtaaataaatcaattagtcgattaggtatcagatgctctgaattttttaagttggttttctgcatttgagtggagtttttatttttttgcattaacatttgtaagaccctatgagacactatgaaaagctaaatattcgtatccagtctttgtgattcttaccatcattttcccttggtaacttgaaattgggaacaaaatgtttcaattggaagaagtaaaggaattttggg

SEQ ID NO: 250787 - DNA, 478 bp, Homo sapiens
atggacaaggagttagagttctgggggttggccctggattccagtcctggcatagccaccacttagctgtgtgaccgttggcaaatcatatatcaacttggatcttaattgcctcatttggaaaatgagaggtctaaactagcttttcctcttctgacttcacaattcggtaatttgtgactattgtgatttcttaagacatatgcctccacatttcaaagcaattaaatacacttaaacacaaaactctgtgaaaccaaaactgagtcatacccttaagaaggtacctctttggctaagtgttaaaagatacattaggatcttgcaggaccctcaaggatatcattatgaataagttattttaacataggaccaagaaaatgttctacctggttttttgtttgtttgtttgtttgttttttgagatggagtttcgctctgcactccagtctgggtgacagagagagacttaatctcc

SEQ ID NO: 250788 - DNA, 525 bp, Homo sapiens
attgtgtgcttgtaggatgaaattgataaacaattattttaccaactttcaaaattacatcatagagataatgtcctttgactattgggtgttcacatatttggcatgttatgaacaactttctggaagataaaggccttttatctcatacttaatattaagacaggaaccagtgtgctagcaatggcttttgggtttgatgtgatatatttgtatgtaatgattttttaaaagttagggtgaaaaatcctctcatacaaaacaaaatagtttttactgttatgagaaagtagttattaattacttataaaacatgcaagtatctttatgatatttggtgatttatttttctccagccatcttgtcttgttgttagtggggaaaaaaatagggatgctctttatctatgaaaatgtgaaaagtatatacacattttaactatacatggtttccctaaaaattcttcttctgtttttaatcctctaaaatgatcattgatatgtacaaataaatattgatgatagc

SEQ ID NO: 250789 - DNA, 380 bp, Homo sapiens
tgggtaacagagtgagactccgcttcaaaaaaacaaaaaacaaagaataataataataacgataaatcctatatgttacggtaaaaatcttcatgagaacaaatttactatcattttttctactgaatggatgatcatgaaaaggaatttatttttatttcgtatgatggactgagcatcatgaaaaaaaatactaccttttggattgttgaacttccatcctgagaaatttactattgtgctgcatgctgcagtgatgatcttgtgatctcagcaatgcccatggggcaatttacatcgggactcgtttcatctctagaccttcacttacctgagaaagacaagtgtcttttgataaataaaatattgttaaatgcaat

SEQ ID NO: 250790 - DNA, 867 bp, Homo sapiens
ggaagggagagaaatcacacactttgatcttcgcaaaaagcaagccatggaagacagctctgttcctcactgcccctgagctccctgccggccacctactgcagcttccggcagatctcaaccagcagcctccacgtcctcacttgaagtcatcctcacccaggttcactctggggaggccgcccttgggcctttctctacggctgcagctgacacttgtccagctggtttctcttcctcactctaccaggaaatgctttccttaaacgctttctgcagggcagggtctcatttcctcggcttggagagtagctggtgggtgggacccaagctctcactttcatcccctttctgggacagcgccccgaaggagtgtgactcacacagcagtggatgtgcttggtcttgcaaagtgtgaagtgcgtcctggctcttcctgcccaaagacgggccacagagtctccccgtgctcccttccaacctgttcccattgacgccaactttcaccatgctggacctgaaccagcccgaaacagtctccagggaagctatgcaccagggagaggaggcaagtccaaggcctaccagatggggaaagcagcagcagcggcagttgagtgatcagacacttgagtctcccgggaccctgacaccgtcctgggaatcaccttcttatgtggccacactgtggactgtcaactatacctgcctggattaaacaagcatcttttgaggacttgcaacctgggaggcagggattatcacgtccccattttacagacgaggagcactgagccccagagaagtgcagtggcttgcccaagtccatgtaattgaggtaggatacaaatcctggtagaatcctga

SEQ ID NO: 250791 - DNA, 481 bp, Homo sapiens
cactgttttgggaagaagggcctgtagggcctatctgatgagggccttactgtcatctccccatcatgccaagcagcctttcctttgacccagggctcccacccccactttcagattagctgccagcctctaacactctgctgttttcccttcctgagaagcagccgctgtgaaagctgtttttctgagcatcaggcctgagcataatctgctttagcagctgaagtggtctgctcttcttttactgacaacactttaatacagaaattctgatggccttttagatttatatatgcttctccctcccctctgggcttttcctggaagtaggttggcaaggaacagtatggctcctacctccacaccagccaggaccttgagaagggagaaggtgctgagccactcaagcacatggccaggggagcttagaaaaacagggacttccaacctgcctgggcaatatagcgagaccccgttctcc

SEQ ID NO: 250792 - DNA, 625 bp, Homo sapiens
ggtcaaagggccgcatctggtgcgggccttctagctgcagcatttcagggtgtagggcatcctaggcccagagggcaaaagcatggcctaaaagagttgtttttttcccagatgagaataaattgttaattctttcccaaatcagtaattttggtaggttgactaaaatgttttctgattgcatcagagaaaagatataaatattgatatttagagtgccttttgaccttgagccagtatcatctttaaggtccagttatgtgaaattcaaagtgtcagtgataatggccttcctaatgtacattctttactgtcacttaaactttctgcactcaaaaccatgtggcacatcgctgtttaatatgacagtccagcacgaggccttacattcacaaccttcagtagcaacagcgtcaaatttctatcatcaaaattgtagcatgtaaatatgtcacatgaagataggtttcaatacagaatgtacgtgagagataagtaatgtctacaaacattaaaaattcctcttgactatgtttcaagtttctagaaaatgaagtatgatatttgcaaaaatatagcttcaatgtgttatgcatagaacttaatgtgtgtgaggctatgaaca

SEQ ID NO: 250793 - DNA, 215 bp, Homo sapiens
cccgggaaacagccaaggttccgccgccctccttggcgctctgccccggccggcctgccgggatctcctccccggcgcggtctgcggctcccggggcctcgcaaaccttccaggcccgaggccatccagacgtgcacaccaggcccggcccgcgaggggagacacaggggccggggctgcggcggctgagctccctgggcggctcggaacgcaag

SEQ ID NO: 250794 - DNA, 184 bp, Homo sapiens
cttttcctaaaatggaataagtacagaattagaccccaataaaaatggacatatgatagagatggcaggattaatttaagaagaggtattggaacaaccaactaaccatttataattttaaaattggattcctacttccctcctcactccaaaataaactccagatagagcaaagattttaata

SEQ ID NO: 250795 - DNA, 457 bp, Homo sapiens
aagatggagactaaaatttgtctggaggatgttttgcatgtcatcccaatctttgctattgccccctttaaaacacccgaaaaataattctgcagaattaaagagtgaggggaaggatttgaaattgttcacagaacaataatggggttggggacgccaattttccacacagtcgaaaatctgggtgtaacttatgattccccaaaacataactaccagagcttactgtagaacagaagctttcctggtaacataaacagtcaattaacacatattttgtatgttccatatataatatattgctgtattctgacaataaagtaagctagaggaaatgaaatgttattaagaatatcataaggaagacaaaatatatttactcttcattaagtggaaatgactcatcatcgttctttacattgagtaggctgagaaggtggaggaaagggaggggttg

SEQ ID NO: 250796 - DNA, 616 bp, Homo sapiens
atgaccaggaagatcttcacaaataccagggagcggtggaggcagcagaatgtcaacagcgcctttgccaagctgaggaagctcatccccactcaccctccagacaaaaagctgagcaaaaatgaaacgcttcgcctggcaatgaggtatatcaacttcttggtcaaggtcttgggggagcaaagcctgcaacaaacgggagtggctgctcaggggaacattctggggctcttccctcaaggaccccacctgccaggcctggaggacagaactctgcttgagaactaccaggttccttcacctggtccaagccaccacattccttagtgtggctctggctgtcatctcccagggcagcacttgcccagaaatcactgcctgtggacagacttttgcatgttccagagttgacctgatgataactcgtgaagcatgaattctagcttcctgggaggtggctcagagacagctgcagggagctgaaagaagccatgaggaatgtcacttgtgggccgccaccccccagggatgtcaggtagagcggcctacctctgcctattttaaatccaggttctgcataagacttttggagaaaaaattctaaataaaaaaaaaa

SEQ ID NO: 250797 - DNA, 702 bp, Homo sapiens
tgtgctccagcctgggtgacagagtgagactccgtctcaaaaaaaaaaagttattaacaaaggagactggagtgagacctgcttatgtttgtttccttggtgagctgccacttctttctgacagtccctgaaatctgtgagtcccttgaagccagtgtggttcaagacaggatgcagttataggtgtggttctagagcccaccttctcagcttccagtcccaaccctgcactttctacctgggtgatcttaggcaaatgaatccacctctctgtagaagtggaatggcctagtgccagcccaaagagtttttgagaggatttagtgtgtgccattgttgtaacatgggatgggggaagagggggcctcgaacaagagcccagcaacttctacgtggggaaatacgggatgatgcagatgcttcccagagcagccagtcagctgcatcgtcgcagaattcgagcccattcaagaccttctagtcctagagaaagtagagttacatttctgcttcagatacacagagggttgggagcaggttttaaatatccttgtccatctacagagttcacttgaattctgtttgaaggtctgctatccaaatgtgtctgaccttcaaatgtgggttcagggagtgtatatttggggcaacttaaatctatgctcccaggttgaaaaaaaaaaaaaaagaaagaaaagaaaa

SEQ ID NO: 250798 - DNA, 298 bp, Homo sapiens
gtatcctaagtacctttaggactctgggctctggatgctatgtggcaacagaaaattgaaaagtgaagtgaaaggatgccaaagaaaactttgaaacactttaccctttggcttggagataccctagattacgcctgacattcatactgagtgtattcttccttatactttctgctgatttgctgtatttgattatacaggttgagtatcctttatcctaaatgcttgagatcagaagtagttcagattttagacttttggattagggatattcaacttgtatgaactaacatcagta

SEQ ID NO: 250799 - DNA, 768 bp, Homo sapiens
gaggaaaggataaataggtagaacacaaaattttgggggcaataaatttcctccggatgataataaatggtggatacgtgtcatcatacatttttcatattttttattccttcttatactacaaagtattttggcttctctttttgaatacctttcaacatttttaaatacaaaaaacagataatacatactaatgagttgtttaataacatggtacaaaaatatgatcaatggatcctcaatatgttttaaaattaaaaatgtgagttaagtgttatgattctaaagtccttatgaatagagtgatagagggactgataatgtgtagacataagaacaaaacatcccatcagtttctataactgcatataacaacacaaagtgttagttgttcaataagacacacatgaatctgagatcttattaaatataaaaatttactaataattttaggaccgtggtgtagggacaagagtgactttattaaatgctaatctgccatttaacatctgactaactccagtccaggaatgccgccaaaatgtctagttgatgtattattgctccttatgtaagaacacctattcacagaaagtttcctccaaaacaacccttatagtcacagaaattataggctgaaatgtctgcaaccacttacacgttccttctagcatacataggcttttcccccaagatgtaacccgtgggtctgagagttcacggtgtaaaaatctacctgtgttgtggttgcccaaggccactattctt

SEQ ID NO: 250800 - DNA, 595 bp, Homo sapiens
gacagggtctcactcttgcccaggctagagtgcagtggtgtgatcatggctcatggcagcctcaacctccctggacttaaacgatcctcccacctcagcctcctgagtagctgggaccacaggagcgtgccactatgcccagctaactttttcttattttgggggtctcctatgttgcccaggctgatctggaactcctgggctcaatgatcctcctgcctcagcctcctgagtagctgggactacaggtacaccaccatgcccagctaatttgtttgttcttgtagacatgggatcttgctatgttgcccaggctgaccttgaattccaagtgatcctcccacctccgcctcccaaagcactgggatgacagttgcagtccaccacactcagtcaattctcaatcttgacatcatctaaccccaaaacctgggcttatcaccactctgctctactatctcccctaactttgggacttgggaatgtaaaagacacagctcctagttcgattttgttgttttgggaaaggagagtactgagttgaggccacttttgtgtgagtccagggtcctgaacatccaccctctgccagcct

SEQ ID NO: 250801 - DNA, 395 bp, Homo sapiens
ctcagagagcctgcccaaggctacacagaagttcagcctggattaaaacccagacctgacttcagagcctgtgctcttaaccacaccactgattttccttagaaagtcccagtggagtgcagttgtgctcagttaaaccatgtgagtatttgacagaggtgagctgcaggagccacagggcccagggagtctgaggatattttgcaatcccttttcaacctatgtctgctttgtttttatttttatttatttatttatgggtttttttttttttttttttttgagacaagagttttgctgttgttgcccaggctagagtgcagtgagctgagatcacgccactgcactccagcccgggcggcagagggagactccgtttcaaaaaaaaggaagag

SEQ ID NO: 250802 - DNA, 488 bp, Homo sapiens
ctttctacctaattggttagacatactggcagcacagtgtaatgaactggcctggagttgggaaatgggaatttgaccttcattcctgacaggaagtagaggaaccccagcaaagtcgtatctcagagcttcattttcctcatctgtaaagttttaaaggttgattaaattatctgtgaggtctaattctgttcaaatagccagtggtgataatctcatttgtatactgtcctctgtattcatggctcaactttggcttttatatttagtccctaaatagaatacatcatttaatgtgtagcttccagacaagctgtgtcttgcggccatgacctgattgttgttaagtgtgaggttttctgaacccttagcagaaggacttttaatgtttttacaacacactattgtattgctataaattgtgaattgctttaaaagtacatgtttactaataaaaagaagtacaggccccctttattttattgtgc

SEQ ID NO: 250803 - DNA, 338 bp, Homo sapiens
ccacagtgattagatgaaaaaattatttgtagataggataatctattgactgaattatcttttgcagatatcagctggttggatttctcaccaggattgtctatagaagttaactgatttatgattgttaacacataaatatggccacttatccatttgcctcaacttccatggatgctacctgaattgtttgttcatttatttactttttcaacaaatatgtgctgggtgctgggcttggtgctgagtgcatagtggaaaacaaagcagaacagtctctcatttagatttcttaatctagtgggaaagaaacaataaatacatagtagcaatgagtt

SEQ ID NO: 250804 - DNA, 440 bp, Homo sapiens
tatcaaaataatcagtggtctccatgttgatagagccaatggggaattctcagttcttatcttccttggtgagtcattagctaacaagttgatcactcctatctcactgtaaaactctcttcactggctgccagtgcactacattccctcatctcctggccattctgcttcagtctctgagtcagtaccttctcatctccctgacatccaaatattgggtgttttaaagctcaatttctggaattcctctcttgtgtagccacagtctctgggatttcattccatttcatagttctcaatatctgtatgttttagcatttatatctccaacttgtttttctttctttagctctaaatagtaataatatcagctggcatccaacaagcttcacatgtctgaaactgagttcctgtttgcaattcaacaacaccctgcaaaa

SEQ ID NO: 250805 - DNA, 1134 bp, Homo sapiens
tggatcctgacaccaaactcatcggaaacatagcactgttacctatcagaagtcaattcaaaggacctgcccccagagagacaaaagatacagatattgtggatgaagccaactattacttcaaggccaatgtcttcttcaaaaactatgaaattaagaatgaagctgataggaccttgatatatttaactctctacatttctgaatgtctgaaaaaactccaaaagtgcaattccaaaagtcaaggtgagaaagaaatgtatacactgggaatcattagttttcccattcctggagagcctggttttccacttcacgcaatttataccaaacctgcaaacaaacaggaagatgaagtgatgagagcctatttacaacagctaaggcaagagactggactgagactttgtgaggaagttttcgaccctaagaatgataaacccagcacgtggtggacttgctttgtgaagagacagttcatgaacaagagtctttcaggacctggacagcgaagggagcccgggcagccgccatctccagagccctgggcagcattttccagcaagatgtacacaatcttttgcctttattcgtaacgttttatatagaagagagaagagcatgtctttacttgaaaaactcttgatcaagaatttgggtgggagaaaagaaagtgggttatcaagggtgatgtgaaattttctgcagcattaagctggcgcttaataaaaataagtaacaaaaaaaattctcccttacctccctcgtccatttggatgaactatatgtcttttaaggcaacatatattaaaatgtaccttatttcccactttgatcagacaattcattgattattgtttttagaacacaaggtctcaacaacaaatgaagttattaaacaggaattgagggcagacgctagacaatgacaaaaactgagtccttttcaaaattactctgaagagacctttagggaccacaaatgcttttgagactgatctaagtgatgaactagcccctccacccttccctatccagaagaatacacatatgaacactaacacaaccatcttcagactgcttcaggaggtccacacaccaactgaagccatcatgaactctctacacatccat

SEQ ID NO: 250806 - DNA, 1265 bp, Homo sapiens
  misc_feature (493)..(493): n is a, c, g, or t
agagaattcacactggtgagaaaccatatgcatgcaaagaatgtgggaaagccttcagccaaagctcagctctcatacaacatcaaagaattcacactggagaaaaaccctacaaatgtaatgaatgtgggaaagccttctcttggatttcacggcttaatatacatcacagaattcacactggagagaaaccatataattgtaaggaatgtggaaaagccttcagttcccactcaggcgttaatactcatcgaaaaattcatactggagaaaaaccttataaatgtaatgactgtgagaaagccttcaaccaaagctcagctctaattcagcaccagagaattcatactggagagaaaccatataattgtaaagtgtgtgggaaagccttcagacagagttcatcccttatgacacacatgagaattcatacaggggaaaaacttatatatgtaagaatgtgggaagcttttagtcaactcatccttactancatcaaagactcataattgagaaaaactgtataaatgcatgtaggaactgaagttatattccatactgagtatcaaaaaattcattgtggggagaaagtgatgaagagtagttaatcataggtaaaacttcagcattagacctcatcacacatcagagacttcatgatgcagggtaaccttgggaatgctagaaaagcttctataaaatgtttattcatatgttcttaagttattaccatgaaatggagaatttttaagattgcagggttagtatttgattgtctagtgatgtacgataacagccaccagctttcctgagcatcactgggaagcctgctgtttatgtacaagtacagccataaaatccagacacagataaatctaggaatctattttttgaaactattatgcaagccagtggtactagaaagaatgttttagaaaagaaatatgtacaggtgacccatagctacctcactgtcactaaaatgttttttaataatcttaaagcagattctgcacttcatggtaaagactttgaattgtttctctgctttctaagccattcacctgagaagaaaatcactccataaactatgcagacgtactgtctttgcgttttcttcctgactacttgttccaaactctgagtcagatctaaagtcactttaagtcacagaacgcatggtatttcacttgtttttctcattaaaagtgattacctttgctgtattaaattgataagtaaaggtcattcagacaaccaaagct

SEQ ID NO: 250807 - DNA, 1202 bp, Homo sapiens
  misc_feature (430)..(430): n is a, c, g, or t
ggggagcgcggcgaggatcccgtcgtctcgatgctggagaaaaaccctacaaatgtaatgaatgtgggaaagccttctcttggatttcacggcttaatatacatcacagaattcacactggagagaaaccatataattgtaaggaatgtggaaaagccttcagttcccactcaggcgttaatactcatcgaaaaattcatactggagaaaaaccttataaatgtaatgactgtgagaaagccttcaaccaaagctcagctctaattcagcaccagagaattcatactggagagaaaccatataattgtaaagtgtgtgggaaagccttcagacagagttcatcccttatgacacacatgagaattcatacaggggaaaaacttatatatgtaagaatgtgggaagcttttagtcaactcatccttactancatcaaagactcataattgagaaaaactgtataaatgcatgtaggaactgaagttatattccatactgagtatcaaaaaattcattgtggggagaaagtgatgaagagtagttaatcataggtaaaacttcagcattagacctcatcacacatcagagacttcatgatgcagggtaaccttgggaatgctagaaaagcttctataaaatgtttattcatatgttcttaagttattaccatgaaatggagaatttttaagattgcagggttagtatttgattgtctagtgatgtacgataacagccaccagctttcctgagcatcactgggaagcctgctgtttatgtacaagtacagccataaaatccagacacagataaatctaggaatctattttttgaaactattatgcaagccagtggtactagaaagaatgttttagaaaagaaatatgtacaggtgacccatagctacctcactgtcactaaaatgttttttaataatcttaaagcagattctgcacttcatggtaaagactttgaattgtttctctgctttctaagccattcacctgagaagaaaatcactccataaactatgcagacgtactgtctttgcgttttcttcctgactacttgttccaaactctgagtcagatctaaagtcactttaagtcacagaacgcatggtatttcacttgtttttctcattaaaagtgattacctttgctgtattaaattgataagtaaaggtcattcagacaaccaaagct

SEQ ID NO: 250808 - DNA, 264 bp, Homo sapiens
cttatcagcgacatgaagatcaagctgattaataattttaattatattgatcacagactagtaagaaatcctgtgggaacatggtagtaagaggcaaagcaatgaattaatcattttatttaatcaaaaatcatttaagtagattcctttatttaaaaaatacaataaaatcaaattaaatttgtgcatatatatatggctatctgaagttatgctgagaaaatatctatactcaaattatgttctagataggtcttatggtca

SEQ ID NO: 250809 - DNA, 432 bp, Homo sapiens
atgactttgaggggtttaagacttcagtggaggaagtaactgccgatgtggtgggaattgcaaatgaactagaatcagatgtggagcctaagatggcatggtcttccaatagaaggctgtttcatctacattgaaaatctgttgtgtagtgtagccacttcatcagtggtcttacctcagtcttgtggagaacttgctgcagcttctacaccagcacttgttgcttcaacttgcacttttatgttatggagatgatttctttcctaaaacctcatgaaccaacctctgctagcttcaacctttccttctgcagcttcctcagccttcatagaattgaagagagttagggccttgctatggattaggctttggcttaaaggaatattgtggccgatttgtatcaagaccactaaaactttctccttatcagca

SEQ ID NO: 250810 - DNA, 714 bp, Homo sapiens
gagagagagaacttgtctcgagtttttttggggtttttttttttgagggaaagtcttgctctgttgcccaggctggagtgcaatggcccaatctcggctcactgcaacctctgcctcctggtctcaagtgatcctcctgtctcagcctctgaatatgctaggataacaggcatgagtcactgcacctgacctgtttccaggtttttactgttataagcagtgctccaattaatattacatctccatattgggcacttatgaggtacatctataaatacattctcagaaatgaaattgctatgtcaaagaataattgcacttttcatttgcatagacatttccaaattaccctcctggccccaattaatattcttacatttccatctttgggcacctatgaagtatatctatagatacattctcagaagtgagattgccatgtcaaagagtaattacacttttactttccgtagatgtttccagattatcctcctaagaagttacgttggtttatactcctaccaactgtgtattttctccacataattaagtatggacactaaagtaacaatagtccctatcttacatggttattgtgaggattaaatgaagtaaatgccaaaaggtacctactaagctgtcagcaaatgacttatattattaatataattattgtttttttctgaactttattaccagaaatattataaacct

SEQ ID NO: 250811 - DNA, 661 bp, Homo sapiens
agaggggtcgtttttgttgtttttttagtgtcgtcaggagactccctccatcagaattactcaggctgattgttttgagtcctgggacccagttggtatccagaatcttggcttgtttgcctaggaacctgcattttcacatccccatctccacacccctggtgattcttatgcatataataatgtgaaaagcattgcattgaagaattgctaaagggtgtcagaaaacggattaacaaaatcaggaagctttaattttcaagattctattaacctcaaaattcaacatatccaaaaattgaatgtctttttctccagtgttttctaggagagtgccaacactagccacccaagtgctcaagccagaaacctggaaatgatccattactctttcctctgtctctggagtccccatgttaaattagatgtgtttgtttgtgagacagattctcactctattacctaggctggagggcagtggtgcaatcattgttcactgcagcctcgacctctctgggctcaaggatcctcccacctcagcctcccagctactcaggaagctgagacaggagaatcacttgaacccaggaggcagaggttgcagtgaactgagattgcgccactgcactccagcctgggccacagagcaagactccatctc

SEQ ID NO: 250812 - DNA, 515 bp, Homo sapiens
aacgttgagttccgtacccggtgattgttggcccctggagttcgcggtcctttcggcactgactgactcggcgacctcccccgcaccgcgcagacccctgcaggaccctagccgctcacctgccgcccccggctccagactccgacgacccagcgtgggtctccggggatccagtgtctagagttgggggggtctcgaggacgaagggaagttttttaatgctacactttttgtttaaggttcttgcctggaaacattaaaacacacacacacacacacacacaaatttgtaggctggtctaaatgtctccagctctatttcttaatttcttgtaaatcatgaatcataaagtgtcatggctatacggtgatcctattagaattcctcacagccgtttatttgggctttttgtgaaaaactgcatatcatgttaaagaaaaaatgtaatgaattatttaaagaatccttgcatgtataaaatggaaaatacaacctatgcgtgcgtacctgtata

SEQ ID NO: 250813 - DNA, 488 bp, Homo sapiens
gctgctcaggccagatggatgagcttgtttgtgtgtgaatgttcctctcaccttcctgatggtgaggggggcgatgtccacttccagatgctgccaagtaggacttcctgttttcttcctcttgtccccccccgcttcctttttatatttacaaagctctctggttatgtacagcagggaaatggtgcctgagagactccttcagatagcagttccttctagtttgagtcaggaggcactgcgtccccagagtccctgcatcctcattcatgaaatgctggcagtcaagggaacagccctggctatctcatgaggttggccttaggatttaagtgagataatgtgtttgacaatggaatcccagcatgagcttgggtttcggcttcattaaaaaattagaatttattgtagaaaatttagaaaatagacagaagaaaataatcctagtaccttctcttactatttgatgtatatcccatatttttttc

SEQ ID NO: 250814 - DNA, 354 bp, Homo sapiens
gataaccatgcttgcctgctcaccctcggtgccttaaccacaaagagcagcgaaaggaaattctgggctcagctgggtgactcacgcctgtaatcccagcactttgggaggccagggcgggcggatcacttgaagtcaggctggtcttgaacttacctcaagtgattctcccgcctcagcctcccaaagtgctgggattacaggcatgagccaccacgcccggccagtataattaatttttacaactggtatggtttaaggagcagtgcttccaagaaggccaagtaaggagctcagcaaatcctctccctaaaaagcaatgacaaaactgaacaaacttgtcacaaaaaaaaa

SEQ ID NO: 250815 - DNA, 469 bp, Homo sapiens
agacatggctcttgcctttaaggagctcagcatctagtgggggcaacaggaaggagaccaagaaatgacacaggcatgacaatggcaccggagagaggtacacagagcatttcagaaatacaaataaaggtttcatgttggcctggagttggggataggaatggaaaaggaggggcagaggcaggatctgtgaagactttgcagatgagaagcaaattaaatcttcaaggatgagtagaaattaagggaatggggaaggcactacagccaggagtggcatgtgtaaagttaccaaggcaaagagagaaggagcattcagagagctacgcattacccatcgccgttgaaaagaaagaactacacaggtgttgtgtgtaagaaatgagcttcagaagtctgcaaagatcagaaaaaagaggcaggtctgtcctgctaagggccacacaccacagagttattgaggtatgtt

SEQ ID NO: 250816 - DNA, 704 bp, Homo sapiens
acaaagcatactttttccaggaactcatcctaaaataattccttcaagaattaacaactttattctgttatttctatgttgcttattatcagtctcacgtttgccatcttaaattttcatatacacattactaattttttcaaatgtgttaaattatttgaagtaagacattgtcttttttccccttaatattaccaaagcctttaatatcactgagtcctcttaaagattttttttctttttaaaatctgttgaataagtgatctcttctataaaataggtaaaacttacctgttgctagatgatctgggatatataagtgttcagttatggttcttatcatatcagagcatctctgaataatgagagggttataccttgcccacagctgtcttgaccacagaatacattttcccaggacctattgtccacattctcatttggtgcagggacaatgtagccatgtcactacagttctaagaccagaaacagatgctcatggaatcttttttctgaagtatttggaactgatctgttgtacatttagtggaaaacacttcaaataacttttaaagattgtcattgaaattgtaaataaataaaatgtgttaaatgacagttgttcacatttattaaatctggttgtaggcatatggatgcttttgtttttccctctactctgttgtatattaaaattgtttttc

SEQ ID NO: 250817 - DNA, 390 bp, Homo sapiens
gccatttgtcgttccattctgagccctttctgtctctccatcttcaccctcaataatgccatttgaattgtccatgcagctcccatgatgataattttgtaaagttggttgttttaggaagaagttgatttctttgatctcttgtctggtttgtagctatgttcctacttattctttccaggctctgccgttcttcggaaactcctccatgttacagtgtttgtgaaactgcttgcactttgattatttttaatgtgcatttcaccagaaacccatagtactcctgtactgggagtgaatcctgcctgcagtgagtgctgatgaatggagggatgagctaatataactaaaagaaaaggaaaacaattaaactcaatgccaaaacgaaca

SEQ ID NO: 250818 - DNA, 363 bp, Homo sapiens
cagttcaagaggcctgggcgatgtgaacctgaacagaatgaggtcagctgaataagaagaaatacaccagtaaaggaagatttgcagatttctcacccttcactgggccttcttgattagccacagtgacttggatcaattccgtcatttcatgaaccgatattttccattctctaccctttcctctgactctggtcttcttgcatctctgcctttccaaatggcttctcaactatataatttttaccaactcagctctaatgatagacgaaaccaacattaagctattgaactcatatattttagcatgtgcctacactcttgaaggcagcaatgaataaaaattctgctgggaaaatatag

SEQ ID NO: 250819 - DNA, 541 bp, Homo sapiens
cgtatgtaagtaatccaaacaaaactttgcataaatattttaagaaactgaaatatcagaatagatgagccattgaataaaaatcaacatcaatcacaacctacctcattttaaataagctacaaatcgaagtaaataatttgatgcgagtggtcatttctgctttcaatctgagaggaagtcagtaaattccttttgctgttacaaaagtagtttaaattccatgcaggacacgagtctgggcaatcacatcagcctcagcgtaccaaagagcctagagagacagcagaacaatgtctcccactcgagctacagagggaaggtggtcttaggttttgctgcagtaactggaagcttaaatttaattttcagtcagagcctgctgtttaagctccctgtctgttctgcaatctaagctgaatgggtactttttttttcttttctaatattcttaagtcatttggagaaatctaatacttatattttcaaattacatcaccttagctaaagatatattttcctctctataaaattcagttgc

SEQ ID NO: 250820 - DNA, 450 bp, Homo sapiens
ttagtcatgaagtaccataggaagagatggtcacaccctaacattgtaaagcaaaagaaagcttcaggaatcagaccataacagcaacactttgctgaaaaatatttaattagaaggcaataccacatactcacatatgctaaggagtgcaattattttgtatgtttactggaaaaggcaaaaaatttttctgtagttaaaacaatatttttgtttctagaacttttgttcttgtactgattcattaccattaaactgttttcacaaaatgccaaagaacagaggagagctatacatgatttgaccaagacgctgcaagtagtttcagaaactgaggagactatttttctgacaatgtatataagatctataatgaaatgattggtaaaattataaaatggttctggaaataatcatgtaaaatataaaatgggaaattgtaaatgtgat

SEQ ID NO: 250821 - DNA, 389 bp, Homo sapiens
tgacagcccacttgacaggtggtcaggaagaagtcaaatcttctagaggagaatcaaccactgacctaccagaatccaccatggacctggagtcacccacagatgtgtacctggagaacacccaggctttccaaaatgaagcaaattctccattagctgtgatgatcactgctatccactactttctaagaagattctatgcttttgagcatgcctaccactacactataggagatctattgtagaagactagaaaaacataggatgtgcccagctgaggcattgatcctggctgggtagggggaattgttcagggatggggaaggggcacttcttagctgtgtctcatcgagtacgggctcaataaataattgaattttgagagtggt

SEQ ID NO: 250822 - DNA, 567 bp, Homo sapiens
gatggtggcgccattttcagcttgctgtgggaagatggtgatggccttgacacagtgtaaatatgtgtcatcttgtgtgtaattccttatagatccagctagcttcttctccagtgtctccttttggagttgtacctgatttcattaccagttgttaatctgaatccactggggaatgggacatttttgcttttgtttcttggccaggaaacaatcctgaaagtcttgtgagaagacatggcaagaagcggagtcaggcacacaccacgatggtggagaaaggaagagataactaattttctatttttagtagagatgaggtttcactatgttgaccaggctggtctccaactcctgacctcaagtgatcacctgccttggcctcccagaagtgctgaggttaacaggtatgagccaccacgcctggtcaaaaatgaatattttaacacccaaagtacacagcccatcattttcttttgcacctcagatctgctgtctaggatcattattcctttgtatgaaatatatattctaaaatttcctttgttaagggtctgttggctgcaa

SEQ ID NO: 250823 - DNA, 632 bp, Homo sapiens
aatgtctggaactacccgacatacttgcagcaatttttagccccctaaattaagtcaagtgtatttatcatggcggtgtgccctacaaacatccatgctcactatttcacctttattgtaatgatggtattgtacagaaaatattaaatggtcaggggaggaggaggtgcaagatagagaaattctaatctagaataaggttttgtttgggagaaggcacagttagagcaataaaagctggtaagtctctctgcttcagtatagtgtcattgaagaggcaaatctagacgcacattcatttattttcgaaggtcctacactctgaccatcttgatcctctcacctaagcttgtctagtctagtccagctcaagagagtgtaatattctttttacttctggattaaagaaaaacataccactggcttatttccccatgtgcaaatcggaaatgagtatctatcaactttagaacataggagtacttaatacaataataaagcatacaatgaagacagaaaatgggataaaagtagaacagagagacaaaaattattaccagaatagatgagaacatttggttcatcaaaaataaaaagcccaatgctgaaagagaaaaccaagcaaatgatct

SEQ ID NO: 250824 - DNA, 224 bp, Homo sapiens
tttgttttctttcttccagggacatttgaaaaaaagaaaactatttttcaaagatctttagagctcaatttttaaagctctagattattttcattattttatgctgcctctgcataactaattttgatttcagggctaggagggtggaggtagggtgaggaaatgaaataagtttttgtcatctaaataataaacattatgaattaaacttaattttttaaatc

SEQ ID NO: 250825 - DNA, 363 bp, Homo sapiens
cttaggtattaagcccagcaagcattagctatttatcccgatgctctccctcccccaaccccagccacccccagacaggccccagtgtgtgtgtttccctccctgtgtccacgtggttctcggtgtgcagctcccacttagaacatgccatgtttggttttctgtttctgtattagcttgccgagaatgatggcctccagctccattcatgtccctgcaaaggacatgatctcattcctttttatggctgcatagtattccatggtgtgtatgcatcacattttctgtaaccagtctatcattgatgggcacaaatacatcatttttagattacaaataaagtgttgctttgaggtctctgtc

SEQ ID NO: 250826 - DNA, 551 bp, Homo sapiens
cttgggattagccccagcctctatgaggctggcctccagtccctgctgggcccggcaccctccccacaaagcaccccactctgtgctgggcccttgacatcccagcctcctccaggaacagcccctccacgcacctcttcccagacggcctccgattcagttctcaagacccggggccttgtcccctcctttgagaaggtgccctcagtggggggcagctccctggcttttccgggctcctccgcccacaggattcaggcacggctcagccagctctggtttcatccaccctgaggggcctgtctgtgcataggtgccctcactaaatgcacaagaagcctttactggtgttgctttgttaaaatgtgactgtcatcatccaattccagtttgcccatctacaaaacaggtataagaagagacagaaggcctagcatacccaaaggtctaggccggtgtgcttggtaaatgagtattattattacttctggatggtcgcaaaatacatgaactcttctcttcacccttcttcagtttcatttaaaaaaaaa

SEQ ID NO: 250827 - DNA, 499 bp, Homo sapiens
aaatgcctccctcactttgagtttatgcttttatggttttattttttatgtttaaatctttcctcaatctggagtttgttttgataatgagatgtgaggtataaatcttaacacctccacctccaattggccacccaactgcctaacaccattcattgactaatggcttcttcctctattgatttgaaataccactgttgtcatgtactaaattcttacattcttttcttttctctttatctgtatgttcattgccagcagctaaacctagtttaagttattgtagcttcataaaatgtaaaaatgtctggaagggctagtttgctctgattactctattttttttctgtcagtttttttctaggtattcttgccagactatttccaaacgaacattagaatcaacttatctaggtgaaaattcaacaaaaatcatgctggcagatctttttctccttctctctcctcccccctttcccctttctgtctgtctgtctct

SEQ ID NO: 250828 - DNA, 1948 bp, Homo sapiens
tttaactcaatttcttggaattgctttcagtaactgcttcaggcctctttgaatagcagtgaaggcaaaatcagggcaagtcgtggtgaacagtttggcttttctggaacactgagctgacgccagccaccccactgggcttggttccccaacatctcacagcgaaggcacttgtctgatgcatattaagcttttatgttaccaccgggggctgcctcagaagttactcctctgtgtcctgatggtccttgacttggccttggactgtccttgacctccaataccttagacagttgcaggtgggaacagtgtagcttgaggttctaaaatgctttgctgatggaaaaggttttgttctgaaaagtgaattacaataggaaatggatttgcattactgacactatctgctgtgggctttgcctctattgatttaaagcaaaagggcacaattagtggccttcaaagagaggggaaaaaaaaataacctaactctgtcctagcacgttcaattaacttgtttactttgaagggaaaaaaaacttttatttttacatcaacagcgtattagcatggtgttgccttgtctcatctgtaatggcaagacatggttttgaaaaaaaattctcttcgtttcatagtagtaatgttattttctaacattaagcacaacaacaacaacaaaaaaaagcagggagagcacgaggggttcggtgtataaaaacggtgttctagctgccagacttttattctggatctcgaagagaacagttcattgtatttcctttcctaaaccaatgaaaatgaaaaattagttactaggtagaattctcttccactttctatcccttttccctgacgagatgaaacctgctgggttttgccataaaaagaggtccctgttggggaaatgagagttcagctcactcttcacatcacagtgtaatacagcaggactggctctggaagattatgtagtgcagcactatgcctaagaacagaagaggaggctgagctctggagaaagagggtcacaaagcgttacaggcatttggtgaattttgctcactgcacaggcagttgtgagagcctccgaaccctgtagttcagtcttttccccactttaccagtgtgtgaggcctctctcccacttcctccacttaccacctctccaagatgccagcctcactgtgggctttccctagaaagaaacactggtttctttctatcgtgccctggttagtgttgtttctcacattaggcctctgtgttagaaataaagctgctaaactccatgtcgttatacaacaaaaggaatacagtgacctatccttcattcttctgatagttccctcaactccagctgcagcccctgccaaatactatcatccttaaaagatagacagtgatcccagcactgtgggaggccaaggcagctagatcacttgagtccgggagttcaagaccagcctgggcaacatggtgaaaccccatctctactgaaaaaaatataaaaaaaagccaggtgtggtggtgtgtgcctgtagtcccagctactcaggaggctgaggtggtaggattgcttcaggccaggaagtggaggttgcagtgagctgtgatcgcaccactgcgctccagcctgggtgacagagtgagaccctgtctaaagaaaaaaaaaagacagtgatgatgattatagctaacatttatggagcacttactatgtggtgggcactgatgctacaggcactttacttgtgtaccctgtaataatgagatagggctcgttttaaaggtgaggaaactgaggcacagagagattaagaaagtgtccaagttctcatagctaacaaatgtcagggtagagattcaaccccagactctagattttgcaaatcaaatctctacactttgtcttcaaggtcataatcaactctctcctttttcctta

SEQ ID NO: 250829 - DNA, 435 bp, Homo sapiens
tttaactcaatttcttggaattgctttcagtaactgcttcaggcctctttgaatagcagtgaaggcaaaatcagggcaagtcgtggtgaacagtttggcttttctggaacactgagctgacgccagccaccccactgggcttggttccccaacatctcacagcgaaggcacttgtctgatgcatattaagcttttatgttaccaccgggggctgcctcagaagttactcctctgtgtcctgatggtccttgacttggccttggactgtccttgacctccaataccttagacagttgcaggtgggaacagtgtagcttgaggttctaaaatgctttgctgatggaaaaggttttgttctgctgggagttccagtgctttttgtgcattgcgtatcacctgggtgtcttcttaaatggacagggttctaggcagcat

SEQ ID NO: 250830 - DNA, 829 bp, Homo sapiens
tttaactcaatttcttggaattgctttcagtaactgcttcaggcctctttgaatagcagtgaaggcaaaatcagggcaagtcgtggtgaacagtttggcttttctggaacactgagctgacgccagccaccccactgggcttggttccccaacatctcacagcgaaggcacttgtctgatgcatattaagcttttatgttaccaccgggggctgcctcagaagttactcctctgtgtcctgatggtccttgacttggccttggactgtccttgacctccaataccttagacagttgcaggtgggaacagtgtagcttgaggttctaaaatgctttgctgatggaaaaggttttgttctgaaaagtgaattacaataggaaatggatttgcattactgacactatctgctgtgggctttgcctctattgatttaaagcaaaagggcacaattagtggccttcaaagagaggggaaaaaaaaataacctaactctgtcctagcacgttcaattaacttgtttactttgaagggaaaaaaaacttttatttttacatcaacagcgtattagcatggtgttgccttgtctcatctgtaatggcaagacatggttttgaaaaaaaattctcttcgtttcatagtagtaatgttattttctaacattaagcacaacaacaacaacaaaaaaaagcagggagagcacgaggggttcggtgtataaaaacggtgttctagctgccagacttttattctggatctcgaagagaacagttcattgtatttcctttctaagggttagctgttgttatcattgtcattactaggcagactt

SEQ ID NO: 250831 - DNA, 440 bp, Homo sapiens
cctttgttactgaccgatgcttaatttggtttctgggttttgttagttttttcccctgcccttacctcatttaccttaacgacagctcccccctctagagctcagctagggcaggctgccactgtggattggggggccaagaggcccagtgcaagaagaaagtgggttgaaagcagagttctgtttaaagaattttctgctggaaactagcccagagggagtaaagaggagctttaatgaggagcagctgcagtgccgacgcaacccacatgagacttttttttccccttcgttccacattctgtatagtttttttaaaaatcatgactttgaaatagctgttttgtaaagcatgcctctctttttcttcttgtatgtggtgggattttgctttgttgttgttgttgttgtttcttgaatggccaaatcctcgttttaaa

SEQ ID NO: 250832 - DNA, 456 bp, Homo sapiens
cgctcttatctagaagggaggataagaaatctaattttttagtggggacacatttctgctcaccaaaaagtcagggccctaaagaatatattttggataggccaacagcagtgtttgccgcaaccctcaattcagctctggatgtatctttgcatagccagggatgcattttttaattaaaactaagaggccatgccattgctgaagggtggggaactggagcagaagaaatgtctctgtccttcatctgctgtcttcactaacagtctctgaaagtggaaggggcagtaaagaaatttactttcccactgttgtgaaatttaccaccctccttataaggcagaagtggttacagttgctttttattttcctgttactatacccaaggattgttgtgagaatcagaagacagatatgagaaatcatgttgtgaactataaaatgctattaaatgac

SEQ ID NO: 250833 - DNA, 757 bp, Homo sapiens
aactatagacaagaaatgagagagaactgggatagtctaaggccacatggagatctgtcttgcactatgttgacttagtttagaggccccggctggagaggagtcaggcccttttcttgtggggtcaattaagtccgatcctcaattacctccttgtttgtctctcagacccttggccgctattcagtcgccatatgtgcctcggagccagaaaccacaaaaaaaggttttcgcctactgctgccctttatccctctggctcaactctgacgctggtgctcccacgagtggccccctgtggcatggcacgctgtgttctccccagggaactctttaggagacaggatgtctgaggtcagaagttccccctggtgaccaaaccagttaagactgatgagattcaagatccagctcacttcgcctttgaagaacctccaacttcattataatttattttccatactaaatgacactcccaccagtgccatgacagtttataatcaccatgacaatgaccagaagaaattatgaaaggacaaaaaggaagaccacaactccggttctgaggaattctccacccattcccagaaaagacaagaatactcctccccttgtttttaatgcccaaacccttcattaaagatgtcccatatctgtgacttcctgtctctcattaattgagaagttaatctgtgagtcaagctcccacttcttaagtccatggccattgaataaagcctgcactgcttgatgctca

SEQ ID NO: 250834 - DNA, 583 bp, Homo sapiens
agcctgtttgccctgcctaaccctttcattcctgcagaaaccacaaaaaaaggttttcgcctactgctgccctttatccctctggctcaactctgacgctggtgctcccacgagtggccccctgtggcatggcacgctgtgttctccccagggaactctttaggagacaggatgtctgaggtcagaagttccccctggtgaccaaaccagttaagactgatgagattcaagatccagctcacttcgcctttgaagaacctccaacttcattataatttattttccatactaaatgacactcccaccagtgccatgacagtttataatcaccatgacaatgaccagaagaaattatgaaaggacaaaaaggaagaccacaactccggttctgaggaattctccacccattcccagaaaagacaagaatactcctccccttgtttttaatgcccaaacccttcattaaagatgtcccatatctgtgacttcctgtctctcattaattgagaagttaatctgtgagtcaagctcccacttcttaagtccatggccattgaataaagcctgcactgcttgatgctca

SEQ ID NO: 250835 - DNA, 636 bp, Homo sapiens
acaagaaatgagagagaactgggatagtctaaggccacatggagatctgtcttgcactatgttgacttagtttagaggccccggctggagaggagtcaggcccttttcttgtggggtcaattaagtccgatcctcaattacctccttgtttgtctctcagacccttggccgctattcagtcgccatatgtgcctcggagccaggtaccagacaaccaggaacaagcccactgaaattatttcaagtcatcaagcctaagcctgtttgccctgcctaaccctttcattcctgcagaaaccacaaaaaaaggttttcgcctactgctgccctttatccctctggctcaactctgacgctggtgctcccacgagtggccccctgtggcatggcacgctgtgttctccccagggaactgtgagtataacaaaactgtaaaactctttcaagcttctcttttgatcttcctctggcttcaccatacctcatccacattaatatggttaaatcagccatctgatgtcttgtcaaatgacaatgttttcctcccatatttttttggcaggcctttgttttccttgttgaattgtagaaattttgttttataaaggatataaatcctttgtaagatgcatgcat

SEQ ID NO: 250836 - DNA, 444 bp, Homo sapiens
agccctggactatttctgccactaccagggttttcaacaaagaacagtacgtgtgacaaaaatccatctgtttgtttctctttttgaattacttaacctttgaatattcaaccttttgccctcttttgctttatgttttcacaccatcttatcctcaaagaaggggaaatacttatcttcttctgtaagcctttgtatctaagaacacaaatgaagtatttagggacaattgctttgatttttacaagaaaactcagtggctattttgggtgacggtatgctttgctagcaaatagaaatagagaaaatctggcatctcaaggtgaaataagagtaaacagtttccagaattttctccctctctccttccttaataattgcaaattgccactgcttataaccataatagaaactagacatgtctcccggccttcctcaatgaaa

SEQ ID NO: 250837 - DNA, 137 bp, Homo sapiens
cctgctgggctaggtctccactggggccagcctcagtttctcctcaacaggtttggggacagcccctcctgccctgcttgccccacactgtctaggctcacttcctgccacagtgtaataaagcctcctaccctgca

SEQ ID NO: 250838 - DNA, 443 bp, Homo sapiens
agcccctctcatggttcccatataagtctttgggtgaggtgcaggtggggcatcctttgaaactcacccagatgacccctgaaaaaagtcatcactgttcaaggtgaaggttacatttccggtacctcctcctttctcatacaaaaggcaaaatatggctgggtgtggtgggtcattcctgtaattccagtactttgagaagctgaggagggagaaccgcttgtgctggagttcaagaccagcctggaaggtctgaacatagggagatccagactgtacaagaaaattaaaaattagccaggcatgatggcacttacctatagtcctagcgacttgggaggctgaggtgagaggattccttaagcccaggaggttgaggctgcagtgagtcatgattgtgccactgcattccagcctgggtgacagagtgagaacctgtctca

SEQ ID NO: 250839 - DNA, 380 bp, Homo sapiens
ggacacatgactaacgctttccaacctgccattttcatatgtatcatgcactctccacctcacaataattctgcctcccaaaagagcatattatagtcaatgaggtttaaggtttcttcggttcagtcatgtggaagttttgctttcctaaaattatagctggatcactttgattggatttgggatattacccaaatgctaatcaaatattaaaaggcaatcttttttgttatgtgattgctacagattactgctcttacagtttgattcttcaaattttcattctcagaagggaatcttaaacccagtttgaagggtaccttgtccacaaccacttttaaattttggctaacttcccaaccttccaccatgttctggga

SEQ ID NO: 250840 - DNA, 306 bp, Homo sapiens
gctgcaaaattttgtgacagtgacttctgctttctggcaaaagtggaaaaacaagaatggatttatcatgctgtttgaaacaaatttaaaaatccagcaaaatatatgaaacaatggttttctggacagtggctatcaggcagtgcaggagagtgataccacagagagagaaaacaaacaagatgaacattatgtttgccccagattacttccttaagagcattttcaggtcatgacacaggggtggggatcactggtagattccagcagattccctaggttgagaacagggaactaagggtccaa

SEQ ID NO: 250841 - DNA, 474 bp, Homo sapiens
cccaataatcttctgtctgtctacattcatctcagaaaatcctactcccccaagagtgattggtaggggatgtcgggggcttctggaatactgtactattctctgtgggtgctggttacatatctagtgttttcagattgtgaaaattcaatgagcctgtactgtatgcaatatattctcttttatgtgtgtgttatgctttaacaaaaagtttgtttttaagtgtatgtcccttccaagtgccctcctctctatagaaccttccctgatcaagtaactggaagtgatctctccatcctccaaatagttacagcaattatacctctcatatgatactaacacatatgagctgagcaaaccttatttcattactggacttcaatttacttaaaattggggaataactgacatatatttgaattccctagaatgcttagcatgttataggtgtttaataaatatttctgaatgaat

SEQ ID NO: 250842 - DNA, 299 bp, Homo sapiens
ccatagccaggccagaacaatcgagccgctacacgggtggcttacccccaccccgcccacactcactgctcgtcgcctgcccgtggccacccgtagtgccgctgccgtcggcctcgcgcagctcgcaccccgccgctgccacctgacgccccgtgcgaaccggggttcgaggggagaccctgatccatgccatctgagtacagattagtcgggactgggactggcgaagattgccgaaaggcggcggggaggaggaggagggtgtcatcgctacagtgagcaagcagatctcgcaggag

SEQ ID NO: 250843 - DNA, 338 bp, Homo sapiens
aacacctattgtttcagcaatggataaattatttagaaaatcaacaaagaaacatcagacttaaactatattttaggcctagtgaacatcatggtcacatacaaaacatttcatccaacagctgcagaatacacattgctctccactgcatgtggaacttcctccaaaatagattatatgttcagccacaaaataagtttataaaattttatgaagattgaaatcatatcaagtatcttttctaaatataatagtataaaactagaaataaataacagggggattttggaaaagtcacaaatacatggaaattataaaatttattgagacaaataaaa

SEQ ID NO: 250844 - DNA, 491 bp, Homo sapiens
gcggccggcgaggtggagcagtacaagctggtggagagcgcggacacccccaaggccagcaagggcagctacatggaggttcgaaccggggaccctccggaacgcagggactgtgagctgggccggccgggccccgacagccagagttcggtggccgagatctccaccatcgccaaggaggtggacaaggtcaaccagatcatcaacaactgcatcgacgcgctcaagtccgagtccacctccttccagggcgtcaagtcggggcccgtgtccgtcgcggagccgccgctggtgctgctgtccgagccgctggccgccaagcacggcttcctggcgcccgggtacaaggacgccttcggccacagcctgcagcggcaccacagcgtggaggccgccgggccccctcgtgccagcacctcgtccagcggctccgtgcgcagcccccgcgccttccgagccgaggccgtcggggtgcacaaggccgcggccgc

SEQ ID NO: 250845 - DNA, 234 bp, Homo sapiens
tcattaaaaattttctactgtgtgtaatcagggaaataatgtgcatatctgtaatttgttactttgttttgctgttttataatattcttgcatttataagagacatcatttgtaccaaatcctagctgattaatttgcatatcattgtatcagtgtgatactttgcagtaaattctgctactaaggtacaactttcagctgaataaacatagttcatctccatgttaagcttca

SEQ ID NO: 250846 - DNA, 431 bp, Homo sapiens
tgttggtttcggccatgcggtttgtggtaactggttccagcagccctaggaatctaatacactgcccatggaacaaatcctttcttgaccaccaatggctgcatgacttatcctgagaagatcatggggattttggatgccaggtcaacccttacactcagcaaggaagtggaagggcctcagtttcaaacactttgtaaacacagaggttaggtcatttcctctccaataagccagaagctgagctgtccctggcagcaaactgtgtgtcaaatgcctggcgggtttcaggttttactaactccagagtgacgaaacatcaccacctctaatgccagaaagaagtcagctgttgtacctgtgtcacaactaaatttactgaagtcagggcagctgaagtaatctataaaacttagcatgtcaatttcaat

SEQ ID NO: 250847 - DNA, 461 bp, Homo sapiens
agtctaatagtctaatctagccctcttaagtgcagagatgttttccctctgaacacccgtgtgtttcagctctgttcctcttccaatgcccttccacagggaacaaatcctttcttgaccaccaatggctgcatgacttatcctgagaagatcatggggattttggatgccaggtcaacccttacactcagcaaggaagtggaagggcctcagtttcaaacactttgtaaacacagaggttaggtcatttcctctccaataagccagaagctgagctgtccctggcagcaaactgtgtgtcaaatgcctggcgggtttcaggttttactaactccagagtgacgaaacatcaccacctctaatgccagaaagaagtcagctgttgtacctgtgtcacaactaaatttactgaagtcagggcagctgaagtaatctataaaacttagcatgtcaatttcaat

SEQ ID NO: 250848 - DNA, 456 bp, Homo sapiens
ctaaatggaagcttatcactgttcatagtcatgggatcatttggccaatgggggaacctgggaggcagtccttcctatgttggttgaaggagagctttgcttctcgtggcatacagggacccacccttatggcatgacttcaaagttatgtgacatggtggtgcagctggaagatgaggaaagtgaacaacgttggagaggccccacctactcttgactgtctctgctggaagtgattcaacactcctctttaaatttcattgataaggaaaacccccatgagagaaagtaacttgatcaacatcacacagctaggtgggagtggtggcttctgcctgtaatccaagcactttgggaggacgaggcaggcagatcgcttgagcccaggagtttgaaaccagcctgggcaacatgaggaaaccttgcctctataaaataaacaaaaattaaccagga

SEQ ID NO: 250849 - DNA, 418 bp, Homo sapiens
aaaccccaacagaataaagagcagataagagatagcatgttctttatttaataggccaagaagcagagcaggaattggtgcatatattcataattgtttctttgctatttgattttaggacatctggccacagcctgtctttccctactgttaccctcttcctggatacacctgtgtgtgctaagaacattgttctacttgattctacaaacatgccacctggtttgatttcttaagctttgcctatgtgattctccatcccactgtttctacttgcccatctccaagttatacttgaagggttggttgaaatatccctcttctgtgaagtttttcagatacctttagacagaaataattgcatgtaatctgtgaccccaccatgatttaaatatatatatttttaaaagcgctcatc

SEQ ID NO: 250850 - DNA, 474 bp, Homo sapiens
ggctggtttcgaatgagcccacgtagtctttttttttgagacagatttcgctgttgtcacccaggctggagtgcaatggcgtgatctcggctcactgtaacctctgccttccaggttcaagcaattctcctgcctcagcctcccgggtagctgggattacaggcgcctgccaccacgcccagctaatttttgtatttttagtagagatggtgtttcaccatgttggccaggctggtctccaactcttgacctcaggtgatccacccacctcggcctcccaaagtgctgggattacaggtgtgagccaccgcgcctggccgagttcatgtagtctttagtgacgctttgcacagtgaaaggtattctctgcctgtactccccgtaggtgaacatgccttctgcaatgcagaatgactttggaaagattgtatgtgtttttttttatgataaaaataaaatagaatttttaaagag

SEQ ID NO: 250851 - DNA, 464 bp, Homo sapiens
gcggccgcttctcccgctttacggctgctgaaaacccggcctggcccggcagccgtaccgcagacgagcccgcgcccgcgccgctcagttttctgaaagaaaagatcagtaagatcagttatgggctatgatgaaaccattttaagtctctgttctttgccaagctccaaggtccatgaaatctgatggtgtaggaaatgctcatccagtatctgcagtgctgtttaaagagaaaaggcccagtgtaatttcggcttattttacatcaaaaatcacctccatcaaagcagagatcaatgatggttaacatgaatattctgaagtttgtatctacatctcttacacaaatgcatttcgtttaagctttcctgtaataaagatctcccagctggacgttcaaaatagcttttgatgtcttagggcgtcttttattcaaccctaggtaagccctctattggtgacct

SEQ ID NO: 250852 - DNA, 524 bp, Homo sapiens
tgtgagtaatagtgggtgactcattgcaagcaggggagtcttgcagcttttgaggtgaacaggcaaaggggagaacagtgatggtggccacccaagggccaagtgtttatgtcctaaatgtcaaaatgtctttgatctcctgttaaactttgcagctgcatcattcacatgaatagttgcatttttttttttctaaaaatgcaacatattttctaaagcatttgtttttaatctgggatgattctgaggtgggaggtaagttggtggcaggacatactacatgatttttgttattgttattatttttaaaaatcacgcattgctggctttcccctatactcctggagatgccatcatgtatgtatagctaattctaaaaagggcttgtgtgactcttcatatgagaaggggtggttatttgtggcttgaaaaaattgcttgggtgattctgatctttctctttcactctgctgaaaaccattgtttcaaagccaataataaatatctaaagaagttttacttca

SEQ ID NO: 250853 - DNA, 856 bp, Homo sapiens
tcccacatgacagcaagaatcactgaaaatgctggacccactgtcaatgctgtattgttgcaaagaaaatgtttatcttgcctaactttaaagtcacacatgcctgggaacttccaactagaacacagctggcaaagcagacaccctctccctgcagcctcgttgaaaatgacctcctttacatttcctcattgagaatctgcccagtgaggactgtggcagaagagagtcagggagaattttctagctgattagggttagaaaatgaagacgagggctctcttgtaatcagcaggaagctatgatagaaaagaatgccttttaaatttgaagtgcaaaactagaaaatagaaaattattaggggggtttgatatgaagtttcggaattcttttcaagactgtgtgttttgaagttaagattttaaataatgtaggaaggtacagtctatactgatgggttcaggatatgctaacccaaaatatggcaccttggtgtttgagaaaatggcggaagcaggaaggtcattctcaccatccacctccctttccccctcctgaagcaggtcttctttgaaaggcccctccctgtaaccagaagaaaggaacattcttacctttgaagtcacagggtcacagagaagaatctgaacaggacttactaaattcttccagtttgtcaccatttgctcataccatctttgtccagttatatttctccaaagctatccactcttcatcaaacttagcataaaaattgtaaaaccttacacatttcttcaggtcttccttttccttaggaagcctcccatgtcacatgaaacttaaataaaataaatctgtatgcttatctcttgt

SEQ ID NO: 250854 - DNA, 918 bp, Homo sapiens
tttacaataaaactgaaatgccagaaaaagagacaacctactttaaggtcaccactgcctcccagcaaggacgtttaaaaataacccccgatctgccctgtgctcacaactctcattgcgccagctcaatggcaggcccagtgccaccaggacagctatgtggaaggttccgggtggggcacgggtgtgtgttatggaggaggtgagggaggctgttctcataacaatgctggcatctggtctgtgggtccaccctgccgatgtctgtgaaagggcatgtggttggcccctgttagaccagttctgatgccagtttccagctaaagtgaaactgctccagacctgagtgggaagtgcactgtgagaagtcaggttcacctggagggtatggatgccagggtgtggcattgggtggacatcaagcacatccctcagggagtcctggggctattacctctagaagctgctccagcaactctgccagacaggatcataaacttttgcagctaaatcttggggatgaactttttcagtaattgtcaagctgtgccccacagattgctggtgattctggggcagtgatatggtttggctctgtgtccccacctgaatctcatgttgaattgtaattcccaatgttgtgggtggcagcgggggaacctggtgggaggtcatgaatcgtgggggcagttttccaccttgctgttctcgtgatggtgagtgagttatcacaagatctgatggtttaaaagtgtgtagcatttccccttctgctctctttctctcctgccaccacgtgaatacgtgcttgcttcccctttggattccaccatgattgtaagttttctgagacctcccagccatgcttcctgtacagcctgtggaactgtgagtcaattaaacctcttttcttcgtaa

SEQ ID NO: 250855 - DNA, 352 bp, Homo sapiens
atctgtttatctgttctttcacccttgtcttgatgagtgttgcttcatagtaagtgttgggttgggcagtgttagtcctccaaccttgttctttccttccatattgtgttggctattctaagtcttttgtctttccacataaactttggaatcagtttgtcaatactcacagaataacttcctgaaattttcattgagattgcgttgaccctatagatcaagttgggaataactaacattgttacaatattgagtcttcctgtctgggggcggtggctcacacctgtaatctcattgctttgggaggcagaggcaataggatttcttgaggccaggagttaaaagaatagcc

SEQ ID NO: 250856 - DNA, 362 bp, Homo sapiens
taaatcaatactcaaagattcaccccaaaaaaaacataatgaacacacacatatccctattctcaactacaacacttacaaacatcattctgcccctatttcatctgttcctctcttttccttagaaacatcttttgcatctacgccataaaataagtttatattcacaatttaagttgaagatttccaaatgcccccggtcatcactgtccactggtactcctcggatggtcatttttcgtgtgcaggagacagtttgttctcagtccctcaagaactcatttaaaagtcatattgtaatgaaaatactttgactgtaaaaattatatcttgggaaattatacatgtattcactatcttgc

SEQ ID NO: 250857 - DNA, 437 bp, Homo sapiens
tactagcagtgcttgacactgaaaatgttatgcgttaaaatatttaatttcattctgagttaacatttttcccctgaagcattattttatgtaactggaatacccagtcacttcaggatacagtcattgtcgaaatccttgtaggttaaatattggattttcctcagatcctgaggttcagcttctgtgtttttttttgtttgtttttttgtttttttttttttgtttttgaaacagagtcttgctgtttcacccaggctggagtgcagtggcacaattttggcccactgcaacctctgcctcccgggtttaagtgattctcctgcctcagctactcggaaggctgtggccagagaatggcgtgaacgtgggtggcagagcttgcagtgagccgagaccgcgccactgcattccagcctgggcgacaaacaaaaaaa

SEQ ID NO: 250858 - DNA, 678 bp, Homo sapiens
tccatagttaaccttctttctaccatgcctcctgtgagaaacagtttaaatggtccattttcaaggcataaaaaatctgagtactggcagccaaccttgcggacgtgacgaacctcacgactcaggcacctagaaagtcacacttagcgaacaggatgtagaggaggggtcagcccatgaaagggggccaggcgcggtggctcacaccctctagaacagaccattttccatctgatttgttgtttgtaatcccgatacctggcatcacacctgcacctggaaatggtatgtggatgactggcgtttgctaattgttgaacttgggaaattacatatggcaaataattgtatggaaaatataaaggcttacaagtaaactaaggaatataacttaagacaatttaaaataaatctattagactgcaaaaataaaatgtatgtttagaaaatcaatgtggaaattctgttttaggacgtggtagactagactatactggacaaaccttcctgctgagaacagtcatatcagcttgacacaatattaacattatctgttgaaggtgctgaagagccaagtcactgagaattttcagggccaacatcagggcaaaggggaacagtcaaagagaatgagcttagtgccacattaatgctcaagagccaaatccaaaagtggtg

SEQ ID NO: 250859 - DNA, 418 bp, Homo sapiens
gtaggtaaggagctattacggctgggtgattttgagcatggctctctgagcctcagcttgagtatctgtaaaatgggttgacaacaatttcattgcagggctgtggtgaacataaaatgtactaatggctgtgagaggctttataaacagtcaggggtgggattgagcctaagttatatatatatccattatgtctgtttgcatgtgggtcgatatatacatgggtatacacagagtttgggttgaggggctaatgtaggaccatttcctgcttgctataagctaaacagcgagtaatgctatctccttgttctctttccagctggttctgaggacatggggaccacagtcaatggagatgtgtttcaggtaagcaaggctctgtctcagcagtggtaaggaccaatagccctggtct

SEQ ID NO: 250860 - DNA, 431 bp, Homo sapiens
cagacgagccatggtagttttatgcttattattagtgataaaaccacattcaaaagtatactatttgtgtttttctggttacaccctaataggctgaaaatatgtaataaaataccctaatgactacaccttgagaactaaaccctattctaattgctttgatgcatgggctagcaggataattgattgacactaagaccactcagtaaacagccagctaacagaattagattaatgaaaacatatggtaattacaactgtgcagaacaacttgaaatctacaacgtagcctcaggataaataatcaaaagtctgatcaaagagcaattaaagttaataaaagtctcattgtgcatttaggattaagaagggctgaaagatgaaactgtaaagttttagaagggtatttgatgaaagatttacttcattcc

SEQ ID NO: 250861 - DNA, 319 bp, Homo sapiens
caggccccagagctggggtgaggcatacagtgccttccctgcagaggcagatctctagatgccctggcttccaacaagtggatgagggatttggagacccagagcaatgcttatcctggaaagggacccttgtgacagtctagccttaaaaacaaccacaaccataaaacttgcagcagcagcagcaggctttgtcgagagcctattaaggtccaggtaatggggccttccgtgtgtcactcgtgacccatggcagcttggcccagagtcagagaaatctcaggccaacatccaaaaatgagtgaaaagcaatttaaat

SEQ ID NO: 250862 - DNA, 352 bp, Homo sapiens
cggtcgggttcaagagtgcccgggcctctctgaggaccatgtgtgtaaccccaggatccccagggctccccacggtgagggagatcagaaggaccccaagcagttctcaaagaagaaagaggctataaaaagtggcagcaagggacccttgaggaccgagaggccacatgggagcactgtggctggaggaagcttctccatgattgaaaaccctgcttctcaatgagcagtaactgcgttgaggataaaggagtgagaggcagatgtgtccaaggcacctctgcctcccgagtgacatcctccccggggctgtacactcttgagggcatggatcgcaggggcacaagcactt

SEQ ID NO: 250863 - DNA, 510 bp, Homo sapiens
gctaccagaattcccaggacccccaccctggccactgccatctaccccttcttcatgtttcctcagtgagacccaaggcaaaaaatgaagaatccaattgcaactaaatccaccacctttaccagaattgcctaaaacataaaacgcacattccctgaggatccatggaccaatggcacagtgggtacgtccgagacctgagtcctccctgccctacccctccaaccccgtacccttcaaggccagcctcagcctgccctgacctccacgatagcaatgaatcctctttaggcattgaggatgctgccccagcacggccggaacgaggggcacctggggacacagacagcacatctgtacctgcaatgcccaaaaatgcctggcatgaggaggtcctctatttcatcagtacgacaggtatgccaccagaaaaatctttttagaaagactccagaaagatgaaaacattccaaattttgtttaaaattttattaaaaactagtgttgtgt

SEQ ID NO: 250864 - DNA, 602 bp, Homo sapiens
agggaagagaaagcaggcccagctggagatttcctggtggctcaattttaaccccagcagccaatggaaaaatcacgacttctgagactttgggagtttccacagaggtgagagtcgggtgggaaggaaacaaaacaaaacaaaaacatcaaaccaatgaaataaaataaatcatgtctcctgctagaatagtattggatacctgactaaattacacaaaatagaccataataggatagcgctgtgaatacatccttcccgatcactgagtcacagtgacccttggctgctgctgttctcttctgcaaggttgaagcttgacgtgtgatgaacatgggtgggctcttggtccaccccaggctggggcctgcgccaagcatgaactagctgggaccagtggctgacagaacacaggacttccctaagtacccgtaggtctgtggagcaagacagagcagagttgccatgtcaacacatggggaatgatatgatagaaacaatctttatgactaaaagaaactcatcttcttcattaaaaaaactttggtgtccttaatctctctgaatttggctgtgtaataaacaactggaactgactcaca

SEQ ID NO: 250865 - DNA, 690 bp, Homo sapiens
gtctcacaatcctctccactctaagaagcagggtgagcccacaaggagcaatggagcagggcagcggccgcttggaggacttccctgtcaatgtgttctccgtcactccttacacacccagcaccgctgacatccaggtgtccgatgatgacaaggcgggggccaccttgctcttctcaggcatctttctgggactggtggggatcacattcactgtcatgggctggatcaaataccaaggtgtctcccactttgaatggacccagctccttgggcccgtcctgctgtcagttggggtgacattcatcctgattgctgtgtgcaagttcaaaatgctctcctgccagttgtgcaaagaaagtgaggaaagggtcccggactcggaacagacaccaggaggaccatcatttgttttcactggcatcaaccaacccatcaccttccatggggccactgtggtgcagtacatccctcctccttatggttctccagagcctatggggataaataccagctacctgcagtctgtggagcaagacagagcagagttgccatgtcaacacatggggaatgatatgatagaaacaatctttatgactaaaagaaactcatcttcttcattaaaaaaactttggtgtccttaatctctctgaatttggctgtgtaataaacaactggaactgactcaca

SEQ ID NO: 250866 - DNA, 1806 bp, Homo sapiens
gtctcacaatcctctccactctaagaagcagggtgagcccacaaggagcaatggagcagggcagcggccgcttggaggacttccctgtcaatgtgttctccgtcactccttacacacccagcaccgctgacatccaggtgtccgatgatgacaaggcgggggccaccttgctcttctcaggcatctttctgggactggtggggatcacattcactgtcatgggctggatcaaataccaaggtgtctcccactttgaatggacccagctccttgggcccgtcctgctgtcagttggggtgacattcatcctgattgctgtgtgcaagttcaaaatgctctcctgccagttgtgcaaagaaagtgaggaaagggtcccggactcggaacagacaccaggaggaccatcatttgttttcactggcatcaaccaacccatcaccttccatggggccactgtggtgcagtacatccctcctccttatggttctccagagcctatggggataaataccagctacctgcagtctgtggtgagcccctgcggcctcataacctctggaggggcagcagccgccatgtcaagtcctcctcaatactacaccatctaccctcaagataactctgcatttgtggttgatgagggctgcctttctttcacggacggtggaaatcacaggcccaatcctgatgttgaccagctagaagagacacagctggaagaggaggcctgtgcctgcttctctcctcccccttatgaagaaatatactctctccctcgctagaggctattctgatataataacacaatgctcagctcagggagcaagtgtttccgtcattgttacctgacaaccgtggtgttctatgttgtaaccttcagaagttacagcagcgcccaggcagcctgacagagatcattcaaggggggaaaggggaagtgggaggtgcaatttctcagattggtaaaaattaggctgggctggggaaattctcctccggaacagtttcaaattccctcgggtaagaaatctcctgtataaggttcaggagcaggaatttcactttttcatccaccaccctcccccttctctgtaggaaggcattggtggctcaattttaaccccagcagccaatggaaaaatcacgacttctgagactttgggagtttccacagaggtgagagtcgggtgggaaggaagcagggaagagaaagcaggcccagctggagatttcctggtggctgtccttggccccaaagcagactcactaatcccaaacaactcagctgccatctggcctctctgaggactctgggtaccttaaagactataaaacaaaacaaaacaaaaacatcaaaccaatgaaataaaataaatcatgtctcctgctagaatagtattggatacctgactaaattacacaaaatagaccataataggatagcgctgtgaatacatccttcccgatcactgagtcacagtgacccttggctgctgctgttctcttctgcaaggttgaagcttgacgtgtgatgaacatgggtgggctcttggtccaccccaggctggggcctgcgccaagcatgaactagctgggaccagtggctgacagaacacaggacttccctaagtacccgtaggtctgtggagcaagacagagcagagttgccatgtcaacacatggggaatgatatgatagaaacaatctttatgactaaaagaaactcatcttcttcattaaaaaaactttggtgtccttaatctctctgaatttggctgtgtaataaacaactggaactgactcaca

SEQ ID NO: 250867 - DNA, 1671 bp, Homo sapiens
gtctcacaatcctctccactctaagaagcagggtgagcccacaaggagcaatggagcagggcagcggccgcttggaggacttccctgtcaatgtgttctccgtcactccttacacacccagcaccgctgacatccaggtgtccgatgatgacaaggcgggggccaccttgctcttctcaggcatctttctgggactggtggggatcacattcactgtcatgggctggatcaaataccaaggtgtctcccactttgaatggacccagctccttgggcccgtcctgctgtcagttggggtgacattcatcctgattgctgtgtgcaagttcaaaatgctctcctgccagttgtgcaaagaaagtgaggaaagggtcccggactcggaacagacaccaggaggaccatcatttgttttcactggcatcaaccaacccatcaccttccatggggccactgtggtgcagtacatccctcctccttatggttctccagagcctatggggataaataccagctacctgcagtctgtggtgagcccctgcggcctcataacctctggaggggcagcagccgccatgtcaagtcctcctcaatactacaccatctaccctcaagataactctgcatttgtggttgatgagggctgcctttctttcacggacggtggaaatcacaggcccaatcctgatgttgaccagctagaagagacacagctggaagaggaggcctgtgcctgcttctctcctcccccttatgaagaaatatactctctccctcgctagaggctattctgatataataacacaatgctcagctcagggagcaagtgtttccgtcattgttacctgacaaccgtggtgttctatgttgtaaccttcagaagttacagcagcgcccaggcagcctgacagagatcattcaaggggggaaaggggaagtgggaggtgcaatttctcagattggtaaaaattaggctgggctggggaaattctcctccggaacagtttcaaattccctcgggtaagaaatctcctgtataaggttcaggagcaggaatttcactttttcatccaccaccctcccccttctctgtaggaaggcattggtggctcaattttaaccccagcagccaatggaaaaatcacgacttctgagactttgggagtttccacagaggtgagagtcgggtgggaaggaaacaaaacaaaacaaaaacatcaaaccaatgaaataaaataaatcatgtctcctgctagaatagtattggatacctgactaaattacacaaaatagaccataataggatagcgctgtgaatacatccttcccgatcactgagtcacagtgacccttggctgctgctgttctcttctgcaaggttgaagcttgacgtgtgatgaacatgggtgggctcttggtccaccccaggctggggcctgcgccaagcatgaactagctgggaccagtggctgacagaacacaggacttccctaagtacccgtaggtctgtggagcaagacagagcagagttgccatgtcaacacatggggaatgatatgatagaaacaatctttatgactaaaagaaactcatcttcttcattaaaaaaactttggtgtccttaatctctctgaatttggctgtgtaataaacaactggaactgactcaca

SEQ ID NO: 250868 - DNA, 1166 bp, Homo sapiens
gtctcacaatcctctccactctaagaagcagggtgagcccacaaggagcaatggagcagggcagcggccgcttggaggacttccctgtcaatgtgttctccgtcactccttacacacccagcaccgctgacatccaggtgtccgatgatgacaaggcgggggccaccttgctcttctcaggcatctttctgggactggtggggatcacattcactgtcatgggctggatcaaataccaaggtgtctcccactttgaatggacccagctccttgggcccgtcctgctgtcagttggggtgacattcatcctgattgctgtgtgcaagttcaaaatgctctcctgccagttgtgcaaagaaagtgaggaaagggtcccggactcggaacagacaccaggaggaccatcatttgttttcactggcatcaaccaacccatcaccttccatggggccactgtggtgcagtacatccctcctccttatggttctccagagcctatggggataaataccagctacctgcagtctgtggtgagcccctgcggcctcataacctctggaggggcagcagccgccatgtcaagtcctcctcaatactacaccatctaccctcaagataactctgcatttgtggttgatgagggctgcctttctttcacggacggtggaaatcacaggcccaatcctgatgttgaccagctagaagagacacagctggaagaggaggcctgtgcctgcttctctcctcccccttatgaagaaatatactctctccctcgctagaggctattctgatataataacacaatgctcagctcagggagcaagtgtttccgtcattgttacctgacaaccgtggtttctcttctgcaaggttgaagcttgacgtgtgatgaacatgggtgggctcttggtccaccccaggctggggcctgcgccaagcatgaactagctgggaccagtggctgacagaacacaggacttccctaagtacccgtaggtctgtggagcaagacagagcagagttgccatgtcaacacatggggaatgatatgatagaaacaatctttatgactaaaagaaactcatcttcttcattaaaaaaactttggtgtccttaatctctctgaatttggctgtgtaataaacaactggaactgactcaca

SEQ ID NO: 250869 - DNA, 356 bp, Homo sapiens
tgcctgtttcccacagccccacccattcagggtttgatgatttcattttcttttcactagtttggtaagcatgcactgatacccagagcttgtgtgtttgcattcctcttgtttctggtagaactatgtactttttcatgttttgatttaccatctgtgcttcctgtgtaaactgtctgttcacctcctttgttgcttacggagtggaatctgggcactgattttagctttttgtaaaaaagcaaaaattaataaattttagatgtatcgctggttggttatttcttccaggctgttattttcctcttgtgactgtcctatattttattcaataaaagtttcctattttttaattg

SEQ ID NO: 250870 - DNA, 378 bp, Homo sapiens
tggatgcttgggtggctgcactttgctgctgtgagcacttgtgcacaagctgtcgtgtggatgtgtgttttcagtaacctgcgtgtacgccgaggactggaattgctgggcgatgtaactgtgttaagcttctgaggacctgccagactgttttccacagcagctaaataattgtacgttcctcttagcaatgcataggggttcctgtgtctccatgtcatcaccaacacttgtccaaactaaaaaattctaggccaggcgctcatgcctgtagtcccagcaatttgggaggccaaggtgggcagattgcatgagttcaggagttcaggaccagccagggcaacaaagtgaaaccttgtctctaggaaaaaaaacaaa

SEQ ID NO: 250871 - DNA, 379 bp, Homo sapiens
aaacttgtgtgctgcaaatgatttatcttcaagtaagtagaaagataatccatagaatgggagaaaatatttgaaaataatatatctaagaagggtcttttatccagaatatatgtgtatagaactcttgcaacttaacaataaaaagagcaatgactcaattgaaaaatgtataaaggattcaaatagatgtttctcaaaaaaagatatacaagtagtcaataagagcattaaagatgttcagcatcattagtcatcagggaaatgatgagctaaggaggaggatcgcttgagcccaggagtttgaggttacagcgtgctatgataaagccactacacttcagcctggatgacagagcaagatcctgtctctaattta

SEQ ID NO: 250872 - DNA, 428 bp, Homo sapiens
tccaatcaatcaataataaataaatagttcatgtgttatatttctctgttgagagcaaatacagattaaaatattaattatgaaaacttaaaagttttactgtaaaaatagtgagttaataaataataaatagagattaaaaataataattctgagccctttgaaattaagacactgtattttcatcttcttagagttcaaggcttcacattttacttataaaccagatcactgatcaataaatgattttgtagtaaaagctgagtgatttgcactgtaattttgaatttgaatataatatgaatatgaaatcacctattttaacaccttgaatccacaatttttttaaagtagaatcattgtagaggaagtttttctatttaaaatacaaaaatattctatatagtataagtatgttaaaaaaaaga

SEQ ID NO: 250873 - DNA, 380 bp, Homo sapiens
ctggtggcgtatgagtcatctacagtgaatacgtctctggaactctgaggtctgtcacaaaagaaatctagcccattttctatgtttgatacaatcctttagatgggtatcatgaacatagactgggtttgtttttggtctttgtgctcatacattttcattctatttttattattgggttaatgtgagaatcaataaacaaatataaaaataaagatatattggttgaagtgttgctcaattatattcaaggaggaataaatggtacgtgtctgtcacctctttggctaatgatgatatagagaggataattatagacagtgtttttattctgggtcagtggcaaattcagaattgttcatctttttaagacaaagtga

SEQ ID NO: 250874 - DNA, 372 bp, Homo sapiens
ttattgggcattttcattttggccattgtgagagcagttatactgtttggttgaggtatagtgttaactgttaaagacagtagagtgcttcatgcttgtaatcccagcactttgggaggcggaggtgggaggattgcttgctcaagaccaacctgggccacatagggagacgtggtctctactaaaaaaacaaaaacaaaaacaaaaaacagctaggtgtggtagtgcacacctgtagtcccagttactgaggaggcggaggcgaaaggattgctttagctagagaaatggaggctgcagtgagctaggatcagtgagctatgattgtacccacacacttcagcctggctaacagagcgagatcctgtctca

SEQ ID NO: 250875 - DNA, 1076 bp, Homo sapiens
acacaaatccttacactcctgggtttacattgctgcccccagcatatgcaggtaggatgggtttacattttaaaatcagttgtttgagtcgggtctttttcattctttctttctttttttcttttttttgtccattacctaggctggagtgcagtggcataatcatagctcacagaagcctcaagctcctgggctcaagcagtcctgagctcaagccgacttagcctcccatgtagctgagaccattggtgtgcaccaccatacctggctaattttgtagagacagggtctcactttgttgcacagcctggttggttgggtcttctgtcacaaggacatgagttttgtgtgaatgtcttttccttcttttttgttcagggagaggagaaaggacacatgtcaattttcttgtcacaaagtagcctttaaatggcctcccttccaatagcccactcgctggtggatgaatcatgccctaggattaacattttggccaatggttttggcattcttttggatttggcccagtcttattttcaatgcagagtcatgactatagataccagaagattagagaataaaattcattcatacctttcttggctgttggttgttaccaataaatatttcagcaaaggttcagaccccagaaaaaaacatcaagataggatataacaaatgtgtctttgctcatgtatctagcaggagaaaaagttactttttaaaaaatttaatgcagccgggtgtggtggctcatgcctgtaatcccagcactttgggtgtccaaggcaggtggatcacctgaggtcaggagtttgagaccagccgggccaacatggagaaaccctgtctctactaaaaatacaacaagattagccgggcatggtggtgcatccctgtaatcccagctactttcaggaggctgaggcaaacccaggaggtggtggttgcagtgagccgagattgcaccattgcactccagcctgggcaacaagagtgaaactctgtctcaaaaaaaaaaaaatttaatgcattttaatacctttggtctatgtacccagtttctttttttatat

SEQ ID NO: 250876 - DNA, 1480 bp, Homo sapiens
atcagtcggtacgcacctgaagttgccagatcctagttaagagataaaacgtagagtccttttgttgtccatttgtcagtgcaaatatttaatataagtatttctcccagggaccctatagacttgaaaacagtgactatagattgcagacaattttgatattccagggatctctgaccagaataataagaaattactgtaatttctcaatttctagcaccacacaaattgcatctcacacacacagacacatacacacacaggggcgggtttacctacttctcagaaaattgcacagattcaacgagaaagaataaatagtaattaatgtgttccttaatggctggtgaataataataaaatgttaactaaaacaaaaacaatttttatttttaaacccactatcactaagtgataaagtctaaactgacagaacagcaaattagtacagtcctttgggagggaaatatggtgatacatattgcgaagcaatcctgttatttgttgctttttttttaaatgacaggaaaaaaaacaaaattaaaaaaggctatgtttcataaatcacaatacattcttacaatgaatactatgtaaacactttaaaaatgagacacttgtgtgagaactaactttgaaggaggagcaaggtatttacaaattattctactgaatgatagctagtatttggcaacacctatgtactagggctgtgctgactgcttgtacacttgctgtttaattttacaataaccttacaaggcaggtggcatactaacctcatttaacaaataaaatggaagtggaggcttaagtttattatctagtatcactgagggaggccatagcacaattaggatctaaaagcaccaaaccttgatttcagaacctacacttccactcactgtgccagtgtgtcataaagtatacatacttttgaaaaactcatttaatatggatcaatgttatatttctttaatatacagcaatgtacataatatcaacgttatgtatttatctaatatagatcaatgtatgagttcacagctcttatcactaaggatttctgggtttctttagtaaattttaagaaaactgttatgaattaacagtacagatgatacaagcatatggcaaaagtaacaaggaggcactctaatgactgaaagtttggagaacaaaactcttaccttcccggccaggcatggtggctcatgcctgtaatcccagcactttgggaggctgaggtgggcagatcatgaggtcaggagattgagaccatcctggctaacacggtgaaacctcatctctactaaaaacatgtaaaatcagccagggttggtggcgtgtgcctgtaatcccagctacttgggaggctgaggcaggagaatagcttgaacccaggaggcagaggtttcagtgagccaagattgcacccctgcacttcagcttgggcgacagagtaacaatctgtttcaga

SEQ ID NO: 250877 - DNA, 430 bp, Homo sapiens
gatctcagtgtgtttgagaactgggaagatgaaaagggttcatctcatggcctgctttagtttgaaacaatttaagcttaactagattccaaaaaaacaacatttccacctgaaccagctgggttcattccagtcttttaccctggagtttggtgcccaagtcctagttaagagataaaacgtagagtccttttgttgtccatttgtcagtgcaaatatttaatataagtatttctcccagggaccctatagacttgaaaacagtgactatagattgcagacaattttgatattccagggatctctgaccagaataataagaaattactgtaatttctcaatttctagcaccacacaaattgcatctcacacacacagacacatacacacacaggggcgggtttacctacttctcagaaaattgcacaga

SEQ ID NO: 250878 - DNA, 676 bp, Homo sapiens
tgctttatacccttggagcttcatgatcacaggatggctgttatagctccagccgtcatgaccaagttcagactccaggaacaagatggaggaagctatgtcaaagggggcttttcttgatgtgtctctcgcctttaaccagtgaagaaaatcttcttagaaggacacagcagacttctccttatgtctcattatccagaagtggaccacaggacagtccctactgtaaactctttcaagtatcaggcaaaaaggaacaaaaggccccagcctggcttaaaccaaccttgagtcatcacctgacactggacactttgtttatccaagcaaaatcaggattttctgttagcaagcaaaggaactgctcatggataagaaattaacagtgtgtgccataattcatatttgccgccaagcatcttctcaggctgacactgtgccaaacaagggattatagagatgaagatgcagcttccatccctgaaagctcacagtccattctctcagggcaatcccggtaacctcctcatcacaatcatccatccagatcatggaagtccctttactccccaaataagaaggagtagcaggaaaaagtgacctcatcaagctgactcgagtttttccaaaagcaaataaataaataaataactttttaacctgcacagccaaatat

SEQ ID NO: 250879 - DNA, 747 bp, Homo sapiens
gatcagaagaattaatattgttaaaacgaccatcctgccgaaagcagtgtacagattcaatgcaattcctatcaaaataccaacatcatttttcacagaattagaaaaaacagtcctaaaattcatatggaaccaaaaaaataaaaaataaaaaagcaaagcctaagcaaaacaaaacaacaacaaccaaaaacaaagctgcaggcatcacatttcctgacttcgaactatactgtaagactacagtaactaaaacaacagggtacttgtataaaaatagatacatagatcaatgaaacagaatagagaacccagaaataaagccatatatctacggagtgccagctgatctttgaaaaagttaacaaaaacatgctctgcgtattctgagatgttctcaggagtatatgttagtccttctccacatacctgttttccaggttggtcttgaactcctgggtgcaagcgatttacccagcttgacttcccaaagtggtaggattacaggcacgagccatcatgcctagctaggctaccttttaaatatatatcatggccaatatttgtttattctgattatttattagttcctttttgatgtctggaagaacttattttctagccagacagactcttatatcaaatatcaaatttccagccttccaaatgggttttcctaccttgtctcaagccaaagcaaaacaaacccccaccccacaaaagaaaaacaaaacaaaacaaaaactt

SEQ ID NO: 250880 - DNA, 497 bp, Homo sapiens
ggaagcctgccaggtgacagctctgtggccttgcacgagtaactgaactcagtttcctccatggtaccacggacaaaagaaaatagcccaactgtaccctcgcctgtggcatcactgaaacttctgccttcaatgatgaacaataaaactcaccaggaaaaacagctcctcctcaaggacaacgtggaagtggaaatgaggggggttgtaccttctcaagagccagtctctgagaagactctcagggatggagtggcagtgccagaggaagagagagcaggctgggtccctgggaccacaccaaggaggtaaaggagagcctgctaaggaaccaagggctcacctgtggtagggaagtatacacctgtccataccaagcaaaagctgatggtaatgaaatgacaaggtcaggggaaaagcagggtcaaacatcatatgccaaagaggaaatcccaaccgttaagtcggcacacaataaaacattctgcttactgaat

SEQ ID NO: 250881 - DNA, 611 bp, Homo sapiens
caagcgattctcctgcctcaggctcccaagtaggtgggactacaggcatgtgccaccacgttcagctaattcttgtaattttagtagagacggggtttcaccatgttggccaggctggtcaccaactgctgacctcaagcgatccacccgccttggcctcccaaagtgctgggattacaggtgtgagccaccacgctcggctggcctaatgtatagttttaaaaaccatagttgttttggttaaagtaatgcagaaaggagtccttttcctgacagctcagctggtcttccaagtgtgattgtcaaaatggtagggactgactaaaacaaacaaacaaacaaaaagaaaaaaaaaaaaccaaaactattctatgccatagtgaaacctaatgctgaatttttctccaaaaaagaagaaagtgagaacaagcaaaccccagggctgctgggcctgtctgcaaagggtgaaagcagcagaggagtctaaatcgaactgaattgcaagatttcagttctaagcatggcacatgtatacatatgtaactaacctgcacattgtgcacatgtaccctaaaacttaaagtataataataataaattaaaaaaaaaaa

SEQ ID NO: 250882 - DNA, 417 bp, Homo sapiens
gctggagtggcaactgtgatagaaacatgtctgtgccagattctcgcccccacacactggaccagtgccaggggtagaagctgtaatgtgaactgggggcttcccctccgcccagccagaagcagagcaggaccttctataatattttaacaatgctgcaagccacaggaccactatcagagatggagccagtcagggttcaccgcctacccttaaacaaagcatttcaggtccttcctcctaagacagcacagactttgctttactttctcttatttttaaattaggcaaaactgggccaggtgcggtggctcacgcctgtaatcccagcactttgggaggctgaggcgtgtggatcacctgaggtcaggagtttgagaccagcctggccaacatggtgaaaccctgtctccacta

SEQ ID NO: 250883 - DNA, 456 bp, Homo sapiens
gcaagtgatacagtctcaccaagcccctgtgtcctcagttggaaaacaggggtaagaataccaactacctaaagtaacgctgtggatttcatgagaatatgagagattcctggaatagagcatggcaccccatggatgcagtaaatgccaggttactttggaatttttggacctttgggaaatctatcccaactttttctccttctgccacctacactctgccatccctttctgtggagttgctacagtaacgccacctgggtatacagaattccaggccctccaccccattcattgtctctatcaaaatgtacccatcttcctggccaggcacagtggctcatgcccataatcccagttctttgggaggctgaggcaggaggatcacttgaggccaggagtttgagaccagcctgggcaacatagtgagtccccacctctacaagaaatacaaaa

SEQ ID NO: 250884 - DNA, 470 bp, Homo sapiens
agtttgcttaagttgctaaaactctgcatcattattcatgtcatctccccataccccttgcccaagttaaaaataaagcaatgtcaggataataaaagctgtgacagggaaaaatgaaaaataaagcaaacatctcttcttattgcatgcatggtattaaatcagggttgccacttcaaatagtgaccagtactgtgcaagagctatggagagtgtgcttattttctttgtcctctggagcctcctttttcgtttgtttcaggcattttattgaacaccacacctaaaattcaggcatccagcatgctttcttaaatgtgatgatttatgttgggtgatgcatgcccccaactaatccagttaagggtgacttaattaagaggataaaatttgcctgtgcttttctgcttctagcattcacattacagcattcacatatttgcatttcctgcaaaaacacaggcagaaaa

SEQ ID NO: 250885 - DNA, 168 bp, Homo sapiens
accgtgtgaatagaactttaattgaatactgcaaaggttcaggcgacatgccttcctcttggtgtgagggggtagatgttaggagagagcagagaatatttcatttaatgcaccatctcctacatatgagtaattggtaaaacaaggataccccttctgctgcctttc

SEQ ID NO: 250886 - DNA, 622 bp, Homo sapiens
gtatccgctacaagaacaaatgtggtattctggatgggatcctgcaacagaaaaaggacactggataaaaactgaggacatctgaataaagcatggatgttagtcaataatgataatatgggccaggcatggtggctcacgcctgtaatcctagcactttgggaggccaaggtgtgcggattacttgaggtcaggagttcaagaccagcctggccaacatggtgaaacctcgtctctactaaaaatacaaaaattagccaggcctggtggcaggtgccttgtaatcccagctactcacctaaaacctctactcagtcccagctgtcttaccctcactccaccaatgctcctggttggtaattgaaaaaaccaaagctatcagccatgaatgatttctacttcctgttctgtctcactctctacaaatgcccacaaacctccaacttcagaggaagaagagtcctttatctaagaacaatcctcctattctccaaatttatgctctggccttgtcgcgcgacaaggccagacaaatggagattgggaaggggcctgattagaatagaaactgatgatgtgggtcagcactgtcagatgagaaggggcctggagaaccttagag

SEQ ID NO: 250887 - DNA, 536 bp, Homo sapiens
cccaccacagagcaaggtgaattgcaatgtaagttttaataatctacaaacatttactgaggcccaccatgtgcacagcattgtactttgcaagtagagggtaagaacaagtgaggcatggagtctgctcttgagaaatgagtaagcatccttttccttgttgtggtcatttccatctctcatgcccttagctcccaccctacactactcacctaaaacctctactcagtcccagctgtcttaccctcactccaccaatgctcctggttggtaattgaaaaaaccaaagctatcagccatgaatgatttctacttcctgttctgtctcactctctacaaatgcccacaaacctccaacttcagaggaagaagagtcctttatctaagaacaatcctcctattctccaaatttatgctctggccttgtcgcgcgacaaggccagacaaatggagattgggaaggggcctgattagaatagaaactgatgatgtgggtcagcactgtcagatgagaaggggcctggagaaccttagag

SEQ ID NO: 250888 - DNA, 1002 bp, Homo sapiens
ttcgcctttttcagactccaagggggatggaggagatggtctgaataagacaaatatgaaagaggaagtgtctcagcaccaaccaaacgtaaaacagcgacagcgacccacttcacttgtgacctatacagaaatactgaagacgtcctctgtgtccttttagactttctgggggagggaacagccgctgcccagaagcaagcagcttccttttggccaggtcagtgcagggaaccaacaaagacagggacctgtggccagaagaagcacagccgcagcaggtgtctgattggactgagccaggaaaggccttcttgcccttagggacccctcaaggcttttttcccaaaagctggaaactgcttggctcactgctgtgctaaatgcaggtgccagccgagggggttaccctaggaccgtgagccattaacagcttgtctcaaatacacttctccaaggcagtcagcaactccccactgaacacctgtgggttcctgctggtgctaacttaggcacggggctagcaggtccctcccctgtagcagatgatgagagcaagtgtggtgcaggaggaactgaaaagagagcgtcgtcagagatgacacttgcgtggattaaaaccatatattcttgtgcaatgtaaaaatgccaacttgcatcagcgtaacgaaggacacacttagaatagaaaagctgaggaggacagaagaataggaagaacaacaaaaccatgcctggtccttttgcccagaaatgacccatgtgaatcttggctgaacttttagactttttcgtggtgcacatttttcaacataatttgacaacgtgggacctctagaattgtacattctaatttttcagtccatttatttcttattccagaaagaatccatgtataaggatggctcatcacagtgttgtttttaattctgaaaagctgaaagatggatgctcaccactagtgtttatacataagttcaataaagttatgctctcacaata

SEQ ID NO: 250889 - DNA, 590 bp, Homo sapiens
agtggaagttctctgcctgccaaggacaaaatccaagtcctatttttctcagcctgagaatcatgtccactgagtccactccagatgtggaccaaaacagtcagtgactggtcaggagagacagtgctgccacagatgcagggccacatctatttaatcttttcataaggacttaattttccttcttcttcaggtcacaatggccatggatagcaattttaatacaatgtcagtagcctatgagaagagtagcaggataaaataattctagagtgttggactagcaactggagatgtgggttctggccacagtgctgtccctgcctcacagggtgatcacggtggagtccctttccctccctgacccacacattccttgtcagtaaaaagaggggcggggatgaaatcatctctgtgggtttccctgctctaaaattctgatcctgctacatattggacaagtctgagaattccaaaaataccttcaaaaattctactagaaatactgttcctgcaaagaatggtccccattcattaaaaagcagtactagttttcaaaatgaggtaataaagctatacattcaatgtgc

SEQ ID NO: 250890 - DNA, 819 bp, Homo sapiens
gaaattaggatacttacttagcatttaatgggatatgtttgtgtagttttgaggcactctgggaggaattaaactaaactattgacaaccatcctggtataggaatggcttccagaaaaattcctgttgcccatggtactgagtactgactcatctggcattatgacacaaagctgcagggccagaggccatacaatatgaatatgtcttgtaggggcaccaccataggtgtgtgggtaatggaggagaacaaggattgaataggaagctagtctggggcaaattcttccagtcattagatctataatattgtaagcagatgatctggttatcatcaatgtcaagtcaaaaggaaagttttctcttattagatatacacttcataatgtgacatgtataattatcaatgcaacaaatatatttttcttgtattgatgggaatccatgaactagaatgtattaagattaataaatattaataaagttgacctatggcagtactacaaacagtaagcacatttgtgtgtgaatgttgtatacatcccaaataaataaaaaacaaatattgatctaacttatcaatgggaagactaaaatacattttaatttttaaatagaaaataagaaaataatatattcccatgaagaagcaaagagaattcatgtaacacgggaaagagagcatttatacaggtatgacaagaagtcatttaattaaaaatgtatgttagtaatttgtcaactttttcaaatttataattaattgtaattccttttctcattttaaataaatatattttgtgcattactttgtatttg

SEQ ID NO: 250891 - DNA, 450 bp, Homo sapiens
acacccttatctctgttccacgacagagactcctgggaaggacccaatctggcaggggtgggcgttttcttggacacagccgttttcccgggagcccgaagtcccaggagcctctggacgagaggtttatctcgagagagcctcataaatgcatgttcacagtcaggggcacgacaggaaatgcatgccacagtgctgcgggaaagatttcctaaagcggtttctggtcctccttgaatgccagtttcacgcccctaaaagctatgacgctgaggcacctttcagggcctagcagtggggtgtggggttttgtgttttcatatggaacaagctgggaaggggccagaacctgttgctcacaggggccagggggcatcagcatcggggaggaagcccctcaggaggagaggtgcctggggggcggttgagaggctgcttcccagtggctgc

SEQ ID NO: 250892 - DNA, 278 bp, Homo sapiens
cccccaccccaaaacacacacacacacctaccacactgcctacaagaggctctcagctctgctttcacctgaactcttccacagcctgagcctcaggtctggaacccctggaaaggtctagctctgtctgggctgcccctgggaaaacctttgtgggcccaaaaggcactgtgaactaccccaacaagtagttttagtcaaagttatcagtaataggcagtgagacaaatgagcatactaaccacaaggttaataaatgtatctcttacatagttaaa

SEQ ID NO: 250893 - DNA, 428 bp, Homo sapiens
agcttctggtcgcctcagggattccttggcctgggtcctgtgtccacatttcccctttttataaggacaactgtcatgttgcataaggacttcccctaatgacctcatcctaacttgattacctctgcaaagaccttttccaaatgaaggccacattcacacataaggaggatcaagactaccacatcttttgggaggacacggttcaacctgtaacatctgcttctatttattcagagtactctatgccatgtgatttgagaagtaaagcaggccttctgcagaaaaattagtgattttatatgtattgcctttagaacgtctaaatcctgttaccgtgcaatatttggagaccctacttgctgtcatacttcatctccctctctctagacattttagagaagtagatctcttttaaggcaaaagga

SEQ ID NO: 250894 - DNA, 328 bp, Homo sapiens
ggacaaggtaaacaccgcttcaggaaacaaattcagaatatgggacagcccatttaagtcaggaatgggaggcagggaagtaatgagatattatttttctacatttaaaaagacgaaagagacaaacaacaacaacagcccacagtgcaatgtgaaccttgattgaatcttggtttccaaaaaacaaaaatggtgacaaatgctatttaagggagaatttttttttttttttttctttttatgcgttgtcgagcaggtagaggcttacttgaaatgtgtaaacgttggctttggattaaggcgacagcgatttctaggataattacgt

SEQ ID NO: 250895 - DNA, 666 bp, Homo sapiens
tctctactaaaaatagaaaaattagctgggcatggtggcgcgtgcctatagtcccagctacatgggaggctaaggtgggaggatcacttgagccctggagatcgaggctgcagtaagccaagatcgcatgctactgcactccagcctgggagacagagcgagacgctgtctcaattaaaaaaaaaaaaaagtggagaactggcagtgacctctactgggggccatggcagggaggggagccttctggaagggctgccttggagattggaatggggactcccagggagacctgcgttccatccctgcctgcctcacccctgccacagactctgcacaccactggatggtgggtccaagcctggcacagtccctgtgcttgtcagagtcattattatgattaatatcaattacgatgccaaaaattgctgggcaaactttgaagacctcaacttgttacaatgacgatgatgatgattcttggcggttacacaatccttcctcctgggggggaggcagctaggaggcccagcaggggggcttctatgctgctgggctcccctagggagttggggtagtctgtgccaactccaggcagctgctgtggcctcacccctgggccccccaattttgggtcatccatcctcaaatacactatttttgcttgta

SEQ ID NO: 250896 - DNA, 445 bp, Homo sapiens
cccaacgtttaaggcaccggatcttgagaagcaaatctagtgcccagcttcaaatccccgccttggaaaagtacaaagagaaaactgatttttcaaatcccaaagccctttccttttaagcaacttggaaaaactcagctataaacgctttctcctcttatgctaaaattgaaaacttatagattttagatggaatgaagagaagatatattccttttccctttaaatagccacatttcaaattgtgccaggcagcaatttctgcgaaaaaggagtggcggttgggattgtttgggagatggagttttatttgttcccatttattttgttttatttttgttttatttttttctttgagtttctttgttattttgagattcatctaagagactcagaattccactctgaataaagcactttttgttgtttcaaaatttcaaactga

SEQ ID NO: 250897 - DNA, 604 bp, Homo sapiens
agccccgggctgcaggaattcggcacgagcggcacgagagaaaatctgagtaagtatggacgtcagttaataatgtatcaatattagttcattaattgtgacaaactatcatagagtaacgtaagatgttaacagtagaggtgttgtgtacccctgtggtagaaagattgaagggtcttatgtacccctattgggtgtggggtatataggaactctttaaaaaagagtttgatctaccatggtagagaatttattctttccatagaaatgatggaattcttagatgaagaagcattcgaagagaagtcaaccaaaacatataggaagaagaaagtatcatagatgtgtatcaggaagttaattgataaatattctctctgggggaaaaaaaaaagctacttctgcttgcatcttacacaattgcacgtgtacatttttgctggaaaacaatcagaagtcctattttgttacttagaatgttataaagtcatgtactcgagagttgagatataatgaaattaataatttttactgttgttatcaagtacattcttaaatgaaactggctttttttaaaatttattttcaatttttgagtgtgtgg

SEQ ID NO: 250898 - DNA, 312 bp, Homo sapiens
ccaagagaaagataaatttccttggaaaacttagagtaatcatacccattatcattatggctttaaaatttaaataaaaattctaactttcagtggtgcctgagtgtataataagaacagtgtctgttggtttccagtactgttttataaagaaacagggcagtgagtcatattgactgatagatttcttggctaagtatctccttactagcaagagcatggactgtctgcccctcctgctgcttctgagcatatgcttcttgggaaatagaattggtaattgcttgcaatacaaactaaaacaaaaaacaa

SEQ ID NO: 250899 - DNA, 424 bp, Homo sapiens
tgccatttttccttcattttcatattttgttcccttcccaaattataaagcgccttttcatgccacacctgggtaaattgaaatctaaagtgggagcctgatgagcccttgaggattaatggttcaatttccctgcaaatctgcatgtgcttttgaactaaggaaaaagaacacagggcaatgtaaccctccgtagggcttcgctagcacatttcagttttctacagttaccgccagctcttaggacagtcatcacatttgacacctgactctagaacaaccaaagtgcaggttttttgtaggttatggctcatgcaagttagtgtgaggttgggagtttttcttttttcttttttttttggcataagaatagcgctgtattttcctacaggtaatttttctattgcttcaacattttctcttc

SEQ ID NO: 250900 - DNA, 411 bp, Homo sapiens
aactcggagtctgatgtttgagggcaggaagcctctagcacggggaaaagatgaaggctggaagactcggcaagtcaaatccttccacgttcttctgcctgctttattctagcggcaatggcaactgatcagttggtgcctacacagattgagactgggtctgtctctcccagtccactgactcaaatgttaatctttggcagcactctcacagacacacccaggaacaatattttgcattcttcaatccaatcgagttgatactcaatatgaaccatcacaggggatattgcagccaattccatagatgcttctctgatctactgtttttctctgagtcccttcagcctttgcttaaatgaatgtaggaggcaaagtgcaatttactatataaaaaagtgtgaaataaga

SEQ ID NO: 250901 - DNA, 353 bp, Homo sapiens
tatcctctcccacctcctgctctttcctccagttgtgtgcctcgtaacctcttcctccctccaaggctaaatcaaaccctacctccttatacaggaggaagtaatttctgggttgatgtatgcatccggcagattcatgctgagccaacaggttaggggctggagaaacagtgatgagcttaaccaggccctgccagcctgcccaccccgagtctggtgagggtagcaaaaaacataaagtggaattgataaataatataatctatccatatccatatttttattttttattttttgggacgaagtcttgctctgtcacccaggctggagtgcagtggtgtgatctcagctca

SEQ ID NO: 250902 - DNA, 398 bp, Homo sapiens
ctggagtgcactggtgcaatcatggctcactgcagcctccacctgttggctcaggccaggcactaattttaatgatagaaaccaaatggaatgatgctgggtcatttactacttagggtcagtttttctggcaggtcagatatttggagttggtgtttcccttttcttccctgccttctggccatttaactgctaattcagacctccacctggggaagtgaaaaagaaaagtggttccctgctcattgtcatagttctggtttaaaagttttatagaatgaaatacttgcccaacatgagaggtttagaatgttctggtaaaccacagtgttaataagtggaagctaatggaaatagctaacaggttttctacacgtagaatccccttgtgtagatga

SEQ ID NO: 250903 - DNA, 257 bp, Homo sapiens
ctcccggatcccccgggctgcatgtgggtgtgcagttgagaagacagcctcttgaatgatgtgaacagtgatggctttctctgagagtaagacaagaaagctttgtaaatggcgttgaatttcctgctcttggcaggccctgctcagcacagaagaaaagactgatcaagttgtccaagatggagccctttatccacgttagtccacttatctctttaagattaaaggaaagcaatcattaaaaatacagatccagt

SEQ ID NO: 250904 - DNA, 190 bp, Homo sapiens
tcaagccctgctagaagggcactactctcatccactaggactccaacctcacagcttcatcacctcttaaaagccccacctcttcatactatcagttgattattaaattccaacatctgaatgttggaggacacatccagaccgtagcatccctcaaaaaaagaataaagatgttccatagcacccatca

SEQ ID NO: 250905 - DNA, 619 bp, Homo sapiens
tttcaataaggttaatctgttccttactcaaattcaacatttgctaagcaccaactgtattcagggaacaatgccagaaatgggaggtcgggatagcggggtggttctcataacccctgttccctgccaaggcatcaagcaaacagccccacttgtgtttggggtagctgtatgtagccaggtagggagagtgaataccccttgcccacctttccatttccagttgttctattgaggttcttgaagactaagaagtcaagtacagtactgtaaatctgagggcccaacaatgggagaagagaagtgatacacctatctcatcaaggcttttgtggaagcaccgcctcttttggagaaggctgacagtcagatatgggcagaaatggtcttagtcaggatcagtgtatgcccagtcaacctggatgtgaatgttgggcattgatttcttctgagaaaacatcacggggctctgtgctacacacttagtaggcaattgtggatttttttatactgccctagtggctcttgagccccacaacccccactccaccagctttcttgagaccaggagaatgtgatagaaaaggtaagatggcaattagaaggctccaattccaag

SEQ ID NO: 250906 - DNA, 517 bp, Homo sapiens
tctctctctaaacctgtgggaaagacatcagcaaggaacaaagattataaatccatttttatgtcttccaaattatgttttgattgtgtagttatttttcctctatagatgcaaacgtttttaagttatccacatagacattttttaactgtacggtttaatggtttttagtatattcaatatacagataggagcactatcaccacagttatagaactttttcattgccccaaaagaaaccccatacattgtagctattcctatgctaataataatagtaatactgatattggatgatcccaaccctaatctgttttctgtttctgtagatttccctgttctggacatctcatatgaatgaaattatataatgtatggtcgttcatgactggcttttattcacttagcataatgtttttaaggttcatccatattgtagcatgtacctttttttattccttctgtgtatgcatttttatttgagcaaatatacaagtgaataattcgtaaaaaaaaa

SEQ ID NO: 250907 - DNA, 245 bp, Homo sapiens
caatgtttattatcagtcttccccactgaagtttgtttacttatgagaacagggctctctttccggtagatcataaagcaattcccggaagggcctcgggtgggaggatgtgctcaggtacagaagatatctcacaatgttgacctattaagaaaatgggtggtcctagactctgggctggtgagcatttttcttctgccttctagcaatttcttataaatggcaaagtcttgttttaaaaatct

SEQ ID NO: 250908 - DNA, 1145 bp, Homo sapiens
ctgcccgcctccacctctcctggtgacaggtatctggatggtctggtctctcggacagaggcagtccctagttctgaagtggcgtgttgttcttacctggctcccgtcccaccccacacctctctctctcatcttctactgttaacaagaaaattgggcagcagctcactttctgggacccagatgactggcttaagcaggaagggctgtgtgcatgaggcagccggggtggttctggaaggctactgaaaggtgaacaggagcagcccttccatgcccacgtctgttgaagccactggctcgatagagcagctggagctcccttagaagggcaatgctgggagacacctccagtcttcacttacccacttggcaaaggcatcataaagccccacctttgtcctgctcatgggcatgacttagcagatctgtcctcagccccttgggctctagtgccttctcctgtatcctgcctgggactcccatgcggccatgctgcactctgtgttctcagacataagcagaacctctgggaggaagggagaggcggtgggcagctgtgagccccgtcaagtgtcctggcccagttttgctccgggaggcctgagattaaagttcagtcgtgcaggttctgcaccacacagggttccacgactaaagggcactgtccatgctgtggacattgaagatttgaacattttcatcaccaggcttaggcagcatacacccctcccccagacctccctggtaggcaggactccagaagaagcacaacatcaccatgaccacagaatcttcacgtctcatgcagatctcctgccctccacatggcatctgagtgaccgttttaaaatgcatgatgaggccgggctggtggctcacgcctgtaatcccagcactttgggaggccaaggcaggcggatcacttgaggccaggagttcgagaccagcctggccaacatggtgaaaccccgtctctactaaaaatacaaaaattagccgggtgtgatagcaccctcctgtaatcccagctattcaggaggctgagaccagagaatcgcttgaacccgagaggtggaggttgcagtgagccaagattgtgccactgcactccagcctgggtgacagagtcagactctgtctca

SEQ ID NO: 250909 - DNA, 431 bp, Homo sapiens
ctttgactccccactttttagggtaagaaattagtaaccgctgccattttacctccccctttgttttttctttaataatgtcttctctctttttcagtttagaatgcctatccatttgatatagaagtacctggctgaggccgggcacagtggctcacgcctgtaatcccagcactttgggagtccgaggcaggcagatcacaaggtcaggagatcgagaccatcctggctaacatggtgaaaccccgtctctactaaaaatacaaaaaattagctgggcatggtggcaggcgcctgtagtcccagctactcgggaggctgaggtgagagaatggcatgaacctgggaggtggagcttgcagtgagccaagatcgcgccactgcactccggcagaggcgacagtgcgagactccgtctcaaaaaaaaaaaa

SEQ ID NO: 250910 - DNA, 747 bp, Homo sapiens
tgatcttgaaagagtttctaattttagtgtaattaaaataaaaatttttaatagcttcacctattgccacataatattaattaggcctccaaagacaagaaaagctcctctatgaaccacttttacgggaatctctgtgccctcttagagtttcaagtctgcgacttgaaagatttaaactacaaaattctgtgtgtatgtgtgtgtctctctctctgtctctctttctctctctatgtgtgtgtgtctgtctctcacacagacacacacacagacacaaacacacacacacacacacgtaattttctcccaaaaaatttacacccaaattaatggcgtgttcctttttgacaaagactttggctaaaccctcttgtaaaacattctaaaatggctagtgatatctacctactgacaaggagtcagtgtaatcaataacccaatcaaacactcaaaatgcttaactataatcttaggatttttaaatatcctgatcattttcacttggtacttcatattgaatgaatatcaccaagatccaacttgataggctgggcgcagtggctcacgcctgtaaatcacacctcccaaagtgctgcaattacaggaatgagccaccacgcctggcctgagatcatacacatttttgaaattcagctactaggtgagataccacagggatataggaagaggctatgttattagctttactggggataaatgttactggacagttattatgagggt

SEQ ID NO: 250911 - DNA, 574 bp, Homo sapiens
tgcctcaggttattcaaataacatcttcaccattgatcaaatgctcaagaaaaagcagacttgtacagtggccgatgcaactgctattaaacaacatgtgaagagagctactgatacctataatttaggaattgcccttgaacaccgaaaagagatgctaaacctctggcagaagatccgaggggatttgattgggatggactctagaaatgagtccttttatgacaccttttctacttatacatggtcctggaatgtttgccaagaattactttctcctaaggacttaaggttatatgatgcctatgtgaatagaaattcctcccataactccagatcctcttcctcatcagataccagtgaatgttacacagactcaggaagaaaaagaaaacggaaaggtttaaagggatttcaacaatgaaatttctacattttctaaacagctcatcacaaactactttttcatagttatcaaaattattgtttcttgcttttgtctaagtacattcttagaagctggaaattttgacatcttttggattctgaccagtaaaaaagtttaagtcataaa

SEQ ID NO: 250912 - DNA, 581 bp, Homo sapiens
ggagggatggaagtcagcggtgggtctgcgaaagcgcaaacaggagtggtggacagcaagcgaaagctcacctcgagccgtaaggaacacggaacaaaagagagtgcagttgcaagatttaatagagtgaagacagagctcccatacaaaaagagaggacccaaagaggtcatcagttagatgaatatgtatttgaaagctgttcattcattgtggagatgtgggaagacagcagtaaatatgccccatggcactgattaactcaaagtggctccaggccaaagattttatgcttcagtggagacatttttgccaggaaccatgtttaccagagatgtttcccaagatggacaacagactgaccatgttgattcagaactaagtactaataaaaaggagtttaataagaagtctaatagaaatcaaattgtatttatcaactttaattctattttaatgcacgagtcctaacagccaaacgactaatatgctgacatttcttaattcattttttctgactgtgctcccaaaaggtgtgtgaaaatgcagtttataaattaaaaccttatacatgtttatat

SEQ ID NO: 250913 - DNA, 501 bp, Homo sapiens
aatatttaatactatttggagactgatatattttcctcttatctagagtaaaataaattataagaagtgatgaaaacaaccatttaattagacttaagtaagtttgaaaagcaactctgtgaatttaagtgtttttaataatttcataggtgtctcattctataaactcaatggctattgagttaatcttcaagttattttcctacgggcccttttaagagaaggttggaaagaatgaaccatgtttaccagagatgtttcccaagatggacaacagactgaccatgttgattcagaactaagtactaataaaaaggagtttaataagaagtctaatagaaatcaaattgtatttatcaactttaattctattttaatgcacgagtcctaacagccaaacgactaatatgctgacatttcttaattcattttttctgactgtgctcccaaaaggtgtgtgaaaatgcagtttataaattaaaaccttatacatgtttatat

SEQ ID NO: 250914 - DNA, 2636 bp, Homo sapiens
  misc_feature (1558)..(1558): n is a, c, g, or t
aggggagctggctacaacgtgggacaatcagtgaccttcgagtgcctcccggggtatcaattgactggccaccctgtcctcacgtgtcaacatggcaccaaccggaactgggaccaccccctgcccaagtgtgaagtcccttgtggcgggaacatcacttcttccaacggcactgtgtactccccggggttccctagcccgtactccagctcccaggactgtgtctggctgatcaccgtgcccattggccatggcgtccgcctcaacctcagcctgctgcagacagagccctctggagatttcatcaccatctgggatgggccacagcaaacagcaccacggctcggcgtcttcacccggagcatggccaagaaaacagtgcagagttcatccaaccaggtcctgctcaagttccaccgtgatgcagccacaggggggatcttcgccatagctttctccggtcagtatggaagcctggcctggtgggaagggccaggctttcaagtcaaggctgagcttgactcccgtctccaccatttgcggatcatgtgaccttgagtgagttgtataacctcttggagcctcagtgtcttcagagttatgagaattaaatgtattagcctatgtgagagctctcagtgcagggttctgtaaatgcaagttttcctcctattccacactgccagggcagagaggcacagaagcccaaaccttggtgccaagtccactcattcacatcaactcactggctggatcatccctatacctgtgccccagcttatcccttagcactttctagcgggttctccttctccaaagggatctagggcttctgctgacctctcaaggagcactgtgtttttgtgcacaaatgaagatattgtgattttgagtaggaagagtatgaacaattcagagtaggtatgcctttattggcagcctgttttcttctacaagtcccaagttagggatctggatatttcctcatttttattatagtggaattgcctagagaaacttatagaatgttctctgtggacttgtgcctatctatggaatgatgcacatatttgcaatttacagatcactgcagatattttaaccagaaatcaggaaagctggattttactcccagctccaccttgggccagctgtgtaaaaccttgcacaggtcccttccccacttgagacttcagtttcttcacctgtagaattaccggcttggagtttgtgacctgtaagaattctgtgaggtagtaaggcaaatattctaacccccactttacaaatgaagaaatagggcaaaggaaggctcaagtacttgcccaaaaccatgtggatagaactggaaacagaacccagcctccgcagtatctgctgcagtatctgctacagtatctgctctggtgtgactatacagtgttattacatcatgcgtgcacttgcagaaacacactaagactgtgaaagaggtagtgaaagaaacaggaagcaacagagagaaacaaggatgtaaagaacctaagcagctgtgactgccattcccaggagctatcgnccagggtgagtgcaatgtgggaatgagactccgccctctccatctgctcagttcccatgcccctctcattgggcacacctgtcgctccactaatgaaatccaggctttaaggctctgtcattttgacttgtgactttcccatagagtgataagagtatggacttcagagtcacagacgggttcaaaccttggctctgacacatgcaagctatgtaactttgtctgtcatttcacccttctgagcctcaatgttattatgcacaaaataggaatcatataagtacctaacctcctaaagttaaatgaaacaatgcttggaaatccttagctccaggcacagagtataaaaggtgatcaataaattatagttttaatagtcatcattgtcatgattatttttattatatctagatattgacaggcttggtgtaaagttaccttggtggtaggccaggtctcttgttcctgttcctgagccttcacctgtaccagaaccaggcaaaggaggctcagcacagccccaggccatccttatttccaagttcttctcagcaaggtctttcattgagagtgcttgcctaagggcacaatgctccttctgcctctcagatgagacacaaggcccttgctatggtgtaaatgcttaggcccccctagaattcatatgctgacatcctaacccccaaggtgatggtattaggaggtggggccttgggaggcaattaggtcagacaacagagccctcatgaatgggattagtgcctttataaaagagacccacagaatcaccacactgaagccttctcagtggaaagagctaagaagcacaggaaacacagaggccgaggtgggcggatcgcctgaggtgaggagttcaagaccagcctgaccaacatggagaaaccctgtctctactaaaaatacaaaattagatgggcgtggtggcgcatgcctgtaatcccagctactcaggaggctgaggcagaagaatcggttgaacctgggaggcggaggttgcagtgagccaagatcacgccattgcactccagcctgggcaacaagtgtgaaactccatctc

SEQ ID NO: 250915 - DNA, 751 bp, Homo sapiens
aggggagctggctacaacgtgggacaatcagtgaccttcgagtgcctcccggggtatcaattgactggccaccctgtcctcacgtgtcaacatggcaccaaccggaactgggaccaccccctgcccaagtgtgaagtcccttgtggcgggaacatcacttcttccaacggcactgtgtactccccggggttccctagcccgtactccagctcccaggactgtgtctggctgatcaccgtgcccattggccatggcgtccgcctcaacctcagcctgctgcagacagagccctctggagatttcatcaccatctgggatgggccacagcaaacagcaccacggctcggcgtcttcacccggagcatggccaagaaaacagtgcagagttcatccaaccaggtcctgctcaagttccaccgtgatgcagccacaggggggatcttcgccatagctttctccgggcacttggcagctgtttgtacattgtgacacccctccacgcacacatctgccccccagccacagaagcttggaccagaggtggacacctgagctgactgcagcaggggcaatcagatgttctctcttgggaagttgaaataggacccaagagattctacttttgcctggacccatctcctgaaaagataaaaatccaagtgcaatggattgctgctcttctactttccatgtggaccaaaaagtagaacaatcctatgtgcagaaagagaatgattgagaagtggaaaaa

SEQ ID NO: 250916 - DNA, 334 bp, Homo sapiens
gtgttatcttcaatgtagaagtattaataggtggggcccttaagaggtgattggatcatgagggctctgtgttcgtgaatggattaatccattcatagattaatgagtgaatggattatgtgttatcatgggattaggcctgctggctttataagaagaggaagagaaacccaagctagcatgcttaaccccctggtcacgtaatgccctgcaccaccttaggactctgcagaaagtttccaccagcaaaaagtgttcatcagatgtggccatttgaccttggatttctcagtgtccataattatgagaaataaattgcttttcttataaagta

SEQ ID NO: 250917 - DNA, 370 bp, Homo sapiens
tcaaatcttcttagctacttttgcaatttctgggcaggtgattgcagaacttctttctgggggaatttatgatagcgtcaggagacagccaaggatccctggtgaaaccctgccttcaagcctaaaacagcctgaaggctgaaaaactggactgctcgtcctagatgaagcccaccctttcctgactaattctctctgaacaatgcccacctgtgcactgggaggatggggtggagcctcaggaagttcatgccattcacagcgggaggaggctgacctcttcagttcctgggtggtgacctggaattcaatctgtgagatggaaaacctactagcaagactctctctagctttgctgagagttattttt

SEQ ID NO: 250918 - DNA, 362 bp, Homo sapiens
cacccatgctggagtgtagtggcacaatcatggttcactgcagcctcaacctcctgggctaaagcagtcctcccacctcagcctcttaggtagctgggaccacaggtacaagccactacacatggctaatttttttttttattttttctagagatggggtctcacaatgttgcccagactggtctgaaattcctggactcaagtgatctgcccaccttggcctcctaaaatgctggaattataggcatgagtctccatcctggctgcactacagtaaagtttagtcttcaacctcagtcgaacccttagtgataactggtagttatttcacatgctccacatcagcaacctttttccttaat

SEQ ID NO: 250919 - DNA, 402 bp, Homo sapiens
agcagggcttaagaactgtcagtagctgacaacatttcagcctgattagctcctggggtgaggagatggggatatgttcatatgctgctctgtgcttccttgtgaactggcaacatctcaagatgtttctgatgctggagaatccctcaaagtgagacagaactgaaagccctggtcccaagatgagccagagatggggtctcacaatgttgcccagactggtctgaaattcctggactcaagtgatctgcccaccttggcctcctaaaatgctggaattataggcatgagtctccatcctggctgcactacagtaaagtttagtcttcaacctcagtcgaacccttagtgataactggtagttatttcacatgctccacatcagcaacctttttccttaat

SEQ ID NO: 250920 - DNA, 851 bp, Homo sapiens
  misc_feature (40)..(41): n is a, c, g, or t
tttttctactgtcgagcgtattcacccttccctatgggtnngtttttatttacctctacatggctgacttggaaaattacgtcattagtggcattgctaccttctctttgaggcactggtacaacacacctgtgctgctttgcctttgtagctgttgaattcatggtaattttatgtataggtagaagtaaagactggtattaaaatactgaactgctttgagaacagcttggtaaataccagctgctctgagcttccctacctcctagtgtgtccatgtatagggcccttcggatttcctgcagttagcaatgaaagagttaatcactggtaccttggggttgaagggcttccaggaccatccagctttatggattgtgccaatgcctgtgctggtgcctgtgtggatgttattattccctgggttcaaaatctattcataatatcatctagtgtagttgtggtgaaatagttacatacagaaatacatattattttattaaaattacttcttaggtctcctttatgttacatttagggcatctattgtagggtatgtctcgatatgtgtctaataggttataacattcatttcatttaaaaatagagaacagctgcttcaaactgaatcagtaaaaataggggatgttgagtttgagagttgggaactactgactggtaaatcagtcggggtcccactgtttttgtcctttatcttgcttcaaattgaaatcattatctattgctattataaattaaatatatagctggcatcatctgagtagtagaaatgaaagcgtcagtaatttgtgttgtttttaatagagtttctccttttggaatagggtgtt

SEQ ID NO: 250921 - DNA, 574 bp, Homo sapiens
tgtcgcccacacccacgcctgcaccaagacaaatcgcacggggctaggctctcccgagaaggcctttgcagaccgctgctggcctcccagcaagtgctgcatctctgcgagccactaagcatgcagggagtccctgaagagacagctttgaaatgggatcattttcttcctggaagcaaaagggtgtttcctcaagacactatttctccattaaagtatgagaaattccatctctgaagctcccagtggggccagacatcgggttggggtggggacgggacgttgataagagtcaaatctagaacactgtgctcttaccccctcatttcacctggtgtctctgggcctggcttctgggagctatttgtgatgtgtggtatgagtgcatgtgctggaaagtattcttgtatgagttcaaatttatgtgctcaccttgccccttggggtattactggccttcaagtttgatgcttttggaagctgagttctctcccgtcctttcaatcaaactcaacccttgctgcagtaatctgtctttaacaactcccactgcaagtcaataaaatgtcaattt

SEQ ID NO: 250922 - DNA, 430 bp, Homo sapiens
tcttcatggacttggagtctgctctgcactttctctctctctgtctctctctgtctctttctctctctcttccaccctccctccctctccttccttcccagacatacctgagcctatggttcccatgattcatatttgcaaagaaaattctactgtagtctcaggcctaagacgaattctccatctcaaaatactgaaaatcctttattcagggagttgtgcagatttttaataaatcaatgcttaatgtctctcatttggctggtgatcttttgctggatgcagcatcagtttgaatgctggagggatcaggggtaaccagcatttagaattcctaagactcttcttgggaggctgaggcaagaggactccttgagcccgggattgcaagaccagcctgagtaacatggcaagaccccatctcagaaaa

SEQ ID NO: 250923 - DNA, 505 bp, Homo sapiens
ctcctggtgcgggggttcgcagtaataagcgaggggaaacttggaaggcactgtggaaagtataacatcacttttaaggggggaaacgggagagggtttgtaaactatattctagctgttcaattctatgatattcattttaattacctgttcacaagatattcctaaaccttttctcaacaatttatgcttaagcacgtcggggagaggggtcagggagtgcatcacagagcaggataaatctttttctctccttgggatagtgtggagaattgtcagctttccatcaagggataattggttagttataaagctatggttatacttcccgatttccgcaggtgtcgtggctgactgcagcacctccgtctttcctctctgctaggtatttggaaagcagatcctcatattttgaaagaatgttgtgtaaatgaagagcaaacagcccgaaactgagttctgaaggctcacctgtgaaataaatgcatgaattttagtgcaaaca

SEQ ID NO: 250924 - DNA, 684 bp, Homo sapiens
ataccatttctgtataaagttcaaaaagacataccatatattggttaaatgtggtaggccaggcatggtgctcacacctataatcccagcatattgggagactgaagcgggccaattgcttgagcccaggagttcaagaccagcctgggcatcacagcaaaacccatctctacaaatattacaaatcaaaaagtaaattaaaaaaattcatcaagctatacactttatgtttagtttattgcatactttaaacatgtatcatttattgtacaaataaagctattaaacacaaaagccaggaagaggttgaagccatactcttttcccagcctgcccagtcagataagtccgtcttccttccagtccccagattctccctaccccacacacagtccccttctcccttaggaggtacattttatttcttccagtctagtaataggacgtccccccaccaaaaacataaaacaaaaagttttatgaattacttgccgtacactgttgagtgaattcagtttttggttttttttttttttgagacagggtctcgctgtgtcacccaggctggaatgcagtggcacagtcatggctcactgcagacttggcctctctgggctcaaacagtcctcccacctcaggctcctgagtagctgggattacaggtgtgcgccacaacacctgttt

SEQ ID NO: 250925 - DNA, 420 bp, Homo sapiens
tcaggcaaaaattaataatgaatctttatttgaagccttctattgtggatggatggatttagcaaaaatagttgttggaatgaagagggagaaagcagttaaaatattatttggagaaataaacaagaaaggtaaaataggaaaggatagatgaaaagctcttcatcagaggccttaaacaagtttcacttccattctaatctgtgctgctgttgttttgcttttttctttttaagggacttttccttgtcgaaaatatgttgcactattctttggattcctaacccattgctgaagtcagatgacaacacatttgcagttcctggcaccccaatcccctgctgtcaggattgtaaatgatgccacttttcaacaagcagcgatccagtaaggggattagaggcatgaattttaactgac

SEQ ID NO: 250926 - DNA, 420 bp, Homo sapiens
atatatattgatgaatttccagccttgtttcatattctgttgttcccggcagcagatttattttttatagttgtaaaccgccaagtcattttttggtgctgtcttttgttttataaagtcttccctataaagacaaactacagagcattatcaagattttctgttaaattgtaaagttctttagacttaaatttaaattaagatatattctttaagtacaaatgatatttttaaatttatctaagggcctggtggagtatgaagacaaaaagaaagaaaactcttaaagagggtcaccttcactgatattggcaaatccttgtgttttctgtctgaaagatgattcatgaatgttttgcatcactttcctttagagaaagagtgcattcttaaagcataaacaatacctattacaaagca

SEQ ID NO: 250927 - DNA, 313 bp, Homo sapiens
tttttttttgtagagacatgagtctcgctatgctgcccaggctggtctcaaactcctggactcaagcaatcctcctgcctcagcctcccaaagtgctgggattacaattgtgagcaccacacactgccatattcctgttttacagatgagccactgaggggttaaagggctcccccacattccacaaggtcatgtacagcagagctgagatgtgaatataagtagcctggcttcaggtccctctcctcaactacaaacaatggggatctctcctggcccttggtgggcatgttaggcatgcatggggttcctg

SEQ ID NO: 250928 - DNA, 492 bp, Homo sapiens
aagtctactcaccttccgacacatgatctgatctgtctggcagtcgtttcctacaaaattaaccaaaaactctgacatattaatgtggtattaaatttgagtgcttatagtccatgtacatcaatggtccacacatcacaagaaatttctaccagcttagcagagcaaatatttcagtagtcagtcttcatgtgataccatgtacatcctattttctatataggaagatgaactggatggtgtttctgaaggagagagttcttgtatcagttggttaacaaagataagatactacactggttgaattactttcaaaagctttggaaagtaaaagagaagcaacttctgtgggtctaggtctaacagttatgttcttccccctcttaagttttaatccaggtgctggtttgccaactgacaaaaagaaaggtgggccatctccaggggatgtagaagcaatcaagaatgctatagcaaatgcttcaactctgg

SEQ ID NO: 250929 - DNA, 435 bp, Homo sapiens
gtttatgaaacaatgccgaattgtgatattttaataaagctcacatcataattcccccaaataaaaagttaatcaacttaaaattcttctatgacctcgacccatgtcctacatgatgaggagagagactcatgttctcagtcacttacatatcgttcagtcttctgcattttctaaatttctggtctacagtgttaaccatttactggtagagccatgtaaataattgaattggattcaggccgtatgcttatatgatactttctactggaataggacatattcacttaaagaaggtctgatagtaaatacttatgatctgtcttctgcttgctgtacctatactgccctcaccaagaggggagcagccatgctgtctcagatggtaatggtgtgctgcttatttactctccttataagttcgcatgctttcac

SEQ ID NO: 250930 - DNA, 773 bp, Homo sapiens
agtatagagctatgttacattgaatggcaaaagtgactttgtagaggtgtcgtttatccggatgctgcatgattaagaccaccatactcttatcaagcatacaggtgttaatgtctattttaaagaggagagaactcaagaagttctgtagaaactgctttcttcatcatatctcaaaggatttgctgaggatttcagaggtgccacgagttgagagaagacttcggacatttcacttaatgctgaaaattcactctactgccactactcaggacttctgatgggcatgaaaatccaagcctgctttatgatattaacctctgaatttcataaaccgcttaaaactttagaatgtccagaaaacactggtagaatacggacacatgagacaaggccagaaaggaagtcaataaaatgtgattactaagcaaattaccaccagagaagcagaaggaaatccctcttcaatattttgagagacagtaaagaacattccctggagttaggacaaatgaagagcaagaagtttcatcttgctctgtcatccaggctggagtgcaggggcaccatctcggctcactgaaacctccacttcccgggttcaagcgattctcctgcctcagcctcctgagtaactggggttacagagtgaatagacaacctacagaatgggagaaaatacttgcaagctatgtatccaacaaaggactaatatcgagaatttacaaggaactcaaacaaaactcaacaagagtaaaacaaccccaataaaa

SEQ ID NO: 250931 - DNA, 696 bp, Homo sapiens
atcaaagtacttctccaaccagaggacttccattgatcaatagccactcagatgttctgtgtttgccatgagtatcggacttcagtcttctggaaagatggctgtggtgcctaaacacatctgtgcctggcctcacccgcgggacttcggacatttcacttaatgctgaaaattcactctactgccactactcaggacttctgatgggcatgaaaatccaagcctgctttatgatattaacctctgaatttcataaaccgcttaaaactttagaatgtccagaaaacactggtagaatacggacacatgagacaaggccagaaaggaagtcaataaaatgtgattactaagcaaattaccaccagagaagcagaaggaaatccctcttcaatattttgagagacagtaaagaacattccctggagttaggacaaatgaagagcaagaagtttcatcttgctctgtcatccaggctggagtgcaggggcaccatctcggctcactgaaacctccacttcccgggttcaagcgattctcctgcctcagcctcctgagtaactggggttacagagtgaatagacaacctacagaatgggagaaaatacttgcaagctatgtatccaacaaaggactaatatcgagaatttacaaggaactcaaacaaaactcaacaagagtaaaacaaccccaataaaa

SEQ ID NO: 250932 - DNA, 511 bp, Homo sapiens
agtatagagctatgttacattgaatggcaaaagtgactttgtagaggtgtcgtttatccggatgctgcatgattaagaccaccatactcttatcaagcatacaggtgttaatgtctattttaaagaggagagaactcaagaagttctgtagaaactgctttcttcatcatatctcaaaggatttgctgaggatttcagaggtgccacgagttgagagaagtgagccaaaaaaactcatctgaagtgtttggacagatgaaatcaatggctgctgattaaatgagaggcacacagcaagtacactgtaaaataattaaatagtaattgaaaatacctgcagaaagtttgattagcatctgaggaactaacaaaagtagccagataataacaaatgcatttccaaagcctgtttaattctatcaatgtaccttagtaaatatgtagttagtctcattaaacgaattaatgtaaatgcattaaacttttcacagtaaaagtagtgttttggaaa

SEQ ID NO: 250933 - DNA, 228 bp, Homo sapiens
ctaaaaataggaggcacaggaaagcaggataacctataattggaggaaaacctgtctgggagatcaagaaggcattcccatacattgtcgtgacaaccttttttggaaggcaatactgaagtgtattaaatgacacagctccttcgacctagctgttccactttaggaataaaagtaatatagcaataaaagtaatactacttaaagcagcatgtggctttggctccc

SEQ ID NO: 250934 - DNA, 262 bp, Homo sapiens
aaacaaaacaacaacaaacccaccaccatattaaaggaatagccaaatttccagcttctgtgccaacagtgacaggtttactagaatagatgagcataacctggtgtgttgtgtgtgactgttgatctggcaaaagcatcctttccgccaccatcaggaaggaggaacagaggcaggcgcattcgcttggcatggacaacagtatactttcacagtcttgttccaggactgtgttaattttcttctccttgtagtattgttc

SEQ ID NO: 250935 - DNA, 549 bp, Homo sapiens
taccctagagcgtccgatttaacgggtcccttagggaattggcccccaggccaaaatttggacgggccccaacagaccaagcagccttgccagcccccacccaagtgccaggagccctgtgcccccaagtgcccaccccctcagcagtgccagacgtccaagcagaagtaagccctgggcatgtgatcagaggcgaacccccaggaaaaacagagcatgaagttccttctgggccagcatcttacactccacaggccaagcaaagccctgctcaccagtgcttctggatgcagccacacttcacacttgcaggagaggcagcaccaggctggcagctggcggcttcctcgagctctactcttcttaattagcagctgcagtttccatctcagacaaggatctggttctaaactatctaatcatctttcctgacatgcatctacattgccctgctggaaacatgagcggcatgcacaggcatcttctcctaccacgcttcccctcagctcctgttttcaaacaattaaaacagaattcctctggcatgaa

SEQ ID NO: 250936 - DNA, 349 bp, Homo sapiens
tgcagaggcgtgtctgtgtctgtctgtgtaagaacacgtttgaatgctgtacaaggcacatatgtgaacattgtaccacatgtacagctttcaaacatgctcttatattctcccagccctttagggggaatgtctcctacatacatttatgctttgtgccttcctacttatgaaattaacccatcattgtcacacttgctgatatgcacgctgtatgcccatagcatgccagggtctgtatacagtgcaaccttgtagtttcaatgcagtgataacatatccctcacatttgtaatcatgggttattctttgattacaaggattaattccaagattccaagattttcaa

SEQ ID NO: 250937 - DNA, 495 bp, Homo sapiens
aagaaatcttcgaaatgaaaactattcctgtttaatgactaatagactctgtatcttaccttgtatcctaaatacaaaactgttttcacaaggttagatttctgggaaagtgggtcatttaaaatattgccataaatttagaaataagcatgagaaacattttttacagtcctgaaaatgaaatatataagaattactatttgaaacaatggaagtaaaataaattgctgtatatatgtttgatgtgacttggctttgtccccaccaaaatctcatcttgaattagctcccataattcccacatgttgtgggagggacctggtgggaggtaattgaatgatggaggtgggtctttcccatgctgttctcctgatagtgaataagactcatgagatctgatagttctataaagggaagttcccctacacaagctttcttgcctgcggccatgtaaggtgtgcctttgcttctcctttgctttctgccatgactgtg

SEQ ID NO: 250938 - DNA, 498 bp, Homo sapiens
cactagccttggtgacagagccagactctctctctctctctgtctctctctctgtctctctctctctctatatatatatacatatacatacacacacacacacacacaattttatatgtatatataatgtatgatgttgtaaaagttgacttggaggaatgtgttcaatgaaagcatgagagcacatatctcatatatgatttcttatctttattaacacgttgaaaatggtatgttttcatcattatatgaacatggattaaaaatacagatgattgatacatgtcagactgttaacaaatttacaaagggtaaatatagatgttggaagaaattaagagaaagaatgttgcagagagaagagaaaaataggccaggcgcggtggctcacgcctgtaatcccagcactttgggaggctgaggcaggcagatcacgaggtcaggagatcgagaccatcctggctaacgcggtgaaaccctgtctctactaaaaaaaaa

SEQ ID NO: 250939 - DNA, 481 bp, Homo sapiens
caactgaaatggggaagggggaaccccggccgactgaggtcctgacatctttagcacatggcttcttaggtcacccagggcatccaggttaccagcttgggaaacaggagatgtaggttggaggaagaggctacagcccaccctggaaataactgccatccgtcccacccatatggttaggctttgtgtccccacccagatctcatctcgaattacaatccccacgggttgagggatggaccaggtggaggtacttgcatcatgggggcagtttcccccatgctgtgctcgtgacagtgagtgagttctcacgagatctgatggttttaaagcgtggcagttcctctttctcgtgcttacatcctcgtaactatcctgtggagaaggtgtctgctttcccctacctccatggttgtaagtttcctgaagcctccccagccgtgtggaactgtgagtcaattaaacttctttataagttacc

SEQ ID NO: 250940 - DNA, 443 bp, Homo sapiens
catttcagctttagagtcagctacatgaaaattcgaacgaccagcccaggtaaaacagagaagagaggttagcctgggaaaggtgtatcagtttatattctagaaacagaagtctcctgaccttcctgtgcttttggccctggacgtccctccttaccacgactctgggagcgggctcagtcctgcccctgcaggtggccccgggatcgctaggctccacagccactggcttctcccaacctgtctcacctctttcccctgggctggggtgtgggcttgatcagtccctggaggagacagctctgcggccttcgagggtcccagcgacacccactccacaagcgcaggagcgtgctggtcccagtgatgattcgctccctttgttaattactcagtgtttcttgttttaggatttttaactataccctgtaaaagaatcctta

SEQ ID NO: 250941 - DNA, 410 bp, Homo sapiens
actatatgggagtgaatgtatctagtgacatcacccttaaaagattagatgtgtagctgtgaggtaatataagtttagctaaatggtttttatgttctattagtactgccatgccacacttcacaatttgctgtgagaagtacaaccatttctttgcctctttaaatgactacacgtcagaatgtgaagaatgagtacatctcctattttaatgattttattatcttctcttagtcttctgtgaggtttgaagaatcatacacatctttgaactgtcttagctgttgatgatgctgttatcatgggcaacatagttcaactctgagtcttggtttccttatctctgtaatggggacttaaaattgctgtcttgaagtgatgttgtggaaataaaacattgaacaaagaaa

SEQ ID NO: 250942 - DNA, 753 bp, Homo sapiens
cgagctcttccggcttggatgtctacgccggttgtttctctgaattctggcctccctcctgtcactgatacttctttctccatcacttttgtgtgtacctggttaaggacaccctggtagccttgttgagctttataaatggagagacccttcaagtcatccagataattctcttagacagtagcaattgttgagcatcatgtgaggtgtgctaggctggggatggaactctaactaggtgacaccaccttctccagcactgaaaggaaaccagagcctgtgtctggagacttgtatttgacgtagaatactgttcatgataatttgtcaagggaaaagcaaattgcttttgttaaaaaaaaatactcaaaaaataatacttagtcttttaaaaatgtggcacatattcactgtggaatactacgcagccataaaaaagaatgagatcatttcctttggagcaacatggatggacctgtaagggcattagccttagccactaacacaggaacagaaaatcaaataatgcatgttctcacttacaagtgggaactaaatgatgagaacacatggacacagagaggggaatgccacacactggcacctacttgagggtggatggtggaaggagagaagatcagaaaaaatacatatgcatagtacgtggctgatgaaataatctgtacaccaagcctacatgacatgagcttacctatatgacaaacctgcatatgtacccctgaacctaaaata

SEQ ID NO: 250943 - DNA, 567 bp, Homo sapiens
atatatatgactttgttattgtctttatatgatgattaagtgtggttcaaggagatgcatatgggtgccatcttggcaaggagtggacttgtgatggttaatttcatctgtcaacttggctggaccataggatgcccagataattagtcaaacattattctgggtgtttctgtgagggtattttggatgagagtaacatttaaattggtggactttgtgtaaagcagattgccctccgtaatgtgggtgggcctcatttaatcatttgaaggcctgcagagagcaaaaagactgccctccctaatgcaagacagaatttctccatcagcctgcctttggacttcactgagacttttgactcttcctggttctaccacagactgccttcacatgcaaattgggatgctggctctccaaactgctggccttcagactggaacttcagagcatcagctctcctgggtctccagcccaccagccttccctaaagattttgtacttgccagccttcataatcacaggagccaattcctataataaatctctttctctgtgtgtaaaattcta

SEQ ID NO: 250944 - DNA, 589 bp, Homo sapiens
caaggagaggaattgtgagcctgtggatgtgtcagtagaaaccgtgaaactggaatgcagaggggagaaaaggttgaaaaacatctgaacagaacttccaagacctgtgtgacaatcacaaaagatgtaacaacatgtaatgagaatacaaggaagagaaaggagaagaaatattggaaattgtcatggctgagaatttttcaaaattaatgacagatccaggaagcaccaggaacaccaagcagaataaatatcaaaatgtctatacctagacacatacaaagcacaggaaaccaaaaaagaagagaaaatcttgaaaggagccagagggctcctatgctggcaccagtagctgcagaagagcaagggtaataaatagggcttctcttcagaaactgagcgatcaagaagagagtggcataatatatttattgtgttgaaaggaaaaaacaaaaacaaaaaactaccaacctagaattctgtatccagagaaattatccttcaaaagtgaaggagaaagaccttctcagacaaaagttgagggaatgtgtgattagtagacctgccttgcctttccttcatcataaaa

SEQ ID NO: 250945 - DNA, 383 bp, Homo sapiens
ggccgctgcagaagtatttgttaaaacttgtatggtaactttaccttctggtagattctaaactctttctttctgattgcaggagcaagatgtatcaaccagggtcctatgctttgatttggaatgtttgaatatgactcatgtttatttccttcaaggatgaagtgtgtatacctcagtagatcctgtcccccgcctcgcctcctgaaaatgtatgcttaaaaacaaattatgaagttattgctagatatgtggttggagtggccagtgtaaacttagttgttgcttacggcactttctgttctctgtggaacagaagggcggggcaggtggggaactggaagaagcagcttccctttgcttttcctgccaaatttagtaaa

SEQ ID NO: 250946 - DNA, 377 bp, Homo sapiens
tctgactccttttccatagggctgctgtagtatcctaggggtctactccagtccctggttacctcgaattttccagtccctggatgtctcaccagtgaaggtagtgaaacagcaaaaatggcagcctgcaccctcctctgggagctccatcccaagaagatgttggcacttcttaggaaggagccatccatgtctgaagagaagaaatgataattaacttcatcatgtggaaagctttagaaggaagtatcttgtccttctgtccaaacccgcctcctccttaccacccccaataaaaataaaagccaaacaaataaaacacgatcggccgggatttttctcctcaccgacccctccgcgcggcgcgcccgcgcccc

SEQ ID NO: 250947 - DNA, 384 bp, Homo sapiens
tctgactccttttccatagggctgctgtagtatcctaggggtctactccagtccctggttacctcgaattttccagtccctggatgtctcaccagtgaaggtagtgaaacagcaaaaatggcagcctgcaccctcctctgggagctccatcccaagaagatgttggcacttcttaggaaggagccatccatgtctgaagagaagaaatgataattaacttcatcatgtggaaagctttagaaggaagtatcttgtccttctgtccaaacccgcctcctccttaccacccccaataaaaataaaagccaaacaaataaaacagatgcggccggactcccttcccttctattctcttcaattgctctgcccgcggctctcctactc

SEQ ID NO: 250948 - DNA, 378 bp, Homo sapiens
tctgactccttttccatagggctgctgtagtatcctaggggtctactccagtccctggttacctcgaattttccagtccctggatgtctcaccagtgaaggtagtgaaacagcaaaaatggcagcctgcaccctcctctgggagctccatcccaagaagatgttggcacttcttaggaaggagccatccatgtctgaagagaagaaatgataattaacttcatcatgtggaaagctttagaaggaagtatcttgtccttctgtccaaacccgcctcctccttaccacccccaataaaaataaaagccaaacaaataaaacaataaatcagatgggcaagtcttcctctttcttccgactaattacgttgcccaccggg

SEQ ID NO: 250949 - DNA, 574 bp, Homo sapiens
tctgactccttttccatagggctgctgtagtatcctaggggtctactccagtccctggttacctcgaattttccagtccctggatgtctcaccagtgaaggtagtgaaacagcaaaaatggcagcctgcaccctcctctgggagctccatcccaagaagatgttggcacttcttaggaaggagccatccatgtctgaagagaagaaatgataattaacttcatcatgtggaaagctttagaaggaagtatcttgtccttctgtccaaacccgcctcctccttaccacccccaataaaaataaaagccaaacaaataaaacacattagcagtagctctgagtttcttcctttcactttttctctctcttcatgccttttctcctccattccttccttctttcaaatcatttttactagtttaagagaataattcaatctatatttagaaatcagacttaaaacttcaaaaattatactgaaatagcttccccttaaagggtgaaacagtcatgataaaaataacaaccgatgcggccgtcgtccttgctatgtcgcctccaaaaatagactataa

SEQ ID NO: 250950 - DNA, 377 bp, Homo sapiens
  misc_feature (345)..(345): n is a, c, g, or t
tctgactccttttccatagggctgctgtagtatcctaggggtctactccagtccctggttacctcgaattttccagtccctggatgtctcaccagtgaaggtagtgaaacagcaaaaatggcagcctgcaccctcctctgggagctccatcccaagaagatgttggcacttcttaggaaggagccatccatgtctgaagagaagaaatgataattaacttcatcatgtggaaagctttagaaggaagtatcttgtccttctgtccaaacccgcctcctccttaccacccccaataaaaataaaagccaaacaaataaaacatggatgcggccgtttctcctcccnacggaactcacccgccgtgcgcacccccgggc

SEQ ID NO: 250951 - DNA, 371 bp, Homo sapiens
tctgactccttttccatagggctgctgtagtatcctaggggtctactccagtccctggttacctcgaattttccagtccctggatgtctcaccagtgaaggtagtgaaacagcaaaaatggcagcctgcaccctcctctgggagctccatcccaagaagatgttggcacttcttaggaaggagccatccatgtctgaagagaagaaatgataattaacttcatcatgtggaaagctttagaaggaagtatcttgtccttctgtccaaacccgcctcctccttaccacccccaataaaaataaaagccaaacaaataaaacatgcgtcggccgaaaccccctcttttttttttttggcggcggaatagcaac

SEQ ID NO: 250952 - DNA, 395 bp, Homo sapiens
aggggattagctgagggctcgcggggtgcgggggagcctgggaatggtggggttcagtttgggactggcaatccagtgcataaaggacaccctagaagtctcgtgttgcacctcgggggaccctgctggggcccaaaagccaggctgaactctcgaacttctgggctcaagcgattctcttgcctcagcctcctgagtagctgaagctacaggtgtaagttactgtgtttggcttaaccttcaatacttaggaaaggccatgtgaccacacaccaagaagctagctgtctgccagccaggaagagagccctgaccagtaatcaaattggctgaagacttgatcttggactccttgtctccagaaatgtgagaaaataaaaatttctgttaagtca

SEQ ID NO: 250953 - DNA, 781 bp, Homo sapiens
aggggattagctgagggctcgcggggtgcgggggagcctgggaatggtggggttcagtttgggactggcaatccagtgcataaaggacaccctagaagtctcgtgttgcacctcgggggaccctgctggggcccaaaagccaggctgaactctcgaacttctgggctcaagcgattctcttgcctcagcctcctgagtagctgaagctacaggtgtaagttactgtgtttggcttaaccttcaatacttaggaaaggccatgtgaccacacaccaagaagctagctgtctgccagccaggaagagagccctgaccagtaatcaaattggctgaagacttgatcttggactccttgtctccagaaatatgttggcacttcttaggaaggagccatccatgtctgaagagaagaaatgataattaacttcatcatgtggaaagctttagaaggaagtatcttgtccttctgtccaaacccgcctcctccttaccacccccaataaaaataaaagccaaacaaataaaacacattagcagtagctctgagtttcttcctttcactttttctctctcttcatgccttttctcctccattccttccttctttcaaatcatttttactagtttaagagaataattcaatctatatttagaaatcagacttaaaacttcaaaaattatactgaaatagcttccccttaaagggtgaaacagtcatgataaaaataacaaccgatgcggccgtcgtccttgctatgtcgcctccaaaaatagactataa

SEQ ID NO: 250954 - DNA, 542 bp, Homo sapiens
tctttttaagtgaagttcattttcttcatggaataagatagtgtagttcagcaaatattgagtacctgccacatgacaaactgtatgttctttaagaaccgtatgaaattgctgatatttaactgttgtttacttatacaaactgcaacttagtgtgattcaatcttatactttatgttatttaattcttacaataatcccatttttagatagatgttttcatggcttagaaaacatttctgaccaagaatagtttctatacttgtggagacactcatagccaaaaacttggatggtctaggttccctcagccccccgaaataaaccttagtctgtttaagatgtgtaaagaatatgctctaagatgacccctgatgactcctgtgcctcttgatgtttatgacgttttgtaatgccttccccttgagtaaatttcttctaatcatcattgtgggtatgtcacttcttgctagcagactctctcccttgctggctttgatgaagcaaattaccatgttgggaaagtccacacagcaaggaac

SEQ ID NO: 250955 - DNA, 317 bp, Homo sapiens
ttatggaagaaagggggcccagaaaggcaaaagtgcccagggcccatggaagtcataacgtggccctgccctagtcttccctcctgcccactcgaaccctctagactccagagttttccttcccccatatcaaaacgtacctgctatctcatgtccctccactaaccctggagctcctggagggcaagaccattctttatgtatcctctgtgcccacagtcatatcaggtattgcgttaccatttcttctttttgcagggaggggggttggaggtgggatgtatggggtggagcagaaaactcagaaaaaaaaaaaa

SEQ ID NO: 250956 - DNA, 342 bp, Homo sapiens
gaaatttcatggtcccacaatgtcattgccatacagcttcactagagttctttgaaccacagctgaaaagagctttgtattattttttaatcccctccccagatatcatttagaactattataataaaggtggtgggtaataacaacctaaggagcctttctagttaccttaagttgcagctaactctgtggtttcttttttgaggcctaacaaacatactgtattttacattatcaaaatgtagtttacattactcactatgttaatgagtatataaaagattcttttgcattgatgcattttgtatctgccttcattaaaagcaaaacagccctaaaaaa

SEQ ID NO: 250957 - DNA, 288 bp, Homo sapiens
agatgacgagttagtgggtgcagcgcaccagcatggcacatgtatacatatgtaactaacctgcacaatgtgcacatgtaccctaaaacttaaagtataataaaaaaataaataaataaaaaaagaaaaaaaagaaaaaagaaaaatatatatatatatatattcatatactgtagatagaatgtaagtaataagtgatcatgtgaataattagcattatatctcattggtttactttgcgtaatagtaaaatgaatgtaatatttctaatatagactctactattta

SEQ ID NO: 250958 - DNA, 772 bp, Homo sapiens
tcccttgtagggaaaaacaagcctccatgaagcaggacccccaccccatcccgcctggagccatcactgcctggcctcgtgctaacatctctttcttcagaaattccaccagactaaacagaggaagctgccctgtctctaagtctagcctgctgtggctgctgagagtacttgcagcctacatgcatctccaaactggcccccactgctgggatttggagactgttttggcaaaaagtaagaggccagaaagtcaagttatctctaacctctcctccagagagtagaatacccccagtgtagtccccagtgactgcatcctattccatcaaagccgggtatcacagctcacttaacctttccctattgttaagcaatttgctttattccaagttttgctctcataagtaatgctgggataaatatttttggtttattgacttttattgcagttctaatgatgtctttggggagtacaattttgatgtcaaaaggtaaacacattttttaaattcctggtgcattttcccacgtggccttccataagatttgtatctttttacattcccatggcaggggatgctgtctcacagactcttctcagcaagcaaacattatattttctacaaacgtttgttaattttgatgattggaaagtatatcctgttatttttaagtcagtagaattccagcagttttcttcccatcaaataccatttaactttccattttggaaggaaggaagggagggagggagggaggaagggaagga

SEQ ID NO: 250959 - DNA, 710 bp, Homo sapiens
ctcttgccctatcaaagagaatagttttggaggggagaagtgggaccaaaaaagatgcagttttcatttgtattgggaaatgtgaaaataaaattgacaactcttttagttaaaaacaaaaaaaagaaaaggaaacaagatgtggggctgccatatgtaataccgtggattccacggatcttctactctggaggcaaatattatctttgctgaagccagaccaacctgacacaaagaccttttgtttttttaatgtgactgtgttttattttagaatgtgtaattcactttagaagggcaaagtacctgtctggggaagactatttaatttcctgcatttatttagaatgttggctgatgttattatgaagggaaacagctctaacaactgagtgccccccacatagccacagctcatgagttcacggggcaaaggaaatgaacagcagcctcctaatagccagccttctttgtgatgtggaaataattatcagcatgtaaaagactatatatatattcaacaattctgatcccctgaaaaattcaaatctacaactgatttgcttcctgggctcctgaaaacaactttgtcaaaattgttcagaaatataatcagccaatcgttgccccttggggacgcaggataaagcaagtcagccatgaccaatgaggagtcggccgtgcacaattacatgcagacctgcaggaca

SEQ ID NO: 250960 - DNA, 451 bp, Homo sapiens
agggcctgggcttggaaccctgttctggcacccactctctgtgggcccttgggccagcccctcaccctctctctgcctcctttctcttctgtgtacacccaaggctgacttcaggattttgccatcccatatactattttactcctaatttatctataagtggattcaattaacatttacacgtatggggttaaaagagtaacttcatatggccaccagagatgcaaaaccatcattactaggcatacataaagggaaattacagatcattaaattctagtagaaacagttgtcctagacagttctgaagccggggcttgctctctttattagaagcaggagggaagcaagtattagagagatgctaaaaacattagcatccagtgatatttttttcccacctaatcttaaggattgaaacagacattaaagaagatgtattttcttacca

SEQ ID NO: 250961 - DNA, 362 bp, Homo sapiens
tattactcaatgccatttttttggcctaccttatgacagataaaatttttaagaaaccctgtctctactaaaaaaaaaaattagccggtgtgatgttatgtgcctgaagtcctagctactccggaggctgaggcaggagaactgcttgaacccgcaaggtggaggttgcagtgagctgagattgcgtcgctgtgctccagcctggcgacagggcaagactctatctaaaaaaaaaaaaagatttattagctgttgacagaactatagtgaattcttcaccaacttattgagcatcagaatactggtcagcttctaaggtagctttaaaaaacaaggaaccctgatttacagaaaaaaaaaaa

SEQ ID NO: 250962 - DNA, 459 bp, Homo sapiens
aaggtttgcagcatgctggtccaagatatttgccctcagacccattctctggcccttccctactctgtgctatattgggtgaactacatattccagattctcttgtcaactggctgccaaacagctttgggaggtacaggtggaagactgcagggaggggaaaagggaaaagtctaagtggtcctccctctgttactctccctcctacctctgactgggaatttcccacagttctagctcctgccaggcagcccctgccccatcattctagctccctctgggcagcccaggttcttgggctctaacatctcttcctgccgttgctccatccctaggggtggcagtgacctccagctgttactaatcttagtagcctcactgctccatttggtttctcaggaactccttcaggggtgtaaccagagactcagtattaaattccctacactgaaagactta

SEQ ID NO: 250963 - DNA, 249 bp, Homo sapiens
gcttcttctgttcatttctgggactcgtgtgggtcaacctccatgcatctgtaaggtggtctaatgcatccctaattctcgggggacctgtcagtgacttgcagtagcatctaatgcttattttacaaaattggcccagcctcgaccttgggtctacacgctatttacgtctctatctatatttcgtgttttttttcttttgttatgtccttgttcagatcaggatgtgccaaatatttttaaatgaac

SEQ ID NO: 250964 - DNA, 404 bp, Homo sapiens
ttagtttaatatttttagaattttattttatccattggccttctaaagcaaaaatatatttaccttttggagggagaagtgtttatatgtagattacaaattacttcctgaggccgggcatggtggctcacgcctgtaatcccagcactttgggaggccaaggtgggcagatcacctgaggtcaggatttcgagaccagcctggccaatatggtgaaaccgtgtctctactaaaaatacaaaaattagctgggtgtcgtggcgcacacctgtaatcccagctgcttgggaggctgaggcaggagaatcacttgaacctgtgaggcggaggctgcagtgagccaagatcgtgcctctgcactccagcctaggtgacaagagcgaaactctgtctcaaaaaaaaaa

SEQ ID NO: 250965 - DNA, 399 bp, Homo sapiens
gtcacgccccctgtggctggcgggtttccatggagaccacaggcggtccaggcccttgggcggggcgacgggagcctgtggtccaccaaggctcgagaatcctcagccccgggctgcccgcgcccggtccaggtgggcaaaggcctgacgagcatacttgggcggcagagccaggccgaggaaagagatttacaaaaaaggaaaaaacgatgggattcgatgaaagcttgtttccgatgggcgggttggtgggatgatggtggtgataatgatagcatcaatcatggatcgctccacatgtgacagacacggttctgagcttaaacagttcgatgtggcagggccctgttgtgccaattatgcagatcatagcaataaaaataattgttgaaggtccgc

SEQ ID NO: 250966 - DNA, 462 bp, Homo sapiens
tttgtagagaccgggtgttgcaatgtacccaagctggtcgtgaactcctgagctcgagcaatctgcctgcctgggcctcccaaagtgctaggaatacaggtgtgagccaccacacccaacccacgattgtaactggctcaggggctggcatagcaatggtgtctggcaacttgatcattcactatgccatcagcccatctctcaaggaacagctcttctatgccattctggactttgccctatctgaggccatgggactcttctgtttgacagtcaccttcctcatcctctttgccatgtgaagctccatgggggtcacctactcacccttgctgctacaactccataacattcctggtgctggcatgtgctgagttttaccattaaacacgtttctcttttttttttttttttttttttttttttttttttttttttttttattatttttttttataaaat

SEQ ID NO: 250967 - DNA, 503 bp, Homo sapiens
tagggcttgggtttcattttactctacttagaattagtaattttgtttgttactatttcacggatgctgccacaagacatgaaacttctgggtaagagacaaaggtctttattactcattgcacagcaagtaacttgatcagcatatctgtgttgataccctttgcccaccaagacacagaggggcaacacagagggcccagatagatgcctaaacatgcagtaagttgcattacagaaaaggaacactgagcatggtgaatctgctgttttgtagcaagtcagaaagcctgttctttgtcccacagggagatgttacctcattcttcaaagatgctcactgcaaagacatccctgagaaatgctatggtaaacagtcatcagggtcttgcatctcaggcatactcagcagatatgtaggtgtgttagatctccatggaagcatgtctcccaacacagcttaacacataattttttaaaatgttgtgtaagcacaactcagat

SEQ ID NO: 250968 - DNA, 120 bp, Homo sapiens
tttaagatgaaggtaaatatttaaattttctctcccaagaaaattcagatgaaaacaggataagtattcaatgacctaatccaaaaagtgtataaaatttaaagcaaagacaaaacaaaa

SEQ ID NO: 250969 - DNA, 399 bp, Homo sapiens
ttcccagtaatgcctgccagaggagaaggcctgagctccccatgctgcaaagttctctgctctctgggactccccgggtgcaccatcatggtcatctccaaataccacatttctcacatcctcagaaaggctcatatagtgactcgtcttttccttactcagaggatcatccactgcaagaagaacaaaaatcagatcaaggagttacgtgggggtcagatgttatctgcccaggtactggctttatttgtacctcctgtaagtgacagacagaatacatggagcaaaaagactttggagactgtcatctatgaagatcaagggttattatgacttctacagcacaggagaatccttaaaatcacacagaaaaacaaataaacaaacatatcattaatt

SEQ ID NO: 250970 - DNA, 498 bp, Homo sapiens
tcccaccccacacctaacactaataacattgcagtctgtctccagcaagcagccctgacctcagggtgtggccggataaacacactgcagtccgtccacacaatggaacgtaactcagctgtagaaaggcatgtggcaccagcaggccagagtgaggaggaaccttgggaggaacatcccactgagggaagcgtggcagacgcccccacataccatgtgattccatttttatgaaatgtccagaatgggccggtccatggggactgaacacagagtggtgggggctcaggagaagggaacgggcaggtgctgtctgaggggcctggggtttcctgctgaggcaggagaatggcgttaacccaggaggcggagcttgcagtgagccgagatggcgtcactgcactccagcctaggtaacagagtgagactccatctcaaaaaaaaggaaatatgtggagtgggaaatcatgcttttaataaaacgagacccaaagaaac

SEQ ID NO: 250971 - DNA, 689 bp, Homo sapiens
ggaccttgtgtgcagctagaaccacagaccctcttcccttcagagccccagggagaggggaaaaataccactaggatttcagtgtcttcacaggaacagggtttcaggtttgggaaacattcatgccatccctcaaataagaagcttggtctgtttaacaaatcttcacttatcgtagtgctaggcatcaaggattcaaccagaatatgctgcataccttgcccttaaggagcttatggttttgtggagggagacagaagtaagtatgatagcacccaaacttactcctgtgataacagttgaagcactgggagagacacctaaagaaggtttcctggtggaggaaaggacctttacattgaggccaaaaaataaaagctaggctggagtaagggaaagtctaggcagagggaacagcaggtacagaagcctcaagcaagaaagagcatggtgttgtgagaattgcaagtggctgtgatctgtagtgagaccatagaaccattaattaaatgaaactggagaaaaggaaaatgagtaggagccaaggcctgaggaccgtgtaatgctcttagaggttttggacttgatcctgagggcagtggaagatcattgtgagattttaaatagagggtgacatgatcagatatgctttacagcagatcaccatggctacagtgcagacatgggat

SEQ ID NO: 250972 - DNA, 612 bp, Homo sapiens
ggagagggtgggtgtcctgagagactcaactgggacatgggaggaggcgcagagggtccctgtcccttgcttgcttgctttcccgaaaagtccccacaagtgtgaaacagaaggaggtgcttgccaggcctcccatggccccctcctttctcggggtctcctcccacgccatggctgtgagtgtctaacataagggacgctgtttttgcaggttttgtggttgtgattcctttgaaccatatccagcccatcttacatcacagtgccatgcttgacttggtctccaatacatcggcacccattggcatttggagaacttgctccgtagttatttgacagtttttagttgtctgtgataatgtattctctatgtttccaatcgtcagtatgggaatctctcccccaacctttcaatttctgggtttgattttttgtatcatatttggtttttttgctttttaaagttgtgattcctttggttattagcccctcccagtggctgcttgtttatgcattatgtttgtgacttcttttgactgtcagtgttgagccagtcttgccaagaaacaatatcaagtatttcctatttctctacttcttgaaaaaaaaaaa

SEQ ID NO: 250973 - DNA, 5071 bp, Homo sapiens
aggctcgcagagcgagcggcgccggcgtcatgtgactgcccggagttggtgccaggagccagaggggagccaggagcggagccgcgcggagccggggcccgagccggagcgcagcgagagcgcccgccgcacgcgcgcccgtccccgtcccctgcggccgccaacgccgcccggactggagccctgacattgctgcgctcggggggctccaggcagcccgtatcggggcctttatttctcgtcggcggcgccctgcaccgcgcctcgcaaagccaaacaccagagcaccctagaaggtttaactaaaagaatgctcatgtttgacccagttcctgtcaagcaagaggccatggaccctgtctcagtgtcatacccatctaattacatggaatccatgaagcctaacaagtatggggtcatctactccacaccattgcctgagaagttctttcagaccccagaaggtctgtcgcacggaatacagatggagccagtggacctcacggtgaacaagcggagttcacccccttcggctgggaattcgccctcctctctgaagttcccgtcctcacaccggagagcctcgcctgggttgagcatgccttcttccagcccaccgataaaaaaatactcacccccttctccaggcgtgcagcccttcggcgtgccgctgtccatgccaccagtgatggcagctgccctctcgcggcatggaatacggagcccggggatcctgcccgtcatccagccggtggtggtgcagcccgtcccctttatgtacacaagtcacctccagcagcctctcatggtctccttatcggaggagatggaaaattccagtagtagcatgcaagtacctgtaattgaatcatatgagaagcctatatcacagaaaaaaattaaaatagaacctgggatcgaaccacagaggacagattattatcctgaagaaatgtcaccccccttaatgaactcagtgtcccccccgcaagcattgttgcaagagaatcacccttcggtcatcgtgcagcctgggaagagacctttacctgtggaatccccggatactcaaaggaagcggaggatacacagatgtgattatgatggatgcaacaaagtgtacactaaaagctcccacttgaaagcacacagaagaacacacacaggagaaaaaccctacaaatgtacatgggaagggtgcacatggaagtttgctcggtctgatgaactaacaagacatttccgaaaacatactggaatcaaacctttccagtgcccggactgtgaccgcagcttctcccgttctgaccatcttgccctccataggaaacgccacatgctagtctgattgcctctgtgtcctgcctcagcgtgactccccactcacctggctctctctctgtcctgcctcccattatctaacacattttttacatgtacattttaatttgattcagctggtctgaatctctgaatttatatcatccaaaacttccatatggtcagtagtagatgttctctaatcctccctctccttaccacgggtcagacctaaagaatgtgaacacttttttttttttttctggggatgctaagcaaacccttcttacagatacgtttaatgtaataagaacaagggaacatgtaaactaacataaccaattgtcagttctccatgtattcctcaaaagaatgtcagagtaaatgtattagaaatacagtatccagactgctagtccttgccagagacattcttacctctgccctgtgataatattttatgcttgacagtgaaaacaagtgtggccccttgcaccggttagctagaagtacagccagatttcaagctagtgcagtcacctcttccgtcattcttcacaaatcttgtcaacctggatcttagacttcatctgaatcgagttctttgccctcctttgtgcctgcagctcatatggaggtctttgccaccaatgggagatgagcccaaactttcgatctaggtgggtgatgtgtagcagttcaagggaagggtgctgtgttttcatagcatggagtcggaggagagggccatttagcagggggagcagaagaggcaattcctcctgggctaggggttgtcagtgaggtttcaacattttgttagctgtgtgcagcattcccagagcttcagtctctgtgcatactcagctttgtagaaccatgctgcaaagccatataccgatggggttatccatgcaactatctccattcctacaatgtccttaatatgagatcatcaaacattgatagtagggactccatggaatatttgcccagtaatggtaagaaatctttcgggtaagagtatggatggttcttcttttacccaatctgcttatagctttttttgtaaacagggaaatgttgagtggtacttgtattcccttatcaaattaatcacatagcttttatacagaaactcttcctgtgtgagctgttaaggtgccaaattggctgtcatttgtattcatgacacataccataaagcatctgctaatgctttaatggattgattcaattaagacctgagtgacactatttgtaaatataactagttgtgaagcacacatacctttattttgggaatttatgagaaaatatagaaaaccacagatcagggattcatatatgtagctcaaaaattcccaaaagtttactgttagagttggcaatttcctatcactatttcagtgtcagaacaaactgaaaataatggctcgtgtttatgttgaagataaatagcaccattattgggggaagttattcaaaagcaggcttttgagcaccatagtctaaatgccaataaaaataattcatacatagaaatgtcattggtcctgaatttgaagaaagtgagcaacagtagttaaatgtgggtgcatataaccaaattccccttcatcaagaatggaggagaagagagaagaatgaaatcctgaagattcatcccagccgcaactcaggatccaacacaactttaactgggaggaatacattgtttgatcatttttaaaacatctgtgaatgagtgattccggaggcctgtgaattgtgtggggagcttgctttgatggcactgtgttaattgtgaaccagctgtaaagaaatgtagttaagaaatgcaaagaaatgtgttatcttggcacttgggtttgattttcctttttttaaagcactgcaaaacttctttaggatactaaaacatcctaattgggctgtttttttgttttgttttgtttttcagctaaaggcaaagataatttttttttcagctgaagtttttcttttttgcaactatgacatgaattgagtgataaaatggctctttgaaaagtagatattgtctgtattgtaaatgcttagtcatattcatggcaaagtgttcatttcttgagatggttctttcacaacacacaagaatcaagatggaacgcaaggaaaatctttttgttttgaccgaggtaaccagtttatgtgtgttccaatccatagagaagtgggggaaagggcgagaaaggatcagattgatctgggatcagctttgagcctgagttcagtgaatagcctcatgggcatctcatggaattgatgcatttgctgtggcatatttaaattttgttcaaaagatttgaagcaagaccttgcaaagactcttaacattactgttcagcttgcttagattgtgttaacagttcatttaacaaagatccgttttaactctgaacaaaagcaacccagagcggccattctctattcccatgctggtcaatacgctttcattaccaattggcccttaccaaacttttcttatatatatatttgtattttactatgatagttgagaaatttagcctcttagtcatttttagctgttattgtggaagacctcaaatacaagattagatgcccttgaacatgttttaatgatgtgtgtcatgttactatcaatggtgatttcaatcgcaatattttaaattgatgagaatgatttgtaaacatgaagttactattacgtaaattctgtttgttatagagtttcttcagttgttacccaagtgtcatcctagagaagtcagaagaatcagaatccatcgtattttagagttatgtgaatctacatcataaatgggcattaacattctaaattgcttggtttggagaatgtgttagcagcatagctatattcaactagggagatgctaaatacacagaagtttcaagagccttggaacagaattacaggggaactatatatgtatatgtatattttattaaacacccatctgcactatcagtattgcactaatgtggaatttgaaagactattttgctgatactgtatatatgcgcatcattcctgattagattgttgtaaagacaatctgaaagatctaaggttttaaaataatttggtttgaaaatatacagttgtcttgaaggaattgctgtcatacatgaagttgctccgagctgtctttattctcttcttggtcaaggttaacaattgctaaatgatcgcaaattcacctaaacaatacatttacaaagccatctttacatgcattaaacgagggctacaacaatattgttttacaaatactagcacttttttttctgttatgtacttagtgttagagggtcaaaataatctttctgcttagcatctcttaaaccatacctgcaaatatagcaggattattacatttacagtactttaatacttgtataaactatgcagaaatttttaataaagtgtaatatattttataagctaataagactgaatgggtaaaggtttttagcatgcgttagtatacttgcagatactgaaacattttggtaatctttcttactaaagatgtgaatgtttaatgtaccttctctgtttctactctgtagtccaatgggaattcagtaatgacattttgtcatgtcaaactgtgaacataaatttgtactgtacagtcctcatatactatatacagtatgcaatatatattatatacttgttaataaaaccatcagaatatta

SEQ ID NO: 250974 - DNA, 5604 bp, Homo sapiens
aggctcgcagagcgagcggcgccggcgtcatgtgactgcccggagttggtgccaggagccagaggggagccaggagcggagccgcgcggagccggggcccgagccggagcgcagcgagagcgcccgccgcacgcgcgcccgtccccgtcccctgcggccgccaacgccgcccggactggagccctgacattgctgcgctcggggggctccaggcagcccgtatcggggcctttatttctcgtcggcggcgccctgcaccgcgcctcgcaaagccaaacaccagagcaccctagaaggtttaactaaaagaatgctcatgtttgacccagttcctgtcaagcaagaggccatggaccctgtctcagtgtcatacccatctaattacatggaatccatgaagcctaacaagtatggggtcatctactccacaccattgcctgagaagttctttcagaccccagaaggtctgtcgcacggaatacagatggagccagtggacctcacggtgaacaagcggagttcacccccttcggctgggaattcgccctcctctctgaagttcccgtcctcacaccggagagcctcgcctgggttgagcatgccttcttccagcccaccgataaaaaaatactcacccccttctccaggcgtgcagcccttcggcgtgccgctgtccatgccaccagtgatggcagctgccctctcgcggcatggaatacggagcccggggatcctgcccgtcatccagccggtggtggtgcagcccgtcccctttatgtacacaagtcacctccagcagcctctcatggtctccttatcggaggagatggaaaattccagtagtagcatgcaagtacctgtaattgaatcatatgagaagcctatatcacagaaaaaaattaaaatagaacctgggatcgaaccacagaggacagattattatcctgaagaaatgtcaccccccttaatgaactcagtgtcccccccgcaagcattgttgcaagagaatcacccttcggtcatcgtgcagcctgggaagagacctttacctgtggaatccccggatactcaaaggaagcggaggatacacagatgtgattatgatggatgcaacaaagtgtacactaaaagctcccacttgaaagcacacagaagaacacacacaggagaaaaaccctacaaatgtacatgggaagggtgcacatggaagtttgctcggtctgatgaactaacaagacatttccgaaaacatactggaatcaaacctttccagtgcccggactgtgaccgcagcttctcccgttctgaccatcttgccctccataggaaacgccacatgctagtctgattgcctctgtgtcctgcctcagcgtgactccccactcacctggctctctctctgtcctgcctcccattatctaacacattttttacatgtacattttaatttgattcagctggtctgaatctctgaatttatatcatccaaaacttccatatggtcagtagtagatgttctctaatcctccctctccttaccacgggtcagacctaaagaatgtgaacacttttttttttttttctggggatgctaagcaaacccttcttacagatacgtttaatgtaataagaacaagggaacatgtaaactaacataaccaattgtcagttctccatgtattcctcaaaagaatgtcagagtaaatgtattagaaatacagtatccagactgctagtccttgccagagacattcttacctctgccctgtgataatattttatgcttgacagtgaaaacaagtgtggccccttgcaccggttagctagaagtacagccagatttcaagctagtgcagtcacctcttccgtcattcttcacaaatcttgtcaacctggatcttagacttcatctgaatcgagttctttgccctcctttgtgcctgcagctcatatggaggtctttgccaccaatgggagatgagcccaaactttcgatctaggtgggtgatgtgtagcagttcaagggaagggtgctgtgttttcatagcatggagtcggaggagagggccatttagcagggggagcagaagaggcaattcctcctgggctaggggttgtcagtgaggtttcaacattttgttagctgtgtgcagcattcccagagcttcagtctctgtgcatactcagctttgtagaaccatgctgcaaagccatataccgatggggttatccatgcaactatctccattcctacaatgtccttaatatgagatcatcaaacattgatagtagggactccatggaatatttgcccagtaatggtaagaaatctttcgggtaagagtatggatggttcttcttttacccaatctgcttatagctttttttgtaaacagggaaatgttgagtggtacttgtattcccttatcaaattaatcacatagcttttatacagaaactcttcctgtgtgagctgttaaggtgccaaattggctgtcatttgtattcatgacacataccataaagcatctgctaatgctttaatggattgattcaattaagacctgagtgacactatttgtaaatataactagttgtgaagcacacatacctttattttgggaatttatgagaaaatatagaaaaccacagatcagggattcatatatgtagctcaaaaattcccaaaagtttactgttagagttggcaatttcctatcactatttcagtgtcagaacaaactgaaaataatggctcgtgtttatgttgaagataaatagcaccattattgggggaagttattcaaaagcaggcttttgagcaccatagtctaaatgccaataaaaataattcatacatagaaatgtcattggtcctgaatttgaagaaagtgagcaacagtagttaaatgtgggtgcatataaccaaattccccttcatcaagaatggaggagaagagagaagaatgaaatcctgaagattcatcccagccgcaactcaggatccaacacaactttaactgggaggaatacattgtttgatcatttttaaaacatctgtgaatgagtgattccggaggcctgtgaattgtgtggggagcttgctttgatggcactgtgttaataaaagttgtagggactgtgcacctaagaggctaagaggtcccactcatccgccctgtgaaccagctgtaaagaaatgtagttaagaaatgcaaagaaatgtgttatcttggcacttgggtttgattttcctttttttaaagcactgcaaaacttctttaggatactaaaacatcctaattgggctgtttttttgttttgttttgtttttcagctaaaggcaaagataatttttttttcagctgaagtttttcttttttgcaactatgacatgaattgagtgataaaatggctctttgaaaagtagatattgtctgtattgtaaatgcttagtcatattcatggcaaagtgttcatttcttgagatggttctttcacaacacacaagaatcaagatggaacgcaaggaaaatctttttgttttgaccgaggtaaccagtttatgtgtgttccaatccatagagaagtgggggaaagggcgagaaaggatcagattgatctgggatcagctttgagcctgagttcagtgaatagcctcatgggcatctcatggaattgatgcatttgctgtggcatatttaaattttgttcaaaagatttgaagcaagaccttgcaaagactcttaacattactgttcagcttgcttagattgtgttaacagttcatttaacaaagatccgttttaactctgaacaaaagcaacccagagcggccattctctattcccatgctggtcaatacgctttcattaccaattggcccttaccaaacttttcttatatatatatttgtattttactatgatagttgagaaatttagcctcttagtcatttttagctgttattgtggaagacctcaaatacaagattagatgcccttgaacatgttttaatgatgtgtgtcatgttactatcaatggtgatttcaatcgcaatattttaaattgatgagaatgatttgtaaacatgaagttactattacgtaaattctgtttgttatagagtttcttcagttgttacccaagtgtcatcctagagaagtcagaagaatcagaatccatcgtattttagagttatgtgaatctacatcataaatgggcattaacattctaaattgcttggtttggagaatgtgttagcagcatagctatattcaactagggagatgctaaatacacagaagtttcaagagccttggaacagaattacaggggaactatatatgtatatgtatattttattaaacacccatctgcactatcagtattgcactaatgtggaatttgaaagactattttgctgatactgtatatatgcgcatcattcctgattagattgttgtaaagacaatctgaaagatctaaggttttaaaataatttggtttgaaaatatacagttgtcttgaaggaattgctgtcatacatgaagttgctccgagctgtctttattctcttcttggtcaaggttaacaattgctaaatgatcgcaaattcacctaaacaatacatttacaaagccatctttacatgcattaaacgagggctacaacaatattgttttacaaatactagcacttttttttctgttatgtacttagtgttagagggtcaaaataatctttctgcttagcatctcttaaaccatacctgcaaatatagcaggattattacatttacagtactttaatacttgtataaactatgcagaaatttttaataaagtgtaatatattttataagctaataagactgaatgggtaaaggtttttagcatgcgttagtatacttgcagatactgaaacattttggtaatctttcttactaaagatgtgaatgtttaatgtaccttctctgtttctactctgtagtccaatgggaattcagtaatgacattttgtcatgtcaaactgtgaacataaatttgtactgtacagtcctcatatactatatacagtatgcaatatatattatatacttgttaataaaaccatcagaatattaaatgtgatcatgtgattacttcatatgcagtgatcactagagcaaaacttacagagcaatgtaagaacccttgcttagaacattacttactctgatgggcagttattgttgatggagggacagaaaaatagatctaactggaagatgaactaccggaattaactcagccctcaagctatgtccctggttttctgaaaacagccaacaggaagtctcctaggctgaaatcataaaactgcagacaatccagcaaaaatctacaaactcacctagttcattcttgaaatacttcttgtatttgttatttatgaacccctgcctgcttccaaaaagaacttgcttgcagcgttttgtattaaaagacgcatgtgtataatactttaaacttttagagtaaaatatcaagactctcatgttggggagtggggaacgaggaacagaacaataacgcattaaagtaaataactctggataaaagt

SEQ ID NO: 250975 - DNA, 5070 bp, Homo sapiens
aggctcgcagagcgagcggcgccggcgtcatgtgactgcccggagttggtgccaggagccagaggggagccaggagcggagccgcgcggagccggggcccgagccggagcgcagcgagagcgcccgccgcacgcgcgcccgtccccgtcccctgcggccgccaacgccgcccggactggagccctgacattgctgcgctcggggggctccaggcagcccgtatcggggcctttatttctcgtcggcggcgccctgcaccgcgcctcgcaaagccaaacaccagagcaccctagaaggtttaactaaaagaatgctcatgtttgacccagttcctgtcaagcaagaggccatggaccctgtctcagtgtcatacccatctaattacatggaatccatgaagcctaacaagtatggggtcatctactccacaccattgcctgagaagttctttcagaccccagaaggtctgtcgcacggaatacagatggagccagtggacctcacggtgaacaagcggagttcacccccttcggctgggaattcgccctcctctctgaagttcccgtcctcacaccggagagcctcgcctgggttgagcatgccttcttccagcccaccgataaaaaaatactcacccccttctccaggcgtgcagcccttcggcgtgccgctgtccatgccaccagtgatggcagctgccctctcgcggcatggaatacggagcccggggatcctgcccgtcatccagccggtggtggtgcagcccgtcccctttatgtacacaagtcacctccagcagcctctcatggtctccttatcggaggagatggaaaattccagtagtagcatgcaagtacctgtaattgaatcatatgagaagcctatatcacagaaaaaaattaaaatagaacctgggatcgaaccacagaggacagattattatcctgaagaaatgtcaccccccttaatgaactcagtgtcccccccgcaagcattgttgcaagagaatcacccttcggtcatcgtgcagcctgggaagagacctttacctgtggaatccccggatactcaaaggaagcggaggatacacagatgtgattatgatggatgcaacaaagtgtacactaaaagctcccacttgaaagcacacagaagaacacacacaggagaaaaaccctacaaatgtacatgggaagggtgcacatggaagtttgctcggtctgatgaactaacaagacatttccgaaaacatactggaatcaaacctttccagtgcccggactgtgaccgcagcttctcccgttctgaccatcttgccctccataggaaacgccacatgctagtctgattgcctctgtgtcctgcctcagcgtgactccccactcacctggctctctctctgtcctgcctcccattatctaacacattttttacatgtacattttaatttgattcagctggtctgaatctctgaatttatatcatccaaaacttccatatggtcagtagtagatgttctctaatcctccctctccttaccacgggtcagacctaaagaatgtgaacacttttttttttttttctggggatgctaagcaaacccttcttacagatacgtttaatgtaataagaacaagggaacatgtaaactaacataaccaattgtcagttctccatgtattcctcaaaagaatgtcagagtaaatgtattagaaatacagtatccagactgctagtccttgccagagacattcttacctctgccctgtgataatattttatgcttgacagtgaaaacaagtgtggccccttgcaccggttagctagaagtacagccagatttcaagctagtgcagtcacctcttccgtcattcttcacaaatcttgtcaacctggatcttagacttcatctgaatcgagttctttgccctcctttgtgcctgcagctcatatggaggtctttgccaccaatgggagatgagcccaaactttcgatctaggtgggtgatgtgtagcagttcaagggaagggtgctgtgttttcatagcatggagtcggaggagagggccatttagcagggggagcagaagaggcaattcctcctgggctaggggttgtcagtgaggtttcaacattttgttagctgtgtgcagcattcccagagcttcagtctctgtgcatactcagctttgtagaaccatgctgcaaagccatataccgatggggttatccatgcaactatctccattcctacaatgtccttaatatgagatcatcaaacattgatagtagggactccatggaatatttgcccagtaatggtaagaaatctttcgggtaagagtatggatggttcttcttttacccaatctgcttatagctttttttgtaaacagggaaatgttgagtggtacttgtattcccttatcaaattaatcacatagcttttatacagaaactcttcctgtgtgagctgttaaggtgccaaattggctgtcatttgtattcatgacacataccataaagcatctgctaatgctttaatggattgattcaattaagacctgagtgacactatttgtaaatataactagttgtgaagcacacatacctttattttgggaatttatgagaaaatatagaaaaccacagatcagggattcatatatgtagctcaaaaattcccaaaagtttactgttagagttggcaatttcctatcactatttcagtgtcagaacaaactgaaaataatggctcgtgtttatgttgaagataaatagcaccattattgggggaagttattcaaaagcaggcttttgagcaccatagtctaaatgccaataaaaataattcatacatagaaatgtcattggtcctgaatttgaagaaagtgagcaacagtagttaaatgtgggtgcatataaccaaattccccttcatcaagaatggaggagaagagagaagaatgaaatcctgaagattcatcccagccgcaactcaggatccaacacaactttaactgggaggaatacattgtttgatcatttttaaaacatctgtgaatgagtgattccggaggcctgtgaattgtgtggggagcttgctttgatggcactgtgttaataaaagttgtagggactgtgcacctaagaggctaagaggtcccactcatccgccctgtgaaccagctgtaaagaaatgtagttaagaaatgcaaagaaatgtgttatcttggcacttgggtttgattttcctttttttaaagcactgcaaaacttctttaggatactaaaacatcctaattgggctgtttttttgttttgttttgtttttcagctaaaggcaaagataatttttttttcagctgaagtttttcttttttgcaactatgacatgaattgagtgataaaatggctctttgaaaagtagatattgtctgtattgtaaatgcttagtcatattcatggcaaagtgttcatttcttgagatggttctttcacaacacacaagaatcaagatggaacgcaaggaaaatctttttgttttgaccgaggtaaccagtttatgtgtgttccaatccatagagaagtgggggaaagggcgagaaaggatcagattgatctgggatcagctttgagcctgagttcagtgaatagcctcatgggcatctcatggaattgatgcatttgctgtggcatatttaaattttgttcaaaagatttgaagcaagaccttgcaaagactcttaacattactgttcagcttgcttagattgtgttaacagttcatttaacaaagatccgttttaactctgaacaaaagcaacccagagcggccattctctattcccatgctggtcaatacgctttcattaccaattggcccttaccaaacttttcttatatatatatttgtattttactatgatagttgagaaatttagcctcttagtcatttttagctgttattgtggaagacctcaaatacaagattagatgcccttgaacatgttttaatgatgtgtgtcatgttactatcaatggtgatttcaatcgcaatattttaaattgatgagaatgatttgtaaacatgaagttactattacgtaaattctgtttgttatagagtttcttcagttgttacccaagtgtcatcctagagaagtcagaagaatcagaatccatcgtattttagagttatgtgaatctacatcataaatgggcattaacattctaaattgcttggtttggagaatgtgttagcagcatagctatattcaactagggagatgctaaatacacagaagtttcaagagccttggaacagaattacaggggaactatatatgtatatgtatattttattaaacacccatctgcactatcagtattgcactaatgtggaatttgaaagactattttgctgatactgtatatatgcgcatcattcctgattagattgttgtaaagacaatctgaaagatctaaggttttaaaataatttggtttgaaaatatacagttgtcttgaaggaattgctgtcatacatgaagttgctccgagctgtctttattctcttcttggtcaaggttaacaattgctaaatgatcgcaaattcacctaaacaatacatttacaaagccatctttacatgcattaaacgagggctacaacaatattgttttacaaatactagcacttttttttctgttatgtacttagtgttagagggattattacatttacagtactttaatacttgtataaactatgcagaaatttttaataaagtgtaatatattttataagctaataagactgaatgggtaaaggtttttagcatgcgttagtatacttgcagatactgaaacattttggtaatctttcttactaaagatgtgaatgtttaatgtaccttctctgtttctactctgtagtccaatgggaattcagtaatgacattttgtcatgtcaaactgtgaacataaatttgtactgtacagtcctcatatactatatacagtatgcaatatatattatatacttgttaataaaaccatcagaatatta

SEQ ID NO: 250976 - DNA, 2145 bp, Homo sapiens
tggtgttctagaggatcccgaggcttcaacggaactttaactgggaggaatacattgtttgatcatttttaaaacatctgtgaatgagtgattccggaggcctgtgaattgtgtggggagcttgctttgatggcactgtgttaataaaagttgtagggactgtgcacctaagaggctaagaggtcccactcatccgccctgtgaaccagctgtaaagaaatgtagttaagaaatgcaaagaaatgtgttatcttggcacttgggtttgattttcctttttttaaagcactgcaaaacttctttaggatactaaaacatcctaattgggctgtttttttgttttgttttgtttttcagctaaaggcaaagataatttttttttcagctgaagtttttcttttttgcaactatgacatgaattgagtgataaaatggctctttgaaaagtagatattgtctgtattgtaaatgcttagtcatattcatggcaaagtgttcatttcttgagatggttctttcacaacacacaagaatcaagatggaacgcaaggaaaatctttttgttttgaccgaggtaaccagtttatgtgtgttccaatccatagagaagtgggggaaagggcgagaaaggatcagattgatctgggatcagctttgagcctgagttcagtgaatagcctcatgggcatctcatggaattgatgcatttgctgtggcatatttaaattttgttcaaaagatttgaagcaagaccttgcaaagactcttaacattactgttcagcttgcttagattgtgttaacagttcatttaacaaagatccgttttaactctgaacaaaagcaacccagagcggccattctctattcccatgctggtcaatacgctttcattaccaattggcccttaccaaacttttcttatatatatatttgtattttactatgatagttgagaaatttagcctcttagtcatttttagctgttattgtggaagacctcaaatacaagattagatgcccttgaacatgttttaatgatgtgtgtcatgttactatcaatggtgatttcaatcgcaatattttaaattgatgagaatgatttgtaaacatgaagttactattacgtaaattctgtttgttatagagtttcttcagttgttacccaagtgtcatcctagagaagtcagaagaatcagaatccatcgtattttagagttatgtgaatctacatcataaatgggcattaacattctaaattgcttggtttggagaatgtgttagcagcatagctatattcaactagggagatgctaaatacacagaagtttcaagagccttggaacagaattacaggggaactatatatgtatatgtatattttattaaacacccatctgcactatcagtattgcactaatgtggaatttgaaagactattttgctgatactgtatatatgcgcatcattcctgattagattgttgtaaagacaatctgaaagatctaaggttttaaaataatttggtttgaaaatatacagttgtcttgaaggaattgctgtcatacatgaagttgctccgagctgtctttattctcttcttggtcaaggttaacaattgctaaatgatcgcaaattcacctaaacaatacatttacaaagccatctttacatgcattaaacgagggctacaacaatattgttttacaaatactagcacttttttttctgttatgtacttagtgttagagggtcaaaataatctttctgcttagcatctcttaaaccatacctgcaaatatagcaggattattacatttacagtactttaatacttgtataaactatgcagaaatttttaataaagtgtaatatattttataagctaataagactgaatgggtaaaggtttttagcatgcgttagtatacttgcagatactgaaacattttggtaatctttcttactaaagatgtgaatgtttaatgtaccttctctgtttctactctgtagtccaatgggaattcagtaatgacattttgtcatgtcaaactgtgaacataaatttgtactgtacagtcctcatatactatatacagtatgcaatatatattatatacttgttaataaaaccatcagaatatta

SEQ ID NO: 250977 - DNA, 1858 bp, Homo sapiens
aggctcgcagagcgagcggcgccggcgtcatgtgactgcccggagttggtgccaggagccagaggggagccaggagcggagccgcgcggagccggggcccgagccggagcgcagcgagagcgcccgccgcacgcgcgcccgtccccgtcccctgcggccgccaacgccgcccggactggagccctgacattgctgcgctcggggggctccaggcagcccgtatcggggcctttatttctcgtcggcggcgccctgcaccgcgcctcgcaaagccaaacaccagagcaccctagaaggtttaactaaaagaatgctcatgtttgacccagttcctgtcaagcaagaggccatggaccctgtctcagtgtcatacccatctaattacatggaatccatgaagcctaacaagtatggggtcatctactccacaccattgcctgagaagttctttcagaccccagaaggtctgtcgcacggaatacagatggagccagtggacctcacggtgaacaagcggagttcacccccttcggctgggaattcgccctcctctctgaagttcccgtcctcacaccggagagcctcgcctgggttgagcatgccttcttccagcccaccgataaaaaaatactcacccccttctccaggcgtgcagcccttcggcgtgccgctgtccatgccaccagtgatggcagctgccctctcgcggcatggaatacggagcccggggatcctgcccgtcatccagccggtggtggtgcagcccgtcccctttatgtacacaagtcacctccagcagcctctcatggtctccttatcggaggagatggaaaattccagtagtagcatgcaagtacctgtaattgaatcatatgagaagcctatatcacagaaaaaaattaaaatagaacctgggatcgaaccacagaggacagattattatcctgaagaaatgtcaccccccttaatgaactcagtgtcccccccgcaagcattgttgcaagagaatcacccttcggtcatcgtgcagcctgggaagagacctttacctgtggaatccccggatactcaaaggaagcggaggatacacagatgtgattatgatggatgcaacaaagtgtacactaaaagctcccacttgaaagcacacagaagaacacacacaggagaaaaaccctacaaatgtacatgggaagggtgcacatggaagtttgctcggtctgatgaactaacaagacatttccgaaaacatactggaatcaaacctttccagtgcccggactgtgaccgcagcttctcccgttctgaccatcttgccctccataggaaacgccacatgctagtctgattgcctctgtgtcctgcctcagcgtgactccccactcacctggctctctctctgtcctgcctcccattatctaacacattttttacatgtacattttaatttgattcagctggtctgaatctctgaatttatatcatccaaaacttccatatggtcagtagtagatgttctctaatcctccctctccttaccacgggtcagacctaaagaatgtgaacacttttttttttttttctggggatgctaagcaaacccttcttacagatacgtttaatgtaataagaacaagggaacatgtaaactaacataaccaattgtcagttctccatgtattctccttgccagagacattcttacctctgccctgtgataatattttatgcttgacagtgaaaacaagtgtggccccttgcaccggttagctagaagtacagccagatttcaagctagtgcagtcacctcttccgtcattttacactttggcaacccgaactttacactttgggctgg

SEQ ID NO: 250978 - DNA, 1275 bp, Homo sapiens
catgatgtgattgtccatgatgtgattgttcatgatgcgactgttcatgatgtgattgtccatgatgtgattgttcatgatgtgattgttcatgatgtgattgttcatgatgtgattgtcatgatgtgattgttcatgatgtgattgttcatgatgtgatgttttaatgatgtgtgtcatgttactatcaatggtgatttcaatcgcaatattttaaattgatgagaatgatttgtaaacatgaagttactattacgtaaattctgtttgttatagagtttcttcagttgttacccaagtgtcatcctagagaagtcagaagaatcagaatccatcgtattttagagttatgtgaatctacatcataaatgggcattaacattctaaattgcttggtttggagaatgtgttagcagcatagctatattcaactagggagatgctaaatacacagaagtttcaagagccttggaacagaattacaggggaactatatatgtatatgtatattttattaaacacccatctgcactatcagtattgcactaatgtggaatttgaaagactattttgctgatactgtatatatgcgcatcattcctgattagattgttgtaaagacaatctgaaagatctaaggttttaaaataatttggtttgaaaatatacagttgtcttgaaggaattgctgtcatacatgaagttgctccgagctgtctttattctcttcttggtcaaggttaacaattgctaaatgatcgcaaattcacctaaacaatacatttacaaagccatctttacatgcattaaacgagggctacaacaatattgttttacaaatactagcacttttttttctgttatgtacttagtgttagagggtcaaaataatctttctgcttagcatctcttaaaccatacctgcaaatatagcaggattattacatttacagtactttaatacttgtataaactatgcagaaatttttaataaagtgtaatatattttataagctaataagactgaatgggtaaaggtttttagcatgcgttagtatacttgcagatactgaaacattttggtaatctttcttactaaagatgtgaatgtttaatgtaccttctctgtttctactctgtagtccaatgggaattcagtaatgacattttgtcatgtcaaactgtgaacataaatttgtactgtacagtcctcatatactatatacagtatgcaatatatattatatacttgttaataaaaccatcagaatatta

SEQ ID NO: 250979 - DNA, 1258 bp, Homo sapiens
aggctcgcagagcgagcggcgccggcgtcatgtgactgcccggagttggtgccaggagccagaggggagccaggagcggagccgcgcggagccggggcccgagccggagcgcagcgagagcgcccgccgcacgcgcgcccgtccccgtcccctgcggccgccaacgccgcccggactggagccctgacattgctgcgctcggggggctccaggcagcccgtatcggggcctttatttctcgtcggcggcgccctgcaccgcgcctcgcaaagccaaacaccagagcaccctagaaggtttaactaaaagaatgctcatgtttgacccagttcctgtcaagcaagaggccatggaccctgtctcagtgtcatacccatctaattacatggaatccatgaagcctaacaagtatggggtcatctactccacaccattgcctgagaagttctttcagaccccagaaggtctgtcgcacggaatacagatggagccagtggacctcacggtgaacaagcggagttcacccccttcggctgggaattcgccctcctctctgaagttcccgtcctcacaccggagagcctcgcctgggttgagcatgccttcttccagcccaccgataaaaaaatactcacccccttctccaggcgtgcagcccttcggcgtgccgctgtccatgccaccagtgatggcagctgccctctcgcggcatggaatacggagcccggggatcctgcccgtcatccagccggtggtggtgcagcccgtcccctttatgtacacaagtcacctccagcagcctctcatggtctccttatcggaggagatggaaaattccagtagtagcatgcaagtacctgtaattgaatcatatgagaagcctatatcacagaaaaaaattaaaatagaacctgggatcgaaccacagaggacagattattatcctgaagaaatgtcaccccccttaatgaactcagtgtcccccccgcaagcattgttgcaagagtaagtatatttaggtctacccagcatttgcatagtagtgtgcatcttggaacctggagcagaagcacaagatttcacacgtgtgatgtggtgtggatgaccaggaacggcttgtgatctgtggccgccactggtccagtaccactggtcaagatgggagaatctctccaaaaacaatatgctgttacactgacaacgttatgacaaaagttacatcaagttttcatggaatcagtcatccatgattttgcac

SEQ ID NO: 250980 - DNA, 5125 bp, Homo sapiens
aggctcgcagagcgagcggcgccggcgtcatgtgactgcccggagttggtgccaggagccagaggggagccaggagcggagccgcgcggagccggggcccgagccggagcgcagcgagagcgcccgccgcacgcgcgcccgtccccgtcccctgcggccgccaacgccgcccggactggagccctgacattgctgcgctcggggggctccaggcagcccgtatcggggcctttatttctcgtcggcggcgccctgcaccgcgcctcgcaaagccaaacaccagagcaccctagaaggtttaactaaaagaatgctcatgtttgacccagttcctgtcaagcaagaggccatggaccctgtctcagtgtcatacccatctaattacatggaatccatgaagcctaacaagtatggggtcatctactccacaccattgcctgagaagttctttcagaccccagaaggtctgtcgcacggaatacagatggagccagtggacctcacggtgaacaagcggagttcacccccttcggctgggaattcgccctcctctctgaagttcccgtcctcacaccggagagcctcgcctgggttgagcatgccttcttccagcccaccgataaaaaaatactcacccccttctccaggcgtgcagcccttcggcgtgccgctgtccatgccaccagtgatggcagctgccctctcgcggcatggaatacggagcccggggatcctgcccgtcatccagccggtggtggtgcagcccgtcccctttatgtacacaagtcacctccagcagcctctcatggtctccttatcggaggagatggaaaattccagtagtagcatgcaagtacctgtaattgaatcatatgagaagcctatatcacagaaaaaaattaaaatagaacctgggatcgaaccacagaggacagattattatcctgaagaaatgtcaccccccttaatgaactcagtgtcccccccgcaagcattgttgcaagagaatcacccttcggtcatcgtgcagcctgggaagagacctttacctgtggaatccccggatactcaaaggaagcggaggatacacagatgtgattatgatggatgcaacaaagtgtacactaaaagctcccacttgaaagcacacagaagaacacacacaggagaaaaaccctacaaatgtacatgggaagggtgcacatggaagtttgctcggtctgatgaactaacaagacatttccgaaaacatactggaatcaaacctttccagtgcccggactgtgaccgcagcttctcccgttctgaccatcttgccctccataggaaacgccacatgctagtctgattgcctctgtgtcctgcctcagcgtgactccccactcacctggctctctctctgtcctgcctcccattatctaacacattttttacatgtacattttaatttgattcagctggtctgaatctctgaatttatatcatccaaaacttccatatggtcagtagtagatgttctctaatcctccctctccttaccacgggtcagacctaaagaatgtgaacacttttttttttttttctggggatgctaagcaaacccttcttacagatacgtttaatgtaataagaacaagggaacatgtaaactaacataaccaattgtcagttctccatgtattcctcaaaagaatgtcagagtaaatgtattagaaatacagtatccagactgctagtccttgccagagacattcttacctctgccctgtgataatattttatgcttgacagtgaaaacaagtgtggccccttgcaccggttagctagaagtacagccagatttcaagctagtgcagtcacctcttccgtcattcttcacaaatcttgtcaacctggatcttagacttcatctgaatcgagttctttgccctcctttgtgcctgcagctcatatggaggtctttgccaccaatgggagatgagcccaaactttcgatctaggtgggtgatgtgtagcagttcaagggaagggtgctgtgttttcatagcatggagtcggaggagagggccatttagcagggggagcagaagaggcaattcctcctgggctaggggttgtcagtgaggtttcaacattttgttagctgtgtgcagcattcccagagcttcagtctctgtgcatactcagctttgtagaaccatgctgcaaagccatataccgatggggttatccatgcaactatctccattcctacaatgtccttaatatgagatcatcaaacattgatagtagggactccatggaatatttgcccagtaatggtaagaaatctttcgggtaagagtatggatggttcttcttttacccaatctgcttatagctttttttgtaaacagggaaatgttgagtggtacttgtattcccttatcaaattaatcacatagcttttatacagaaactcttcctgtgtgagctgttaaggtgccaaattggctgtcatttgtattcatgacacataccataaagcatctgctaatgctttaatggattgattcaattaagacctgagtgacactatttgtaaatataactagttgtgaagcacacatacctttattttgggaatttatgagaaaatatagaaaaccacagatcagggattcatatatgtagctcaaaaattcccaaaagtttactgttagagttggcaatttcctatcactatttcagtgtcagaacaaactgaaaataatggctcgtgtttatgttgaagataaatagcaccattattgggggaagttattcaaaagcaggcttttgagcaccatagtctaaatgccaataaaaataattcatacatagaaatgtcattggtcctgaatttgaagaaagtgagcaacagtagttaaatgtgggtgcatataaccaaattccccttcatcaagaatggaggagaagagagaagaatgaaatcctgaagattcatcccagccgcaactcaggatccaacacaactttaactgggaggaatacattgtttgatcatttttaaaacatctgtgaatgagtgattccggaggcctgtgaattgtgtggggagcttgctttgatggcactgtgttaataaaagttgtagggactgtgcacctaagaggctaagaggtcccactcatccgccctgtgaaccagctgtaaagaaatgtagttaagaaatgcaaagaaatgtgttatcttggcacttgggtttgattttcctttttttaaagcactgcaaaacttctttaggatactaaaacatcctaattgggctgtttttttgttttgttttgtttttcagctaaaggcaaagataatttttttttcagctgaagtttttcttttttgcaactatgacatgaattgagtgataaaatggctctttgaaaagtagatattgtctgtattgtaaatgcttagtcatattcatggcaaagtgttcatttcttgagatggttctttcacaacacacaagaatcaagatggaacgcaaggaaaatctttttgttttgaccgaggtaaccagtttatgtgtgttccaatccatagagaagtgggggaaagggcgagaaaggatcagattgatctgggatcagctttgagcctgagttcagtgaatagcctcatgggcatctcatggaattgatgcatttgctgtggcatatttaaattttgttcaaaagatttgaagcaagaccttgcaaagactcttaacattactgttcagcttgcttagattgtgttaacagttcatttaacaaagatccgttttaactctgaacaaaagcaacccagagcggccattctctattcccatgctggtcaatacgctttcattaccaattggcccttaccaaacttttcttatatatatatttgtattttactatgatagttgagaaatttagcctcttagtcatttttagctgttattgtggaagacctcaaatacaagattagatgcccttgaacatgttttaatgatgtgtgtcatgttactatcaatggtgatttcaatcgcaatattttaaattgatgagaatgatttgtaaacatgaagttactattacgtaaattctgtttgttatagagtttcttcagttgttacccaagtgtcatcctagagaagtcagaagaatcagaatccatcgtattttagagttatgtgaatctacatcataaatgggcattaacattctaaattgcttggtttggagaatgtgttagcagcatagctatattcaactagggagatgctaaatacacagaagtttcaagagccttggaacagaattacaggggaactatatatgtatatgtatattttattaaacacccatctgcactatcagtattgcactaatgtggaatttgaaagactattttgctgatactgtatatatgcgcatcattcctgattagattgttgtaaagacaatctgaaagatctaaggttttaaaataatttggtttgaaaatatacagttgtcttgaaggaattgctgtcatacatgaagttgctccgagctgtctttattctcttcttggtcaaggttaacaattgctaaatgatcgcaaattcacctaaacaatacatttacaaagccatctttacatgcattaaacgagggctacaacaatattgttttacaaatactagcacttttttttctgttatgtacttagtgttagagggtcaaaataatctttctgcttagcatctcttaaaccatacctgcaaatatagcaggattattacatttacagtactttaatacttgtataaactatgcagaaatttttaataaagtgtaatatattttataagctaataagactgaatgggtaaaggtttttagcatgcgttagtatacttgcagatactgaaacattttggtaatctttcttactaaagatgtgaatgtttaatgtaccttctctgtttctactctgtagtccaatgggaattcagtaatgacattttgtcatgtcaaactgtgaacataaatttgtactgtacagtcctcatatactatatacagtatgcaatatatattatatacttgttaataaaaccatcagaatatta

SEQ ID NO: 250981 - DNA, 5071 bp, Homo sapiens
aggctcgcagagcgagcggcgccggcgtcatgtgactgcccggagttggtgccaggagccagaggggagccaggagcggagccgcgcggagccggggcccgagccggagcgcagcgagagcgcccgccgcacgcgcgcccgtccccgtcccctgcggccgccaacgccgcccggactggagccctgacattgctgcgctcggggggctccaggcagcccgtatcggggcctttatttctcgtcggcggcgccctgcaccgcgcctcgcaaagccaaacaccagagcaccctagaaggtttaactaaaagaatgctcatgtttgacccagttcctgtcaagcaagaggccatggaccctgtctcagtgtcatacccatctaattacatggaatccatgaagcctaacaagtatggggtcatctactccacaccattgcctgagaagttctttcagaccccagaaggtctgtcgcacggaatacagatggagccagtggacctcacggtgaacaagcggagttcacccccttcggctgggaattcgccctcctctctgaagttcccgtcctcacaccggagagcctcgcctgggttgagcatgccttcttccagcccaccgataaaaaaatactcacccccttctccaggcgtgcagcccttcggcgtgccgctgtccatgccaccagtgatggcagctgccctctcgcggcatggaatacggagcccggggatcctgcccgtcatccagccggtggtggtgcagcccgtcccctttatgtacacaagtcacctccagcagcctctcatggtctccttatcggaggagatggaaaattccagtagtagcatgcaagtacctgtaattgaatcatatgagaagcctatatcacagaaaaaaattaaaatagaacctgggatcgaaccacagaggacagattattatcctgaagaaatgtcaccccccttaatgaactcagtgtcccccccgcaagcattgttgcaagagaatcacccttcggtcatcgtgcagcctgggaagagacctttacctgtggaatccccggatactcaaaggaagcggaggatacacagatgtgattatgatggatgcaacaaagtgtacactaaaagctcccacttgaaagcacacagaagaacacacacaggagaaaaaccctacaaatgtacatgggaagggtgcacatggaagtttgctcggtctgatgaactaacaagacatttccgaaaacatactggaatcaaacctttccagtgcccggactgtgaccgcagcttctcccgttctgaccatcttgccctccataggaaacgccacatgctagtctgattgcctctgtgtcctgcctcagcgtgactccccactcacctggctctctctctgtcctgcctcccattatctaacacattttttacatgtacattttaatttgattcagctggtctgaatctctgaatttatatcatcccgggtcagacctaaagaatgtgaacacttttttttttttttctggggatgctaagcaaacccttcttacagatacgtttaatgtaataagaacaagggaacatgtaaactaacataaccaattgtcagttctccatgtattcctcaaaagaatgtcagagtaaatgtattagaaatacagtatccagactgctagtccttgccagagacattcttacctctgccctgtgataatattttatgcttgacagtgaaaacaagtgtggccccttgcaccggttagctagaagtacagccagatttcaagctagtgcagtcacctcttccgtcattcttcacaaatcttgtcaacctggatcttagacttcatctgaatcgagttctttgccctcctttgtgcctgcagctcatatggaggtctttgccaccaatgggagatgagcccaaactttcgatctaggtgggtgatgtgtagcagttcaagggaagggtgctgtgttttcatagcatggagtcggaggagagggccatttagcagggggagcagaagaggcaattcctcctgggctaggggttgtcagtgaggtttcaacattttgttagctgtgtgcagcattcccagagcttcagtctctgtgcatactcagctttgtagaaccatgctgcaaagccatataccgatggggttatccatgcaactatctccattcctacaatgtccttaatatgagatcatcaaacattgatagtagggactccatggaatatttgcccagtaatggtaagaaatctttcgggtaagagtatggatggttcttcttttacccaatctgcttatagctttttttgtaaacagggaaatgttgagtggtacttgtattcccttatcaaattaatcacatagcttttatacagaaactcttcctgtgtgagctgttaaggtgccaaattggctgtcatttgtattcatgacacataccataaagcatctgctaatgctttaatggattgattcaattaagacctgagtgacactatttgtaaatataactagttgtgaagcacacatacctttattttgggaatttatgagaaaatatagaaaaccacagatcagggattcatatatgtagctcaaaaattcccaaaagtttactgttagagttggcaatttcctatcactatttcagtgtcagaacaaactgaaaataatggctcgtgtttatgttgaagataaatagcaccattattgggggaagttattcaaaagcaggcttttgagcaccatagtctaaatgccaataaaaataattcatacatagaaatgtcattggtcctgaatttgaagaaagtgagcaacagtagttaaatgtgggtgcatataaccaaattccccttcatcaagaatggaggagaagagagaagaatgaaatcctgaagattcatcccagccgcaactcaggatccaacacaactttaactgggaggaatacattgtttgatcatttttaaaacatctgtgaatgagtgattccggaggcctgtgaattgtgtggggagcttgctttgatggcactgtgttaataaaagttgtagggactgtgcacctaagaggctaagaggtcccactcatccgccctgtgaaccagctgtaaagaaatgtagttaagaaatgcaaagaaatgtgttatcttggcacttgggtttgattttcctttttttaaagcactgcaaaacttctttaggatactaaaacatcctaattgggctgtttttttgttttgttttgtttttcagctaaaggcaaagataatttttttttcagctgaagtttttcttttttgcaactatgacatgaattgagtgataaaatggctctttgaaaagtagatattgtctgtattgtaaatgcttagtcatattcatggcaaagtgttcatttcttgagatggttctttcacaacacacaagaatcaagatggaacgcaaggaaaatctttttgttttgaccgaggtaaccagtttatgtgtgttccaatccatagagaagtgggggaaagggcgagaaaggatcagattgatctgggatcagctttgagcctgagttcagtgaatagcctcatgggcatctcatggaattgatgcatttgctgtggcatatttaaattttgttcaaaagatttgaagcaagaccttgcaaagactcttaacattactgttcagcttgcttagattgtgttaacagttcatttaacaaagatccgttttaactctgaacaaaagcaacccagagcggccattctctattcccatgctggtcaatacgctttcattaccaattggcccttaccaaacttttcttatatatatatttgtattttactatgatagttgagaaatttagcctcttagtcatttttagctgttattgtggaagacctcaaatacaagattagatgcccttgaacatgttttaatgatgtgtgtcatgttactatcaatggtgatttcaatcgcaatattttaaattgatgagaatgatttgtaaacatgaagttactattacgtaaattctgtttgttatagagtttcttcagttgttacccaagtgtcatcctagagaagtcagaagaatcagaatccatcgtattttagagttatgtgaatctacatcataaatgggcattaacattctaaattgcttggtttggagaatgtgttagcagcatagctatattcaactagggagatgctaaatacacagaagtttcaagagccttggaacagaattacaggggaactatatatgtatatgtatattttattaaacacccatctgcactatcagtattgcactaatgtggaatttgaaagactattttgctgatactgtatatatgcgcatcattcctgattagattgttgtaaagacaatctgaaagatctaaggttttaaaataatttggtttgaaaatatacagttgtcttgaaggaattgctgtcatacatgaagttgctccgagctgtctttattctcttcttggtcaaggttaacaattgctaaatgatcgcaaattcacctaaacaatacatttacaaagccatctttacatgcattaaacgagggctacaacaatattgttttacaaatactagcacttttttttctgttatgtacttagtgttagagggtcaaaataatctttctgcttagcatctcttaaaccatacctgcaaatatagcaggattattacatttacagtactttaatacttgtataaactatgcagaaatttttaataaagtgtaatatattttataagctaataagactgaatgggtaaaggtttttagcatgcgttagtatacttgcagatactgaaacattttggtaatctttcttactaaagatgtgaatgtttaatgtaccttctctgtttctactctgtagtccaatgggaattcagtaatgacattttgtcatgtcaaactgtgaacataaatttgtactgtacagtcctcatatactatatacagtatgcaatatatattatatacttgttaataaaaccatcagaatatta

SEQ ID NO: 250982 - DNA, 3063 bp, Homo sapiens
aggctcgcagagcgagcggcgccggcgtcatgtgactgcccggagttggtgccaggagccagaggggagccaggagcggagccgcgcggagccggggcccgagccggagcgcagcgagagcgcccgccgcacgcgcgcccgtccccgtcccctgcggccgccaacgccgcccggactggagccctgacattgctgcgctcggggggctccaggcagcccgtatcggggcctttatttctcgtcggcggcgccctgcaccgcgcctcgcaaagccaaacaccagagcaccctagaaggtttaactaaaagaatgctcatgtttgacccagttcctgtcaagcaagaggccatggaccctgtctcagtgtcatacccatctaattacatggaatccatgaagcctaacaagtatggggtcatctactccacaccattgcctgagaagttctttcagaccccagaaggtctgtcgcacggaatacagatggagccagtggacctcacggtgaacaagcggagttcacccccttcggctgggaattcgccctcctctctgaagttcccgtcctcacaccggagagcctcgcctgggttgagcatgccttcttccagcccaccgataaaaaaatactcacccccttctccaggcgtgcagcccttcggcgtgccgctgtccatgccaccagtgatggcagctgccctctcgcggcatggaatacggagcccggggatcctgcccgtcatccagccggtggtggtgcagcccgtcccctttatgtacacaagtcacctccagcagcctctcatggtctccttatcggaggagatggaaaattccagtagtagcatgcaagtacctgtaattgaatcatatgagaagcctatatcacagaaaaaaattaaaatagaacctgggatcgaaccacagaggacagattattatcctgaagaaatgtcaccccccttaatgaactcagtgtcccccccgcaagcattgttgcaagagaatcacccttcggtcatcgtgcagcctgggaagagacctttacctgtggaatccccggatactcaaaggaagcggaggatacacagatgtgattatgatggatgcaacaaagtgtacactaaaagctcccacttgaaagcacacagaagaacacacacaggagaaaaaccctacaaatgtacatgggaagggtgcacatggaagtttgctcggtctgatgaactaacaagacatttccgaaaacatactggaatcaaacctttccagtgcccggactgtgaccgcagcttctcccgttctgaccatcttgccctccataggaaacgccacatgctagtctgattgcctctgtgtcctgcctcagcgtgactccccactcacctggctctctctctgtcctgcctcccattatctaacacattttttacatgtacattttaatttgattcagctggtctgaatctctgaatttatatcatccaaaacttccatatggtcagtagtagatgttctctaatcctccctctccttaccacgggtcagacctaaagaatgtgaacacttttttttttttttctggggatgctaagcaaacccttcttacagatacgtttaatgtaataagaacaagggaacatgtaaactaacataaccaattgtcagttctccatgtattcctcaaaagaatgtcagagtaaatgtattagaaatacagtatccagactgctagtccttgccagagacattcttacctctgccctgtgataatattttatgcttgacagtgaaaacaagtgtggccccttgcaccggttagctagaagtacagccagatttcaagctagtgcagtcacctcttccgtcattcttcacaaatcttgtcaacctggatcttagacttcatctgaatcgagttctttgccctcctttgtgcctgcagctcatatggaggtctttgccaccaatgggagatgagcccaaactttcgatctaggtgggtgatgtgtagcagttcaagggaagggtgctgtgttttcatagcatggagtcggaggagagggccatttagcagggggagcagaagaggcaattcctcctgggctaggggttgtcagtgaggtttcaacattttgttagctgtgtgcagcattcccagagcttcagtctctgtgcatactcagctttgtagaaccatgctgcaaagccatataccgatggggttatccatgcaactatctccattcctacaatgtccttaatatgagatcatcaaacattgatagtagggactccatggaatatttgcccagtaatggtaagaaatctttcgggtaagagtatggatggttcttcttttacccaatctgcttatagctttttttgtaaacagggaaatgttgagtggtacttgtattcccttatcaaattaatcacatagcttttatacagaaactcttcctgtgtgagctgttaaggtgccaaattggctgtcatttgtattcatgacacataccataaagcatctgctaatgctttaatggattgattcaattaagacctgagtgacactatttgtaaatataactagttgtgaagcacacatacctttattttgggaatttatgagaaaatatagaaaaccacagatcagggattcatatatgtagctcaaaaattcccaaaagtttactgttagagttggcaatttcctatcactatttcagtgtcagaacaaactgaaaataatggctcgtgtttatgttgaagataaatagcaccattattgggggaagttattcaaaagcaggcttttgagcaccatagtctaaatgccaataaaaataattcatacatagaaatgtcattggtcctgaatttgaagaaagtgagcaacagtagttaaatgtgggtgcatataaccaaattccccttcatcaagaatggaggagaagagagaagaatgaaatcctgaagattcatcccagccgcaactcaggatccaacacaactttaactgggaggaatacattcgttgacgagctaacggggtcctttag

SEQ ID NO: 250983 - DNA, 1844 bp, Homo sapiens
aggctcgcagagcgagcggcgccggcgtcatgtgactgcccggagttggtgccaggagccagaggggagccaggagcggagccgcgcggagccggggcccgagccggagcgcagcgagagcgcccgccgcacgcgcgcccgtccccgtcccctgcggccgccaacgccgcccggactggagccctgacattgctgcgctcggggggctccaggcagcccgtatcggggcctttatttctcgtcggcggcgccctgcaccgcgcctcgcaaagccaaacaccagagcaccctagaaggtttaactaaaagaatgctcatgtttgacccagttcctgtcaagcaagaggccatggaccctgtctcagtgtcatacccatctaattacatggaatccatgaagcctaacaagtatggggtcatctactccacaccattgcctgagaagttctttcagaccccagaaggtctgtcgcacggaatacagatggagccagtggacctcacggtgaacaagcggagttcacccccttcggctgggaattcgccctcctctctgaagttcccgtcctcacaccggagagcctcgcctgggttgagcatgccttcttccagcccaccgataaaaaaatactcacccccttctccaggcgtgcagcccttcggcgtgccgctgtccatgccaccagtgatggcagctgccctctcgcggcatggaatacggagcccggggatcctgcccgtcatccagccggtggtggtgcagcccgtcccctttatgtacacaagtcacctccagcagcctctcatggtctccttatcggaggagatggaaaattccagtagtagcatgcaagtacctgtaattgaatcatatgagaagcctatatcacagaaaaaaattaaaatagaacctgggatcgaaccacagaggacagattattatcctgaagaaatgtcaccccccttaatgaactcagtgtcccccccgcaagcattgttgcaagagaatcacccttcggtcatcgtgcagcctgggaagagacctttacctgtggaatccccggatactcaaaggaagcggaggatacacagatgtgattatgatggatgcaacaaagtgtacactaaaagctcccacttgaaagcacacagaagaacacacacaggagaaaaaccctacaaatgtacatgggaagggtgcacatggaagtttgctcggtctgatgaactaacaagacatttccgaaaacatactggaatcaaacctttccagtgcccggactgtgaccgcagcttctcccgttctgaccatcttgccctccataggaaacgccacatgctagtctgattgcctctgtgtcctgcctcagcgtgactccccactcacctggctctctctctgtcctgcctcccattatctaacacattttttacatgtacattttaatttgattcagctggtctgaatctctgaatttatatcatccaaaacttccatatggtcagtagtagatgttctctaatcctccctctccttaccacgggtcagacctaaagaatgtgaacacttttttttttttttctggggatgctaagcaaacccttcttacagatacgtttaatgtaataagaacaagggaacatgtaaactaacataaccaattgtcagttctccatgtattcctcaaaagaatgtcagagtaaatgtattagaaatacagtatccagactgctagtccttgccagagacattcttacctctgccctgtgataatattttatgcttgacagtgctagtgcagtaaccttttcggcatttttaacatttgtcaccttgtcttctt

SEQ ID NO: 250984 - DNA, 866 bp, Homo sapiens
aggctcgcagagcgagcggcgccggcgtcatgtgactgcccggagttggtgccaggagccagaggggagccaggagcggagccgcgcggagccggggcccgagccggagcgcagcgagagcgcccgccgcacgcgcgcccgtccccgtcccctgcggccgccaacgccgcccggactggagccctgacattgctgcgctcggggggctccaggcagcccgtatcggggcctttatttctcgtcggcggcgccctgcaccgcgcctcgcaaagccaaacaccagagcaccctagaaggtttaactaaaagaatgctcatgtttgacccagttcctgtcaagcaagaggccatggaccctgtctcagtggtaagttttccaagattgaacacctcgccttattttttccaagtgatgataacattattgtgtgttgaattattccttgaaatcatggccgggcgtggtggctcacgcctgtaatcccagcactttgggagaccgaggcgggaggatcacctgaggtcgggagtttgagaccagcctgaccaacatgaagaaactcccgtctctactaaaaataccaaattagccgggcgtggtggcacatgcctgtaatcccagctactcgggaggctgaggcaggagagtcgcttgaacccgggaggtagaggttgcagtgagccgagactgtgggcaaagtcatcatctctctggatctcagttcttgttctgagcagctgaattctccagaaattctccgtacgtgtgtgtgctcatcttcagcactttctgcattcaagaatactggcagtcagacaagttatctctgtgtgggcccgggctcctccgcccgtcagagcctcat

SEQ ID NO: 250985 - DNA, 597 bp, Homo sapiens
ctctcagcccctctgcctcactatccctctttctgtgccctcccccacacagccccctacacttcttcttagtctcatcttcagcttcccatacgaggccatcctcatgaaatcaggcactgggaggtccctggggactgacaagtgccagctgtcccttgctgtctctctgccccatggctgcagcagggagggtgggcaaagggcagaggtgacagtggccaaacctgaaactgaggcccagctctggttgggaaagaaacaaggaaacaaaataacttggggacagagggcgtggggtcatcagagcgggcaaaggctgcccaggagttgtaaatccgagccgctcccggctttatgaggccgatttggggttgagcctggactttgcccaggaaggagtgctggcagcacacggggcgccaggtgtgggccccggatgataagaagcctcggtgaaaagaccatggacctggggccacgaagactggggagcccaggtgagtgggcatgggacactctccagagccctgccgaaggcggacgccaggcagggccccggtctccaattggttcccgcccccaagaaacagcaac

SEQ ID NO: 250986 - DNA, 398 bp, Homo sapiens
ccaataaccaaggaattctacctgcaggaatcatgctaccagaattccgcctcttaagggacaccctaataaagcaatcgcaaaaacctttatccctacagggtatctgcaaaagaaacatcaggaatatttatggtgagaaatacaaacagcacttgaagcaattcctcccagtgacaatatggaattctgtctactgctgttatgacttggcatatacctcttgaaataagacctcccagtttcacagcagagggactttcggccactcaaactgcattttctggctagacatgtcccagaaaatgcttcacctatcacctgtgacatcccaaatgtacaaactactgattcttgaacatgttccaaaatacaaagtgatttgtctattaaaaaaa

SEQ ID NO: 250987 - DNA, 869 bp, Homo sapiens
agctgcctagattacccagtgtcttcaagatcgactccttggaaatgcttgcaaaacactagttttttttctcttgaacagctaaacctttcaggttgacacagctgaaggagtgtgagttaggagagtcgttataagcttgagctgtggatcctgggttgggccttatttacctaccacttactgcttgtgtaactttgggcaaaattgtttaacttttccctgcttcagtttcctcatctgtgaaggagggaaatagtaatactgatctcatagggttgttggatgaaccccacttatccagtacggccatactaagtactccaataggcatttcatgtattcgaatcttaataacataactgaggtgtgggggcttttgaagcaaaatggaaaacttcttatctttgagaggctgtggaattcatgctgtggatggtaggaactggtgaaacagtttgtcttggggagtaggtgcctgggtggagtgcatccgtaagtgtgaaaggacctcgggtccagcacttggaaataagatggtgcctcctgttacctgctcatccgacctgttgcgctagtgggtggaggggggcataaaacgtgcttcattttgaaggcgtgggacagaagctagggtggtaatagtttgtgatactccctcgaggtagtgaagagctacatgccaggctggcagctgggccaagccacttctggaggtagcgtgagactgctgatggccctgttgctcaggctggtgtgcagtggctccgtcatagctcactacagcctcactgtatgacccaggctgggcttgcactcctggcctcaacagatgtctccctaaagattggttaatcagtttttaaaaa

SEQ ID NO: 250988 - DNA, 487 bp, Homo sapiens
ctttcaatcatggcagaagtcacctcttcacagggcagcaggaggcagaatgggtgccgagtgaaaggagaagccccttataaaaccatcagatcttgtgcgaaatcactcactaccactagaactgcatgggggaaactgcccccatgatgcagtgatctcaacaggatcctgcccttgacatgtggggattattataattcaaggtgaaatttgggtggggacacatatcaccgaaaattatttttacttctggcatatagaaatgcagttatttttgtagattttgtagaaatctttccttattaatttttttagacttttattttaggttcaggggtacatgtgaaggtttgttttgtaggtgtcatgtcatgggggtttgttgtatagattatttcatcaccaaggtattaagcctaataaccattagttattttttctactgctctcctttttactaccctccaccctcaagtagacccaa

SEQ ID NO: 250989 - DNA, 395 bp, Homo sapiens
tattgctctaaaggaacacctgaggctggataatttgtgaagaaaaaaggtttctttggctcatggctctgcaggctgtacaggaagcatggtgccagcatctgcttctggtgagggcttcaggctgcttccactcgtgatggaagctgggatagtgttcaactttgttgttgagggccctggatgtgctccatcccctctgcacacctgcccaccagcctgggatgtcctgctccccagagggtggttctacgtgcctgagggccatggaacagctctgggttaggaacccaagagaacttctcggccatcgtatttctcttggactattctgatagcctgtgaactggtctcctttcttccattcttgctaccctgcaataaatcctgatccc

SEQ ID NO: 250990 - DNA, 354 bp, Homo sapiens
ttagtctttccccaactaaagcctagaagaatgagcgcaggggttcagaacgctaccttgggttcagttgtttctggcctcctccccagaccccatgcctgaggtctgccaaccacctttccctacagtttcagacttgtttacaaccatatgcatggccggggttgccaggaagtgggagctgcagattgtcttctgcaatgtatcatggctctgatcatcaaaagtgaacgtggaaactctgaggcttatttctttaagcgctggaaaaaaaaatctgacacatactttggtcttcttttggcttgagtctatgtgttgccacttcaggaaatgtaaggggacaatgcaggc

SEQ ID NO: 250991 - DNA, 1010 bp, Homo sapiens
cacacagtgtaccaagaatgaatcatgaagaattagaaaatctaaacagactcacagttatatgacattgatgtagtaatcagaacccctaaattggacagacactacaacaagctacaaatgttctttataactattaatgcagaaatcctcacttaaataccaacaaaccatatttagcatcatactaacgcagaaatcctcacttaagtactcacaagccatatttagcagcacagtaaaaggattatacaccaaaaccaagtgagatttatccctaaaataaaatggttcaatatatgaaaaatcaatcagtgtaatgtatgacatttgcaaaatgactgaaatatcgtagctattgcaacggatgcaggaaaagtatttggcaaattattaagacccactcatgataaaaatacacaataaactaggactacaaggaaactacagtatgaaaaaccagcactaacatcaccatcaatgctgaaataccaaaacaaacaagcaaaaaaacccttttctcccaagatcaggaaagagcggtagagaacctctgcttttatcactcccattcaacacagtattggaaatcctggccacagtgatcgggcaaggttgctgtacagatttagcattaatgtgccaaatgcaggcaacagaaaacagcacagacttacccactctaacaaattcttcatcctgcaggaaacaaactgatgttttggttaatttttgtaattcaccaatttatgtaccacacttttgtgtgtggaaatgtattcactttctgtaatcataaaggaagagagatttttcctatttctcttccctggtagcattcctgattaaaagccctagaatttcatttgaaactacccaaaagaagagacgagacctcaaaaagttaccacatacactcaggggaatgaaaataaaatatatcaaaaaaactcttctaaacattggcttgggcaaagaactcatgaccaagaacccaaaagcaaatgcac

SEQ ID NO: 250992 - DNA, 313 bp, Homo sapiens
actcacttacttcacttacagaaatccacaaaatcggctgggcacggtcgtcacgcctctaatcccagcactttggtaggctgagatgggtggatcaccaggctggtcttgaactctgacctcaaatgatccacccgccttggcctcccaaagtgctgggattacaggtgtgagccaccacacccggctagatcttaactgtttttagtaaacatgttggtgatgatgttggatattgttatttcaaaatgattgtctgtattctgcataaaataaatgaatactttgcttaatgattgagaactggcatttt

SEQ ID NO: 250993 - DNA, 464 bp, Homo sapiens
ctcctgcccccgagtcatgggctctgcgcgctttattcccacgaaacctaggacagtggccatcaaaccgagcgctttttcacggagaaacccggggcgggagaaagacgggagcgcgtcccttgaaggcgcccggcgccagcgccgcgtgggttcccggcagcgtacgccaggcccggacgggcaggacgcgagcccaagggcgcgggaagaagacggcggccgggagcgccgcgggggcctttcacacagtaaggactgcaacgccgcgagaaacgcgcggggaaagcatctccgacggacgaggcgaaggcgcaccctggggagccactggaagatccagcctggggtccagcgcctgccgcgccccaccccctccgtgcagccacgccacgcccctgtagccccgccctgcagccacaccccgccccggcgtgcaccgcgcccagcccgcgccccacccc

SEQ ID NO: 250994 - DNA, 437 bp, Homo sapiens
agctgtttaatgtgtagatagaggctgctctggttgtgtagtcttccagctctggactgtgccaatagcatggggtttggagtcaaatccaagttctatcatttacacttgatggcattttgatgacagataatttgcttaaatcctctatatgtgcatttaaatttgtatagctattgccaatctgcaaattgctctccattgacaatgtaccagtttacactcagattacacaccggagaggtgatgggcccgttgtctcacgctcatcacacatggtgtactctcaaactttgggttgcttgcaaatatgaaatgtagaagaagctatcccagtggagttttcatttgctttttcttcaatatgagtgaggttgtgcatcttttcatctatttaagggctacgagtatttctataaaccatcctttctatcttt

SEQ ID NO: 250995 - DNA, 516 bp, Homo sapiens
gtgctttccctgtatgtgtataccatgttctctttatggactactatttagccttaaaaaaagacaagggaattctgtagtaggcaacaacatggatgtaccttgaagacattatgtgctcagtgaaataagccaggtatggacaaacactgcatgattctgcttacatgaggtatctagagaagtcaaattcatggaatcaaacatcaggatggtagctgccaggggcttggtggaggaggaaatgggaatttattaatccacaggcataaagtttcaggtaaggaagatgaacgagccctagagatctgctgtccattgtaccgagagtctacaatgttctgtccacttaaaatgtgttcaggacaaacagcaattaaagaaaaaaaaatgttgggccgggcacagtggctcaggcctgtaatcccagccctttggaaggccaaagcaggtggatcacttgaggtcaggagttggagaccggcctagccaacatggcgaaacctcttctctact

SEQ ID NO: 250996 - DNA, 413 bp, Homo sapiens
aagttttaagtttagtggttgccggaaattaaggggaggaaggaatggaaagttattgcttaatgggtacagagtttttggttttgcaagatgaagagagttctggatgtggatggtaatggtgatgattgcacaacgtcaagaattaaagcataaaaaagattgggttaaagcctttggtttctagtaaaggttagtgtgtgtggtttttttaagaagctgttttgctaaattatttttacttggaatgtttcaaacagatttcaggctgcaaacttgttttataatcgtttgcttctccaagtgaagctcagaaatacctaaaaatagctgtaacgttcgcgttaggaaagatggtgtttattccagtttgcatttttatggtgaaataaaatccttttccaatgaactaa

SEQ ID NO: 250997 - DNA, 324 bp, Homo sapiens
tgaaagggcaaaagtgacatttttggggttgtgactaacttgcactttagcaactagtaaagaaaagaaaatcaactaaagtttcccctctccctcccccactccaaactcccacattcttccaaaatagaaagttgaattccagaatgaattgccagaatacatttatttagagttgaggacaacacggagctcacaggctttgggtgctgaacgtctctctggccctcagaaggcgagacgtggtacctgggtccctgcaaggtagatcttctgaagtggcctatttcccatagcggagacagaacaaccaaggtgtaggag

SEQ ID NO: 250998 - DNA, 157 bp, Homo sapiens
acattatcacatgtatacgaagtaaacaattcctcagcatacctaagacagtatacagtggtcccccatctccggaggataagtcccaagacccctaggggatgcctgaatcctcagagagtactgaactccgaatttgctatgcatgcacttcttt

SEQ ID NO: 250999 - DNA, 480 bp, Homo sapiens
cagaaatgtgccctgacgtgcaagtttgagaaacaccggttaacagatgagacaggacagttagaaggaaggacagagccagccagcaactaactgtagccccttggcatcacacaagaaacccgggattctctgtctccttgtgaagatttgcatcagctctctttgaggttagagaaggcagctgctggaagaggaaaggggtttatctggaccaactcttctgccaaatccatgtgctggagtttgttgtatgatcactctcctgagtttccagctgtcccttttcatgagtctcctggtcagtggctgggaaggaaggggagcgggagactcgtggattgtcttgaaaatcactggccaagtcaggaaatgcatgccttcctcttggcctgtttctggtattgactctttggttaccaagaaacacaaacccagctagctcaagaaagcatgtatattataataaaggctatctca

SEQ ID NO: 251000 - DNA, 441 bp, Homo sapiens
tatcatttataagagcaacataacatcaactacttaggaataaatctaagtacagagggtcaaaacatcaataccaaaaaactttattagcagaaagtaaggaagacaagtgactggaggaatatatcatgttcacagatggaaagactcaatattgtaaagttgtttattctttcctaggtgatatacagcaacatgcaattctaataaaaatttcaggattgtttttgtggaaactgaaaagctaattcttaatttatatagaaatgtaaagcacaatcagctggggctgccataacagaatatcagagactgggtagcttcaacaatagagattgattttcttaaagttccagaggctagattaaggtgctggcgggatgggtttctggtgaagcctctcttcttggcttgcagacagcttccttcttgctctgacct

SEQ ID NO: 251001 - DNA, 456 bp, Homo sapiens
tcaaaattatatgcctcctattagcctgactcatgcgtttctcacagcctatagaaaagcttactgagatgctttacagagaaacttccagaaacttacagaaaagtatacaagaacagggatatttcactgtctcttgggcctaggacaatacaaggcagtcaacactattgactcattcattcgttcacttatttgtttctttatttgcgtgataaataatcactgatttctacttcgtattaggtgtcaggctgtattacagcaaggtgccaccctcaaggagctcatagagctggtacaaaccctaagtaacatatgtattataaatatatatgtgtgtgcatacacacacacacaactgagttgccttttcagtaatgtttgtagcagctctaacaataaaaaagggcaattcaattgaattttgaccaaaagatatgcataggcagttca

SEQ ID NO: 251002 - DNA, 642 bp, Homo sapiens
agtttttcctttatctctcctatggttaatggtttctgcagaaaaggaccaattaatttctttctaaaacgttgcttcagggtgtagagtcctttataggtcatgtgtcaacttacagaaaatttttatagttcaaatataaattacgttcaatgtagactttgtaatagaatttaaggttaagtaaagtttccactttccttaggctgtttgcagtgcccagcaggccccatcatatcgagatggaagttatgttaaaggaggaggttggccagggttgggcagaataaggactatgggcagctcaggctaatgatacaatgattgagatgtagaaagagggccaggcatgggataacgcctgtaatcccagtgctttgggaggccaaggcaagaggatcgcttgaggtcagaccagcatggtcaacagagtgagacctaacctgtagaaaaaaaaaaaaacacaaaaaaacaaaaaaattagttgggactacaggcccacactagtatgcccagctaattattttaatttttgtagagatggcaggtggcggtgtgggggtgtctctctatgttgcccaggctggtctcgaactcttgacctcaagaggatcgcttgaggtcagaccagcatggtcaaca

SEQ ID NO: 251003 - DNA, 550 bp, Homo sapiens
ccagaagaaatctttatcttggtgtgcagtctctggtgagggacaaatgtcatctctcttggatctgaatctggaaggatcaaggcactgaagggatttttttgtttcaggcagtctccctctgttgccaggctggagtgcagtggcccaatctcggctcactgcaacctctgcctcccgggctcaagcgattctcctgcctcagcctctcgagtagctgggagtacaggcacgcgtcaccacgcccagctaatttttgtatttttagtagagactgggttttaccatgttggccaaggcaagaggatcgcttgaggtcagaccagcatggtcaacagagtgagacctaacctgtagaaaaaaaaaaaaacacaaaaaaacaaaaaaattagttgggactacaggcccacactagtatgcccagctaattattttaatttttgtagagatggcaggtggcggtgtgggggtgtctctctatgttgcccaggctggtctcgaactcttgacctcaagaggatcgcttgaggtcagaccagcatggtcaaca

SEQ ID NO: 251004 - DNA, 442 bp, Homo sapiens
aggcatagaacacatagaaggtaaaagtcactggaaataacttctctatgagggagttcatatctttttgtattagcagcatgatccgccacttaatattttaaaatattcttaccatggaaccctgtgctttcttcactgtggatccgtagcaatcatggcgttttctcttttttgtctccaccaaatcaactcactcttgctgagcatcattcttcattaagatatggctttggggccaggaatggtggctcatgcctttaatcccagcaatttgggaggctgaggcaggtagatcacttgaggtcaggagttcaagaccagcctggccaacatggcaaaaccccatatctactaaaaatacagaggcatgaggctcacttgaacccaggaggcagaggttgcaatgagctgagatcgcaccactgcacttcagcctcgg

SEQ ID NO: 251005 - DNA, 249 bp, Homo sapiens
ctgagaatgttttgtgttgatggagaaacagacaatatgtggcaaatttgaaaataaacaatacaattctcatatagtgataagtacaatgagcaagcagaacccaatctgaaagcaaagtaaactctatataagcgtagagcatgaatccattcattcaccaaacacttgctgagcactaccatggggctgggggctgtccttaggtgctttaaatacttgatttcttcccttttttttttttttaaa

SEQ ID NO: 251006 - DNA, 349 bp, Homo sapiens
ctgtgatgtttcctaatcagtgaactcatactggacctcgaagctgtctattaacaaaaatagcaaagtggctgttcagggtggctcatgcctgtagtcctagcactttgagaagctgagggcggtggatcacttgaggccaggagttcgatacgagcctggccaatatgtgaaaccccatctctactaaaaatacaaaaattagccaggtgtggtggtgtctgcctgtagtcccagctacttgggaggctaaggcacaagaatcatttgagctcaggaggcagaggttgaagtgagctgagatggcgccactgcactccagcctgggcgacacagcgaggctctgtct

SEQ ID NO: 251007 - DNA, 571 bp, Homo sapiens
ttctttataggtgttttgatttgttttgagggggttgtttggcatatattttgcaactaattaattcatttttgtaaaaccatcagacaacagtgctagatgtttaaaatattctacagcagaaattttcaaatgtttttggaatcattaatacaaccctgtctctccttcacttaaaccacagtagccattggtaattgagaactagattctttccctttgagtcctagttgatctcaaaaatcattctcaacactgcacttagctacaggtagctgttaatattttgagttgatgactaagctgaaacccatttgccacctgtgagttaatgggcaaggtctatccttgtctcttccaggctctagcctatagtgcaagtgttggcaaactttttctgtaaaggacctgataactattttaagccttgttaaccatacagtctcttatcacaaccattcacctctgctattgtagcctgaagccagctgtggacaagacacaacaaatgaactatgttccattaaaactttatgagtgtgactgtgttccaacaaaattttatttacca

SEQ ID NO: 251008 - DNA, 550 bp, Homo sapiens
tgtagacacctaagcagtgaaaaatttgatgccttaacctatataatttaaaatcaaaatatttacactataaggtgaatttaaggaagatctcatttttctcatggtgaagactaagatactttttcaaaattactaaattttcatttgtttcatcagggatgaggttgggggaggatctagctcctttattaatacctgaatatataggttttaatatccaagcttgactatatccactacacttggtacacaacagaacaaatgaatgaacattttcatgcctgtaatcctagcactttgagaagccaaggcaggaggattgcttaagcccaggagcttgtgaccagcttggacaacatagggagaccttatctcgacaataaatttaaaaattagctggttgtggtggcacgtgctggtagtcctagctactggggaggctaaggtgagaggatcgcttgagcccaagaggttgaggctgcagtgagccatgatcatgccactgcactccaacttgggctacagagcaagaccttgtctctcaact

SEQ ID NO: 251009 - DNA, 338 bp, Homo sapiens
actgtcagaatctcatccctttagctaagaaccttcaatgtataccaagacatacaaaacttagggaaggctagcactttaattctatcattcacatacctcttcgagggaatgacataaagatctcacatgggttcagctctttttagttttcatgacaacacagtgaggtaagcaggatttttttgtatcatttcacaaatatggagaatgaatagcttaagaacgctaatacatagcctagctagatcccaaaggcaggttttccaaaaaatctagattcctgtaggaagagaccacgattccatttaagctgagtggactctcagagattacag

SEQ ID NO: 251010 - DNA, 435 bp, Homo sapiens
atttgtttcatgcccatttttagttgtttgtggaaacatgtttataatggctactttcaaatccttgtcagataattccaacatctgtgccatctcaatgttggcatctcttgactgtgttttctcatttaaattgaggttttcctggttcttggtatgataaatgattttgattatatccaggcatgttgggtactatgctatgagactggattttatttaagccttctgtgttaacaaaccttctctgacactgtgctagcaggggaaaggggggcactccctcatttctgtgaggtgggggagtaggagggtaccttattattggtaggtgagggtgaaattcaggctacccatagttgatactgttatttttattgttagttttgtactgggtgcagtaacctggacagtgtctcagctctgtattcctta

SEQ ID NO: 251011 - DNA, 531 bp, Homo sapiens
gctgtcatggcagccctaacagatgaatccagtggcatatgaaataactgctaagaaccatgtgatagctggatgggggtttgtctgtgcaccatatgcacatacacacaaggacatccacatgtgtgaaagagggtgttgcattcccttaagagtagtatacttatttatgtattctgtgtaggatacttatttatatgagaaactctagcgcatgagaaaatgttgaacaagaatttaagaggattttctgtttaccctgagtttaactgtaaaattagagttcttccctaaatattattgttaatattatacatgttgttttttgctgtaaaatattcagagattatctaagtaattctgccactatctgtcatgatgtagtgactatgtgcatttctgttggacatttaatttctatttgataatttatttctgttcaatatgtatatttgtagaattatttctgagatatagatgttcattgctatccagaatattttatgtaataaactctatgttttctgtcat

SEQ ID NO: 251012 - DNA, 204 bp, Homo sapiens
ccccttaattttcatataaaatgtaataactatcagaataaaaagcacaataaccaagtatactttaaaaagagagctaagacagttataaacatatgaaaagcacacaatccattaacctaccagaacgtttcttaagtaaaaatatcccaaactcagaaaatctctcatggtttttgacaaacttgacaaaacggtttctta

SEQ ID NO: 251013 - DNA, 417 bp, Homo sapiens
gtgcctgtagttccagctgctcaggaggctgaggtaggaggattgcttgagcccgggagtttgtattgaagatataatgctgagcaaaataagccggtgacaaaaggacaaatactgtacagttccactcctaagagctgcctagaatcatcatatttattgagacagaacgtacaatggtgggtgccagggactggggaaatgggaagttatgtttaatgagctgagagtttcagttttgcaggctgaaaagagatctggagctggatggtggtgatggttgcacagcagtctgaatgtgctccatgctactgacctgtacccttaagatagttacagtggtacattttatgttacatataatttaccacaatttaaagaaaattaaaaaaatttacaaattcccttaaaaaaaaa

SEQ ID NO: 251014 - DNA, 946 bp, Homo sapiens
taaggctttcatcatataggaactctttattgaaatatttcaagaaaaaagggattatcatttagaagactgattagtcttatttattatgactgaaatgtgcaaacagaatcattgtttcatgaacagaaaacagcagagtttttgactgtcaatgatgttcgaatagaaaatggatcactaaggagataggagattctgttatcgacagtcttcaaaagtaagttgatggccctggaatgaatggagtacaggggattctctaatttgatgacttgttgaactacattatagtcaagatttttctccagtcatgagttggaagattctacaatctggtggtattatagaatggattggccacttgtgcatctgaatttgttatgaatgtgtaagaaaaaagcaattgagaagataccttgaaaataaatgagaacctcctttgtaacctgactttgtcagtcttcttaaagataacattgagttgatgtgtttttaaataagctgctaagagtaatatgtgtttttctgaaccaatattgtggtatttacatttaaggaattgttatagatttatttatttcaagtttccaaaggtatatacctaaacaagagatctaatcatacacatcttcaaagctcattttcttgtatctttgtgatataatttgataaaataacaattttaaacaacttgaatcttggatattagtctcatgagttagatgggctgttatacatatgattatttcataaactctgaaagtgtgaatgttattttactatactaccaatttgggatgttaaactacatcttgagcatttgttgttatagggaaagctcactaactacttttcatggagatcaggctggtttattttattctcttattacctgtgaccatttcatttaaacaaataaaatatttctctgatggaaaaacta

SEQ ID NO: 251015 - DNA, 395 bp, Homo sapiens
atttatataatttttaggagaagcaaatggtaacccttttaacgagaccctaaatcatataaagtggttggatattattatatctatatgtttgtgtctgaatatatttatttctgctactcctctgctataatcccaacactggcttacaaaagaggcaattcaggcaatggatatgtcacatcatttttttttttttttttatcacttgcggattgctttttaaatgctgtagtatgaataactgggcatttaataaccttgagaatattaattcatttactgatgtgcttattcatttatactcattcttactccaaaaaggatctaagaagactcgcaaagataaaaataatacaagaaaaactaaaatttaaaaaggagagggaattagg

SEQ ID NO: 251016 - DNA, 388 bp, Homo sapiens
ttttaaattttctataatgtgtgtgtgtgtgtattaatttaacaattagataaaatgttatgtacaggtcgatttcactaaaaagccaggtgctgattacagcagtattcattataatgaaaacttgaaagtagctcacatatcaattactgttgatactcgggtcactattggatttgttaagtgagttataaaatatatatctattgcaatagcttgcagccattgaaaatgaagattacaaagaccaagtgaaaccattatgtgaaaaaataaaaaatgctaggcatattatgcataattatttgaggatatcattgtaaaatctgtaaggaaagaggaaatgataactgcaacaggatagtaaaattaaatttgatttaaaaat

SEQ ID NO: 251017 - DNA, 542 bp, Homo sapiens
cttgatctcttgacctcatgatctgcccgcctcggcctcccaaagtgctgggattacaggcgtgagccaagtgcctggccatcagtacatgttttattgggaggtgggaggatcacttgatgccgggagttcaggaccagcctgagcaacatagactctgtctctacaaaaataaaataaaacttagcgggacatgatggcctgcatctgcagtcccagctacttgggaggctgaggtgggaggatggtttgagcccagtagttccaggctattgtgtgagctgtgatgatggcaccactgcactctagctagggcaacagagccagatcctgagtcaaaaataaatgttttaaagagtattatttccttttacaaatctccacttgtttctaggaaatttagaaatgagaaaagtattatttgcaatgtctggaatgccagagtctaacctcttaaatatgtgctcataacctcagatacttggtctatgcttgataattaatggttttgaattgcagtgtttattagttttgaaaatttg

SEQ ID NO: 251018 - DNA, 429 bp, Homo sapiens
cagggaaatacagggtagaaaagggcagttccccagcaaaggccccaccctcaagcctgaaaaaccatggccctaaatgaggacaggcattcctgttgtcacacccaaaaagttgccttttggcctgccatgccccatatcctgtacccatataaatcccgaaccccacgctccagaagcagatgagcaggtgaggaaatgaggagtcaaacagatggatagtagaacgacacagcaaagaaagaagaggaatgtctgaataccaagaggagttcagctgggggcagttagggagaggtttggagactggccagtttccaggggaagatcaccttcctattctatcccctccttctgcctcctcatccagcgcactgagagccacctccaccactcaataaaaaccttgcattcatcctttaagcccgt

SEQ ID NO: 251019 - DNA, 419 bp, Homo sapiens
ggtctctcttttcacatctccataatagaggtggtattttttgacttccatttgtgaagtgtaaatgagattcgttattgttgcttttatgtgaatccttagtacatggcctgctgcaaacacccaggacacccaggaaatggttgttgtttgattttcctcatccccagtctcaaggggaagccaggccaatgagaagagccacttgccatcaggctgtccctttaggagtcactgaaagggccccagggtgggatggtggggagataagaaccatgagagaagttggcacaaaggagttatgggaaaaagggtccaagataggcagaaaagaagcttttgccagttgatggggaagaaaggaaatcagagggcttagacagtgaggggggacaggacatctccatgtgcactctcat

SEQ ID NO: 251020 - DNA, 289 bp, Homo sapiens
gctgcagaggggagtggggccaggactggactggacctttgttacttgtagggtcctatcctgactttcccacagaaccttgtggctgaggagtatgtttgttgtttttatttttattttttgacaagatctgcactccagcccgggtgacagaacaagaccctgtctcaaaaaaaaaaagaacaaaataaaataaaagtaatcataagacaagagaatcccatcctgacttctgttttattgttcattggagaagattctttctataagtcaaggaaattttgctgtg

SEQ ID NO: 251021 - DNA, 421 bp, Homo sapiens
acactgcctgatttttcctgaaaccgaagataattctcatctgactgtggttacctcctagttggtgtgtctgtattccaattttgcaagcttaaaatctgtccattcacctgtcttatttttttaaaatctgtactgccccattctacattatgactttaagatttcagctttgaatttctggtcctagttcagatcctaaggtttggaaaagtcagaaaacagatctattaaaaaaaacacacacacattaaagggaaagtacttcattacattttaaacagcacctgggaggctgaggtaggaggattcgcttgaacctggtaggtggaggttgcagtgagccagattgcgccactgcattccagactggtgacagagtgagatccgtctcaaaaaaaataaaaaaactaaaataaat

SEQ ID NO: 251022 - DNA, 300 bp, Homo sapiens
gttcggagtaaaccggtttagccacaaatacttggagctgtgctttcactccttccagctcattagcatttttcttactgattttctccctatttggccttagaaaaaaagtgtaaatttaactctgtggagtaaatgggagggacacacttccaaatctccagtagatttcaaattttgacccacgatttgtgtgtacttcaaaagaggggagaatgacattcgtttatgcatgccttaacctcctgtttttaactcttagctgaaatcataatccctaacatgtttttccccaagttc

SEQ ID NO: 251023 - DNA, 415 bp, Homo sapiens
tcatgatcggatgccgaagtcagaaacttaaaggacacagcagagcccaggggggtacgcgttcagaccccagccctcctaacactggctgcgtgacctggtaatgcacagaagctctctgtgcttcagctttgtcacctgtgaaatggagatagaaatgggatctgtctcggtgagtgctgtgagcattagatgagtgtagatacacatccatggtgcctggcacacagtaagtggtgttaactatttgctattaattttgtaagcgcatatacaattatgccaaaaaaactaattaataatagcttcctttcctctttcattctaaaaattggctcagggttgcatatcaagtaatttatttaaatacaatttttcacaatatattgatatataatatataaataatttacac

SEQ ID NO: 251024 - DNA, 463 bp, Homo sapiens
tgctttttagttgtcacattctcagtgggccagttatagattgaagtgtcccccaaaagatatattgaagcctacagtacctttgaatgtgacctttttggaaacagggtctttgtagatataattaagctaaaatgaggtcactagtgtgggccctaatccaatatgacttagggctttttaagaaggagaaatttgaacacagggacagacacatacagaaaaaaagatgaagatgatgtaaagacttacacaaaggagacgggcatgtcatgatggaggcagagaatggagtattgcatctgcaagccaaggaataacaaggattgcctgcaaacacctcaagcaagatgagactaaataggactctcccacacatgcttgagggatatgacgctgctgacaccttgattttgaacttctaccctctagagttgtgagggaataaatttctgttgtttta

SEQ ID NO: 251025 - DNA, 284 bp, Homo sapiens
tgctgggtactcctaagcaagactctcctactgtgttttgggggtttatgtaccccactccctgcagacaatatgcttctgaatcagattgtattttacggaagaaagaggcagttagaaatcagatgaaaatggccaggtgtggtagtgggctcctataatccgagtgactcgggaggccaaggcaggaggatcgcttgagcccaggagttcaaggctgcaatgagccatggttacaccattgcaccccagcctggataagagagtgagagcccgcctcttga

SEQ ID NO: 251026 - DNA, 441 bp, Homo sapiens
gagtgaaactttgtctcaaaaaacaaataaacaaatgaacaaacaaacaaaaaatcattgttattcctcagagtaagagcaaagatcatcccctgcagaagcttaggaactatgcacagaactttacagaacaggggcgatgctttaactgaaggctgactactgaccagagaatggaattctgagagggctcaaggaataaaaggaaactaggcagggaaagggaaggcgcccatctgaagcaaacttcagcggccatcaggatatcttgtggtggtcacaagttgtaggctctgtttttggaaggtttgggtatagcgcaggattccatttgtctacttggctacacctctgcctgaggtacactgttgccagaaaagagggtcccaatccagaccccaagagcaggttactggatctgcacaggaaataattcaaggg

SEQ ID NO: 251027 - DNA, 767 bp, Homo sapiens
agcatatactaaaggttttatttagttcattattaatgagggaacaagtaagatggtacaagcagtccaaagtttagaacacagtagtggaaacttcccctatgggacatgcccatccaacaagtgcaacaagaaattaagttttagtgaaaacaccaagcaaaaaagctacagctctaacttctctgctgcagagccctgagtgccttgcctggctgtaagaggaatactttcatcaccaagcctaggagagtgcctttgtccatcgagggtccccattggggttaactggagcccttgcagatcaaggttgcctctgccttctgtgttcctgtctgtggctgtgctgttgtcccagtcatcaccgtaaccagtgatccagttctcactccctcctccagagcaagataatagcctcagatgaagaaattctggttctgagcccgagaatctgagacagactcagatctaaatctttttaaagccttcaaggagattatgatgcccacgtgagctggctcagaagaagaatttatttcaggaatgccaagaatttctcatgcttggtggtaggacattccttgataatttagccaggtgagaagttgtcaaagaactgccaaacccataaggattcttgtagctcacagccaggaggctaccttatattttgaatttaagattaagggaaaaaaaaacacaaaaaacatatacaatacattcttgttgtggtcgagcataaagtaattaactatacagagaaaaac

SEQ ID NO: 251028 - DNA, 389 bp, Homo sapiens
agcccttcttcaagatggagtcgctctgatttgattgcctctgacaattatcttacctgtaatcaataggattgtaattgtgaaagtgagagacaggactagctggatttcctaggccaactaagaatccctaagcctagctggaaggtgaccgcatccacctttaaacacggggcttgcaacttagctcacacccgaccaatcagagagctcactaaaatgctaattaggcaaaaacaagaggtaaagaaatagccaatcatctattgtctgagggcacaacgggagagacaaggatctggatttaaacccaggcatttgagccggcaacagcaaccccctttgggtcccctccccctccttttgtacgggagccctgttttcaccct

SEQ ID NO: 251029 - DNA, 1037 bp, Homo sapiens
tgttaaaaagaaaaaaaatctctgtgactgtccttttatcttccctggtgcatacaccttgttagtaggtctttcggttgaagttttgctttggagaaattccagggccctttgtggcagccctccggtcttttcttgttcatgattttcagaaccgtcagggataacccaagatgcccacagtggccatatctcttggagtgtctaatgaatatcatcccctgggtcatctcttagaggacagcctgaggaggaagagtgtagcctctcagaagagcagctggatggcttaggcctgtggaaatttcctcgcataccatttgtcttagaaagctaaccttttagaaaattaaaattattttttcacaaaggaacgcgtatacactgttgatgggagtgtaaattagttcaaccattatggaagacagtgtggcaactccttgaagacctagagacaaaataccatttgacctagcaatccattattgggtatttacccaaagcaatgtgaatcattctattataaagacacatgcatgcatatgtgcattgcagcacaattcacaatagcaaaggcatggaatcaacctaaatgcctattaatgatagactggataaagaaagtgtagtacatatacaccatggagtactgtgcacccattaaaaaaaaatgagatcatgtcctttgcaggaacgtggatagagccataagacattattcttagcaaacagaggaatagaaaactaaatactagctggatgtggtggctcacagctgtaattccagcactttgggaggccaaggcaggtggatcatctgaggtcaggagtttgataccagcctgagcaacatggtgaaacctcatctctactaaaaatacaaaaaattagccaggcgtggtggcagatgcctgtaatcccagctactcaggaggatgaggcaggagaatctcttgaacccgggaggcagaggttgcagtgagctgagatagtgccactgcactccagcctgggtgacaagagcgaaactccatctc

SEQ ID NO: 251030 - DNA, 936 bp, Homo sapiens
acaaaacgaacttttttcctggttgagcattaactgacaatcacgacagtagaaccgttagagtttagtttttaatattatgtgtgttatctttcatcagttaataatgagtaagcctattcagaaaaagaacataaactgatcaaaaactcagcatctccagcctttcatttcctgctattcaggaaattgcttagaacatcttgatgtcctccttgttcttcctggacagtgactttttgggagtttgttcctgctgcgtaatgtgatacccacttcagattttttttttatcaatacatttagtaagttgaacttctgtcaagttttattacaaaattacttgttaaaacaatttttactaaactgcatttctatctagcatatttttgatatggaagtgatagtatagtatagttccaggagaagtcttaaatcagtccacagagtccagttagcaaatactctgtgccattaagattgctaaaatacacagttcaggtaaatttactagtgttttttaaaggtttatttgttttcacaagatgctctgtccacacccttataacatgtaaaatattgtgtgctgtattatgtggtaaagttgttaaaattcagtttctaacattaacttaaaagtacagacaatctaacatgatgatttgacttacaaactttcaactaaatttatgatggctttaaagcagtgcactgaatagaaaccatactttgagtacccatacagccatttttcacttttactacaatattctataaatcacatgagatatttaacactttattataaaataggctttgtgttagatgattttgcccaaatgtaaactaatgtagtgttctgagcatgtttaagttagggtaggctaaactatgtttggtaggttagatgtattaaaagcatttttgattaaaaat

SEQ ID NO: 251031 - DNA, 388 bp, Homo sapiens
ctcagcacctctgttactgttttaatacatcatgaccaagttggatttattccaggaatgaaaatcaaataatgtaatttatcacgttaccagaataaagggaagaaccatatggtcatctcaacagctgcaggaagagcttttgatagaagctaatgcccagtcatgcttaaaaactcgaagcaaaccaggtacagaaaggaacttccttcagaaaatctctaacacaatcatacttaatatgaaaatattaaaagcttttccccgtgagatctggaatgaggctagatacctgctgaccatttcaattcaacatgatattggaaattctggccagtgcagtaaggtaaaggaaaaagtgaaagggattaaggttagagaaaagaag

SEQ ID NO: 251032 - DNA, 535 bp, Homo sapiens
tggaacttatttttaacaggaatcaaggaagaaaatattcatgcagagctatgacttagaaagttataggggctgccactatacagcacttctaaagtaaaacatcttctatctccaactgggctgtcaacatagtggactttcatgttctatggatatgaattctttaaggatatagcccttaattaagctgtaaaaacaatgcatctctcaaccttgacatttaggatctctcctgtctgccccctctacgccccactccaattaactcatcctacatctctcagatgtaagttggataagagtgggtttgaagtttggtaatacaagtggcagttttaaaacaccaaattctttagatcagctgaaaagaagagtgagaattgaaaattcctccactagtaattgttagccaatagaatagcctcccagagcagtccccacagcacttggttgccatgggtttctctcctctcactgcctgccccagtgccatgatgtctggggcttgtctcttctatggcatcccctgatt

SEQ ID NO: 251033 - DNA, 188 bp, Homo sapiens
tgcagcctcaaactcctgggctccagagatcctcccaccttggtctgcagagtagctgggactacaggcttgtgccaccactcttggctatgattttctattttttgtacagatatgctctatgttggaccagactggtcttgaacacctggcctcaagtgatccccccatctcagcccatatttttt

SEQ ID NO: 251034 - DNA, 622 bp, Homo sapiens
  misc_feature (547)..(547): n is a, c, g, or t
  misc_feature (582)..(582): n is a, c, g, or t
gcctctctcaaggatgaggttttgaagattatgccagtgcagaagcagacccgtgccggccagcgcacgaggttcaaggcattcgttgctatcggggactacaatggccacgtcggtctgggtgttaagtgctccaaggaggtggccaccgccatctgtggggccatcatcctggccaagctctccattgtccccgtgcacagaggctactgggggaacaagatcggcaagccccacaccgtcccttgcaaggtgacaggccgctgcggctctgtgctggtgcacctcatccctgcacccaggggcactggcatcgtctccgcacctgtgcctaagaagctgctcatgatggctggtatcgatgactgctacacctcagcccggggctgcactgccaccctgggcaacttcgccaaggccacctttgatgccatttctaagacctacagctacctgacccccgacctctggaaggagactgtattcaccaagtctccctatcaggagttcactgaccacctcgtcaagacccacaccagagtctccntgcagcggactcaggctccagctgtggctacaacntagggtttttatacaagaaaaataaagtgaattaagcgtg

SEQ ID NO: 251035 - DNA, 763 bp, Homo sapiens
  misc_feature (547)..(547): n is a, c, g, or t
  misc_feature (582)..(582): n is a, c, g, or t
gcctctctcaaggatgaggttttgaagattatgccagtgcagaagcagacccgtgccggccagcgcacgaggttcaaggcattcgttgctatcggggactacaatggccacgtcggtctgggtgttaagtgctccaaggaggtggccaccgccatctgtggggccatcatcctggccaagctctccattgtccccgtgcacagaggctactgggggaacaagatcggcaagccccacaccgtcccttgcaaggtgacaggccgctgcggctctgtgctggtgcacctcatccctgcacccaggggcactggcatcgtctccgcacctgtgcctaagaagctgctcatgatggctggtatcgatgactgctacacctcagcccggggctgcactgccaccctgggcaacttcgccaaggccacctttgatgccatttctaagacctacagctacctgacccccgacctctggaaggagactgtattcaccaagtctccctatcaggagttcactgaccacctcgtcaagacccacaccagagtctccntgcagcggactcaggctccagctgtggctacaacntagggtttttatacaagaaaaataaagtgaattaagcgtgaaaaaaaaatcaaaataaaaaatgaaaaataatatataactactccaggttagaatattttaatctaggaagggggggacctatgaaggcaaatgtacctggggctcacaaaagtcacaacatggccccaccatgggaggg

SEQ ID NO: 251036 - DNA, 502 bp, Homo sapiens
cccttgggaagggtcatggttgtttatttgaagctgctttcagccagtacttggccgaggagtgtggatgaatgaaacgcctctgttgtcctgctgctgaaacgggaacactattgcctgtcatcactgttgtgcccactgttttggcttatgatacaagagcccactgtcctacatctctaatgatacacagagcatctctggtctctaggaggtgggagggacactacttccagctttaaccatatgcatgacaaggagatccagtgaccatctggtggggaagcaggcattccatctccggagcttcccaaggaaacaggagacaatggagtgcaggaaatgctcagaaccaggaaacctgcaaccacttagttccagtggcttggggtagctaggattccgtttattcctttgtaaaatggggataatgcagggtgctctcatgtggagctaaggaaacaatatgtgaaagcccgttgcatataaaatttatataaag

SEQ ID NO: 251037 - DNA, 332 bp, Homo sapiens
cagttgataatctattaataccattgtgttgaggaagttgctgccagagcctattaaaccactttaatctggactggttgctctctgtcttcgtacaggtgtcctcttgctgtcctccaccgtgctagggttcctttcctctctttcttgcctatgcaagattgctatagaataaatatttgtgtctcccccaaattcatacgttgaaacctaatccccagtgtggtagtatttggtggggcctttgggaggtgattaggtcatgaaggcagagtcctcttgaatgggattagcacccttatgaaaagaccccaggaaaaaaaaataaaaat

SEQ ID NO: 251038 - DNA, 479 bp, Homo sapiens
taaatagtagtcattttaatgggtgtgaagtggcatctcatcgtgattttaatttgaatgtaatcatcacctaatgaccgatgctgagcatcttttcatgtgcttatcggctacatgtatatcttctttggagaaatgtctattccatccatttcggaatctggttgttttaaaccatgatgtttttagaaaccctgaccctctgccctgtataccacagccccacacatattcccatggagagttcactggcagcccagacagcgggatgctctgagggagaagaaggtattccattgctctgccccatccaactagttttgccaacgcacatgacacttacgcacaacaccgtactctagggctacggcactgcaaacctctgtgaacctgtaatattacccggaagaggtaattcatcaagtcagtatgactcacagaactttagcttgaattcctaaatctgtgtagctgcctgg

SEQ ID NO: 251039 - DNA, 514 bp, Homo sapiens
gaggctgcaatcaaggtgtcatcaagagatggagtctcatctgaaggctccacagagacagcaagaccaactcttcccctcaggaggaggatgaaagaggctgaggagaaggaagacttttatgatgatccacttccacctaatcaatactgttctaaggcttttatcatccacagttattattttacttttattttcctcaaaaagggtttataatcagccacaagtccaaaatttgtttcttcttcaaggaaattaatggacaggattctgataagtactcctgaatacaggttcctgataacttgggaaaccataccactggactagagtaaaagttacaggtatcaactcctggatacatcacacttgagtcaaagcctgaaaaagctgagacagcaacccttgacagctcagaggaacatcttggatacaaatgtggagaaatagaagaccttgagctgaaaatcataagacaagtaaataagcaaggggtacgcatcttactcaattc

SEQ ID NO: 251040 - DNA, 451 bp, Homo sapiens
tgatattttcgtatgcttctctatggaaatggatttatttagaattttcttcttttttggtttgggcagaggagcgtcaccctgtggccaccagaagcacaggcttaggaggagtacttccaggctaccgccaatgacccttcaaagctcaaaggctcttcagtcagcttgtgagacagcaagaccaactcttcccctcaggaggaggatgaaagaggctgaggagaaggaagacttttatgatgatccacttccacctaatcaataagtaaaagttacaggtatcaactcctggatacatcacacttgagtcaaagcctgaaaaagctgagacagcaacccttgacagctcagaggaacatcttggatacaaatgtggagaaatagaagaccttgagctgaaaatcataagacaagtaaataagcaaggggtacgcatcttactcaattc

SEQ ID NO: 251041 - DNA, 586 bp, Homo sapiens
tgatattttcgtatgcttctctatggaaatggatttatttagaattttcttcttttttggtttgggcagaggagcgtcaccctgtggccaccagaagcacaggcttaggaggagtacttccaggctaccgccaatgacccttcaaagctcaaaggctcttcagtcagcttgtgagacagcaagaccaactcttcccctcaggaggaggatgaaagaggctgaggagaaggaagacttttatgatgatccacttccacctaatcaatagaaattaatggacaggattctgataagtactcctgaatacaggttcctgataacttgggaaaccataccactggactagtgcactccagcctgcgcaactgagctagactgtctgaaaaaaagacaaagttaacgagtaaaagttacaggtatcaactcctggatacatcacacttgagtcaaagcctgaaaaagctgagacagcaacccttgacagctcagaggaacatcttggatacaaatgtggagaaatagaagaccttgagctgaaaatcataagacaagtaaataagcaaggggtacgcatcttactcaattc

SEQ ID NO: 251042 - DNA, 371 bp, Homo sapiens
caggtccctctaagcacccagtcatcaggggcaggcccccatggagagaacaggcttgtttcagggaggaattcccagaagctggagctccagacagaggtgagggacagtggtcagcgcaaggcacactggacagagctgacttcagtcctatctggagtttctccaagaagcttcttcctagaagctcatcatccctactcactttggggtgaaaatagctttgcaaaacctgctcagatgagtcagcaggccagacctccagagcggtggatgtagtccacacgaaattgcctttagtgaactgagcattgatgttataccatttgattgcattgatttggtttataagaaccagcacatccctagct

SEQ ID NO: 251043 - DNA, 329 bp, Homo sapiens
tagagacggggtttcaccacgttggccaggctgatcttgaactcctgacctcaggtgatccacccgcctcagcctccgaaagtactgagattacaggcgtgagccaccgcacccagccaaagcctacttttaaaacaccagtttagtagtctttaagatgtgccaaatgttgaaatactttaactctgggatgatgaatataggcagagtgccaaactcttcaatttaaagaagtttgcttagcgattgttttattgtttattttttgagacagggtctcactatgttgcccattctgttctcaaactccagagctcaagagattctcc

SEQ ID NO: 251044 - DNA, 540 bp, Homo sapiens
gcagaggttgcattgagctgagatcatgccactgcactccagcctgggtgacggagtgagaccctgtctcaaaaaaaattttatgaagttgaacaattctgagtgatgacaagcccagactctagtcctgggtgtggttgactaaaatggaatggcatttaaagtcctgtgagaatcatagatggacggagaagtactaagttcttcagtgaatatggaggcacagattgggaagctgagtataggagacagtactactgaagggccgtgatgcctgttacggacttttacatgagaacataaatagttgtctgaaaagtggctcctggcccagagaatgcctgttcctgttgccagccctatggcatatagagtcctgaaagaataagcagcgtgcactctctcgtggggaaagtgaacacttgagaggttgaatgtgcttctcaccaactcccttggggacatttaaagatgtaaggggtaatttttggcacaacctaaaatactgttctcttcctgttcagggcttaccttttttta

SEQ ID NO: 251045 - DNA, 113 bp, Homo sapiens
ttacatcttttgggtagaggaggtttcagtgaagtttacaaggcatttgatctaacagagcaaagatacgtagctgtgaaaattcaccagttaaataaaaactggagagatga

SEQ ID NO: 251046 - DNA, 281 bp, Homo sapiens
actccaacttgggcgacagcaaaagaccctgtctaaaaataaataaataaataaataaataaacaaatatgtacagccatccttgtcttcaagcactttgagaacattttagccattgatgtttacatgtggcacccacccatgcaagataggtttctgtatttatacattaaaataccaaaaaaaaaaaagtatgaaatgccttcaaaaatgttcaaagcttgagagaaaagcttttttcattagtcaaggtgttttgatatggtattaaaataatatct

SEQ ID NO: 251047 - DNA, 399 bp, Homo sapiens
aacaaacagacaaacatctcagtctttggagcttaaatctgagtgaatgacagtccatcactgaaagaaaaagaaaaaaaacaggtttggttttggtttggagggagggtgcagagattaatgcaattaggtgtttttaaaattttttacttttttgtttgatatcttctcaaaaaccaaaaaaaaaaaaaaaaaaaaaaaaaaaaccaccacaaaataacttttttttttactttgctcagttgccagcactacaggaaagagaagcctggaagtacattatgggaaaagaagtagataggtcttcagtgtaaaatctgaaggggtcatgtgagtatttttaaggattcaataatatacataaacacaaataaaaacacagtatatttcccatctatt

SEQ ID NO: 251048 - DNA, 353 bp, Homo sapiens
tgttttaggtgccacagtcacagcaatgtacaagacagttgctctggaccaagtgctgtatcccctcaaaatttaatgttgaaatgttgaaattctaatccccagtgggatggcatttggagatggagactttgggagataatgaggtattgagggtggagtcctcatgatggaattagtgtctaagaagagacaggccagaacttgcttcatctccatccttctaccatgtaagattacaacaagaagctggatatctacaaagcagcaagagggccctcacaagacaccagactgccagcaccctgccttcccagcctccagattgtggaaaataaatgtttgttgtttaa

SEQ ID NO: 251049 - DNA, 766 bp, Homo sapiens
gtctcttaaaaaaaaaaaaaggtaaaaaaaaaaagcttgtagtgttcatatgtatatatatatattattcaatatattacggtaactaagtcctgcctagtaaaatctttttttttgtaataaaattagcaactcactaaatttatgtgaatatatggttttaaaaactctcaatgaagattaaaagttcactgtcagaggtttcagcagtcctttcccaagcttatttacatgctaattttgcttagtaaactctggcttcaaagaacacaaaggtcagctgccaccaggtccctcctccgaggctttggccctagggaccctgggaaggcggcttcagtgcccgcttccctgagcaaaggctcgtctggactctgacgcggacccaccgggtggggtgggtctccacgccacccggctgtgcgtggggcaagtcctgcaccccgggcctgcgtttcccgctgcgtgaacggatggtcttgcgaatctagccaagggcacacagcgagcctctactcgggcattaggcaggctgtaacgactgagtgctgcacgggcagcgtccttttgcttgtgttttcttaacccgtaagtcatttaaagctttgttttggaacgaccctctagtgaaattggaacatgcccatttaatgccatattttaaaaacgctgtaaccccctcccatctccgcgttcacccttgaggaaatcctaacagtcaccatggatataaacattaataacaaaattaaagctcataacaggc

SEQ ID NO: 251050 - DNA, 271 bp, Homo sapiens
ggtttccatgagatagtgttgttttatagcagtttaatggtcacagctggcagtatgtgcagagctgaaatcacaatagacttgtgtatttggtttatatataggtgagacatccttacctacaaattgaaccagtcctgagcttttctttctcttatcgtaaagtgactagaacttttttctataccaatcgccaaacttgtcaggactggctaacgcggattcgactctccatcatgagggtaggattgttggcaggccagcctgcagt

SEQ ID NO: 251051 - DNA, 492 bp, Homo sapiens
gtgatttccaatacacatttctgcaaagtttttgttttttgtttttcccctacatttcgggaaggagttttgaagggattaaaaagctgagattctttctgaggtgaccaggcctggctttcaaccacgccctggttgcttttggctgttactctgctgcaagccttgtgattcatgttgtttaaaggctgagtcaccagctttgtgacatagcttttttcagagtccaaaaggtacagagaaaaaacagccctaactgcagaggcaggggcgggagaggaggacaggaggaggaaaaaggaagaagaggggatgagggtagggtgggtaatgggccaaaggttagctgcaaagagaaaccaatgttgtctctagcagaaaaaaattattgaaaacatcccagcattccctgacttaaatggttattgaagcaaacagaaataaacctttctccaaagtcactgaggtgacagggaagaaaatggcctccca

SEQ ID NO: 251052 - DNA, 481 bp, Homo sapiens
acatagttcttttctttgaattcctttagggtcctaaggtaaagtacacctgaattttacccaacaataatgtacctattgggcaggccgtgtaaccttcagaatagtggtccttaatctattctaagtttcaggctcctctcagagtctgacctcagaaaaggtacttcagaaaaggtacctcagaaaaggtacgttatactcagatgtacagaattttcacacaatgtcataggttttatgagttcctaatgaccagttatgggtccttcagcaatccatggctttcaagttgatagtctatgttctgtagcaagaatatgagcatcatctctctttgctttcctcctccctcatactttccctcctttcctgtcagcagtcccttccttgaaactcccactccctcaatcccttaaaaaaaaagcatatgagtgtcaatcatatgatttgaaagttttgcccccattgtttaggaaat

SEQ ID NO: 251053 - DNA, 358 bp, Homo sapiens
cagatagatacatgtggtatactttgacccaaagttaaggaaatttttaaatattaaaaagatgaatttttggccaggtgcagtggcttacgcctgtaatcccagcactttgggaggccaaggcaggtggatcaccctgaggtcaggagtttaagaccagcctggtcaacatggtgaaaccccatctctactaaaaatacaaaaattagctgggcatgatagcacgtgcctgtagtcccagctactcgggaggctgaggcaggagaatcccttgatcctgggaggcaaaggttgcagtcagccaagatcacgccactgcaactccagccagggcaacagaacaagactccatctcaga

SEQ ID NO: 251054 - DNA, 483 bp, Homo sapiens
tatttccctggcttgcccaattatcaagggaaaatttcagctgaacacggggaacccagtctttgacactcctgtgtgcagtgtggagcagcgtgcactgtctgagtctccatagtgaggaatggtcttccctggggcatcaccctagaaggatgggctcaaagtcgccctccacgtgggtgcacaggagcccagattctcaagccccagttgcagaattaggctgatggttttacaaaagagtcctcctaaaagtccatcactaagttttgtttggttagcaacccttgccacatgatgtagtacttagctataattttatttttattcaaggccaaatcttatctggtgtccatgccttcccacctacttaaaatttcaaatttcaccctcaaaaatatttcagtaaataaaagttagatctactcaaaattagactccaagggaattactatagttgattatagagtatctatttcctta

SEQ ID NO: 251055 - DNA, 722 bp, Homo sapiens
caagagtcttcagttctatttctctggagtcggatcaacttatttagcaagtgatttgcaaaagtctctttaattaggttatttttgtaatcgtgcaaagaggttttcctttgcctgaaaactcaaacattcattaattattagaaaagccaggaagcaattaacatcaatttagaaataacgtttctaatatacaagttgatgttgtcttatcaaccaaacgaactctgaacgatgggcatggcccaatagacaggtgacttgggaatcacatgccaagaactcaggtttccacactgctgctaaagggctgtgtgtctttgggcaagtcattttacttccctcaacctcagtttcttcatctgtggaatgaggaggttgcatttgaagttctctgccaaccacaatattgtttgactctagtagaaaatgggaaggaaataaaaacaaaaaacatagaagcagtgataaaaagagatttttgtttctacatttctttatatggttatgtgtctctcttggacacatgaaattcttattgccatcagaatgactgtgtcctgccagtacttcaaggcagaaaggcctcccctggatatagagaaaatggccccactagccatcatgacatcaagaagcaagaaggttcccatctaatgaatcataagcaaatcattacagacagagtgaattttacagaagtagaattgttcttgacctta

SEQ ID NO: 251056 - DNA, 485 bp, Homo sapiens
tttgctagcaataaatctacataaacctcaaagctttcttcaagaagctcagtgtctaggacacagacttgaagaattcttatgcagttcctaggtatatatggccatcttgtgttaaaggcagagaaactccaggcacagaaaagacataaaatcatgggtagaactgggaacaagaatcaaacctaatctcctgcttcacaaatttctccaggctgtttccccacaggagtttaagtaaaattattattctttaaaggagttattcattataccataatggcataatgaataactaatacagggctgctcaaaaggtctcccttttatctcttattcactgaggtattataaagacaaaactgctaagttctgaattctgtattaagagcatattacaaataatagatgaactatgtgattatacttttgaattatttagagctctaaagcattttagagaagcattacattaaaatagaaga

SEQ ID NO: 251057 - DNA, 446 bp, Homo sapiens
tactttattcttccagtcatctctgttgtcagaaaggagttgatttctggcttaactctgtatcagaatttcttgctcggatcatttggtattgttaatattcgtctatgaaataagatgtttcaaagaattcaacatgctaaggcaatacttaggaaacactgtgcttcaaggtctgcctgtctcctctgctgaacattttaaataatgggattacaggtgtgagccactgcactcatcctgttccaacttttgaattggctgttatttattttaaacattgaaaacttccaagtgtctgttctttctgttgtcagtgatgaataatgtttcctccagatatgcatgttttagtatagtgctcatttttgctgtagcgaagagcagtgctatttatgtgagtgtacatgtggatttgagaaatgttaattttgaaatgaaccaaa

SEQ ID NO: 251058 - DNA, 864 bp, Homo sapiens
ctaatttaacttttttttttttttttgcggagatatggggatgcctcgctgtgttgcccaggctggtcttgaactcctggcctcagcaatcttcccgcctcagcttcccaagtagctggaattacagttgcaagtcaccacacctaactttttattttgaaataacttcagatttacagataagtttccacgcataataaaaataacttgcaggctgagcacagtggctcacgcctgtaatcccaacactttgggaggccaaggcgggaggatcacttgaggccaggaattcgagaccagtgtgggcaacgtcgggagacctcatttctacaaaaaaaaaattagccaagtatggtgatgtgcaactatggtcccagctactcaggaggctgaggtgggaggatcacttgtgcccaggagcaatgagctgtgagcgtgccactgcactttagcctggggtaacagaacaagatcctgtctcagggaaaaaaaaaaaaaagaaactttcatagatcttcacccagatttccaaactgttaatactttgctgcatgtgttggtttccacctctattgtatgtgtttttttttctctaagccaatatgagtaagctacaggatatggcatcccttgacctcttaatatttcagtgtatttcctagaagcgaatgcattatcctatatagtcacagtgcctgtaaccacaccaggaagttagtattgccaccaggcctcacactgtgtgcagtgatgtttcacaggctcacccactgtatatagtgatatttctagtccccttcagtcaggaatggtcccttgcctttctgtctttcctgaccttgacccctccagagcatgcggccg

SEQ ID NO: 251059 - DNA, 535 bp, Homo sapiens
ctagtactataagcatgcacccccacacctagcttttattttatttttttgtaagatgggtcttgctatgttgcccaggctgctctagaactcctgggctcgagcgatcctcctgcactttagcctggggtaacagaacaagatcctgtctcagggaaaaaaaaaaaaaagaaactttcatagatcttcacccagatttccaaactgttaatactttgctgcatgtgttggtttccacctctattgtatgtgtttttttttctctaagccaatatgagtaagctacaggatatggcatcccttgacctcttaatatttcagtgtatttcctagaagcgaatgcattatcctatatagtcacagtgcctgtaaccacaccaggaagttagtattgccaccaggcctcacactgtgtgcagtgatgtttcacaggctcacccactgtatatagtgatatttctagtccccttcagtcaggaatggtcccttgcctttctgtctttcctgaccttgacccctccagagcatgcggccg

SEQ ID NO: 251060 - DNA, 685 bp, Homo sapiens
gctcggtacccaatcttttaccgcagtgtcaaatcatgatcctctcatatttttaaaggtaaacaaatgcatttctttgggagtcatggaataggtaaatgcaagtagaagagaaaaagcagatgtgacagtcaagggcagagagatgacagatactcagatttcatagattagcacagaacttctttcggcctttattaataagattgccctagcggtaaaagcttaagcttttaccgccaggtaccagataatcagtccatgaaattcaaaaacacacattcttctctaattcccacatgagagatcactgaactgggtaaaagcaacaaaacaggaattctatgggtggggttgaaacaatccctaggaaaaaatgcaaatctttcagactgatccatgattcctttatcatcatatacggctagttttatccagtgggagaaagcagatgcggtaaaagctttacagaggacacactatccagaaaagaatgaacaaagaacaggctgttgcaaaaatatttagtccctttacacatatagtcaaacttcattaatgcaaaaaaatgtagtggttattaaatgtctgaaagaatcagtatgtatgattgagatggttaatctctgagtataacacatattgttcatctcagagttgtttggttttaaagccgtggcggtaa

SEQ ID NO: 251061 - DNA, 353 bp, Homo sapiens
caggtcctggcgctggctgcatctccctactcacctggttgatgaggcccctttttctaattcacacaaaagcaccctgagctaacagcagctccagacctgcagaataggtaagcagacagatgggcaaagggccaggcacttcctcaccctaacccccagccctggcctccgggagagcaaaccaaagcccagaccctgacagaagagcctgaggaactggcaccgtggctcacagggagctggtcttccctgggacaccaggatgcagctaagagtttctcaaatctcaggagtttgagtccaaaagcctccctggagaatgaatgtccacaaaatatatcttacagaaa

SEQ ID NO: 251062 - DNA, 223 bp, Homo sapiens
tctctcttttatatgcaaaaattttagtaaaccttcagatgaagtgactgacacttttttacttgtcagtgaatttccatcatgaagagcagagagcattttctcctcgtgttgtgaggtgggtgctggttatccctgctgtgcaagtacattgtttctcagcttagacaagctgttttatcttgatttttccatctgtgtaaaggacagaatataaaccctg

SEQ ID NO: 251063 - DNA, 459 bp, Homo sapiens
ggtcaaagacggacccgggcgggagcggtctgggctggatatccggagagttctgctctccacgggatgttagaatttgaggcagtctgcctaaggaggcagagcagagaggcatgtgatcacccagatcgtctgagagcgggacattttcccggagcggggtggaaggagtgtcaaggtgactgtgagatgacagacacgtaggggagccccacagaggacccccaagacaccctctctgttgccatcagcctgagtcatcctctatctgaaaaacttccaggactgaagttcgaattggaagcacgcgttctccttggtgaagtccgtcctgtcccaggaggctgcgctaggtctctcctctggctccccctcctcgggtcctcgtggctctctgtcgtgtgaagcggggggtcaggagcgcacaaatgtttatactccacgtgagtcacttgcaca

SEQ ID NO: 251064 - DNA, 504 bp, Homo sapiens
aagattgtttttattccttttcagtcatttcagagaggcttcaggatggagttgtgataaacgcatgtgttcagtctacaatgtttaacagggagtgcctcttgattttttcatgtgaattactgaggagtaggtagtagactatcttgatgcccttcctcatgtccctttgactctgagttgacctgcagctgcagtgaacacttcctaaggatgctgatgtcttcccctatcaagcacttgcctcattctgcttctccgaggatttcctccagtacaccaagagcttgcccgacactcacaaggtatcctggaactgctggggactgaaaacccctcaacccatgaagaatgaggatcagtggattaatagcaactgtcccataccttggtgggactattataaggcattctggttggttcctcagaggtcccaaatgggattgaaccaaagttgcccacagtaaaaactcattcaccaacaaaaaaaacaacaacaaaaaa

SEQ ID NO: 251065 - DNA, 245 bp, Homo sapiens
tctgctgcccccatcacgccgttccgtgactgtcacacagaatccgcagacaggaagggagactcgagcgggagtgcggccagcgcctgcctcggccgtcagggaggactcccaggctcactcgaaggaggtgccaccatttcagctttggtagcttttcttcttcttttaaattttctaaagctcattaattgtctttgatgtttcttttgtgatgacaataaaataccctttttaagtcttgt

SEQ ID NO: 251066 - DNA, 622 bp, Homo sapiens
ggttctggttcttctcaatccaagtttctattgcatcctctctctcttccccttcacctcccaaaccactaccacctttaatatattactttcgctttttgtatttatcagtgattcaattttattttactgtgattttggtaaacatccgtagtgttcaactacttggcagatttgtccccctttttgtgataatagaactctaacacttcttggttacatcacatgttttactatctgatgattatgttggtcatcaatccttcttctgcaaggaacacaatataacaacattacaatgcatctttgttttgtttttgctgatttgggtagaacatagcaaaaataaaaatgcgttcattttctgtcattttggtaataaatctgaagccatgcttaacagaatagttttaagtttaaaatgaaataattttataaatattttacccttttaaaacaaggacgtctcagttcttatggcatcaagatgctcaaattaaattcacaaggctcttcaggaccaattatatcggtgtttaaccctcccagtgtcttttttgcatcttaatatcattgatttctttaccaataatgccaaatacagaaactacccctgcttata

SEQ ID NO: 251067 - DNA, 409 bp, Homo sapiens
agcatttaatggactagctggttcactgctgcctttccactcctgccctccatggtctgcagtatgccagtaaacaactaagtcactgaggcaaagtggtcatgcttcctctgaaactagagacctaaaaatccatgactgtcctattaatacggcaaatgtagtctcttgcttgggaaatacattcttggtagttaaagattttgtgatctacatgttactttagtgtttatattactgaaaacagtatgataagtagtaaaatataaatttggttgctagtatttatttgtgatctgtggctccccacttatgaacaactacttacaatataaaaataattacaaaagatagttcttaaagaatgaaaagtggtttcttttcattcatttattcttttcgaaagaat

SEQ ID NO: 251068 - DNA, 313 bp, Homo sapiens
agtgaaatgaaggaaggacacgtttgttaggggaaaactcatacatttcgtaagcagagaaattcatcatatgaagaatcctacagaggtaggttaaattcctacccgtgcttccatttcaaatagtttacacatttgtcacatgtaaatttcacagacaggtatatctgacgaattgtaacacaaatggtatgtaaaaggcaactctaaccattattcaaatatacaggatccaggatcgtgagttattgtagaaattacttaagacctatttaaaattattgaatacataactttaaaaaatgtaattgct

SEQ ID NO: 251069 - DNA, 1639 bp, Homo sapiens
gtctggagggggctgaggtgctgggcaaccagcctgctcccacctgtgccgagcctcctcccgctatgggtacgatcgggtgggtgggagcacctgctggagagggttcaggggcccacccgcctaagggccctacccacctgggcacctttgtccacaggctccttgaacctgtatcatcccccagacccagagaaagaggtgtttccagccccaccagcaggtaccggcctcccctgagcccttgacgaggctgggagtgggtttgagtgtgcaggcccatcttgcccctgccccgtccctaagtgggagcctgaaggcatggcctctgctccccatgcttcacacaggtcccccagatgagccccaaagacaagctctgtgtcatccatcacccagccagggccccaaagcaatatctatgtcgtcccccaaaggggccccccaatggcaaggttcttgtggcatctcccaaacaggcccccaggcttgggctgggcccctcaggcagcagctgctctcagggcacccgcctgccgcccacaggtttccagatggccccatgcgggtgcttcttcgacccccgcatctatcggatcgagtggaccacccccgactgggccagtcagccctgtataagctggcagcaagcagcggggggccagcgggggtcccctccgccccaggcagctacctcctggagcctcagccctacctcaaggccccggggctgcctccatacccccactaccagcaggcacccggggggccccagtttctcttgccctacttcccgcctgagggccccgggccagaggctctgggttttgtgggggacgcagggcccgccgccttcgtggagctgcccctaccgcccctagaggaaggcccggccccgctgccacccccaccccccaaggagaacaagccgccccctgtactcatcacgctgcctgcagagcccacactgcccccagacgcctacagccacctccagggtcacctcggccacttccctgggcccgaacccctggccttccccgtcaaggagctgcagggcagtggggcccgacctggggtgcccctgtacccaccgggcctcagcgagctcaaggtggccgaggtcaaggagggggccctgctgggagcaggcaaggccaaggcccccaagacggccagagctttggcactgcctgacaaggttctgctggaggacgccatgaagctcttcgactgcctgccaggcgcctctgagcctgagggtaccctgtgcgaggtccctgggccggccctgcctgacagcagtggtgggaactcagccgatgacatccgctcgctgtgcctgcccgaggagctgctgtcctttgactacagcgtgcctgagatcctggacaccgtgtccaacgttgactacttcttcaacttcaaggcgctcgacgaggagcagccgccccacccggggccccctgccaccaacaccccggcccccattctgtctggcaagagaaaggcctcgacggccaagaagggaaagccgggaaggaaggccaggcagccggcaggcccagccagcgccactcccccggggcccagggaggacctgggagccaccccgcattaaagcacatttgacctttca

SEQ ID NO: 251070 - DNA, 3134 bp, Homo sapiens
gtctggagggggctgaggtgctgggcaaccagcctgctcccacctgtgccgagcctcctcccgctatgggtacgatcgggtgggtgggagcacctgctggagagggttcaggggcccacccgcctaagggccctacccacctgggcacctttgtccacaggctccttgaacctgtatcatcccccagacccagagaaagaggtgtttccagccccaccagcaggtaccggcctcccctgagcccttgacgaggctgggagtgggtttgagtgtgcaggcccatcttgcccctgccccgtccctaagtgggagcctgaaggcatggcctctgctccccatgcttcacacaggtcccccagatgagccccaaagacaagctctgtgtcatccatcacccagccagggccccaaagcaatatctatgtcgtcccccaaaggggccccccaatggcaaggttcttgtggcatctcccaaacaggcccccaggcttgggctgggcccctcaggcagcagctgctctcagggcacccgcctgccgcccacaggtttccagatggccccatgcgggtgcttcttcgacccccgcatctatcggatcgagtggaccacccccgactgggccagtcagccctgtataagctggcagcaagcagcggggggccagcgggggtcccctccgccccaggcagctacctcctggagcctcagccctacctcaaggccccggggctgcctccatacccccactaccagcaggcacccggggggccccagtttctcttgccctacttcccgcctgagggccccgggccagaggctctgggttttgtgggggacgcagggcccgccgccttcgtggagctgcccctaccgcccctagaggaaggcccggccccgctgccacccccaccccccaaggagaacaagccgccccctgtactcatcacgctgcctgcagagcccacactgcccccagacgcctacagccacctccagggtcacctcggccacttccctgggcccgaacccctggccttccccgtcaaggagctgcagggcagtggggcccgacctggggtgcccctgtacccaccgggcctcagcgagctcaaggtggccgaggtcaaggagggggccctgctgggagcaggcaaggccaaggcccccaagacggccagagctttggcactgcctgacaaggttctgctggaggacgccatgaagctcttcgactgcctgccaggcgcctctgagcctgagggtaccctgtgcgaggtccctgggccggccctgcctgacagcagtggtgggaactcagccgatgacatccgctcgctgtgcctgcccgaggagctgctgtcctttgactacagcgtgcctgagatcctggacaccgtgtccaacgttgactacttcttcaacttcaaggcgctcgacgaggagcagccgccccacccggggccccctgccaccaacaccccggcccccattctgtctggcaagagaaaggcctcgacggccaagaagggaaagccgggaaggaaggccaggcagccggcaggcccagccagcgccactcccccggggcccagggaggacctgggagccaccccgcattaaagcacatttgacctttcaaaaaaaaaaaaaaaaaaaaaaaaaaaaaaaaaaaacaaaaaaaccccgcagaggcctcataatgtgcggcgggggcgggaaacaagcggagaaaaggaaagcgggccaagtgggcaccaacagcggcggtccacgcggcccacacacattatcgtggtgcacaccaaggggggaaaacattcggcgcgggatccccccaatatagaggaagagagcgcgaatatataaaactcgcgagagaaaacgccgaggggtaacccgcggggatatcagaggaaccgcccggaaaaaaaaagacaagaccgacacacgaccacacacacgacgaccgacaaagacaaaaacccaaaaagaagacaagagacaaagaggacacaaaacaacacaaacctcaagaggacaaacaaaacaacagacggagagaaaaagagaaaacaaaacgaacaacaatacacacgaacaagcaacaagacacaccagcgacaccgcacaaagacacacccacagccacagaaaacaaaacagaaacacaaagaagggacccccgcaccacaaaacgaacacaacaccaccacagacaagcaccgaggaagaggagcgggagaggagagagagagggggaggcggcgggagacgcggaggcaaggagaagggacggaggcacagaagcagagagacaacgaagcgaacggcagagcacgacgcgcgagcggaggaggcgcaggaggcgcgcagggaggagagggacagacggcgggcggagggagcagagacggcagagagcacgcaagcaagaaggcgagagggaagagaggagagagagggaggaggaggcagagagacgcgaggagcgagagagggcggacgggcgccgggcgcagggggccggcagagcgcgacggcggagggcgagaggggaggcgcgggcaggcaggcggagcgacagcacaagagcacaaggcagcgcgagcggaagcagagaggcgacgccggacaggaagggagagaaggcgggggacaaaaccagccgggggagaacaggggggaggcaggaaagagcgcacaaggcaggcgcaagggcgagggagagaggcgcagggggggaagcaagggagagggagcgaaggagagaaaggaaggccgcccagcggcaaagaggacggcagacgaagcaacggagcgaaccaacaggcagacacgagcaggacgacgccaagcacgagaggaacagcaggcaggaagagcagcacaaacaacaagaacgaaagagaaggaggagcaaagggaggaggaagcggcaggggaacgcaaccaaagaaccgagaggagcgagacacgggacagaggaagcgaacgcagagcgagaagcgacccagacacaagagcgagccaacagaacaacgacgagcaaagcagacaacggacagacaaccaaagacagcaaggaaggcgagacacaggcaagcagcagagcgaaaagacacacaggacgacg

SEQ ID NO: 251071 - DNA, 363 bp, Homo sapiens
gagcaggttcaggagctgggccaagtttcacacgaagagacttggagtatctggagaaggtttttgaagacgtttaggagggagggtgagttttctgctgagaaactcaatctgccatacagtagcggccccatctgggatctgtcactgctgacagcaccagagggcacagccgtgatcttctgcacagcctgcactccccgaaataccctccttaatcaaaggatgtctgcgcgcctgagctcagctgaccgcgccgggagcaccagggccgttggattccaccccagcccgccccctccccacgcacacagccacggcccctcgcgtcttcgcggcacgttaattaaatgcggaaaacag

SEQ ID NO: 251072 - DNA, 209 bp, Homo sapiens
gtatgcattgtaatttttattgaaagctgtacatcgtatgtagcatagtatagacaaaggcaaatagattttatgcctggaaacgagtctccctttctttcctttttcgtttcttttcctttctcacttgaacctggaaagcagaagttgtagtgagctgagatcgcaccattgcatgacagcctgggtgacagagtgagactgtctca

SEQ ID NO: 251073 - DNA, 469 bp, Homo sapiens
cattgattgctatctattcattctcacaacaactttaaggaaaatgcagccaagaggagatatactcccaggatgaagttgttctttgaagtttccttatctgcctaaagactggacctgccaaaaagaaaacaattactgctggtcccttccctgagttttcaataactgaactcacatgacaggaggaaacactgaagtcagtaaacactcctggatagacttgtcacaaaccactgtaggttctgtgggcccagcagattttgtcccaggcctttgtatgttcttcgagcccattgacttcccctaaaaatcatttactatgcccctaaaatcatccagacttcctcatctcccttttcccctaagaagggtgtataacctgtaccccattgcatagtggggtaatcactctgtgatcttccctcatgcacatcaataaatttatatgcttttttcttttaatctg

SEQ ID NO: 251074 - DNA, 491 bp, Homo sapiens
aatttgacctagttgacatttgtagaacatcccaccccaaaatggtacaatacacatttttaagtccatgtgaagcatttaccaagacagagcaataaatttaaaaggtaaggtgactcattctcatgtgattctaatttaattcattagaaatcaattacattagaaataaataacatgaaaatatgtggaaaataccaaatatatggaaagtaataacacatttctaaataacccattagtcaaagaatgaatcaaaaaggaaatgaagcattttgaacttaatgaaaataaaaacacaactatatcaacatttgtgaaatgtccgtaaagtagttcttaaagagaaatttaaagtgctaaaggaatgcattagaaaagaagaaaagtctcaatgaatcagtttctaccttaagaagataggagtaggaaaaaatgaaatgcattataaacagcagaatgattggttcaaagcataaattaaatagaaa

SEQ ID NO: 251075 - DNA, 457 bp, Homo sapiens
ttgggaggtttctggttttttattaaaaaaaatcttaaaatgttataaatgatcatgtttattatagaaaatttgaagaatacaaaagaagtttgaagaaggaaatggaaataacccataatcctaccacccagaaaaggaaaaattatttttgatggaggagaatgactttaaaatattttaatttaacgtgaaagctgctggtccttgttgttcctagtctagaattaggactttataaactggtctttgcatgtcaaatctcttcttcaaactcatcttttatctcaggggtcagaaaacattgagagggtcaaatagtaaatattgtaggctatgttggctacctgtagtctccatcacatattctttgtctttattatttatgatccttttaaaatgtaaaaaaaaaatttagcttgcaggctgtacaaaaacaggcccacggaccatcatt

SEQ ID NO: 251076 - DNA, 279 bp, Homo sapiens
taaaattttagatgagcactttaattattggtttacttcttctcccaaatctgcaggtaaagccaacgctctggaaattgggccacatttattctgtgagttcatgtgtcccaagagcatatgaactcatctgaggagcaggcctgatattctggagtgaatgttttttgctctttcctgaaacatggccagaattgggtgtgccccgacatctgcaggctcattgtgctccttcttctgggtttcaattggatttcagtcctgagttctttttttttt

SEQ ID NO: 251077 - DNA, 276 bp, Homo sapiens
atatattttatatgttctagagatataatatatagatacataatatatctagatttttatgtattctaaacatatgtttatatattatatatgtagattttaaaaatatatttgaggcatataaaaatatattttatacattccagatttaagtcccttatgagatatataatttgcaaatgttttctcccattctttgggttaccttttcactttctacacagtgttctttgaagcatgcaagtttcaaattttaataaagttcagtttattttt

SEQ ID NO: 251078 - DNA, 367 bp, Homo sapiens
cctcgagaccgggagattattctggattgtctggtggacccactgtaatcacaaggttcatataagggaaatagggaagcaggagagtcggagaaggagatgggatgatggaggcagaggttggagtgatgcaattgctagctttgaaggtagaggaagagaccttaagccaaggaatgtgggtggcttctagaagctaaaaaaaggcaaacaaacaaacaaacaacaaccctgcaacagattcttccctagaccctccagaaggaacactgccttgctaacaccttgattttagcccagtaaaattcattttgaacttctaacctgcagaaccataagataataaatgtttgtcattttaaactac

SEQ ID NO: 251079 - DNA, 484 bp, Homo sapiens
cactgctgtgcgattttctctcaaacaatggccattatctgaaataacagttcaatgtcacagataacaggccaccgaaacaaattagtcaccacctcttgtcattttctctcccccaatccctcccttttgctactatttttgtttttaaatcaatattttgggaaaatatagttctactggatttacacgtttatttgcacttggagaaaacaaaaagtgggtggcacttgtgttatcccgtttgcagctaaagtttaaccgtcagcacactttccagcccctcttgccccacctctcccccgcaagtgtccctagactcgcttactttgcttaactttccattgttgagctggggagttggattttgtccatttgtttttatgaatggagttttgtgataaaaacgcgtttacttccatttagccagtgggatttactaaatcttacaaagttggccatgaataaatctgtagaccctttt

SEQ ID NO: 251080 - DNA, 365 bp, Homo sapiens
cagggtggtgaagtagcgttgctggctgtcctaagggccggtcttgccccagctttgtcaagggcttctctcttgaagcttcgtgtggattcatggctttcaagaacgtgttgtattttaggggactgctaaatcacttcccagaccaactagttacttctcacggtctaagagtggctttgaatttgctgtttgtatccactctcctccctcaccgtgcagagaatttatctttttttcaatactgctttaaagaatgtttacatagcactttctggagatttcaaggctgtcagtttgttacattttttaaaagttttattgaggtataattgctatacaataaaaatggcacatgtttaaaa

SEQ ID NO: 251081 - DNA, 453 bp, Homo sapiens
agtgatgagtatagcttaataccctcattggggaagaggagcaacgcccttttttggggaggggtatgtgttctgtggtgatggttttggggggcaattgtgggaaacctcagctgctccgctgaacccgtgtgcccacccagtgtgtctgtggctgtgaaatcccatgtcctcctgggtgctcacttggtgccttaaacttgagctccatggcccctccgggtggctgcttagctgagcataggtccagctcagaggtagaattcttaatgttcttgcctctgtcccagagtcccctcaatgtccacacctagaaatacagtttctcatcactggggtaacttgagaactcggtgaagaggttgccagttggggcaaagagaggcacgaaagcctggctgcattcagcttgtagcctgcggtggcctcgagcctcgctgggaagcagctgca

SEQ ID NO: 251082 - DNA, 361 bp, Homo sapiens
gaaaaatattttgcattacgtatagcacatgtcaatatttacaaaacttacacaaacataactttgtggacctataattttctaaaagtttggaaagtaggcgacacttaggattggaaaaggcatagctttgtgaataatttttttgctacctggaagctgcaatatattttgagctagaagcttctataagatatttcccttttctgaatgcaattgattatgctatactgcataatactacatttacctatatataatccagttaaagctgtattacatatttatagaagtcagactttggtctgaaatgccattatttataaacacaaatcagtgagtaattagtctactgtgtaaa

SEQ ID NO: 251083 - DNA, 153 bp, Homo sapiens
ccagaaatgtaaaatgatttaacctaatagaaacaaataacgacagagaagaatcagaggaatgatacaggagaagggacgttgaaatggggcttatttattaaaatgaaaatttttattgttctccttaaatctctgtggaagccaccctta

SEQ ID NO: 251084 - DNA, 387 bp, Homo sapiens
cacacacttagttgccagtatttgtgttcacagattttgtgagtcaaggattcagaaagggcacagcaggaacagctttgtaactccatgatgtctggggtttcagttgggaaaactcaaggttggaatcaacagttggtcagtggggtcatttgaagcggccacactatgatagccacaagtggctactgagcagttgaagtgaggccagtctgaatggagactagtgtgttgattgaaaataggactgtaagtataaaatgtgcatcagatttcgaagactttgtataaaaaaagaaactaaactatcttaatggtttttatattgattatattttagatagattaaactcaatgtattaaaattgaattttaatgtgactacta

SEQ ID NO: 251085 - DNA, 403 bp, Homo sapiens
tctttcatcacaccaaattacggataaatacaggcagtgcattgaagttgccaactttattcactgcattatctcaccgttatttgctttattaatgaatatggcactagacaaaatcaacaatgaaactaagggcttacccaactttaaattcttcctctttatcctctcttttttcctgtttaaattttttctccaataagtaaatctgcctgcagctctagaatgagtaaatctgtctgcagctagacaccaagaccattttcattatggttgaaaaagacaattgtaaaatgtagcttcatcataatctcacactgaagattttttgcatcatttttgctattatcattctaagaattacaaatcaaaagaatctacaccttaatgtgtcattatatag

SEQ ID NO: 251086 - DNA, 436 bp, Homo sapiens
gaccagttgatatacccacagctgccatgtaaggatgtgtgtggacttcactagggaagaacggtgttatgaaagaaggggcagaaaaactcacctgttggtctccatgtagacatttattgtcctgaattcctggaggttcagtgaaaagcagaagattgtcttttacacatgttgagttatgcccccatatatgtggttgtggtaaagaaagaggatgtgttgatgagaggtcctgaaatgcattttcctaatactcagcaggggcttctcaagaaggatcttccctaagaaagaagctcagagaacaaaaatggaaaaggattagatatggcactttcactggaaaaagtcatgttattcattgattgttttgtcatctccctccttaagtgttgtttttaggatgtggtaatctctgaccctgcctaacaca

SEQ ID NO: 251087 - DNA, 386 bp, Homo sapiens
cctcgtttttctcttttatattaatttaaccaatttctgtctttgcgtgtgcttaacaataataaactacatttttaggcatgtgctataatttaggctgtgttcggtttctccaccctcctgcctttgactctctattcataaatgattgttttagtaagttttgctttaaattgtgttattttagaaagaagctattttgcacatttgaggggtagcattgccttcgtccaatttcctgcttctccacaaggaccttgttcagttccataaagagattgtgcagtaggaaaaaagaccttttgtatcagggctttagaagtaattgacataaggaaaatctgcctaaaagaacataatgagcatgtctttaaataaacaaaccc

SEQ ID NO: 251088 - DNA, 544 bp, Homo sapiens
cctatgaatagctcttttcatgtttatgatatgttaatctttaaggtgttaataactctggctagcgttaaatttgacttttaggaaaaaacaccagagacttaaaggatactgatcattttcccttcctttttggaaggtagaaaattaatttaagcgccattttttaagcatgtttccatttgaccgcaaatagaactgactcctttttatcactcttttttatagtaggacaagaaactagatggtgtggaatgaagggaaagaaaggagtaataaatatggacttgtaatttaatgggtgatgatggccccttgtctggctggacagttgtcggacatcgggttaaagaaagaactctgaatttgagaagtgttcagtgaagaagggaagcaccttttaggagagagaaaaagaagggatcccttggaaaatgagataattctaatttgaaggaagaggaaaaattagccagtgacataagtatttaccatttaagtcaaataatttccttctctaccatctcgtttctggctttatgga

SEQ ID NO: 251089 - DNA, 496 bp, Homo sapiens
tcatccacctcctgccaaaatgaccaaagcttggccggcctcctggaggccgaaagcaggtggaagtgccaccaggtgcatgaggcagcagctcagagcagtgtgggattgtcctgggagcatgcgtgctgagttactgctttggacactgataccataatagcgaaactagattttggattacattttaataaaatagtgtgcactgcccagaaggcagatgtgctctgctgtattttccaaaagtaatgatgggaaaaataaagtgctgaaaattccatgggtagctgcaattaaagtcttagtgatagacaagtgattgtgtgtaatctgagacatctgggagctgatcaggaacatcagagccagaggagtggcgggtgcagcagctggcgcttgtcatcccagcactttgggaggttgtggcaggggggaatcacctgaggtcaggagtttgagaccagcctggccaacacggccaaatcccatctctact

SEQ ID NO: 251090 - DNA, 335 bp, Homo sapiens
gagagggagtctcagtctgttgcccaggctggagtgcaatggtgtgatcttggctcactgcaacctctgcctcccgggttcaagcaattcttctgcgttagcctccccagtaggtgggactacaggtgtatgccaccacacctggctgttttgtatttttagtacagatggggtttcaccatattggccaggctggtctcgaactcctgacctcattatctacctgcctcagcctcccaaagtgctaggattacaggtgtgagccaccacgtcctgcaacattaaatattttattaatttcatctttttcaagaaatccttcctggagtcttctt

SEQ ID NO: 251091 - DNA, 421 bp, Homo sapiens
attctgttgtgaaaataaataagtaaatacaaagatacatgttctgcctcacagaacttttgcaaactgcgaggatgtatcttacatttaaattttggtaattttttttctgtgcatctctttcaagtaaaatcttgtttttgttccagcatggtcctagttggaaagatatagagaaaaaaatgagaattttttttttgcaaaagaaaattgaaattctgtctatctcttaaactgctcctaccatgttttaagagggtctgttctgatcagcacaccaagtatttctaatgaattagggaagaaattaccattatgtctggtcatttatctgaagcttgctgccgaggatgcaagatagacatgtaatccacccttagccatattctccagctcccttcagtccggattgtgagtagag

SEQ ID NO: 251092 - DNA, 249 bp, Homo sapiens
ggttggggtagggacccagggatagatctctagaagggtctggattccctaggggcctgcgatgaaacttgcactctgtggaatagttccagggttgaggaggtaagcagaggccagaccgccctggaagtttgcgtaagggctgttctcctgggggtgctgagctgggagaaggcttgcctggggaggtggcggggccagagctagccagagctgtcctgcaggtccctgccatgctgagggtgatgc

SEQ ID NO: 251093 - DNA, 337 bp, Homo sapiens
tattcattctacactgacctagcatcaatgccagttctgcctagccaggtctgtgttaccagagagccaagtagagcagaggatcaaagaaggtaggtctggaactaaaaaatcgatcaggcaataacaaaaattgaatttccttccagctcaaaaactcagtgattctgtgattcttaagcatctatgaagtaccccatataagagaaacattttaacactgattttaggactttgggtactagcaagattccactgttattctgttctttagatagctaaagatatttagacagatgaacttttaaaacttgagtttacctagtttatcagtttc

SEQ ID NO: 251094 - DNA, 592 bp, Homo sapiens
ccaaattctgtcccatccacgtgtgtaacttttaagctccagcacccaaccttgaaaccatcctgttcctttcccgccttctcaacttcctttcctctcttttaaccccaacatacacaaaagagaagattttaataggttcctcctcacccataattgatttcaaatgttccctgaagttgcccagctgagtaaccacctgcagctccaagttgcaggagactgagtcactaagtccatggcagaattggagcctgagcccaggtttcttcatccgacaaatatttattgagtgccttccatgcaaagcacggcaaggccctgtggggagcacaaagatgtctaagaaactgtccctgacatgaagacaagttttcctcctctgaggatccgagcattagagtatatgcttgtgtagaacttgggaggcaggccaacctggcaacagattccatctctgacgcttatcagggctgtggtcttcagcgatccattgagcttttctatgccttcatttcctcaaatggaaaaaggagaaaaatatatgtatacaaaatatcattccatttaaataaaaatgaaaaaagctcca

SEQ ID NO: 251095 - DNA, 614 bp, Homo sapiens
ggggagctgctgctgactcattgttggaggtgagccacaataggaggcttagaaccccactctgcagcctctccaatctaataaggagatggtagtgtggtcggtgggggcatccacacgcagtcaaagggcacagggagtgatgtgtcccctggcctcctctttcagctgtagattctccctctgagttattggaacagcttctctatggccccatcagcctggagtgtggtgacagctcccagatgacgctaacaccagggacctgcgccatccctcatggttccccttggcccagcccacacctttgtaaacagctttttcttaatgatctttcagccacttcgaggtccctgccagcacctgactgccacattccccaaagggaccagactcctcggcacagtagctgaggtttctataggcacagagaaaacactgtcccaactgttggaatggagttgggagtggaaaaaagaatgttttttctcagtgcttagacttaccaattgcttcgttttatcacatgaaggctgtgtggcactttgaagtagaattagtaatttacataattacaaattatgtgttttttttgagatggagtctcactctct

SEQ ID NO: 251096 - DNA, 891 bp, Homo sapiens
tcaacttttattttaaattcagggaatacatgtgcaggtctcttaatggttatattgcatgatgctgaggtatggggtacaattgatcttgtcacccaggtagtgagcataattcccaataggtagtttttccttgcctctcactcttttgcagcccccagtgtctattgttcccatctttgtgtccatgcgtacccaatgcttagctcccacttttaagtgagaacatatatttacttttgttcctgtattaattcgcttaggataatggcctccagctttatccatgttgctgcaaagggcatacttttgggttttctttatggctgcatagtattccagggtgtatatgtaccacattttctttatccagtccaccgctgaagggcacctgacttgattccatgtctttgctattgtgtatagtgctgcgatgaacttatgagtgaatgcatcaaaaagaccaagttgaacttatgagcgaatgcatcaaaaagaccaagacttgatcccttgcccacaaagatacaaggctgaggacaaagccatgaaggaaaagcctcactgaagaagaggaacctaagagaagcaggttctgctctgatgaactcccataaaggcattcccataaaggtgtgggcctgagtgataatctagatatggtacagttgacatcaggtatatggcggcagccagaaattcaactttgtccatcagctctctgcacaacaggaaagatggtgaccttccaggcttatctgaggtccaagagtaacatcacaaacacagtaactacacccagccaaagaaaagcatacctgaatccaagagagtatttacactggcttcagggatgaggaaataaaggagtaagtgattaggatcattgtt

SEQ ID NO: 251097 - DNA, 332 bp, Homo sapiens
attaaacagatttttcctaagtgttaagagaagccattgaagaacctcagtgagaaagtggtataaagctcctgttgattgaagaacttgagtgagaaagtggtaataactcggcaagctgctcatatgtgtctggcctctccacttgctcttagctcctgagggcaaagcctgggcctcatcctcttgtggatccaggagagcagtcgctgaagagaaagaggaagaaaaggagtggctagaaaagaaagtttatttccactgcaggaagcactgcctcccatctgagaaatgtcccaagcaggaatcaggtaataagactctgaaaaatc

SEQ ID NO: 251098 - DNA, 442 bp, Homo sapiens
tctgtgagagctgctgtcagcttccagatggtgccttattgctgcatcctttaaggtgttgaaccctgtgtcttcacatggccaaaagaagagaagggtaaaaagagccttgctagttccctctagcccttttataaggtcataggaaatgaaacagactgctgttttcatgagaagcatttacagagggaaataaggacactcaccaaatagggctaatttgaagaaggacacagctgacttagtaggaagaaggcagaagaattatctcctggtaatcaagactctgaaaataagacttaagataaaagactggatacatgcaagaacagagttcttaaagatcaccagctgaagattgtgatttttcattcttctatgccctaagacagccatattttaccatttgaaacataaataaaaatgacttccaggcttaaaa

SEQ ID NO: 251099 - DNA, 337 bp, Homo sapiens
cggcctgttggccccagactgtgtggcaggcaaaaggtgaacgtcaaagcctgtccccggcttcttcacatctcgcgcctccgcgggcgtcgggccgcccccgtgagcctccccggatggactgggttttagggacccccgcagccggactgcaaagcttcccaccaacccttcccgcgaacctcccagcccgggccgcaagcccagctccgggcgcgacgacgtggggccggaggtagaaggagtctcagcgcggcgggggccggggggcggggaagcccccccacccacgagaaaggtcttacatcagccgccccacgtgcaatcggagagaggg

SEQ ID NO: 251100 - DNA, 574 bp, Homo sapiens
gccgaggcaggtggattgcttgagctcaggagtttgagatcagcctgggcaacatggtaaaagcccatctctacaaaaaatacaaaaactagccaggcttggtggcacacacctgtagtcccggctactcgggctgaggtgggaggatcccttgagcccaggatgcagaggttgcagtgacccaggattgccacagagtgagaccctgtctcaaaacaaacaaacaatgacaaaacaattaattataaagcaggtactcacggctgggcttggtggctcaagcctggccaggacacctgtccaggtgtccaccatatggggaacttcccatactacagtaggacatcatggggtcaccttgtaggggacatgctgtaaaactggaagattttcacgttgacccttccccttgtgggtttcttcctaataattcattgcctggaatagtttaggttcacccttccctgttagtggaagaatgtacagtggcttcatcactgcacttcagcctcaacctcctgggctcaagcagttgtcccacatcagcaccgccaagtagctgagaccacaggca

SEQ ID NO: 251101 - DNA, 385 bp, Homo sapiens
cgggattacctagtgccttcacaatcggtcagagctggattcagattcctgctcgccaacgcccagcttgggcaaggctcctgttctttctgtgtctcggtttccatgtttgtaaaatggtgataataatagtatctacctcagagacgtgtactgtataatagtgcgtataaggcacgtaatgtgaagcctggcccctgaagatattagctattgttatggagataaataatacgcgtaatagaatgagaaaaattataaattatataaattcgctaattgtagtgccctttctgccatcaacttctttcctagaataaattaaagataaaatagatataccaatttttaccaatgaaataatttgttatttgggaattgcctc

SEQ ID NO: 251102 - DNA, 224 bp, Homo sapiens
agggatgtgtagcaatcaaagggaaatgttatccttcctaggagataggatttatgggattcctggatcttttttgtgtctgattgttaaggtcttgacagcctttcaattgaggaatacggtcgtgtctgttaaactaattgtagctgttcactccactatataattttacaacatttcagcttcaaatagaatggcttcaataaacataaagcagactgaca

SEQ ID NO: 251103 - DNA, 282 bp, Homo sapiens
cttttttgtagtaagactatatagatttaataagcctcatgagacaaaatagaagcagctcacttttgaaaacacattctttctgggatcagtataccacagtatctttttagagtagcagcgaatatgataaatcataatgcattccagacatgaacagtttactctcatattttccataaaaagctccacaaaagagtttttattttttttcccaaatgtaccaaggtaatgaacattccctgtaaaatactgaggctttgcaaagaaatgtcaaaacaa

SEQ ID NO: 251104 - DNA, 378 bp, Homo sapiens
atcattcacccggggcctccctattccaggagacatttggtgaatatatctcctgtcctgtctcattcagtcattgacagactgatgattagggtctcaacttttccagttaatcaaggcagtgtgggtcaataaaaatggagcaaaccgatatacatttctacacatctcaggggagaatagaatttcaccctaacaaggccagaagattgtggtacctgtcttctctccatctccctatacccgctttccctgcatttttctcccatttatgtactgttcatctcccttccccccgaaagaatgttttgctcactgttgtatcacaaatgcctgggatacacagcaagtgctcaataaaaattgtttgggccagga

SEQ ID NO: 251105 - DNA, 414 bp, Homo sapiens
tgattttaaaagatttgtccactatgaagttagtagtgtgggatttagttttccccttgagaaatctgttacttacaataaagttcatctttttttgttaataaagtttatctttaaagctgattaaaatttttctcacaggagatttgaataattcacattgtaatactcatttaacctcgtatatatttattaaaattatctccacttaatagtaggaaaatataaagatttataaaattatgattttgtttgtgaaacattttgaaactcagtaattagagtcacctgatttatggcctaatttttttactctgtgatatcccacattttgatttaaaattggtggaggaatgagcagaaagtgattttgtaaaacaagagaggggaaatattaaggataataaggataat

SEQ ID NO: 251106 - DNA, 431 bp, Homo sapiens
agccaagagacctgtataaagcttgtagttagagtcgtttcgatactggcctgaattaagagcagtctccatggggttgctgtctgtggggtacgtgtttaatgaaaatccttgtttttaaataaatgtatcctgctttagaacacccaagatataaaatctagacttcatagacaaaaatagctaacatttgttgtgtatcacagtgtgccaggtgggctctaagagatgtttgatttctttaatccttccagctgccctgtgggctgggggccatccctaccctcattttacagacgaagaaactgaggctgggagaggtcaattaacttgctcaaatttggtataggcaaaactaggaattggcagacggtggttccagtgcctgccttttaattggtacttgaattatacgagtgttttcttccatc

SEQ ID NO: 251107 - DNA, 326 bp, Homo sapiens
cttccagctgtgcctctgctgccagccaagtcttcatttggggccaaaggggaaacttttttttggagaaggcgtcttgctttgatcacaccactgcactccattctgggcaacatagcaaaatcctgtctcaaaaatatttatcagtaggaaatgcaggagggcacagtggctcatgcctgtaatgccaacgctctgggaggccaaggcaggaggatcactggaggccaggattcaaggccacagcgagcaatgactatgcctctgtactctagccggagtggcagagcaaggccctgactctagaaaataaaaattaaaatggt

SEQ ID NO: 251108 - DNA, 337 bp, Homo sapiens
gaaaaaagaaaaaagaaacagcaaatatttctttctcacattcctggaggctgaaaagtccaggatccaggtgcggcatggttgggttctggggaggtcctgcttctgggctgcagaccgccgccttctcactgtgtccgtggtggaaagagtgggagagggtgagagctttctctggggactctttgatgagggcactaaacccattcatgagggctccactcaccttccatcactttgggcgttaggatttcaacatatgaattttggaggcggacacgttcagaccatagcacttccctttcccaattatgacaataaaatatcttcaaacatt

SEQ ID NO: 251109 - DNA, 383 bp, Homo sapiens
gtctgtccaacttagtattttgatctcacccctcgtcatggctttcccgtccctatacaagccagtctaatgacacagggagctgaaatggagaggggtatggtcagcaatttgattactcctgttccctcaactgagagtaggaggttgatatggccttcttctagcacaactcctcctcactcttcttctaatttcttttttctcttatatgggtacagtggtgtgctaaagccagctcctaccaattcattagagctgcttgttgaattttcagcaattttgtgagatgtttattaaacactcaccattaaaaattaaattatgtaaacttaaaattcaatggcataccaaaaataaagataatactcaaaactcaaaaa

SEQ ID NO: 251110 - DNA, 320 bp, Homo sapiens
ctcaaaaaagaaaaaaaaaaaggaaaagcccccttttcctttcccagcacgttgtcatctcagtatagacagcagaagtcaaaaacagcccagtcagggtgaggccaccagggatttgagagtagccaatgtgcgtaaacctagccgggacagagtagcaaagtggctggccaggccgcgaaccaggacggtgccagctcaggttcccacactcaacacggaactcaggactttgcttgtgacgggcttagctgaatggcttcttgatcctttctcatgctgcaggagcagaaagagccaactatccgacacaccatggc

SEQ ID NO: 251111 - DNA, 496 bp, Homo sapiens
ctacacagcagaattagattctctggtttaccagactcttttgcaatactctggtgccaggcagcaaatatccggcaaatatagactgcattgatcctcctgaccttagtgacattattacttccatgttacagatggggaagctgaggcatggagtggcaaagtgacttccctcagggcactggccggtatctgcacccagctttggggctgttggccatgctcctgtctaaccgcccctccccaaatccatccctgttttctaaggtgggagaaaagggaaatgcaggccaggcaccctcctaggctgggcggcagggttcctgccatggtacagctctgtgcacagccgcccttccacccccggtcagtctgagcccgaggcaccttctgggctgggccaaccacttccacaccaagccagtgtttagtttatacttgaattttggtttttacctttttaaaaaaaaataaattcttgatataaatttatgga

SEQ ID NO: 251112 - DNA, 417 bp, Homo sapiens
cccccccttgccagcctgaacactgcctacacatattttgattagttcagctttaaattactagtaacttttaaaaacagacttttttagcagtaggcagcaataattctttgattattccagtgttattcagaatttctcagcatgttttcggaaggaaaaataccatgttttaattatttagttaattctttatatattttttatgttcaggagtacacttgagtccttagagttgactcaaagacttgctggtaaaggaagctgacacagatttacgaaaccttccttgacgaccctttaaaattttttaataggtagataaccatcctagaaatttgctgctttatggagtaagttggagaattgttgatattattgtgagtttgtgtgtgtgtgtgtttaaaaacaaaaaga

SEQ ID NO: 251113 - DNA, 397 bp, Homo sapiens
aatgaccaggggcaagaaactggaaagacaccatgagatccaatcccaaaaccagagggcagagttctggtgccaaaattggccttgaggccttgccctgctacaggcctgtcatcaccaagccagcttggacaggtgcttggctggacagccagcagtcagagtcatttcagctgggatggaaataaatctgagggtagattgtggccagacaccggccaagcttcttatctagtcaatctgagtgttctgtaagcgtgtgaaaaacattctcagagattaaaatggactttttaaataagtggctctaggaaaacaggcaggcatttgaaaaaaattagagctcacaccatacacaaaaataaactccaaataagtcagagatctaaatgtaaaa

SEQ ID NO: 251114 - DNA, 275 bp, Homo sapiens
ctttatcttcaaagttagaataaaagcttgtatgacttggagtgggaaaaaactttatcagcaagatcattaataacttgggactcagcttttcaagttacaattagctgctcaacagctgtgaccttcaagagctactcattattgttggtcctgattgttcactcccactgtagagctcttttcagaaatagtttctctgacatcattgaccccaggggtcagagtgagaaatgagtcttcaagtactcatttgtaagtcttgtttctgcagg

SEQ ID NO: 251115 - DNA, 461 bp, Homo sapiens
cactgcccagcttatgaggacaaatggctctttttatattccagcaaccacggaactctctggagtgcccagggctgttttaggacatcctaaactgctactttcatgccaagtttggaggactgtcttctgaaatatcttttataaaaacaaatttaatgcaaaagcacgtaagtctacatgaaaccctcccagcacgggttttccagccaaatggtaggggcatacatagaaaaatgaaacatttgtggttgtgttttcaaggcagaaaagatgctgaagggaaaagtctatgttcgaaacataatcccagaataaaaagctccaagaaatgcagttttgaggaagtattatctaaacaaagagatgtattaatataattgatgtgcaatatttattcagtgttaatcttttcattaaaatgcatcctgagttttcataaattctggcagatttaatta

SEQ ID NO: 251116 - DNA, 731 bp, Homo sapiens
gaatggttttcacgttaacacatatatgtctgtcttttttttggagctccttgctgtagtacctttttaaaaaagagttgtataatattccattatatggaactgccctgatttacttaaccattcccttatttatttacatttttcactattacaaataagcctggattgaacattcttgggcacttatatttctgaacttgagcaagtgtttttattggatagagccctaaaaaagtgaaactgattggtcaaagattaggtacatataaaattttgctagctgctgccaaattgtcctccagaaaggttgaaccaatttatgaaacttgacatttcaagaaattgtatgtgtttcccatctacctaataaagaaacggtccacaccattaatatagttctgaatgcactgaaatataattgtatatgtctttcccactagattggtacttccttggggataggaatcatgaatttctaaactttagcatcccattgtttgcttaaataaaccttgaaatacaaaaatgaaaagaaagtactgtctttgtccataagtggctcacagcccagtaaaggaatccacagtcttatctatattcatgctctttactacaatgactagaatatggtatgtaccctgtaaatcattattgtataactaaaagcgtttctttttatttgtctaaaaatgaactcactttctattttaggcattgcctgttggaag

SEQ ID NO: 251117 - DNA, 769 bp, Homo sapiens
tccttctgccacgcagggaagcatcctgtagaataataccgacattaaaactttaatgagccgggctcgccagcttacccttcctgtgcagagatgtgtctaggggtggacgctgagatgttctgcttgaggtacatcagagaggggatgtggggcatggatggacatctctcgtagaaagtcctcacctttgccagccctctgctgttgtcaaagaatgtattacttttcaggaatgagccctatgtatgtataagcgtgagcaattcttttcagctattgactttttatccctagacgagttgttagctgggaagaaaaataccttctgatgcaaattagtggtggtgtttcttctcagtgtaactggtgtctacaggactacctgagacactgaattaaatgtgcggattgaaaagaaattcctgtgattttttttcatattgtatgctgatacagaagttgaaaccaatttagcttgtcatgagatattctcgttacagcctatcttttttcctgttgtaaaagtaatacaagtaaattgttaataaagatagaatcattttagttactggtttaggtataaaaggaaagtgtaaccatgtctagcaacattagtggaattatttctgattttgcacccaattctgattttcccatgattcgaatggcacatacattctagcacacggttttcaccaggtcatcagacggtagtaccaatcaactggtcagccatagccggtaacttcacagacgtgactatgga

SEQ ID NO: 251118 - DNA, 397 bp, Homo sapiens
ctggtgtctacaggactacctgagacactgaattaaatgtgcggattgaaaagaaattcctgtgattttttttcatattgtatgctgatacagaagttgaaaccaatttagcttgtcatgagatattctcgttacagcctatcttttttcctgttgtaaaagtaatacaagtaaattgttaataaagatagaatcattttagttactggtttaggtataaaaggaaagtgtaaccatgtctagcaacattagtggaattatttctgattttgcacccaattctgattttcccatgattcgaatggcacatacattctagcacacattttgcaaaggaatattaggattcagtcatatttcttgctttgtaggtaacttagagcgtggcgtacacatt

SEQ ID NO: 251119 - DNA, 263 bp, Homo sapiens
cctgttggcaacgtcaggacttatcaaagacacacaacttcaatgagaacctttctttggaattaattaattaatgatatggagccttgatctgtcactcaggctggagtgcagtggcactatttcagctcactaggaatgcatctttctcttctctttctccacctcccaggagaatcacttgaacccaggaggcggccgtgtcagtgagcctagatcacaccactgcactccagcctggaagacagaggaagactccatct

SEQ ID NO: 251120 - DNA, 257 bp, Homo sapiens
cctgttggcaacgtcaggacttatcaaagacacacaacttcaatgagaacctttctttggaattaattaattaatgatatggagccttgatctgtcactcaggctggagtgcagtggcactatttcagctcactaggaatgcatctttctcttctctttctccacctcccaggtttaagcacttctcctgcctcagcctcccgagtagctgggactgcaggcacaagccaccatgctgagctaatttttgtattttt

SEQ ID NO: 251121 - DNA, 327 bp, Homo sapiens
gattatatgctgttatggtagaattgtaactgaactagaatgataatcacccagggtggatcagctagctatgtgactgatgggatttggggtctcttattttaaggagcggatttaggtccctaaaagtccaaaaagatagactgtgtagacatggtgaactgactttcaacatccattccaaacacttcctcatactgcagaggctgcaaagataaaaactatttcccagactcccatgcagctaacattccgcatacaagttggagtctaccccatcaatggatgaaaaaataaagaaaatgtatttataaatgatggaatact

SEQ ID NO: 251122 - DNA, 234 bp, Homo sapiens
tgtataaaagtcttaaggcagatgttcacttctcttggttaactccctagaagtggaacagctggatcatatggcacatatatgtttaacttgtgtaggaagggagaaaaaggagggattacaggcacgaggaaacgtttcagggtgacggatacgttcaatattgtaatactggcaatggtttcatgggtgtaaaaatgtcaaaatttatcaaactgtacacttcccttttcc

SEQ ID NO: 251123 - DNA, 359 bp, Homo sapiens
gattataccagctgaaatcctgccagtttttactgaagggacaaagatgggacaaagtgaagaaagactgttggacttcttggacttgacaggacaatagggctttttggctgcaaacattcactattcttccaagagggaagttatcagggctactgccacagtttcaacaggtcagacaacctctgttcagagccttgagggcaggactgtcctggagtgatgtaagggtggggtttcctatagccttgggattcggacactggcctacagttatggaggtggtgctgccacacttgatcttggactttctctcctccagaattagaaaataaatttatgtttaagtcattcagtct

SEQ ID NO: 251124 - DNA, 416 bp, Homo sapiens
cactcacacatactcagggaaagatctcttcctaagtgacactttaatgaatctcttcataaatataataactcctaaagtttctagagcacacttttcattaatgtcactaattatgtaatgaaatgccatctaacgtttagaattttgtgacatttcatgtaaagaaatttacaaatctgaaaaatttttaccaaactatgagtctcaatttggattcctaaaaagatggtcaacattcttataaaaggtccctggacctcgtgggatgggatccctgatcaactagagacgctgcagagaggaccagcctggctccaccctgttaaaatccctatgtaacatttagagcgtgagctgctcagagcaaggataacaacttgccatttctgtttttaaaatgttgtcgtagtaaa

SEQ ID NO: 251125 - DNA, 445 bp, Homo sapiens
aagttatttgtagtatattaattcagcagatatttattgaccatgtagtaaatgccaagcactgtgcttcagaactgggtatttacagcttatagattccaattaattttttatgggaaaaataactgaaaagttttttgggtttttcttcagccatgagaaatgttctattttatttcttctttgggactatctgaagtgaaaataaaaaacaaacaaaaaacacctaaagggctgttaatattctagaatttttctagttatcttgctacttttgcaaagaatgatcttttgtcaaatcagaatataaagtttgtggtttaagtttcagggtttttttttttcattgtcaatattcaatataagaattttctgtttttaaagggggaaataccaaactgtgtaccactaagaaaatgatgaaatgaaaaaattgttttaacct

SEQ ID NO: 251126 - DNA, 353 bp, Homo sapiens
aaaagcatatcaatcttaaaatgaacagaaaaactgggttcactgcatctgaattaaatgtccgtaagtccaaaaaaatttcaagagagatgtccccttataacagagcccatctaatcctgtaggttctaactgtctgcaaagcagctgaagcagtgatttgcatcttttttttttaaaaacgtatcagagtgtgcatgcacttgtttgcaaggaagccatgcccacggctccccaccactgcccttgagaactgggaagcagtcattcctttgctggttttctcaggaggcctgttgtgttgtggtatggcttccttgcaaacaagtacatgcccactctgatacgttttt

SEQ ID NO: 251127 - DNA, 376 bp, Homo sapiens
aggcaaagagcaggcatagaatagggggcctggaaatctaccagatctaagtcacagaacagtcagtgtaaatacccagagacattccttgagacacagaggggcacagacacagcaagagaactgggcaggaggcaaagtccacatcatgattagctgtaatgcttcctcaggaagacaagaactcctcacagcagaaacacagggcagagaaatttttctgcccaacagtttgaacggtcaccctgcttcaacatgacaaaacaagccaacgaaaatattttactcaggacaagttttcaaaaagcataaatgcattttttaatggtttagacttttatttgaatacaaaatgaagtctcttactggtgaataa

SEQ ID NO: 251128 - DNA, 495 bp, Homo sapiens
gaccttaatcaccataggtttcattattaaatcagatgaatggaggaggttaggtaaaagtgaccatccttcttcagtcttactcaccactcataaagagaccatggtgggccagaggatggggtgcaaaatactggacaagagctgcattgtccattatggtagtcacattttagttgctgagtagctccatgttgctagtggcaatcctactggacagcacagatatagaacattcctgttatcactaatagttctgttgggtaacactattccagagagtttgggttcagaattagagtatataaaaaagcagttaaaagtatgaatagctttggaagttggccatggcagcagccttcttctctgttgttgcttttgttggttcattggtttttgagagagtcttcctctggttggagcacagtgggttgatcacagcgtcttccgcccgtacctccatctcaagcaagggagcaaacgaacaaaaaaaaa

SEQ ID NO: 251129 - DNA, 800 bp, Homo sapiens
cgcaataaacatacatgtgcatgtgtctttatagtagaatgatttatgatcctttgggtatatacccagtaatgggattgctgagtcaaatggtatttctagttctagatccttaaggaatagccacactatctttcacaatgggtgaactaatttacattcccgccaacagtataaaagtgttcctatttccccacatcctctctagcatctgttgtttcctaactttttaatgttcagatttttctttcaaggagagtagaccaacgtgtgcactgccagctgtgagaatccctccctggcatggagggttggactggcatggacaagagaagcaagccaactggacttgttcccccaggggtgtgtcgctgggacccagcaaatccacaattccagtcttccctgctgtatggcggatatggatggaaagcagcaaggccttgcctgccaagtgggagatggcgagggaggcacgtggcaggaagcagggatgaatcacacctctccaccgaggtggagcactcctttctcatggccatacaataccttaattttgctcttcatgttggagcaaaaataactctgcccttggatttcataaaatagacttggatgtttctaatattcctgccatcccccgtttttattttgtttgcctaaattagctccagtgaatttctgttcaatacaacccaatcacccccaaataagacagaaataaaacaaaatgggatggagggaatatatgaaatgttaataatttgaaaataaatagatttgaaacatcagattgtagc

SEQ ID NO: 251130 - DNA, 509 bp, Homo sapiens
cagttaataaaagagagagaatggaaggtggaaagaagggagaagccaaggtgtttctcaccagcaccctccccttctcctctcaggtaacatcccctgtggtggccacagctctccgatgggtccagttcccacaggaaagccagccatgattctaacttctaccaggtgaccctggccctgggctctggtgacactaaccttttgtttctctagtcctggggaggggtagtaacagcttcctgctattattaatttatggattgcctcattgcctcctgtgaggcttctcagctattgattaccatactactcagcaataaaaaggaaaaaactattgatacatgcaacaactttgtcggaccacaagagaattttaccaactaaaaaagccagtctcacattgttacatactatatgattccacttacataaccttctagaaatgacaaaattattgaggtgaagaacagattagtggttgccaagggttaaagacagggttgggg

SEQ ID NO: 251131 - DNA, 323 bp, Homo sapiens
gggtcgtgcagtccctggcttacacccagggtgcgtgtcacccccacgaggggcaccagaaagcgtcaagaaaacccccgagggaaaggaacaggagggacagcctttaaaggggaagatgaggcagtccgggaaaaaacttcccacggaaaacagtgcctgtccagccgaccctgggccgggatttgggaagtcgtggagtccttgacttgcacccagggggcatgccgtgctcatggggacaccccaaagtggcaagaaggcctctgggggaagggaacaggacgccaatcttaataggggacattgaggcaacacggaaa

SEQ ID NO: 251132 - DNA, 1226 bp, Homo sapiens
taaaatatacagtaggccaggcatggcggctcatacctgcaatcccagagctttgggaggctaaggccacaggagtacttgaggccaggagtttgaggccaccttgggcaacatagtgagacctcatctctactaaaaataaaaaattagccagacagggtggtgcatgcctgtagtctcagctacttgggaggctgaggtgggaggactgcttgagcctgggagtccaacacttcagtgagctatgattgcaccactgcactcaagcctagacaacagattgagaccctgtctctaaaaaaaaataataaaaattaaaacacaaacaaacaaaacaagcaaacaaaacaagtcaaggcagtttttatagaaactgacattgtagccaggtgcagtggctcacacctttgggggccgaggcaggcagatcacttgaggtcaggtgtccgagaccagcttggccaacatggtgaaaccctatctctactaaaaatacaaaaattagccgggcatggtggtgtgcgcctgtaatcccagctacttgggaggctgaagcaggagattgcttgaacctgggaggcagaaattgcagtcagctgagatcattccactgcactccagcttgggtgagagagtgagactccatctcaatgaataaataaatgaataaataaaccgacattggtaaagaggttatctttagttgggccttaaagacaatggagtggacactgtctgttggctccatagctaacattcattacttgccttcccattactaacagcgtccagactttaacttggataacatatatgctttaccataagctcaagtactttagggaaagctgatcccacttcaagcttcagtcggggagttggggaggggtctgtggcttgtttaaaaacaaacattggtacattcaatttcccctgcttacatcatttttcggttgagggtggggatggggaatgggaaggggagaacacgacccaaccagggtgaatttcaggacccttgtttgaaatgccagctaagaaatgtctgggaaaacaccaggaagagaaaacatctctgttcctccaacaccatgttgtatgcatgtgaagcctggaaccagtagagtcattttgctagatgtaagctgagggccaaggaaatatatggaggaggttactgccaagatactgtccaaatttccaattctcttataaaagttttttcc

SEQ ID NO: 251133 - DNA, 447 bp, Homo sapiens
ctgcaaagaaacagaagtagagccactggatcaagccaacgtgaagcctgtcttactgctggaccaatatattttcttactgtttaactcagtttaagttttgttggtttgttttgttttatgtagttgaaagccttctgatttagatgggtacatttcaaataagtaaagaagttagattgttccagaaacaagtagtactcaagaaatgcaagtaagttagaaagccctggaagataaaaagtagaacaatattttgaagatggagggtgtatacaatgtaatggtaaactgtaaaaagtgtacaaaaaaaaatggttcagaggcagatgcagaaaaatgtaaaacttgagctatggattttggaccttttgtaggcaaggtcagttaatgggttttgactggggaatgtaaaaacaataaacatttactggctacttattatgt

SEQ ID NO: 251134 - DNA, 375 bp, Homo sapiens
gatatggagtctcgctctgtctcccaggctggagtgcagtggcttgatctctgctcactgcaagctccgcctcccgggttcccgctctgacactttctactcctgttacctttgaaaaggccttttgcttcttgggcttcagtctttttaaacaccgaatcagtggtttttaaactaggttttgctgaatccctcaggatcagtgagtgataagggggaaaaaagagaaggctgaaggggcaagtggaataaagtcattttaatctatttctggttaatttcttttgaaagaagagtttagtttctaaaacaaaaatagttcaaaaaccactggactagaagttacctaaatccccttctggctgaacacttctg

SEQ ID NO: 251135 - DNA, 139 bp, Homo sapiens
attcaatgctggatttcatgtagagcagaatatgctaatgaaatgtaaatgtctacggcaaacattgcgtaatatagaaaaccttcaaaactgagctttgtctcttgcacggtgggaaaccaaactttattacatcaga

SEQ ID NO: 251136 - DNA, 494 bp, Homo sapiens
caactattgttttccgttttcatcacgagcgccactttccccctatttgttcaccgcctccactccacaagaactgctcttgacttggccaactttctgggacaccctcactacaaggatttatgagtcaaacaggtttttgtgctagcctggaaatctaactgctgacagcagttgtttcaagaagaaaatgctgttttggaaccaaacagcaggctgccaactgaaacaacataaacccacctccaagttcaaatgaaacaaacaaacaaaaagactggtccaagtgaggcaagctgtggtggctcacacctgtaatcccagcactttgggaggccaaggtgggctgatcacgaggtcaggagttcgagacaagcctggccaacacagtgaaacccgtctctaacaaaataaaattacaacattaacatttgtggggcaggaccattcagtccataattgtccacatttattccttttaaatgccagaaatt

SEQ ID NO: 251137 - DNA, 425 bp, Homo sapiens
agttattcaattcacttaagactttgttaagttaaatattaatgttaaaatgattagggctatttcgttcaagacaattgccactaatcacatgtgattatgtaaatttaaatttaaattcaacttaactaaaatcaaataatgaaaaaggtcaatagtacaaattctcagttatatcacgtgtcaagtacttaagaaccacatgtggctgtggaattagacagtgcagatgtagaacatttccgtcactgcagacattctattgggcagtactagtctagggcatccaattatagaacagaactagagtataaaactgccaaactgttcgtctagaaaatagaatgagagggaaaaatcaaagtaaaggaggcaacaaagcaagggaatataaattcagaaaaagtggcaaaagtagaagatac

SEQ ID NO: 251138 - DNA, 778 bp, Homo sapiens
tgacatcccgacgagttgtccgagttaaggttctcagagtagtcagtgtagctctcccttggtcctatgcaaaggcaagaaggaaagaccaagataatacattttgatggtgaaaacacagtagaaatatatttttataagccaaaggcaaagagatgtgtcagcgagtcacattaggtgttgaggctatcctgttactgaactgatggtaatggagaggactgaggatgagaaaagaagccactcctgtgacttgctgggatctaacgccacatcgcttcccagcacctatgattctgtctctgtgtgggtggcaccgtggtgtagatggacaagacttgactctggctgtgaggcacagctactgtaaagaacactgcgttttgatttatgggcattttttttttttaaaggacagcagccccgagatcatgcctgcgagcctttgtaggcaccgtaagtagggctgcaggcatccctgtgtgccctggcaggtgtctgacattctgtttcccaagagttcctgcggccggggctgaggtcccagcatctcagataaacacggtttgctttgtcagctgcgtctcaggtccacatagagcatggtgtctgggccttcctcagccgctttctgtctttgaggaagtcactggccttgcctgtgcattttcagtgatgacatacatgcccttaaacatgctcgagttaggccagtgacagaggcgtagattgtttttcttgttttaactcggacaactcgtcgggggtcctcggagtt

SEQ ID NO: 251139 - DNA, 122 bp, Homo sapiens
cttaccttccctgtttaggggggaaggatgggtactactcttctgccaattcaagaaatttataattctcaggtcatccttttttccttcttttcatctttctttcctttcctcactccctg

SEQ ID NO: 251140 - DNA, 340 bp, Homo sapiens
tttctaaccaagacttaaatcttgaaaccataaaataaaaatctgatataactgagtaaataaaaattgaaggaaaaaaatcttctaagtagcaaaaagaatctacataagtaaactgaaaagacacatgacaaaggcctaatcaacttaaataaagagttccaaagggtcaataaaaatgaatttcaatccaatagaaaataataggcaaaggatataaacgggcaatgcacagaaaaagaaatatgaatagacctaaatttgttaaaagatgtacttaacattacctcatcaaaactcaaagctatataggaatagcatattttatctatcagattgc

SEQ ID NO: 251141 - DNA, 500 bp, Homo sapiens
gccatatattttgtctctttttttttccagtgatggaacctagtcagcttccaacttttccccaccaaaaagatgccatacttagtttccctttagggacctgtatgagaatccttgaggatatagcaccaggagagaaaatgatgggccatgggatatgtgtatattaagtgactaagtactaccaggcaactcttcagaacagtgtctatgcctacactcccacaagcaacctcaccaacccttagtgttatccagctttctgattactttcatctttatagttataaagtgatcaatatcttgtagttatttgaacttgcatttctgtttttactaatgaattcaagcccttatttacatgttttagttatttgggttttctcttccataaattgcctgttcatatcctctgcccttttttccatcacggttgctgcttttgtcttgtctgtttgtaaatctttgtatattgtggaaataaagcacttgtcagcttt

SEQ ID NO: 251142 - DNA, 438 bp, Homo sapiens
gagagattcattctgtccctgagttcttttgtgggttctagagctccccaacccatctctgatgagcagcaagtacatcctaagctcatctctctgagccagcagcctggttctctagacatcccagggccaaaagctcctttaggtaatactactgcaccatggaaacccacccagggaactcatgtctctaagatgacaactcaataatcagatctgtgagtttaaggggaagatagagttcctcatttcatttaatgactctgtctaccccaggtaacacacagacatttcagcaatgatctttagaaggtaatggttccttatagcacctttggtggagccagtcagggttagtattaggagtaccaggaatcttcaaattatattgtatgggtcacagcctgtcttggctagacctagcaaagcaagtaccag

SEQ ID NO: 251143 - DNA, 443 bp, Homo sapiens
agattgcatggtaggtgacataggcaggggcagaatggagtttatgacaatggccataagatgatgaaaaaaattatttggggcctttgaagcagcagatgagctggctcagaggaaagttgcacaactgtagaaaaacaacttttgcaaaattttcctccactcagtgggcactacatacttattctaggatttgcattcattctttcacagactgtttacttattggcttgggcctacaatgacttttctgagagaggtgagggattagcacaacagcacacacacgcctgaaagaaatagtgaatttctaattttcagattttagtctctgacctaaccaaagaattgaccattgtagattttatctattaataatattaatgatgctcacaaatatgaagatttaagtacatcttatgataataagagatgctttcaaa

SEQ ID NO: 251144 - DNA, 283 bp, Homo sapiens
aaaaagaaaaagtgcttaggaatacatttaaccaaggaggccaaagaagtgtatcttgaaaacaacaaaatgttgctgaaaaacattaaagataacctaaataaatagaaagatatcccatgttcatggattgatattaagatgtagacgtgacccaaagcaaactacagagtcaatgtaaaatctatcaaaagcatagtcgcatttttacagaaataagaaaatccaggaagacccaaccaaaatggctgactagaggcattttgtactcgcctcttccatt

SEQ ID NO: 251145 - DNA, 374 bp, Homo sapiens
gtgagagttgtgtgtgtgtgcatgcatgcatccctgtgtgcatgtgtgtgttggggaggagagtaaaagagacttcatttggattggcattgaagtcacaagagtaacaaagcagcggttatcttttccagatacatattaggtttctttaattcactgtcaaagtatagtctgtgttctgcctgtattagaatcacctaagcccaagatgattgaaatcctttttcttggggctgacctcggaagcactgaattgctttctggcaagaggtccaagaaatacactttttaaaaattcccacagtgattctcaggcttgctgaagtctgagaatttctgctcaagttccttaactctgaagagtttagtttaaa

SEQ ID NO: 251146 - DNA, 410 bp, Homo sapiens
tattgagtgaatttgatatcaaaaggcctagctattttggctatcatagcagcaatgttttgccattatgctgcatactatttattttcatgcttacatcttgttttagactgaataatgtcagctgctataatatagaattcaaaactctctatgacttaatacaaaacaatagactttttttttgatatgggccagactgctctgctaggtggctttctctaaagggtaatacagggatttagactcatgtggctctaccattttgaaatgcatccctctagccataaagatgtgggagattttaagagccaggcttgtaagtgatgttcatcgtttttgcacacattgcattgcccagaactagtgacagggctcaactctaagggaagatggaaaatgtaatcttc

SEQ ID NO: 251147 - DNA, 330 bp, Homo sapiens
tccatgaccctgctgaatatctaggaaaacccaagaattcgagggaggccgtgttgtaatatctggtctgagtggccctctttggatttggaggctgtttccaatagacacaagataaaaactgaagatttaacagagcttagtcgttagccaagttgggcccttaggcttcaaaatattgttacccaccgtcctccccaattttttaaaactatgtccccccatacacatttttgacaaattaatatgtatcttaagattaagcagatgtttttctttgtattataattattgacatttttaaaaattaaagtgttgcatcattcttga

SEQ ID NO: 251148 - DNA, 497 bp, Homo sapiens
ccggtgaggagggtgccctagctcccatagtaaccccagaattagtctccttaaaggctggggatcatggcttgttcaatagtttttcttcaggttcgggcatatagaaggggctcaataaatagtcacagaatcaataactattacaaaagccccattgatggaatgctcgctccgtaccaaggctgagaagggtgatctgtcacccaaagtaggacccctttgttgctccctgaaccaacaacccagaagagcctgccagttttgtagttttgtttttccttttcttgctatttggccaggagcagcagtagcagcagctccaagaaagcactggctccttcttagtcccatggaagcacagatcaacatcattgcccttgcaaacttctctcagcttaggagagtctactcgctctttgcacattgttgacatgaaatgaatattaaacaccaaacctcatagaggccagccctgctgggcgagcaatgaaaaa

SEQ ID NO: 251149 - DNA, 229 bp, Homo sapiens
caaggcctgtcagggggagggctccacttctcagcccatctgcagtaggtccacattcgggagcactggctccttcttagtcccatggaagcacagatcaacatcattgcccttgcaaacttctctcagcttaggagagtctactcgctctttgcacattgttgacatgaaatgaatattaaacaccaaacctcatagaggccagccctgctgggcgagcaatgaaaaa

SEQ ID NO: 251150 - DNA, 330 bp, Homo sapiens
tcccccccaccccctgacaagtcctggtatgtgatgttccccttggatgactctgttacttggccatctgatgattttggactgcaactttgaaagaccaaattgtagcatgctgcatagctttcaaagaatttagatatttttttctggttggcatacattttgattttaaaataattaaattctgtgaaatttgtttttatatcaggtgactataccatcaccataaattgctagtcatgaaaatacatacagttgacccttgaacaatgtttgaactgtgctggtccacttatatattcatttgttcaataaatatattagaaagtt

SEQ ID NO: 251151 - DNA, 219 bp, Homo sapiens
agagacaaggtcttgctctgtcacccaggctggagaccctggcttactgcaagcttcaacctcctgggctcaagcgatcctcccatttcagcctcccaagtagctgggacttcaggtacacaccaccacacctggttaatttttgtatatatatattttttaatagagatggttctcattttgttgtccagacaacaaagaacgcctgggctcaaggga

SEQ ID NO: 251152 - DNA, 265 bp, Homo sapiens
cccagcctgctctctaggcgttccatcagccgtccatgctgaaatgtccttcaacctcaccgccccctgcaagccctcccgctctccagccgtgcgcaggcaggccacggtcccccccacctgtgtctcgtgtgacaacaaagcagaggaggaaagggaggggctgagcttgtcacgggggggtgggggcctgcgacacaatagcgcgcagtcctagctgctttattgaggatactgtgttgaataaaccaatgactaagagaga

SEQ ID NO: 251153 - DNA, 339 bp, Homo sapiens
ccgtctctcttcttcaccactgaaaatgtgggcctaacacagcccagtgcacagaaagaacccaatgaacagctaccagatgactgatggaccaggtgatggtgaatccttctgagatccacaacacaccttagcctcatggaagctgcccagaatgggaggtcaggatcgctggcttggatcccagctctgccccaccatgcagaagccgaatgtccttggtcatttcacaccacttctctaagcctcagctttcttatttgtcaattgaaacaatttctcacctctcagggtttggggggaaataaaggacagagagcctgtgcaattgccaagcac

SEQ ID NO: 251154 - DNA, 462 bp, Homo sapiens
gttttagttgtaaatctgctcatctacattagcacaatttctgacaacttgaaaataaattatagaagtgaccccaaagttccagagaattggctccgtgtcccattttttcttccttgttcctggtttgtcattctgttcatttctcttcttggatttgagaaaggaatctgttgactcagcagcccagggctgcggttctttctctctgggatccctgctcattagcttcctatgcgtggctttcttccctgctggctctgggctataacctctcctctcatcctcttcagggaatggagaaaatttgcttataactgtgatctaaacataatcatgcaataggtaccctaaaaatactcaaggaaggaagtacaaaggacagactaccaattgataggacgtcttcttggatttcatgattgatacattagatttctttactctgggcaaaaaaaaaaa

SEQ ID NO: 251155 - DNA, 480 bp, Homo sapiens
tggggtggttcacaagcctcagtgcctccatttctggttcctggcattcctgaaaagcccggagcctctgctttctggcttcatcttcccttcagcttcaccaggactgccctgcactctaaatttcaccatcatcctttcctttcagctctgggcttttgccactatggttccctccacctggaatgcccttgccctactcgtgttgaaatccaacacgtcctctaagggttcagggcccccacctccccttctccctttgggtcagctctgcctaccctccatggtcttccgtgactacctgtgtcatttcctccacttctccacccacgtggcttggcattagggttgtctgtggatgagtctcccccaaccaggcgtgggtctgagcacattgctgttccccatggggaggaagggaagggatcagctggttatggagcgcctactgtataaaaggccagagctggacactcaaga

SEQ ID NO: 251156 - DNA, 567 bp, Homo sapiens
cattcgtagaccccaccatcaaggtggactccggctaccgagttcacgaggatctgcggaacctggggctgtatgttaaaacccgggaaggcattcctgtcatgaggcccctgtgggtgcagtaccctcaggatgtgactaccttcaatatagatgatcagtacttgcttggggatgcgttgctggttcaccctgtatcagactctggagcccatggtgtccaggtctatctgcctggccaaggggaggtgtggtatgacattcaaagctaccagaagcatcatggtccccagaccctgtacctgcctgtaactctaagcagtatccctgtgttccagcgtggagggacaatcgtgcctcgatggatgcgagtgcggcggtcttcagaatgtatgaaggatgaccccatcactctctttgttgcacttagccctcagggtacagctcaaggagagctctttctggatgatgggcacacgttcaactatcagactcgccaagagttcctgctgcgtcgattctcattcttatggccgtattaccaggggatacatcataggaacagct

SEQ ID NO: 251157 - DNA, 622 bp, Homo sapiens
cctgttgtgttacagcatcttctggtaatgccacttgtaactggcgagagagcatggctgttacatctcagcacaatgatataatcgagatgcttgtgcaggatatctttgtgccttctggtaacctctatatcatgccatcggaagggattctgtcatgagcccctgtgggtgcagtaccctcaggatgtgactaccttcaatatagatgatcagtacttgcttggggatgcgttgctggttcaccctgtatcagactctggagcccatggtgtccaggtctatctgcctggccaaggggaggtgtggtatgacattcaaagctaccagaagcatcatggtccccagaccctgtacctgcctgtaactctaagcagtatccctgtgttccagcgtggagggacaatcgtgcctcgatggatgcgagtgcggcggtcttcagaatgtatgaaggatgaccccatcactctctttgttgcacttagccctcagggtacagctcaaggagagctctttctggatgatgggcacacgttcaactatcagactcgccaagagttcctgctgcgtcgattctcattcttatggccgtattaccaggggatacatcataggaacagct

SEQ ID NO: 251158 - DNA, 207 bp, Homo sapiens
tatcataaaggataagagtgacatttaaaaaaccagtttttaaaaaatgatggtagcaaataaatgcagatgatcaggatgacagcaagtaccaagtcaaagcaacacggagaagaaataggccctagcctgcaggttacactttaaacactgaggagaaatgggagagtaaagagcaacactgagcctcatcggactgtaggtgaa

SEQ ID NO: 251159 - DNA, 487 bp, Homo sapiens
gccctatccggtaccgccttgttacgtagaagttactcagcagactgacacccaatccccctcgggcgatcatctgccctgtcttcccacctccagggctacagtgggcagcaccgccatccccagtgtgacagggccctgggagcctcagggctgcccggccaggttggtctgctctggttacattctggccaagctgccccttcctgctgacctgcatgtgtattgttgtcaccttcagctctcagcacctcggcccccttgggcagtgaggaagggccctggaggcgaggttgggagaaaggatagctagaacaggatcctgcggggaacaagggtgtgggcagctctcacccggggctgcctcactgagagcaccgccgagtgggggtgggggtgtccaactctccagccacaaaccgcttcctccttgtctgcaggctgtgcaggtctggcctgtgagtaaacacatttatcagcaacccaa

SEQ ID NO: 251160 - DNA, 346 bp, Homo sapiens
gtgtaaagaaaactttcagctatcttcaggtttgtgtttggcactttgatctgtaagcaatcaacatggagagatgctatgccaaagaggaaagtctgcaggaaccatacaaggactctcccacatgactcagccaggcaagccaatacccactgcacaggagggtgtgatggtggcccaccaagtactgagtgaaggagtccaggggcccaaggctctgataaaggatactccaaggccaaaagacaacccatgtgaagcagtcgagccccaggaccatgaccagcaagggcaagggtctggctggacagaagtaggtggcagctgcactgctggcttccaactt

SEQ ID NO: 251161 - DNA, 393 bp, Homo sapiens
ttgtgagattcattcatggtacgagcagcagtttcattgctgtataattttcttttgcatgagtatgtggcaatttatttttctagtcttttcttagtagacattttggtttttgtagcttgtggctgtttcgattagagatgctgttagcattcttttgctgtacagttgcactcatttttgttgggaattattgggggagaagataggtacgtgtttagttttagtaggttcttcccgttttcctgtatggttgtattaattcacaccccacgtggcattgcgtaagttccaattgttctgtatctttgacagcacttggtatcgccagtctttcatatttttcaaagctcgtttcttttttttgagacacagtcttgctctgtcgcccag

SEQ ID NO: 251162 - DNA, 422 bp, Homo sapiens
acacccaccccagcctttcccggtggaggagtgaggaggatacccctatgctggtgtgctctttgtttatggccctgctttcattgttgagtgagcacatggttccgggccctgtccccaagcgctcacagctgagctgaagagatacaacacatcatgccaggatttctagttgttggtgaggcctgggataacctgggcccacttaagccaggatgtgccaggaggacctctgagaagaagcctgctctgcagaaaaagagcaaacacacaggccctgcctcctctccctctgtcctcctctcctgcctctcctgagccatggtccacagtggccttcccaccagacctaccttctgtgctcctgtccaaggcctggtggccccaagcctggcacccactcccttctgtctgcctgggtc

SEQ ID NO: 251163 - DNA, 478 bp, Homo sapiens
atttatgaaaaggatcatggagtcatagaatcccatgtcatcctataactcctcccttgaagggtttttagaaccacctcttgggacgtgagccaagatctgagagaaaggcaaggtgaaggagaatgctattcagaaaaactgaaaagcagattcatttctgaaagcatttattgagcacttacggtgtgcaaggtaggaacttggaggtgaagaataacttagaaatatttaagagaagacactggagaaactacagtggaatacctagggcaagtccaaagtactggctggagatcagtcttatctcatttgatgagtgttcccaggtcagccctggagagtaaggggtgtgtattagtatctcagaaatgggaccaaaagtggcctaacagaactgaaatactaaacagttaaacctgaagtgcatgtatggggaatgtggaaacccaggaaaaaataaaatattaccttgtca

SEQ ID NO: 251164 - DNA, 389 bp, Homo sapiens
acgctgctgtgtttagtgttgaacagggtggtcaaataacagttgtactatgttatcataaaacatagtgttcttactatggtgttaacagaccctattataatttgatatttaattctgatgtaaggataatagattttgtccaagtctagtaacatgttataatttattttagagggaaagagaaaaaaaacagcctaggcaacatagtgagaccccatcattacaaaaaataaaaaaagttagccaacttcatggtcctagctactggggaggatgggttggaaggatcacttgagcccaggagtttgaggttacagtgagctatgaacatgccactgtccttcagcctgggtgacagaccaagacctaccctgtctcaaaaaaaa

SEQ ID NO: 251165 - DNA, 504 bp, Homo sapiens
agagtgagggcccatgtttgaaggcagtgagtttgacttgctgagaggtagtggagggaggcagagcggtagcctcaatgatagatgtggaagatactatagcatagcctgccttttttggtgagtggcgatcaggcctggtggaactgccatcaataaaccaaatgtgatcagggtgaggaacaggaaagaaggaaatatgcggaaatggggtgaatgtcagctggatcagagagatacagtcatgggagtcaggtgttgtatctggaataatgtgggaggccggattgaagtctgggccaggaacaatggtaattgtgggagactcaacagagactgagtatagctgaaggagccagggagcagaaagtatatgtgtcaggtgtgaggaagacaatagattttggaagttatgagaactgtagagagtgagttgagcatagtttgcgattttgagggcctctaaaagtattagggtggcagcagccgctgcatggagacatg

SEQ ID NO: 251166 - DNA, 649 bp, Homo sapiens
  misc_feature (649)..(649): n is a, c, g, or t
cttttttctgggggttgacgctgggtgggcagagggcagaggcctgggccaggacagggcccgaagaacgactcagatcccggactgtcctccgggcgcgacggaggcggcggccggggcggaacagcggcgcccgaggcaggggcgcggcgctggctctgcgcctgcgcggcggcccatggtcaggatgcccgcggcgtggttgccgctggcctgcaagaggcgctgcagccgaccctggaggcccgggggcccctcgtgccgaattcggcacgagaatccaagaattatgatggaaatatgaacattttaaaagctccctgcatgatccacatgtgaccatgatgggtaatttctgatttgggctttctgaaccccgggaacttcttctagagaatggtggtaagatctgcctccctgccatgattgttatggagaacaaatgaaatactggatgtgccatgttggtgtgctgcatccattaactcgtcattaacattaggtatatctcctaatgctatcccttcccccttccccaccccacaacagggccccggtgtgtgatgttccccttccttgcgttcgtgttctcattgtttaattcccacctatgagtgagaacaagtggcgtttgtttttggcctcgcgn

SEQ ID NO: 251167 - DNA, 426 bp, Homo sapiens
gtcatgaaagggcagctgccacctcaggccatggtggcggagacaaaggctatgggccggtgtagacgtctaagaaaccaacaggaagtcccagccggaaacacagaaaggatatggagaaaattattattctgcccctacagtttcggtgacccagatgggatctctgggacaccctgcctgctctacaattgggatccctggaaaagtgacagaatctggcaacagatgagtaagaaaggtcacttcctggcagacctcaggtatattggggacatcaagaaaagaataattcatcaaagtctacagatattgcaggcaaagttgaaacaagccagacaagttctctttgtattcttgagagacttggaaagtctaacctgagattccttattaaaagttccagcaaaacagaaaaaaaaaaaa

SEQ ID NO: 251168 - DNA, 612 bp, Homo sapiens
gcgggcgctcccctgtctggggggtgcttggctgggtgtggagaaggatcaatcacagctgactcctcagaggtgacagcccctgcccccttaaaaacaagaaaagacctagcagtgtgaagccaaactgcacccccagccccggtgacatgaggaaaccgtgaggcgctcagcctgaggttcatcgttcatctccttcctgcttggaatcagaatgtcctcactgctgagtttctccgttttatgggattacattagtggacaaaggaggaagtcccagccggaaacacagaaaggatatggagaaaattattattctgcccctacagtttcggtgacccagatgggatctctgggacaccctgcctgctctacaattgggatccctggaaaagtgacagaatctggcaacagatgagtaagaaaggtcacttcctggcagacctcaggtatattggggacatcaagaaaagaataattcatcaaagtctacagatattgcaggcaaagttgaaacaagccagacaagttctctttgtattcttgagagacttggaaagtctaacctgagattccttattaaaagttccagcaaaacagaaaaaaaaaaaa

SEQ ID NO: 251169 - DNA, 379 bp, Homo sapiens
tccaactcctgggctcaagtgattctcctgactacaggaagtcccagccggaaacacagaaaggatatggagaaaattattattctgcccctacagtttcggtgacccagatgggatctctgggacaccctgcctgctctacaattgggatccctggaaaagtgacagaatctggcaacagatgagtaagaaaggtcacttcctggcagacctcaggtatattggggacatcaagaaaagaataattcatcaaagtctacagatattgcaggcaaagttgaaacaagccagacaagttctctttgtattcttgagagacttggaaagtctaacctgagattccttattaaaagttccagcaaaacagaaaaaaaaaaaa

SEQ ID NO: 251170 - DNA, 2174 bp, Homo sapiens
  misc_feature (1)..(2): n is a, c, g, or t
  misc_feature (4)..(4): n is a, c, g, or t
nncncgggccgggacgcagggcaaagcgagccatggctgtctacgtcgggatgctgcgcctggggaggctgtgcgccgggagctcgggggtgctgggggcccgggccgccctctctcggagttggcaggaagccaggttgcagggtgtccgcttcctcagttccagagaggtggatcgcatggtctccacgcccatcggaggcctcagctacgttcaggggtgcaccaaaaagcatcttaacagcaagactgtgggccagtgcctggagaccacagcacagagggtcccagaacgagaggccttggtcgtcctccatgaagacgtcaggttgacctttgcccaactcaaggaggaggtggacaaagctgcttctggcctcctgagcattggcctctgcaaaggtgaccggctgggcatgtggggacctaactcctatgcatgggtgctcatgcagttggccaccgcccaggcgggcatcattctggtgtctgtgaacccagcctaccaggctatggaactggagtatgtcctcaagaaggtgggctgcaaggcccttgtgttccccaagcaattcaagacccagcaatactacaacgtcctgaagcagatctgtccagaagtggagaatgcccagccaggggccttgaagagtcagaggctcccagatctgaccacagtcatctcggtggatgcccctttgccggggaccctgctcctggatgaagtggtggcggctggcagcacacggcagcatctggaccagctccaatacaaccagcagttcctgtcctgccatgaccccatcaacatccagttcacctcggggacaacaggcagccccaagggggccaccctctcccactacaacattgtcaacaactccaacattttaggagagcgcctgaaactgcatgagaagacaccagagcagttgcggatgatcctgcccaaccccctgtaccattgcctgggttccgtggcaggcacaatgatgtgtctgatgtacggtgccaccctcatcctggcctctcccatcttcaatggcaagaaggcactggaggccatcagcagagagagaggcaccttcctgtatggtacccccacgatgttcgtggacattctgaaccagccagacttctccagttatgacatctcgaccatgtgtggaggtgtcattgctgggtcccctgcacctccagagttgatccgagccatcatcaacaagataaatatgaaggacctggtggttgcttatggaaccacagagaacagtcccgtgacattcgcgcacttccctgaggacactgtggagcagaaggcagaaagcgtgggcagaattatgcctcacacggaggcccggatcatgaacatggaggcagggacgctggcaaagctgaacacgcccggggagctgtgcatccgagggtactgcgtcatgctgggctactggggtgagcctcagaagacagaggaagcagtggatcaggacaagtggtattggacaggagatgtcgccacaatgaatgagcagggcttctgcaagatcgtgggccgctctaaggatatgatcatccggggtggtgagaacatctaccccgcagagctcgaggacttctttcacacacacccgaaggtgcaggaagtgcaggtggtgggagtgaaggacgatcggatgggggaagagatttgtgcctgcattcggctgaaggacggggaggagaccacggtggaggagataaaagctttctgcaaagggaagatctctcacttcaagattccgaagtacatcgtgtttgtcacaaactaccccctcaccatttcaggaaagatccagaaattcaaacttcgagagcagatggaacgacatctaaatctgtgaataaagcagcaggcctgtcctggccggttggcttgactctctcctgtcagaatgcaacctggctttatgcacctagatgtccccagcacccagttctgagccaggcacatcaaatgtcaaggaattgactgaacgaactaagagctcctggatgggtccgggaactcgcctgggcacaaggtgccaaaaggcaggcagcctgcccaggccctccctcctgtccatcccccacattcccctgtctgtccttgtgatttggcataaagagcttctgttttctttggctaaaaactg

SEQ ID NO: 251171 - DNA, 1849 bp, Homo sapiens
  misc_feature (1)..(2): n is a, c, g, or t
  misc_feature (4)..(4): n is a, c, g, or t
nncncgggccgggacgcagggcaaagcgagccatggctgtctacgtcgggatgctgcgcctggggaggctgtgcgccgggagctcgggggtgctgggggcccgggccgccctctctcggagttggcaggaagccaggttgcagggtgtccgcttcctcaggtgtctgtgaacccagcctaccaggctatggaactggagtatgtcctcaagaaggtgggctgcaaggcccttgtgttccccaagcaattcaagacccagcaatactacaacgtcctgaagcagatctgtccagaagtggagaatgcccagccaggggccttgaagagtcagaggctcccagatctgaccacagtcatctcggtggatgcccctttgccggggaccctgctcctggatgaagtggtggcggctggcagcacacggcagcatctggaccagctccaatacaaccagcagttcctgtcctgccatgaccccatcaacatccagttcacctcggggacaacaggcagccccaagggggccaccctctcccactacaacattgtcaacaactccaacattttaggagagcgcctgaaactgcatgagaagacaccagagcagttgcggatgatcctgcccaaccccctgtaccattgcctgggttccgtggcaggcacaatgatgtgtctgatgtacggtgccaccctcatcctggcctctcccatcttcaatggcaagaaggcactggaggccatcagcagagagagaggcaccttcctgtatggtacccccacgatgttcgtggacattctgaaccagccagacttctccagttatgacatctcgaccatgtgtggaggtgtcattgctgggtcccctgcacctccagagttgatccgagccatcatcaacaagataaatatgaaggacctggtggttgcttatggaaccacagagaacagtcccgtgacattcgcgcacttccctgaggacactgtggagcagaaggcagaaagcgtgggcagaattatgcctcacacggaggcccggatcatgaacatggaggcagggacgctggcaaagctgaacacgcccggggagctgtgcatccgagggtactgcgtcatgctgggctactggggtgagcctcagaagacagaggaagcagtggatcaggacaagtggtattggacaggagatgtcgccacaatgaatgagcagggcttctgcaagatcgtgggccgctctaaggatatgatcatccggggtggtgagaacatctaccccgcagagctcgaggacttctttcacacacacccgaaggtgcaggaagtgcaggtggtgggagtgaaggacgatcggatgggggaagagatttgtgcctgcattcggctgaaggacggggaggagaccacggtggaggagataaaagctttctgcaaagggaagatctctcacttcaagattccgaagtacatcgtgtttgtcacaaactaccccctcaccatttcaggaaagatccagaaattcaaacttcgagagcagatggaacgacatctaaatctgtgaataaagcagcaggcctgtcctggccggttggcttgactctctcctgtcagaatgcaacctggctttatgcacctagatgtccccagcacccagttctgagccaggcacatcaaatgtcaaggaattgactgaacgaactaagagctcctggatgggtccgggaactcgcctgggcacaaggtgccaaaaggcaggcagcctgcccaggccctccctcctgtccatcccccacattcccctgtctgtccttgtgatttggcataaagagcttctgttttctttggctaaaaactg

SEQ ID NO: 251172 - DNA, 1053 bp, Homo sapiens
gaacccacattgaaccaaaccccagccgtgccagagccagagcagctgatatgggggaagcttggtgcagggaggaggatggatgagatctggtatccgttgattaaaggggacctaggatacggggttgcttatggaaccacagagaacagtcccgtgacattcgcgcacttccctgaggacactgtggagcagaaggcagaaagcgtgggcagaattatgcctcacacggaggcccggatcatgaacatggaggcagggacgctggcaaagctgaacacgcccggggagctgtgcatccgagggtactgcgtcatgctgggctactggggtgagcctcagaagacagaggaagcagtggatcaggacaagtggtattggacaggagatgtcgccacaatgaatgagcagggcttctgcaagatcgtgggccgctctaaggatatgatcatccggggtggtgagaacatctaccccgcagagctcgaggacttctttcacacacacccgaaggtgcaggaagtgcaggtggtgggagtgaaggacgatcggatgggggaagagatttgtgcctgcattcggctgaaggacggggaggagaccacggtggaggagataaaagctttctgcaaagggaagatctctcacttcaagattccgaagtacatcgtgtttgtcacaaactaccccctcaccatttcaggaaagatccagaaattcaaacttcgagagcagatggaacgacatctaaatctgtgaataaagcagcaggcctgtcctggccggttggcttgactctctcctgtcagaatgcaacctggctttatgcacctagatgtccccagcacccagttctgagccaggcacatcaaatgtcaaggaattgactgaacgaactaagagctcctggatgggtccgggaactcgcctgggcacaaggtgccaaaaggcaggcagcctgcccaggccctccctcctgtccatcccccacattcccctgtctgtccttgtgatttggcataaagagcttctgttttctttggctaaaaactg

SEQ ID NO: 251173 - DNA, 1054 bp, Homo sapiens
aagatgaagaggttgaccagcggggagagcaacccccggggcagctcagtgaccttgttgtggtccaggtagaggttcggcatggcccggaacgaattggcagccagcaccgggaagttgttgcgctgttgcttatggaaccacagagaacagtcccgtgacattcgcgcacttccctgaggacactgtggagcagaaggcagaaagcgtgggcagaattatgcctcacacggaggcccggatcatgaacatggaggcagggacgctggcaaagctgaacacgcccggggagctgtgcatccgagggtactgcgtcatgctgggctactggggtgagcctcagaagacagaggaagcagtggatcaggacaagtggtattggacaggagatgtcgccacaatgaatgagcagggcttctgcaagatcgtgggccgctctaaggatatgatcatccggggtggtgagaacatctaccccgcagagctcgaggacttctttcacacacacccgaaggtgcaggaagtgcaggtggtgggagtgaaggacgatcggatgggggaagagatttgtgcctgcattcggctgaaggacggggaggagaccacggtggaggagataaaagctttctgcaaagggaagatctctcacttcaagattccgaagtacatcgtgtttgtcacaaactaccccctcaccatttcaggaaagatccagaaattcaaacttcgagagcagatggaacgacatctaaatctgtgaataaagcagcaggcctgtcctggccggttggcttgactctctcctgtcagaatgcaacctggctttatgcacctagatgtccccagcacccagttctgagccaggcacatcaaatgtcaaggaattgactgaacgaactaagagctcctggatgggtccgggaactcgcctgggcacaaggtgccaaaaggcaggcagcctgcccaggccctccctcctgtccatcccccacattcccctgtctgtccttgtgatttggcataaagagcttctgttttctttggctaaaaactg

SEQ ID NO: 251174 - DNA, 565 bp, Homo sapiens
gctcacccactcctctgccaaccagcccagggtggggattgctctgcccttgacgaagctgactcctggccaggccagcccctggtcccctacccatacccctgtgagcttgcgcagcctcacgccttacctccctccctctggtctgcagatctctcacttcaagattccgaagtacatcgtgtttgtcacaaactaccccctcaccatttcaggaaagatccagaaattcaaacttcgagagcagatggaacgacatctaaatctgtgaataaagcagcaggcctgtcctggccggttggcttgactctctcctgtcagaatgcaacctggctttatgcacctagatgtccccagcacccagttctgagccaggcacatcaaatgtcaaggaattgactgaacgaactaagagctcctggatgggtccgggaactcgcctgggcacaaggtgccaaaaggcaggcagcctgcccaggccctccctcctgtccatcccccacattcccctgtctgtccttgtgatttggcataaagagcttctgttttctttggctaaaaactg

SEQ ID NO: 251175 - DNA, 919 bp, Homo sapiens
  misc_feature (1)..(2): n is a, c, g, or t
  misc_feature (4)..(4): n is a, c, g, or t
nncncgggccgggacgcagggcaaagcgagccatggctgtctacgtcgggatgctgcgcctggggaggctgtgcgccgggagctcgggggtgctgggggcccgggccgccctctctcggagttggcaggaagccaggttgcagggtgtccgcttcctcagttccagagaggtggatcgcatggtctccacgcccatcggaggcctcagctacgttcaggggtgcaccaaaaagcatcttaacagcaagactgtgggccagtgcctggagaccacagcacagagggtcccagaacgagaggccttggtcgtcctccatgaagacgtcaggttgacctttgcccaactcaaggaggaggtggacaaagctgcttctggcctcctgagcattggcctctgcaaaggtgaccggctgggcatgtggggacctaactcctatgcatgggtgctcatgcagttggccaccgcccaggcgggcatcattctggtgtctgtgaacccagcctaccaggctatggaactggagtatgtcctcaagaaggtgggctgcaaggcccttgtgttccccaagcaattcaagacccagcaatactacaacgtcctgaagcagatctgtccagaagtggagaatgcccagccaggggccttgaagagtcagaggctcccagatctgaccacagtcatctcggtggatgcccctttgccggggaccctgctcctggatgaagtggtggcggctggcagcacacggcagcatctggaccagctccaatacaaccagcagttcctgtcctgccatgaccccatcaacatccagttcacctcggtagggcagaggtctccaggccccaagcccagatggacacatgccccctgtccctgtgacacttccgcggggatggggagacagcagaggagagc

SEQ ID NO: 251176 - DNA, 174 bp, Homo sapiens
gttgcttatggaaccacagagaacagtcccgtgacattcgcgcacttccctgaggacactgtggagcagaaggcagaaagcgtgggcagaattatgcctcacacggaggtgagcccctgaccaagactccaaagtcccacctcccgtcacccagctggggtgcacccagctggg

SEQ ID NO: 251177 - DNA, 469 bp, Homo sapiens
gcaggtccttggctccctggaaggcgcctgcgcgcagctcacggatcttgttgttgttgagctgcaagatgaagaggttgaccagcggggagagcaacccccggggcagctcagtgaccttgttgtggtccaggtagaggtaggtcagctcggtcaggtcgtcgaaggcacctgcgcgcagcacgcggatgtcgttatgggacaggtacaagtagataagttgcttgaggccgcggaaggcaccggcggccacctcgcggatctggcagtgctgcaggtgcaatgacacgaggttcggcatggcccggaacgaattggcagccagcaccgggaagttgttgcgctgtaggttgagcagcttggtcttctctgacaccttggggatcttctgcagccccaccttgtcgcagatgacgtgctgcaggtcgctgtggcagtggcagttctgggggcaggcggccagcgccgg

SEQ ID NO: 251178 - DNA, 706 bp, Homo sapiens
gcagcatgggaagatggacagcaaagcaccgatgtcctgctagaacgtcctggcaggttgcttatggaaccacagagaacagtcccgtgacattcgcgcacttccctgaggacactgtggagcagaagacagaggaagcagtggatcaggacaagtggtattggacaggcaccgttctcgccgctagaggtccagaggaaagtaagatgagaaggatcctgctttttggaggaagacagatgatgcccaacatcgataaataacaccaagaaaataggccaggcgcggtgactcacacctgtaatctcagcagtttgggaggccgaggcgggtggatcacctgaagtcagaagtttgagaccagcctggccaacacagtgaaaccccacctctactaaaaatacaaaaattagccggacgtggtggcggcacgtgcctgtagtcccagctactcggaggctgaggcaggagaatcgctgtaacccaggagatggaggttgcagtgaaccgagatcgcgccactgcactcaagactgggcgacagagcaggactccatctcaaaaacaaacaagcaaatgaacaaacaaaaaacactaagaaaatgaaatagggttataggagagaaagtggctgtggtggggaggggagcttcccttagattgagtggacagagaagatgtctggagacatttgagctgagacctg

SEQ ID NO: 251179 - DNA, 1165 bp, Homo sapiens
ggtcgagactggcagcagacagggattagggtagggatgtgacaaggtgaggaagggaggtggcagagctgctcaccttggagatagccagagggacagggaacctggggacgggggatggtgccagctgtggccctggctcctggggcctccaggaagggaagaaggaaccagggcagagccacagccaggagctcaccttctccaggttggtgttgtccagccagagggtctccaggttgcttatggaaccacagagaacagtcccgtgacattcgcgcacttccctgaggacactgtggagcagaaggcagaaagcgtgggcagaattatgcctcacacggaggcccggatcatgaacatggaggcagggacgctggcaaagctgaacacgcccggggagctgtgcatccgagggtactgcgtcatgctgggctactggggtgagcctcagaagacagaggaagcagtggatcaggacaagtggtattggacaggagatgtcgccacaatgaatgagcagggcttctgcaagatcgtgggccgctctaaggatatgatcatccggggtggtgagaacatctaccccgcagagctcgaggacttctttcacacacacccgaaggtgcaggaagtgcaggtggtgggagtgaaggacgatcggatgggggaagagatttgtgcctgcattcggctgaaggacggggaggagaccacggtggaggagataaaagctttctgcaaagggaagatctctcacttcaagattccgaagtacatcgtgtttgtcacaaactaccccctcaccatttcaggaaagatccagaaattcaaacttcgagagcagatggaacgacatctaaatctgtgaataaagcagcaggcctgtcctggccggttggcttgactctctcctgtcagaatgcaacctggctttatgcacctagatgtccccagcacccagttctgagccaggcacatcaaatgtcaaggaattgactgaacgaactaagagctcctggatgggtccgggaactcgcctgggcacaaggtgccaaaaggcaggcagcctgcccaggccctccctcctgtccatcccccacattcccctgtctgtccttgtgatttggcataaagagcttctgttttctttggctaaaaactg

SEQ ID NO: 251180 - DNA, 1013 bp, Homo sapiens
ggtcgagactggcagcagacagggattagggtagggatgtgacaaggtgaggaagggaggtggcagagctgctcaccttggagatagccagagggacagggaacctggggacgggggatggtgccagctgtggccctggctcctggggcctccaggaagggaagaaggaaccagggcagagccacagccaggagctcaccttctccaggttggtgttgtccagccagagggtctccaggttgcttatggaaccacagagaacagtcccgtgacattcgcgcacttccctgaggacactgtggagcagaaggcagaaagcgtgggcagaattatgcctcacacggagagatgtcgccacaatgaatgagcagggcttctgcaagatcgtgggccgctctaaggatatgatcatccggggtggtgagaacatctaccccgcagagctcgaggacttctttcacacacacccgaaggtgcaggaagtgcaggtggtgggagtgaaggacgatcggatgggggaagagatttgtgcctgcattcggctgaaggacggggaggagaccacggtggaggagataaaagctttctgcaaagggaagatctctcacttcaagattccgaagtacatcgtgtttgtcacaaactaccccctcaccatttcaggaaagatccagaaattcaaacttcgagagcagatggaacgacatctaaatctgtgaataaagcagcaggcctgtcctggccggttggcttgactctctcctgtcagaatgcaacctggctttatgcacctagatgtccccagcacccagttctgagccaggcacatcaaatgtcaaggaattgactgaacgaactaagagctcctggatgggtccgggaactcgcctgggcacaaggtgccaaaaggcaggcagcctgcccaggccctccctcctgtccatcccccacattcccctgtctgtccttgtgatttggcataaagagcttctgttttctttggctaaaaactg

SEQ ID NO: 251181 - DNA, 273 bp, Homo sapiens
gcttggctgggtgtgccatgcccttggttccagggagactgatctgggacagtcaaacccatagctcctctccctacagttccagagaggtggatcgcatggtctccacgcccatcggaggcctcagctacgttcaggggtgcaccaaaaagcatcttaacagcaagactgtgggccagtgcctggagaccacagcacagagggtcccagaacgagaggccttggtcgtcctccatgaagacgtcaggttgacctttgcccaactcaaggagg

SEQ ID NO: 251182 - DNA, 634 bp, Homo sapiens
gtagaaatctgaaatgcatagaagtgcatcctgacaacttgtgggtatttttttcccagttaatgataattaaagtatttctaatcagtgaggtgtggtggtgtgcacctgtagctacttggaaggctgaggcaggaggattacttgagcccaggagtttggggctgcagtgagctatgatgtgccactgcactctagcctgagtgacagagcaagatctggactcctttaaaaagaaacaacaacatgtatttctaataatgataggtaatatttaataatgataggtaactccaacctcatggacttgtattttaaatattgagaagttgggaaaataatggagaaaactggccttggtaggaagtaaactgtgctttttagtactaaatggattcctaatatctaggaaacaggaaaatagtgactcctagtgtatctcatatctttttattactaaacaatgccttgctaaaactgcatttcaatctttattagacttatattttgtgtgttgatattctgacaatatccagataaagttgagagtgttaggagaatttcatttctctacaggaaagataacatcttaattttatgcatactatgagtgggaaagaccatataggatatc

SEQ ID NO: 251183 - DNA, 466 bp, Homo sapiens
  misc_feature (442)..(442): n is a, c, g, or t
tgctcctccttcaccttccgccatgattgtgaggcttccccagccatgtggaaacatattcgcagagcacccactaggtgccagtaaatgtatgagaagtcctgtggaataagactgaagttgtccttgccttcaagcaacttgcaattgcctaagaacacagtttaaaaccacaaaactaagccttggaaatcacatgctgtcatttctgcgatcggtcataaccagtcctgattccatgttagaggagactacataaggacacaggtaccagaagaaacttctaagtgctgctgtatttcaccaagctccagttgatatccaaattggacaactcctgtgtgccaggacaaggtgctaggcttgctttaaaatgatacatacaaataagataaagcaaagagacttggctttaacattcagtaaaacaataatgtgtttnttaattttaaacatttgcacgtat

SEQ ID NO: 251184 - DNA, 606 bp, Homo sapiens
tgctcctccttcaccttccgccatgattgtgaggcttccccagccatgtggaaacatattcgcagagcacccactaggtgccagtaaatgtatgagaagtcctgtggaataagactgaagttgtccttgccttcaagcaacttgcaattgcctaagaacacagtttaaaaccacaaaactaagccttggaaatcacatgctgtcatttctgcgatcggtcataaccagtcctgattccatgttagaggagactacataaggacacaggtaccagaaggagactaaccagcatgggctacatcaaaaaggctgccatctactttctgctgggtaggggcaccagagagacttgtcagaaactagaaggaaggtagagtgcgaaatctgagtgttaattccctggcttcatcaaaggacactggtcttcacaaggaaacagactacatgattctccttttgggcttcagtaaaaaccccctcctttcatcccttagtctagggatggtaagaggtcagcagctaagaattctaggttctttgtggttttcccgtatacatgtctttgatgatagcccctttggaaataaattctcctagacttttttt

SEQ ID NO: 251185 - DNA, 343 bp, Homo sapiens
cctcccaccccgcctttccccttcgagtgagtcatcgaacccgtgcttctagacgtgtttggagcagagcacctggaaatcatgatgttctctagataacagggaatattgataaattcccttgtggcgatgtcactgtcgtccatacagaagacaggaaagtgtaacgcctgcaatcaagcctggaaccaggcttgattgcaggccacctactcatgcatctaattggaagcgccaccctagcaatatcaaccactaaccttccctctacacttatcatcttcacaattctaattctactgactatcctagaaatcgctgtcgcctgcaatcaagcctggaa

SEQ ID NO: 251186 - DNA, 618 bp, Homo sapiens
aatgctttattaatgcattaaataataaattctagcagcagatataagtaccagaattttgaagtagtgatgagcataaatatttcaaagtatctgcaacaactataatatgatatgaaaagatgtaagatttctcttgttaatggagtcacctaatactacctaatttagtatactagctagtatactacccaccactacctaatatactaccctgtgtaattactaatatacccagtactgcctaatactaccttgttaattgcctgcatttgagagtgaaggaaacaccaaatttcaggctgtgtttaataataatagagttgtgtctttttctcatttaaattcatagacccctgattctatccctggacccattcttgtagatctcaggtttaaaattcctgtgaaaaaaatgtaccgtttaaatgaaaacaaaattcaatgaaataagcatgatacataatagataatacataaagtattatgaaagcgcagggaagctttacaagtcgaaatacctcttgagagtcttactgcgcatcacacaggtggacaacaggaaagtggcattctaggaagacagaaaaacctcttgccctcctgtccaactccaaa

SEQ ID NO: 251187 - DNA, 448 bp, Homo sapiens
aatttgccaattatacttcttactgtaaaatgataaattagcattctcacataactttgggagactggttcacctatcagagatctgtaggccttatcaagcagctaatacaagtcagatttttggactcatgaaaatggcttggactctggaatcagctgatgcagtactttaccctaaaatggcctgagcagcaatttctctctttaacatactaaattaaactagccagatcaatgcacaattagatggaatatggagccaagctattaactatctagatgaagccagaaacaaatacctaaatgaattcttacctctaaagcttggataactgaaaattagtacaatcactacggtgtctaagagacacaaaattatatatttactattcacctaaaatgttttaaaacaatatgtatttttatgtacaaataaaaggtctaat

SEQ ID NO: 251188 - DNA, 562 bp, Homo sapiens
gagaagcttgataaatgttcgttctctggatgttgtttcaggcctaagtagtttagtgtgatgttgcagcagtcagtttcacagttaattaatagtcttttcaaggcagctgctttggaatgtatagtggaacaccagtagtctttactttcctctgaaagtctgtcattacacttacaaatatttattgcccttcctgagggtcctttggcctagaagattgttttcatggaatctaatctatgtcaaattcttttaatttactacactttattaatagattgaaagccatttttctgggacaacaaagttgttattctcaaaagttggtaaaattttttaagaagatataattcatactacaataacagcatcttcatactacatagttctagcaactttgagacactctcaaaaagtttgagaagttttaactggagattaacaataacaaacaccttgtattagttttagcaacccaaagttgttctgtttccagaaggacatcaaagtgagtgtagttgcaatctgtcaaataaaagattggtatctactatgtatg

SEQ ID NO: 251189 - DNA, 539 bp, Homo sapiens
ttagcctccaagtgcttgcagctcactgatttcatcctcaagtttccgcacagtgcccatcagaagtatgtccgacaatgcctggcagatcgcagatcatcaatacaaaatggctcagccacaccatgggccaagaagaaaaaagctcatagaataaggatataaagaaaatatctttgtgcagctgtacagtgtatttgcgttttaagctaagtgttattacaagagtcaaaaagtgtttaagttgataaagtaaaaaagttaaactaaggttaatttattcttgaagaaagaagaatatttctttataaacctagtgttgcctaagtgtacagcgtcatggttactcaccactcactgacgcacccagagcagctgccagtcctgcaagctccatgcctgggaaatgccctatacagctatgccatcttttatcttgttttttgttttttttttcccaagacagaattttgatcttgttgcccaggctggagtgcaacggtgcgatctcggctcaccgcatcctctgcctcctgggt

SEQ ID NO: 251190 - DNA, 527 bp, Homo sapiens
acagagtctcactatgtcacccaggctggagtgcagcagcgcattcttggctcactgcagcctctgattcctgggttcaggcgattctcctgcctcagcctcccaagtagctgggaccacaggtgtccgccaccacgcccagctggtttttgtatttttagtagaggcggggttttgctgtattggccaggctggtcttgaactcctgacattgtgatccgcctgccttggcctcccaaagtgctgggattataggcgtgagccgctgcgcccggccttatgaatcattaaatgagactggttcaaataaaagtcacagtaatggccagaagttttctgaaaatgaaactaaaaacaagcctgatatgcctttaccagtaagaaacctgtggatttgcgctggacatggtggctcatgcctgtaactgcagcactctgggaggccaaggtaggaggatagcttggagccaggggttcgagaccagctggggcaacaaagctagaccccttctctacaaaaaatgaaa

SEQ ID NO: 251191 - DNA, 415 bp, Homo sapiens
gtattttagcacagacagggtttcaccaatttgagcccaggctggagtgcagtggtgtggtctcggctcgctgcagcctgcacctcctgggttcagttcaagccattctcctgccttggcctcccaaagtgctgggattataggcgtgagccgctgcgcccggccttatgaatcattaaatgagactggttcaaataaaagtcacagtaatggccagaagttttctgaaaatgaaactaaaaacaagcctgatatgcctttaccagtaagaaacctgtggatttgcgctggacatggtggctcatgcctgtaactgcagcactctgggaggccaaggtaggaggatagcttggagccaggggttcgagaccagctggggcaacaaagctagaccccttctctacaaaaaatgaaa

SEQ ID NO: 251192 - DNA, 372 bp, Homo sapiens
agacagtaaagactgcttgttgtaagaatgatttcggttgattcctatgaatgatatactagtatctgatttccagggtatggtggggagtaccagatttatccaaagtgcgaaaaactggcaaaatagggattaaaatcaggcctctgattgcaagcctgaatttgttcaacttgaaggcagcccatcttctcagaactttcattttcccatagggagattaaggtattaaatatctcatagtgaagatgtatcccagttcttgatgtgctgaaagtctgagcgttcaggagctccagcgggatcaggtccttaaagcagcatggcttagatggccatgggcaagatggtgaacctcatgtgggaagagtg

SEQ ID NO: 251193 - DNA, 864 bp, Homo sapiens
catactggccaggctggtctcaaactcctgacctgaggtgatctgcccgcctcagcctcccaaagtgctaggattataggcgtgagccactgcacctggccagaaggtattgatattaataggtcatgacagaaagctgcagggaacaaaactgaaaggaggggacccactggccaaagatgaagcatctccagcatgaataatgatggacaatgcctgagttcataatgacactaaagagagtcactgatcaacactgaagtcgccggagcgccaaagaatcgattatttatctggtacttcccacccaactgctgatgaagaaaaattcttctttacaagaattatcaactaatgtatgagcagggagagaattagaaaagcataatttgcaacccttaacgaatttgggcaatcaccaattgatagtaaaatgattacacaaagcactgatagggaactttacaagggaagacccagacctgagcctaatgatcaatctcaaaatcagttcaaagcagaacaaccagctatcacagcacagactcagcaccacctacagggtcttcttgacgtcaagaagcatcctgagttctaactatactacaaggctagagtaaccacaacagcattggtactggtaccaaaacagatatatagtccaatggagcaaaacagaggcctcagaaataacaccacacatctacaaccatatgatttttgacaaacctgacacaaacaagtaatggggaaaagatcccctatttaataaacggtgttgggaaaactggctagccatatgcagaaaactgaaactggactccttccttaaaccttacacaaaaatcaactcaggatgcttct

SEQ ID NO: 251194 - DNA, 285 bp, Homo sapiens
gcagtgggagggaggagtagccacctgtggactgtggctccctgctggagacgggtgtgcgtctcgcttcgcccctgtgaaggttatgcctgtcgccctgtctatcatgagtctgtctctgcagcttgtggcttctgacccgctgcgaccatctgcctgtgctcagtccccacccaggaagtgaactgattctgtcactttcttctaaagaccacagatctgcctggtttatacaacgaagctcgtctgaattggagtcctcaaatttgtgaatttaagttttaa

SEQ ID NO: 251195 - DNA, 257 bp, Homo sapiens
atatatagtgttggaggagtgtaacctcattttttacctgtagatacccatttgtttcagcatcattagttgaaaaatctattccttccctattgaattgtttcggtaccatgttgaaaataaatacagtgtaaataagagggtccatatctggattctcagttccattccattgttctatttgtctatccttatgccggtgtcacactcgattcattactgtagctttgtagtaaattttgaaaacaaagtgtgaa

SEQ ID NO: 251196 - DNA, 298 bp, Homo sapiens
aaaaaggaaagtcaacaaaatttatgtaaggccagtacaccaaaaactacaaaaaattgctttgagaaattatgaaagaactaaattagtggggagataaaccttgtcatggatcagaagagttgttatgtttaaagagtcagttcttcgtaaattgatctccagatccaatgcaattctaataaaaattccaagcggcattttggtagaaattttcaagctgattctaccatttatatggtaatgtcaatgatcaagaataataaaatagcaatattataaaagaataatggtgaat

SEQ ID NO: 251197 - DNA, 2317 bp, Homo sapiens
ccccggcgcgctaggctcacaaaggcaggcacagactgcaaccctgctcagtgctccgggcgcttcaggctggcttgggtcctgctgctccaaccccaagggccctggagcgctccctgatacctccatcactcaccatggccagccagttctgcctccctgaatccccatgtctctcgcccctgaaacccttgaagccacatttcggagacatccaagagggcatctacgtggcgatccagcgcagtgacaagcggatccacctcgctgtggtcacggagatcaacagagaaaactattgggtcacggtagagtgggtggagaaagcagtcaaaaaaggcaagaagattgacctggagaccatactcctgctgaatccagctctggactctgctgaacaccccatgccgcccccgcccttatcccccttggctctggcgccctcttcggccatcagggaccagcgtaccgtcacgaaatgggttgcgatgatcccccagaaaaaccaaacagcctcaggggacagcctggatgtgagggtccccagcaaaccttgtctgatgaagcagaaaaagtctccctgcctctgggaaatccagaaactgcaggagcagcgggaaaagcgcaggcggctgcagcaggagatccgagctagacgcgccctcgatgtcaataccagaaaccccaactacgaaatcatgcacatgatcgaagagtatcgcaggcacctggacagcagcaagatctcagtcctggagcccccgcaagaacatcgcatctgcgtctgcgtgaggaagcggcctctcaaccagcgagagacaaccttgaaggacctggatatcatcaccgtcccctcggacaatgtggttatggtgcatgagtccaagcaaaaggtggacctcactcgctacctgcagaaccagaccttctgcttcgaccatgccttcgatgacaaagcctccaacgagttggtgtaccagttcaccgcccagccactggtggagtccatcttccgcaagggcatggccacctgctttgcctatgggcagacgagaagtgggaagacgtacaccgtgggtggagacttttcaggaacggcccaagattgttctaagggcatttatgctctggtggcacaggatgtctttctcctgctcagaaactccacatatgagaagctggacctcaaagtctatgggacattttttgagatttatgggggcaaggtgtatgatttgttgaactggaagaagaagctgcaagtccttgaggatggcaatcagcaaatccaagtggtcgggctgcaggagaaagaggtgtgttgtgtggaggaagtgctgaacctggtggaaatagggaatagctgtcggacttccaggcaaacatctgtcaacgctcactcatccaggagccatgcagtgttccagatcatcctgaagtcaggagggataatgcatggcaagttttccctcgttgatttagctgggaatgaaagaggagcagatacaaccaaggccagccggaaaaggcagctggaaggggcagagattaacaagagtcttctagccctcaaagaatgtattctggctttgggtcagaacaagcctcacaccccattcagagccagcaaactcgcactggtgctccgagactcctttataggccagaactcctccacttgcatgattgctaccatctctccggggatgacctcttgtgaaaacactctcaacactttaagatatgcaaacagagtaaaaaaattaaatgtagatgtaaggccctaccatcgtggccactatccgattggacatgaggcaccaaggatgttaaaaagtcacatcggaaattcagaaatgtcccttcagagggatgaatttattaaaataccttatgtacagagtgaggagcagaaagagattgaagaggttgaaacattacccactctgttagggaaggataccacaatttcagggaagggatctagccaatggctggaaaacatccaggagagagctggtggagtacaccatgatattgatttttgcattgcccggtctttgtccattttggagcagaaaattgatgctctgaccgagatccaaaagaaactgaaattattactagctgacctccacgtgaagagcaaggtagagtgaagccaatggcgagagatcaggtccgaaatgctgcattgctgcagtttccaccactcttatacaggaaaactgtccaaattatctaaagatcctcctgagaagcttaaaacatcttaaaatacactgatgggaaacatgctctttcttctgcctctgtt

SEQ ID NO: 251198 - DNA, 521 bp, Homo sapiens
aaggctgccagaggtccttcagcagctcccgtggctgacagtgactctacgtttcctagatttcagggaccacctggaggggagcggaccagagagacttcctcggaataggctgtggctcttcacaaggtgtcttctatgctttatttgggagccattgccttgagcgttatttcccagatggttttctaatgtcaccaactgaagaaaagacccatgcacacaggacacagcatgatctgatgctcacagcgttttccttcctctctgaaaacggactcagcgattctggcaagcggtacttactctgagatcacccgtttgctaaggaaaaatcttagtactgagaaaggtgacactttcctccctgcttttgctggagagacactttggttatgagttatttctagcataacacagtttatttcagaagtccagctcaatagcagaccaaggcatgaacaacacatgaaaatttatgttgggaaaatatatattgtatgtctgcttgaaaagtgggt

SEQ ID NO: 251199 - DNA, 379 bp, Homo sapiens
tcatcattgctttcattctcatcatcctcatcatcttcctcgtccttttcatctacaccttgccaggagccatcagccgaaggatcgttgtgggctcatagaggatcatggaggacccagatcctcgccatatactaatcctctcttccttatctgggagcatctaagaacatgtcccatgcatggcactgtgctgagtgctaaggggacagatcaacccttcttggaagagatggaaaagaaacatttcctccctgctccaacccctgcctccaagtttcaaacttgtaaggcatgttttatcccttgggcagcatgaaataaggcactttcacctcatggtaatcaacaatgacctcaaattgacttagatcaatgt

SEQ ID NO: 251200 - DNA, 537 bp, Homo sapiens
agagattaagctgaaggaagattttgtggtaaggggtgatattgtggggttgttagaagaaacatttgtcatttagaattattggtgatggcctgggtacagttttgtatgaattgaaaaactaaatggaataagagaaggagaaaaacaggtataaaatgtctaagaattgggacgactcaggacatctgattagagagtgcctaaggagattcagcatagtcctgccagcaaagattatttgtttacttcaggagttaagagtggcagtttggggatagcacgaggagatatcagctgtgatggcttggagaaacagtgtaaaccggcagtgtgaacaagagcagggcacgtatgagtagttgagaacggagaataggagtatgactagacagaagatagtagggatgacaagttttttgggggcacagtctaagttggtccggtgtctggaatgagactggggcctaataaaaaggattgtccatacaggagctcaaataggctgtaccctgcagcattctgagaagcgaaaga

SEQ ID NO: 251201 - DNA, 263 bp, Homo sapiens
cggccacgtggcgtcagcaggacggcaggtgcattcttgaggcgggcacacacctgtgttctccaggacaagctaggaggtcgccggtctgcaggtcgtggaagcagagcacgtggccgatggacacaggaaggaaggcctcgcctcgagaggggagccgtggagctgtgagcaggggccacacagggcacatttgacaggggccacacagggcacgtttgacaggggcactggctttggacgacggcctggatgcggatgtg

SEQ ID NO: 251202 - DNA, 616 bp, Homo sapiens
ttaccatctgtagatatgaaggatatctgaagaacaactggattcatttcatattaacagtgaagaaatgagatgggcccctttcctttgaagggtatcttgctaggaatacagtggtgctttagtgtctaggtagcatttataagctggcaaagctgatggcagaaataaagcctcagctaaggcccagggagagggaagcagatgagatgtcagtgatgggaagaaaagggtctgtttcaattggcatgcttccaaacacccctcaaatgatccacacgaaacaaatcagaacaatttgttgagcttaccagacggttactgcgttagcactttgaattttcatagtgttttacagaattttagttatccctgtcactctgtagaggtggttggcatcattatcacagaatcagaaatgcacagaggatgaatctgcctcccaggggcattcgttaccaagtgtttatctttcaccgcacatactgactcttctgttatcacacagccgattgggctgttatctcgggcctctccaaaaataaatgtgtcccttttagaaaagccctgctttctttgtctttcttctgtctgtatggcctatttgtgcagaatg

SEQ ID NO: 251203 - DNA, 564 bp, Homo sapiens
ttaccatctgtagatatgaaggatatctgaagaacaactggattcatttcatattaacagtgaagaaatgagatgggcccctttcctttgaagggtatcttgctaggaatacagtggtgctttagtgtctaggtagcatttataagctggcaaagctgatggcagaaataaagcctcagctaaggcccagggagagggaagcagatgagatgtcagtgatgggaagaaaagggtctgtttcaattggcatgcttccaaacacccctcaaatgatccacacgaaacaaatcagaacaatttgttgagcttaccagacggttactgcgttagcactttgaattttcatagtgttttacagaattttagttatccctgtcactctgtagaggtggttggcatcattatcacagaatcagaaatgcacagaggatgaatctgcctcccaggggcattcgttaccaagtgtttatctttctcccgtccaccacgcctgatatgggaatgctcaggccatgggagtgctatatcgggccttttcataaatacctgtgtaccatctacaaa

SEQ ID NO: 251204 - DNA, 616 bp, Homo sapiens
gagaggtcaccttccattcctattccctcccttactcatgctttatgatctcgaacaagtcccttcccctctccgaacctctgagtttcctttccctacagcaaggaagacattagaggagaaggtccttaagtggctccctgcttagtgttgacctgaccttattttgggcttagagccagaaggacacactccctccccattgggcagatagggaaactgaggttggggtaagaaatggaatatggttctgaaggaagaaaaaagaagtctattggcccatgaaatacccagaagttgggagaaggaagaagctctcataggaaccagacctggacaaccctttgagcaccagcttggacagcttctcagcttccctctcttctccagccctgacccaggctggagtggacagatggaagtgcagtctcacttgaactgtcgcccttttccaggcaggcagctcttccccaacccatcagtgaggagggggcgtggctctctagattttaaggcttggccagcctagggctcccgtatctcaccccaccccaagccccacccagtccagctatgcagaggaataaaatgctttattgattaaatgattattcag

SEQ ID NO: 251205 - DNA, 380 bp, Homo sapiens
taagttatttaatttcaaatccaactcagaaagcacagagagctgcttatgctcattgctcaagtgacagcctttttgacagacccacataggtgcctctctagtcaaagacggaaaagacagtcactataatacttcatcaaacaccttctagacatgaggcaaattttttcttcatgaaatctcggaggaagcattggaatatctcccagaacaacttataaaatatccagtgaaattataataactggaggctgcaaaaactaatcacttattttgatgattacataatgtttttatttttaaacgtagattacaaaagccaaaacttaattttttctgcacacttatttgagctattaaaacttcttataaatgcc

SEQ ID NO: 251206 - DNA, 411 bp, Homo sapiens
cctataaaacacagaattaatggaaagtgagtatcttggatttcagatctgaagagatttttaccattagtggtttgattttaatctgcttggttaactatcatatttttcatacacttctctgggtttaaaatgtcttgaggtattttgccactggcttcatgctggagtaatgggtaacatatctttggtatggttcccttagattcacttacctagtcagacccagaagaacttcttttactagcttgcttcctaaatgccttttttcctttccttttggtctccaaatggcctggtcagcttttggtaatattcttcctcatcttccacctagcttgagaaggatgttctccatatagagttaagcgagtgcctaatcccaccttttgtaagattttgttccctcat

SEQ ID NO: 251207 - DNA, 364 bp, Homo sapiens
ttccttatgatttttaaattggtttaaaaaatttaacatacataaagaaataatatgaagaataaaatactaatttttattttttatatatagagtcctaaatttggtaagaaatcactaatccattaagtagaacagtaaaatgaaacaacaaatcataaggaaaaattaacaatggccagtacatatagtgaaaactttcagctattcaaacatttaaagaaacagaaattaggtggctcatgcttataatcgcagcgctttgagaggtcgtggcgggaagatatcttgaggccaggagtttgagatcaggctgggggcaaggtagtgagacccttgtctctacccaaaaaataaaaataaa

SEQ ID NO: 251208 - DNA, 465 bp, Homo sapiens
gctcttccttctcacccaggacttcacattcacccttgcaatccatgtggggacactgttggataggaggcgtggtcccagcgtggtctccctgtctgggcctctgcctatgccaaatgtttgccttacgctgcacactcaagaggttccatgtatacagatgggaattccagagctacagaaaaggcagcaagcaccatgatttaagctaaccagtgtggattcacaccttcctctctctctatcagtggcagaactaccagctagagtaagaagtggttgatccaggacctaaacattctggaaactcttgcccacttctgggagaaatgacccaatccatagtactaagcacaccttaactttcgtaggacgcaggcaagttgtcataccgtgtgcctaaatatagaaaaatgatccactggactaataaagtgttaaataaaatatgtcctgactgtctac

SEQ ID NO: 251209 - DNA, 516 bp, Homo sapiens
ctagttacctaccttacgatttgctgtctaatacatagaatacatcattacagaatcaatctttctcaaattcattccaatactatcaagctcctctttagaaaaatttaataacttcccattgtccttagaattaagttgaattttcctgccttgctaagcaagacttcctgcagccttgcttcaacacaaattgaatgtttttttaaaaaaagatattaattttagttttttgtttatcctagatttattcatatacgatacagtgataatgtcttgtaaaaattgttaaggagagaaaatattctgatgtacatgaaaatgttaagaaatgattattctgtttgtgaattcattgactcactggtctgttgatatcaaaacaatttctcctattgacatgagagcaaagttgcaggatagttttcatattcttaagtgtaatctcccaaaacaaaaatcacagcactgctgtgccaatagaacaataaaggaaatattgtttcataagagttg

SEQ ID NO: 251210 - DNA, 413 bp, Homo sapiens
tatccctgcctgacatacatgcagtaggtgttttgtagaggaaagtgttcactgaaagaagaagaatttaaacaacaacagaagcagttcaaaactagaacctggagatagtactcagaaagcagagcaccttcttacgtcaagaatgtgttcaggcttggagcctggacagggatctgtgctacccactctgagtgcccactggcctccgctgacacacaggcctgcctcgcccagtggactggatcctcgtcacgtcgcatcccgagttcccagcagagtgcctgcctcagcctgagactcagtacatatttgccaccatagccctgatgccagaagaaattagtttctctcttcttgatctgttcatgttagattaaaaatcaagactttctagccctcaaagatcctcc

SEQ ID NO: 251211 - DNA, 612 bp, Homo sapiens
agaacctgtcggccgccgagttctgcagctcgatggcattgcgaggccgaaagcagaatttccaggacctctgagagttgaagtcgttattcggggggaggggattctgtgagcaaaatgtgctgctgttagcattcacggtcacctggtgatgaagagtgctggggatttggccacagtaatggccctaacccagaaccctctttgtcctggagcaacatagcagctctagtggcagtggcgtcaaacatcagattggctcatattctagccgataccctcttagtgtgtgccagtcttagtgttgactgatacaccctaagtgggactgtggttgctcatgaggagggaaaccgaggccaggtgataggggtggaaggaaacacgctttccctctaaatgctttgggacctgtgaatatcataccatgtgcatttcttattcactctttaaaatcaaatgtttttaatatcacttcttcaagaaagtgttcactgactcccccgagagtaaataagatagattaggtttcccgtcacgattccattgcagtctgtacttttaccgcgagagctcttcgcagaattatgaataaacagtaatgagtgtgca

SEQ ID NO: 251212 - DNA, 422 bp, Homo sapiens
gactgctgttaaccatatttgcttataaaacatataacaaattaattagggttgtaaaattttcttaaatatgaggagttaaattagtaataaaaaatacaaaatacattttggttatggaggtattaggtacctcttacttcctctctagcaagttgggttggtctgaggcaccatatctcccagctgtctaaacgcaggtcagtagctgggtctgcgcgtggcgcctgtaatctcagctactcggcaggctgagccaggcaaattgcctgaacctgcgcgacagcggttccagtgagccgcatccacgccactgcactcccgcctcagcgacacagcaagactacgtcaacaaagcaaggaaacgcaacaacggaacgacaaggacacgacagcaagacaagaaaagcacggcagcaagg

SEQ ID NO: 251213 - DNA, 1389 bp, Homo sapiens
ggcgaaagtgcttcccttaagcttctgaaggttggctgcagttccggctacctgtgtagtccgagtttccacagccaggtactactccgccagtgaccctggacagtaacaaaacatataaagcccgagcccaaaccccgccaccatcataggtctgtagttactgtggaatcaataagccatggcatctaagaaatttgctgttaaatgtgggaattttgctgtcctcgtggatcttcatatcttgccacaaggttcaaacaaagatacaagctggttttctgaacagaagaaagaggaagtctgtttactgttaaaagaaaccattgattcaagagttcaggagtacttggaagttcgcaaacagcacaggccatcaaatgcagaattcacaagatccaatcccttgtccttaaaaggttatggctttcaaatcacagcctatttcctcaagagagggatacgccttcgctgcatcaggagcacacagaatgctgaactctgtgtattccctgacagatttgtggtttgtgtcagtcagcttgcattcagtcgtgatcttttagcaagtcagaatgaagatttgacagaaagagttctccatggagtgtctgattactttgctgagtgtgcagagagttcacttcctcccagtgcaaagctccggagaaatgctctgaaagaaattgtgaaaagaactgaaacaaaaagcagtgtcacgagcaaatcgcagaccagaagagacactgtggaaacatctagtgactcagtgattgcagagatagcaaggaggaggaatgatggtcaggcttcctccagtcccccatcagaatccatgggacaagcaaaggattccataaaggcagctgagagccactgggggcttcctgttcaaaagctggaaaaagttaatcagacccagccagaagacactagtggccagcaaaaacctcatcctggggagcggttaaagacagggcttctaagcaggagccccgtctgtagctgtgagtcagcatcaccatgtccaaaacaaagtccacgagtggccaaaacccaacagaaacgcaggaactgcagctctgcggaagacttcgaccaccacgggagagtttctcttggaagtgatcgattagtcccgagagaaataatagtggaaaaaagcaaagctgtcagggttttgccagcttcagagttgtcagatccagggttacttttgaaacaagatttggcaaaaaccacgtctaaggaagagttgcatgttttggaaagtctctcctccagacatcttatgaaaaataacccagggcaggcacagcaaaccggcttagccacaaacactgaaagattatctacaattcagaacagcccaaccaagaaaaaaaaaaa

SEQ ID NO: 251214 - DNA, 210 bp, Homo sapiens
ggcgaaagtgcttcccttaagcttctgaaggttggctgcagttccggctacctgtgtagtccgagtttccacagccaggtactactccgccagtgaccctggacagtaacaaaacatataaagcccgagcccaaaccccgccaccatcatagagaggatcttgctgtgttatacaggctgctcttgaattcctggtctcaagcaatcctg

SEQ ID NO: 251215 - DNA, 1049 bp, Homo sapiens
ggcgaaagtgcttcccttaagcttctgaaggttggctgcagttccggctacctgtgtagtccgagtttccacagccaggtactactccgccagtgaccctggacagtaacaaaacatataaagcccgagcccaaaccccgccaccatcataggtctgtagttactgtggaatcaataagccatggcatctaagaaatttgctgttaaatgtgggaattttgctgtcctcgtggatcttcatatcttgccacaaggttcaaacaaagatacaagctggttttctgaacagaagaaagaggaagtctgtttactgttaaaagaaaccattgattcaagagttcaggagtacttggaagttcgcaaacagcacaggccatcaaatgcagaattcacaagatccaatcccttgtccttaaaaggttatggctttcaaatcacagcctatttcctcaagagagggatacgccttcgctgcatcaggagcacacagaatgctgaactctgtgtattccctgacagatttgtggtttgtgtcagtcagcttgcattcagtcgtgatcttttagcaagtcagaatgaagatttggtgagtatgaaaaaattctataaacaaataagtctgcttaaatgctgagttactgtaaaaaatagaaaacaagaattgtctgctgttgtcattcagctgatgagcacccaacgcatgttttaagggaacaagaagccctacctgttttacgtggtaatatcaactaattcgtgtattgttcttcttttcctcaagaccattttaatcagcagtaccttttccatatcaactgtaaatgagaaagcaacacatcacaaaagctgtgatggtgcttatgatagtgtttaaatgaaataaagaaaagtctttaagtgaaatgaagcaaaatccacatgtttccactggaggctttcattggggtcagtggcttttaaattttattccatggtgaatcaccgacattttcatgagaaccagtacttttccccagtgtattatttcatagctgatagggttcattttc

SEQ ID NO: 251216 - DNA, 1033 bp, Homo sapiens
ggcgaaagtgcttcccttaagcttctgaaggttggctgcagttccggctacctgtgtagtccgagtttccacagccaggtactactccgccagtgaccctggacagtaacaaaacatataaagcccgagcccaaaccccgccaccatcataggtctgtagttactgtggaatcaataagccatggcatctaagaaatttgctgttaaatgtgggaattttgctgtcctcgtggatcttcatatcttgccacaaggttcaaacaaagatacaagctggttttctgaacagaagaaagaggaagtctgtttactgttaaaagaaaccattgattcaagagttcaggagtacttggaagttcgcaaacagcacaggccatcaaatgcagaattcacaagatccaatcccttgtccttaaaaggttatggctttcaaatcacagcctatttcctcaagagagggatacgccttcgctgcatcaggagcacacagaatgctgaactctgtgtattccctgacagatttgtggtttgtgtcagtcagcttgcattcagtcgtgatcttttagcaagtcagaatgaagatttggataaccagagcaccattgcctgcttccttcttcctgaaggaaggggaaaatccacccttcacaattaaagtcctggcactgagccacatccagaggaggctgatctatgccctcccaataccaggggtgtcccagacagaagcatctggcagctacccaaggaattctggggtcctgcagaatccaagtttacaaaccaccagaacaaggttttgcttcaggatagtgtttgactccactgctgcgaaatgactgtctcctggctagtaggatctagatttctccctccctttgaccccaccttgtggaaacccagctgtctactggcagacattggtgagaaagcggagctacgctagggcagggagatgtcatggaaacctcaactcttcgctgtccgggtccttcaggccacctccccaatgagccaaaacagtgttggccct

SEQ ID NO: 251217 - DNA, 979 bp, Homo sapiens
ggcgaaagtgcttcccttaagcttctgaaggttggctgcagttccggctacctgtgtagtccgagtttccacagccaggtactactccgccagtgaccctggacagtaacaaaacatataaagcccgagcccaaaccccgccaccatcataggtctgtagttactgtggaatcaataagccatggcatctaagaaatttgctgttaaatgtgggaattttgctgtcctcgtggatcttcatatcttgccacaaggttcaaacaaagatacaagctggttttctgaacagaagaaagaggaagtctgtttactgttaaaagaaaccattgattcaagagttcaggagtacttggaagttcgcaaacagcacaggccatcaaatgcagaattcacaagatccaatcccttgtccttaaaaggttatggctttcaaatcacagcctatttcctcaagagagggatacgccttcgctgcatcaggagcacacagaatgctgaactctgtgtattccctgacagatttgtggtttgtgtcagtcagcttgcattcagtcgtgatcttttagcaagtcagaatgaagatttggataaccagagcaccattgcctgcttccttcttcctgaaggaaggggtgatctatgccctcccaataccaggggtgtcccagacagaagcatctggcagctacccaaggaattctggggtcctgcagaatccaagtttacaaaccaccagaacaaggttttgcttcaggatagtgtttgactccactgctgcgaaatgactgtctcctggctagtaggatctagatttctccctccctttgaccccaccttgtggaaacccagctgtctactggcagacattggtgagaaagcggagctacgctagggcagggagatgtcatggaaacctcaactcttcgctgtccgggtccttcaggccacctccccaatgagccaaaacagtgttggccct

SEQ ID NO: 251218 - DNA, 677 bp, Homo sapiens
ctaattgccattgagaaaaatatgcctaggccagaagattggtgatggtgggaatagcagggacatagtttagacaaggtcattgagcaagacgtttctgagaacttgaccactggttatctgagaagagacctgaatcgtgtgaggagtgagtcatgtgaatccctggggagcaggtacatgtgggagtcagagcatgggtaggtggcagaaatagggcagagcactgacaagaggctggtgtgagtggagacaagtgagctgggctgagaggagtgggatgagcccagagttgacagaggggccctgtgttgaggggcttgtaggaaatggtgagacattggggtttcattgcactaagaggggaagaagctagagtggctttgggatgtggtggtgatgatgtgctctaattcccgtttgaaaggtttactctacctgttgtgtgggtgatggacagcggcgtgaatgtctcttcatgtccattacccatttttgaatggcgttgtttttttaatggatgagttgtagttttttatgtattttgaatattaattcttcatcagatgtatgattggcaaatagctcctcccattctgtgcattttctttccactcttttaataatgtcacttgttgcaaaaaagtttttaaatctgataaagtctaatttatcat

SEQ ID NO: 251219 - DNA, 383 bp, Homo sapiens
atgaaataaaccaaaataacatgaaagtaaaaaatgcatggttcatctcatgagactagagacagctgatatccaagccacaatatatttggaagagaggccaaaaccagagaagaaaaaataaagtcaagagaaaacagagacaggaggtctgttggtaaaaatctcagaattaatcagcaatgtacatttctcctaggtaaaagacatggtattagtcaaggttctccagagaaagagaaccaataggtgatgtgtatatatattatatatacatatatatatatattatatatatataatatatatacacacactatatattttaatatattatttataatctattgtttctgattatatatacatacacaaacacatat

SEQ ID NO: 251220 - DNA, 389 bp, Homo sapiens
agttggggcatcagcccctacaggtgtgggtccttcttcaggactgtgtggaacttttccttttgaagaactttcctggggatgaccactctgcttggagtctggggtggagcctggtgtgagggagccagcgtagggtttgggtgcctgccccaccctcagaagcaggagcccagcagcccttggactgaccggtgctgttctggggctcccactggctccttccactgtggagcactcccgtgaacactgctttggtttgagtaccagtacaagtgttgggtgtatgttcctgaccttgaggcattcttgattgtgcagttacctagggtatgcttgtgtctgacatgatcattttttttttttaataaaaaatggcatggaaggag

SEQ ID NO: 251221 - DNA, 895 bp, Homo sapiens
  misc_feature (892)..(892): n is a, c, g, or t
atgtcaatttcattcactgtcaaatttaacactcaaaaactgacacattatatacactaaaacatactttttttatatttataagttaaatataaattttgcatcatttgtttattgtctgcatttcccacatgattagaagttcactgacggcaggctctatgtcctatactttataaaatgataagcaactagtaggtattcaataataatttttaaatgaatgaatatgttcatataaagtacatatcagggctggacgcagtggctcacgcctgtaatcctagcactttgggaggccaaggtgggtggatcacctgaggtcaggtattcaagaccagcctggccaacatagtgaaaccctttctcttctaaaaatacaaaaattagctaggcgtggtggtggatgctgtaatcccagctacttggaaggctgagggaggagaattgcttgaacccgggaggtagaggttgcggtgagccaaaatcatgccactgaactccagcctgggcgacagagtgagactctgcctcaaaaaataaataaataaataaataatttaaaaagtacatatcagtacaattctataacgtacatgtcctcaattccttttatactcatgcagatttatcatcatggcaataagcatgaagctgatttattgctattcaccacgagaaacaaaggggaagtagaaagacatctctgaaactagagagagttgctaagaaaatagaatttataaggaaacataacttacaaacagcataggtaaagtatctttttcttaaaatgggacgcatttacgtgcaaatgtttattattaagaaacacattattgttttactgaatgttaaagccaagtctctttgctttatcttatttgtatgnaca

SEQ ID NO: 251222 - DNA, 802 bp, Homo sapiens
gctagcttggatgggaacaatgatgatgactttggaaactgcatcttgaacaaggcaaacgtccttcagctggtccctggtcccctgaggtctccttcacctgaatcctgcttctctgccttttcatgaaagaatattatatgagcaagaaataaacttctattgaattagcttctaatttgaggcccatagatctccaaggggtctgtagattgaattcaaggggtctgtgaacttggaatgggaaaaatatgatttttactaatgtctttcttacctcaatttagcattttcttttgttatgagtataaacaacaaaccagtcgcattagcagtacctatgaaaagtatttttgtatcacattacaattgtaacaaatatctgaaatttaattcatactcatcaagattttaaaaatatagtagtaatgaacctgctggtatattttatttgatgttttaataaataagcatctttattattatatcataaattattttaatactttagcactgcatttcaatgtaattagtttcttttgaaactttaaaaattttctttcatgtatttaaaaacactattttgatgatgtgtacacatgggcatagagagtaaaataataaaggttggagactcagaaaagtgggagagtggcagggggactatgggcgacaaatccccacgtccatgctacttttcggggttctctacacaaacacccgtgctttcccacggaatcgtcttcgtgcacaaatccccctggcccccctaatgcaacaggaacactgccgcccacccaac

SEQ ID NO: 251223 - DNA, 816 bp, Homo sapiens
gctagcttggatgggaacaatgatgatgactttggaaactgcatcttgaacaaggcaaacgtccttcagctggtccctggtcccctgaggtctccttcacctgaatcctgcttctctgccttttcatgaaagaatattatatgagcaagaaataaacttctattgaattagcttctaatttgaggcccatagatctccaaggggtctgtagattgaattcaaggggtctgtgaacttggaatgggaaaaatatgatttttactaatgtctttcttacctcaatttagcattttcttttgttatgagtataaacaacaaaccagtcgcattagcagtacctatgaaaagtatttttgtatcacattacaattgtaacaaatatctgaaatttaattcatactcatcaagattttaaaaatatagtagtaatgaacctgctggtatattttatttgatgttttaataaataagcatctttattattatatcataaattattttaatactttagcactgcatttcaatgtaattagtttcttttgaaactttaaaaattttctttcatgtatttaaaaacactattttgatgatgtgtacacatgggcatagagagtaaaataataaaggttggagactcagaaaagtgggagagtggcagggggatgatggatgagaaattaccaggtacaatgtatattatttgggttatattacactaaaaacccaggctttaccaccacacaatatatccatgtaacaaaactgcacttgtaccccttaaatctataaaaataaaaaatatataaaatacaaaga

SEQ ID NO: 251224 - DNA, 634 bp, Homo sapiens
cgaggtcttttcctcaaatgatccacctgcctcggcctcccaaaatgctgggattacaggcatgagtcaccatgcctggcccctgttaaactttctacctagcaatgtggttagtcttcccatcccactgtatagcagtttcaggatgatgctgcctctctaacttggagtgctgaacaggaagtaagagttggctttacggtaggcagctgccaggctagcataaattctggcataccagaaaatccctttgatccttcctaaatgcttgtcttactttgtgccaaatgactaatgatttaaagcagtggttctcaaccctgcctgtatatcagaaacacccacagaacttttaaaaattatctagagaaactgccccacctgacattttgattcagtagcctcgggtgtagtttaaaaagctccacaggggagctctttcctttcgctgctgtggccgcagccttgagtatgctcaggcttcagaagaggcttgcctctagtgtcctctgctgtggcaagaagaatatctggttagaccccaatgagaccaatgaaatcaccaatgccaactcccgtcagcagatccggaagctgatcaaagatgggctgatcatccgcaagcctgtgatgg

SEQ ID NO: 251225 - DNA, 470 bp, Homo sapiens
ggtggatctgacctagcagtgtgtgtgttcacggcttcccagaggacacagatgagagtcacgttcgggaacattgcagtaaatagacacaaatgcgggatggaggcagtgcgtggtggggaggaaatgcagagacctcgtggaggaaatgagaggcagctcctctgacccaggaagccagcagaggctgtttccatagggacagagcaccgcagtgtgagagaggattgggctgggactgagaagggcgttcctgctgtggtgaggcagccctcagggtctctcctggcacacagctgccagcgtgatgggggatcccttcagaatagcagcaaaacccacgatactgaggagtaactcaaaccaaacttgtgggtctcacagagaggatatcgtcttgcccatgtaaagattccttttagatggtttctggtgtttactaatgttgttaataggtgtatttttctacc

SEQ ID NO: 251226 - DNA, 529 bp, Homo sapiens
gtgtttgcattagatttcgcattggaagaagcggcgatcctggcggccaagccccccgggtggaagcgcggggcaccaagtggcgctccggcggggtgacactgtttgatctgtgactgtttggaaggtggagcagcgcctgacatctccccccggcgcatgtatgtacgggggcttcactcctctgtcttgtttgctttcttcctcttagactaagtgcggggaggaaaaggacagcctgcatcggcctcgctggcgcacaatgagaaagctgcgacccgcgcactaaaaacactcgccgcgacccccaaacagcgaggagagagggggagagaaagttgcgctcggcgactctcggctcgcggaagaaggcgcaggggagcgcccggagcggcgcgccgggaggagcgcccgcccagcagcagcgcggcggcggggaggccgcgccggggatgactccgggctcggcgcccaggccccgcgcgctccgcccgcagcccggcggccgggacgcggcccgcgcggccgc

SEQ ID NO: 251227 - DNA, 590 bp, Homo sapiens
gtgtttgcattagatttcgcattggaagaagcggcgatcctggcggccaagccccccgggtggaagcgcggggcaccaagtggcgctccggcggggtgacactgtttgatctgtgactgtttggaaggtggagcagcgcctgacatctccccccggcgcatgtatgtacgggggcttcactcctctgtcttgtttgctttcttcctcttagactaagtgcggggaggaaaaggacagcctgcatcggcctcgctggcgcacaatgagaaagctgcgacccgcgcactaaaaacactcgccgcgacccccaaacagcgaggagagagggggagagaaagttgcgctcggcgactctcggctcgcggaagaaggcgcaggggagcgcccggagcggcgcgccgggaggagcgcccgcccagcagcagcgcggcggcggggaggcggcagcatggagcgcgggccgcgggccggcccgccgagcgcccgctgctgcgcccgcggcccgcgccggggatgactccgggctcggcgcccaggccccgcgcgctccgcccgcagcccggcggccgggacgcggcccgcgcggccgc

SEQ ID NO: 251228 - DNA, 230 bp, Homo sapiens
tagtggctaccatctcagatagtgcagctctagagagttttctggggagctacaaatttttctctcgactgttaaactttttttaagtttagatgaaaattgttctaaagcttatgttggcacttcactacctccttaatgaaagaacactgatctactgtttttgatgtcttgacatcaaaactatgaccaatttctgtactacgacagaataaaacgatgacctactg

SEQ ID NO: 251229 - DNA, 434 bp, Homo sapiens
gagaccagagctgggactgtataatatgaactgggtcttcaaggatgggttagcagtgtctgacactgtatatggggggaaaagaaacttctagactgaagaaacccttcaacatatgcctagggctggggaaataatgatgcagtcccagaaagaaaaagtagatcctgtgctttcaaagcgaattaggcaagatacaggaaaggaccaagccagggaggatgaggagtgcctgggtgagaagactgcagcaggagaagtttcagtggaaagggatgtggtcagatccgtgctcttgggtgatgtttgtaaatgaatctgatgagaagggagatgaagccatgaaatcattagaagttcattagaataattggatgtaggagacagcaaagataataataataataaaagaggatttaaaattatgattcaaa

SEQ ID NO: 251230 - DNA, 388 bp, Homo sapiens
tccacgtggggaatgctgacagcctagcactcagcgtcagagctcagcagccacaaggggaagagggcatcttcccagagctctagtggagaagtcttggggaaggtgtgaacggaactagctttgctcaaaggtccatttctgagccaaactctgtggtgagggtgggcatgctggccacagcattctggtcagccccacctgagcggtgtggaatgggctctcctcgggagagggtgattctgcctctagaaggaggagaatgggatactggttagaaaaacaaaaccaaaaaccagatgatactatctttctttgtgttttaatttcttgaagtacttctttgttgcacctatatatggtccacattattagtaagttcttattt

SEQ ID NO: 251231 - DNA, 458 bp, Homo sapiens
tacagttttccttaatgaggaaaattctgttatttaataattcacagtcaaaattacattgcatatctaaagaaagtttgagattatctgggacaaattgtttcctccatgctatgagttgcataagatagtagaaatagattacttctctaaaagtaggaatgttatttcttttgtgatttggcatttttccttctcatttgttctgatttaactcactacaaattctacttgctcaaggtagatcctcactactccatggcaagcctttggttcatctctcttactgacaaccttatatacattgccaaattgcaattttcagacctttgctcttgactcaatttcccctattttctcctcttcttattatattaaaggccatcagagctaaattatttgttctttctatttgcttgtaattctcagttagtggctgcttctacttccttattatt

SEQ ID NO: 251232 - DNA, 609 bp, Homo sapiens
ctccggatttgatgcaccaagaatgaggagaaatggcctcccgtcttgtgaacttcaatggggagaaatagttagaatgagcaatagaaatgcactgattcccatacatgcatatacagataaaaatatatgatttgcaatgtagaatttcagacctataatttaaattatattatatatgtttacatcataatatatatatattatatatatattatatatataaggaagataattatataataaaacatgttagtgtatcactacatatgactatagtgtatattatatattatatgaaagatatatttacaatatatagtataataaatttcaagtgttatagttaataaataaatataggtattaatgtaaatatattatctattatgtatacattatgtataactataatagaaaaaatattttatatttaatcataggtttatatcaaatataaattatacattatatattatagtgaatatatgtaacatatattataagttataaatcatatacaattaacattatatacattaaattatatgtatatgtcaagattacataattaaaaatatatttgttatatattatacatttgcataa

SEQ ID NO: 251233 - DNA, 420 bp, Homo sapiens
gtgtgggaaatatgttgtccttggtaaaacctccccttaggaaagaaggcaagagaattgagtaagagaatgatgggccaaaaggagaaaatagagaaagaggctgcatgctacagagaacaagagcaaaattcaaaagcctggcacagttgggcttgaaaccatctgtgtaaaggggactaataatgctgacctcactgcatcacaaatgacagagtttaaaatgatggtgtttttaagggacctagcacgtattaagaatttaatacacattggttttcctcccttctcctagggattagggaaagcacatcactttgcttaaatgcgtataaaaaggcttcagactgcttcttaacaatgagaatctttgacagtgaatatgcaagccaaaaataaagagtggttgagaaactttga

SEQ ID NO: 251234 - DNA, 471 bp, Homo sapiens
gaatcagaattctggacttacacttttgttttagcttcttcttacattattattcatcttttaatgtgtccctttctacttccaactataaacattcagtatgagtttcatttatctgttaaatgttttcctcatctagagactgaagcgtgtcattagaataaattgctgagattggtaggaggattctaagataagtaagaattaaagtgaaattaaggccgggcatggtggctcaggcctgtaatcccagcattttgggaggccaaggttggtggatcacttgaggtcaggagctcaaggccagcctggccaatatggtgaaacaccatctctcctaaaaatacaaaaaattagcctggcgtagtggcacactcatgtaatcccagctacttcggaggcagaggttgcagtgagccaagatcccgccactggactccagcctgggcaacagagtgagactccatctca

SEQ ID NO: 251235 - DNA, 237 bp, Homo sapiens
gccgccgcctactactactactactactacattctcgtccgctacgacgtggctcacgcctgtaatcccagcactttgggaggccaaggcaggtgaaccactgcccctggccccaacactcattttcaaatgagcttttagcagaagtgggtatctattagtttcacctaagctgcctcaaaacctatcgcagccttcagtgagtttcaggaacttcagtatcctaatgaatatttg

SEQ ID NO: 251236 - DNA, 285 bp, Homo sapiens
aatgctgtatagtattccagcctgcgagtataccacagtttatccatttctgctattcatggctatttggtgttttcagctttgggctactgcaaatcaagctgctgtgaacattcttgcacatgtctttcagtagacataagcactcatttctattggtgtatacctgggagtggaattgttatttcatagaatatatgtacgtttagctttggtaggtgtgacaaatatccatatatttttctaaatttattttgtatactgataacctatgatttaccagaa

SEQ ID NO: 251237 - DNA, 417 bp, Homo sapiens
ctccacaggtgtcagatgtgtaccgtgttctgaagactctccccaccttctccagcaccctccccctttgtccttcacaggcatttcctccaatcagtctttcgtcttctgcttcatggaagacctgacggacacagacaactcatctttacatcctccatgcctgggacattggcagggattctgcagcagtgatgaagagcatggacacaaatcataacccgggacttgttccatgggtagccttgagagcaggtgacttcaacctctctgaaaccgagtttgaggtcctcatctattaagtggtattgatattaatagctatgtcttacggctgtttgagaatgaataagttaatgcatgaatacgtttagcacagtgcttaaaaatcacaataaatatctaatacaatataac

SEQ ID NO: 251238 - DNA, 358 bp, Homo sapiens
gctgggactacaggtgcctgccaccatgcctggctagttttttgtatttttagtagagacagggtttcaccatgttagctaggatggtctcgatctcctaacctcgtgatccacctgctctggcctcccaaagtgctaggattacaggcgtgagccaccgcactatgtgtttttttatgtgtaggtgatctcaatatctcatagatatttaattcaacatttgccattgcattactagacataaaatatttcatttaacacccaattcttccaattgattgatgaaaataaatccataatcaaaagaatttgataaaaaataattacttgacagttattattttttttcccaattaac

SEQ ID NO: 251239 - DNA, 200 bp, Homo sapiens
tgagacaggaatctgttgaaaggatttgaacagttgattgaatatgttaggaactttgaggttgagttgagcttctaagatgattgaatggtgggatgaatctgttgtataagagaataccaatttggcaggaggataacacattctgcatccctcactgaattcagtaataaataaaaatgtgtacctgtgatgaaaag

SEQ ID NO: 251240 - DNA, 967 bp, Homo sapiens
tgttggccaggctggtctcgaactcccgacctcaggtgatccgcccgcctcagcctcccaaattgctgggattacaggcgtgaggcagctcgcccggcaaccctcagctgcctctcatatgtccttggccccctggccatctctgaccagacatctaggaggcccctcctgccaatatgcttccccgacagccgagcccaaagctgtctccagccctgcaccttgtcttggttccccgggtgctccctttcccaggctgaagcctggacagccccaggcaacctctctccctgaccacagtaccacctggccacatgccacactgctttctacagcagacaccgcctggccacaaagacttaagccacttccttgggtcctgctcagcgctgagcccagagcccaatctcagggactgggagagagcccagtacatggccagtgggattctcccgatgaaaatcccagccatgcgaggctggcttctccaggttctctgaggcctgtgagtccagggctggctggagggaaagcccctggccccttaaagccactgatcatgttcccatagagggatcctgagaatcccctgggagagaaaatgtcggagccccagtcctggcacccccctgaccagcttgggcctcagcctcctcatccatgaaaagaatggacaagaggggtctgggtgcggtggctcacgcctgtaatcccagcactttgggaggccgaggcgggtggatcacgaggtcaggagttcaagaccagcctggtcaacatggcaaaaccctgtctctactaaaaatgcagggattagccggttgtggtggtgcacgcctgtggttgcagctatttaggaggctgaggcaggaggatcactggaacccgagaggcggaggttgcagtgagctgagattgtgccacggcactccagcttgggcaacagagccagactccatcttaaaaa

SEQ ID NO: 251241 - DNA, 324 bp, Homo sapiens
tgttggccaggctggtctcgaactcccgacctcaggtgatccgcccgcctcagcctcccaaattgctgggattacaggcgtgaggcagctcgcccggcaaccctcagctgcctctcatatgtccttggccccctggccatctctgaccagacatctaggaggcccctcctgccaatatgcttccccgacagccgagcccaaagctgtctccagccctgcaccttgtcttggttccccgggtgctccctttcccaggctgaagcctggacagccccaggcaacctctctccccccccgccccaaccccggacacggattaggatc

SEQ ID NO: 251242 - DNA, 594 bp, Homo sapiens
gtgtgtccagatgagaaaggctgggagggtgacctggttcgggaagaaaaaagtaacgtttaaagttatagggcatgtcatgattagagatgcctgtgagccacatgaagctattaaatgtgcagtgagatatatgaatctgaagacagactcaccagactataaatggtgtatcagcttcacatatgctgtaacaaattaccacaaaattagggtctttaaaacaactacaaattggccaggcgcggtggttcacgcctgtaatcctagcactttggaaggccgaggcgggcggaatcacaagggtgaggagatcgagaccatcctgggcaacagagtgacactccgtctcaagaaaaaagaaaaatactgtgaggcaaaacaaatcattcatggtttgtcaatttatatttattttacaaagaacagtaaatgttccatctggcagtactaaaatgcctcgtacttaccagttactcaaaggttattctacctaaactgagagcaagctggccatatgagtaaactgaaaaatagaacaatgttacctaaggccaggtttatagacaagcttgccttcatcttgaactcact

SEQ ID NO: 251243 - DNA, 386 bp, Homo sapiens
ctagtacgtgaattggagaaaaagtttgggggaagcatgttgtctttattgctcagaggagaattctgcctaagccaacccgaaaaagctgtacaaaaaataagcaaaagcatcccaggagccgtaccctgaaagccatgcatgactcaatccccgaggacttggtcttcccaagtgaaattgtgggcaagagaatccacgtgaaactggatggcagccgtctcataaaggctcatttggacaaagcgcagcaaaacaatgtggaacgcaacgttgaaactttttctggtgtctacatgaagctcacaggcaaggatataaatgttgaattcccagagtttcaactctaaacaaaaatgactaaataaagtgtattcacagtaaaa

SEQ ID NO: 251244 - DNA, 359 bp, Homo sapiens
tgtcacagaagccgggcatgcagcactcactgtgaagcaggaaatgaggcttgtccagaatgccttgctctggtggaaccaaactgagtttgagaggccattcctgtgtttcagagcactttcaaaactattttctaaataccctgttacagaatttcacccaagctattggtggtcaacatcatctttcaatagctactatcttgtttttctttaaattaggatatttgccttctctagtgttctgtcatctctcctaatctccacaactatcaagtatttcggagagcagattagcaacctcaaccgaaagttttgaactttatcaatatcatactttatttttttaaaactgaaaa

SEQ ID NO: 251245 - DNA, 580 bp, Homo sapiens
tcttcctagtgacaactggttggagcaatgttcgctctctagctagtatctagacatagagtaatgagcatcaaccaagtatgtgcccaggcttgagaatctgccctatagaagtacacaatattacattaaatatttacaaagatctcactttccaacttgggcctggcagagtggctcccgcaaagaagggtggtgagaagaaaaagggccattctgccatcaatgaagcagtgaccggagaatacaccaacatcattcacaagcacatccatgaagtgggcttcaagaaacatcccccttggacattcaaagagatctggaaatttgccatgaaggagatgggaattccagatgtgtgcattgatactaggttcaacagacctgtctgggccaaaggaataaagaatgtcccatacagtatctatgtgcagttgtccagaaaacgtaatgaggatgaagatcctcattaagtaagttgtatactttggttgcctatgtacctgctaccgctctcaagaatctacagacagtcaacgtggatgagaactaaccagtgattgtcaaatatatcaaagtt

SEQ ID NO: 251246 - DNA, 397 bp, Homo sapiens
gccaccatgccaggcctcctttgttctgtttctgagtgcatgaatcagcagccgtcatgcatgttcctatctttcttcatttcagaccccacagaggaggggttaaggtctttctactgcaatatgaagcgtgtatacacacaccacctgtgtagactgtggagtggttctgctggccacgagggaccaacacattgcaagtggctggatcttgtgaaccctccatctccataagtaaacattgtacctcttgagcttggtgggggtggtgtcttttctcagtgacctcaagtcatacactgtctcttccttgggtgacacctagttgccttgtaactttggctacagagccttatcacctggtgtacagtaaagcagttatgttgatgtataacaa

SEQ ID NO: 251247 - DNA, 889 bp, Homo sapiens
cttttttttttttttttttttttttttttgcagagagagtatctatgttcctaggctgatctcaaactcctgggttcaagcaatcctcccgcctgggcctcccaaagtgctgggattacaggattacaagcacgagccactgcatccagccttatactttggctcttgacagcctacactgcccaagcaatgccagagcactgccagagcaatgcctgcctcctaccagaacactttctttgcaataaatgagtatggaaaaaaatcacagaagtgagtacatgtctaatgtttaatagcagcacattttatgaagaatttgcttgcaatatattacataaaaaggcaggatgcaaaattgtaccacatggagctcacattaaaactcatacacagccagatgaggtggctcaggcttataatcccagctactgaaaaggctgaggcaggaggatcgcttgagcccaggaggttgagactgcagtgagttatgattgtgccactgtactccagcctgagtgacagagcaagaacctgtctctttaaaaaacaaaaacaaaaaaaaaaaggccaggcatggtggctcatgcctataatcccagaactttgggaggaagaaaaaaataagttataggttattggtgattgttcctttcttcttaaatactttcctaaattttagtttttcacaatgaaaatttttcacaagtgtataatgtaaaggattatacatgtgaaggacaataagctatctattaaacaacccattccaggctaggcgcagtggctcatgcctgtagtcccagcactttgggaggtcaaggtgggaggatcacaaggtcaagagatcgagacaatcctagccaacatggtgaaaccccgtctctac

SEQ ID NO: 251248 - DNA, 471 bp, Homo sapiens
agaacagtgtcctgggggtgtctggtttgctaggtgtgtggctggtgcagcaatgggaaggtggcgctttgactgcctggcccctcacatcttgctcctcccttttcactgctcctctggcctccagagtagccatgtaagcctgtgctttcacgtacagaattgctgctctaccctgttcttggcatttgcgtcaaaatttactgtgttccgctgacaaaattctagaatctcaaagctggaatggagttcaaagttatatacccttcttctttcaaagcatgaatatccaacatctgccgagcagtcatttttttccgtacttaaacacctataagcaaagaggaacttatacttcctccactttcagggatgtacggcttttggaaatttcgcctttctgttgactcaaacattgtttcccagtagcttcagttcactggttctggaccacctataaggggtagactt

SEQ ID NO: 251249 - DNA, 286 bp, Homo sapiens
ttcacttccaaatcatgatggtattgtcctctgtgctcttttgaaaagctttattgtttttgagaacacatggacacaggaaggggaacatcacacaccagggcctgttgtggtgtggggggaggggggagggatagcattaggagatatacctaatgttaaatgacgagttaatgggtgcagcacaccaacatggcacatgtatacatatgtaacaaacctgcacgttgtgcacatgtaccctaaaacttaaagtataataaaaaaaaagaaataacttcaagaa

SEQ ID NO: 251250 - DNA, 515 bp, Homo sapiens
gctctttttttaaatgaattttattgtatatatttcaggtttacaacgtgatattataggaaacatataggtagtaaaatagtcaccatagtgaagcagattaatgtaccttcatctcatgtagttactttttgtgacaggagcagttagaaactacttatttacaaaaatccctattacaattttatttactacagtcttcatgttatattaaatctctagactttttcattctacatatgactactttatttttttgacctacatctccccatttcctcccccaccctcacccctagtaaccactagtttattctttctgtatgtatcttatgtataagtgagattacataaatatttttctttctgtgtctggcttacttcacttagcataatgtcctccagctttatccatgtggtggcaaatggcaggatcctttgtaagagtgaataatattccattggtgtattagtccgttctcacactgctatgaagaaatacccaagactggata

SEQ ID NO: 251251 - DNA, 151 bp, Homo sapiens
tgatcaagtagagatactgaatgcctgaaaatgaaatgatggactctataaacataaattctgttctgtcaatgtattgcatgaactaattttgatttgcctaaatttatggcattttgtattcaataaaggaaatatttcttactttcag

SEQ ID NO: 251252 - DNA, 706 bp, Homo sapiens
ctcgtgccgattcgtcacgagctcagacttagctttccggtgtcttcgtgccatggtagggagttttaaggagccttcacccgtatctcctgtgcacctggagagtgacccgtcgctggccctttagctctcctctgttgatttactcctcgtttttctccctagagaatcatgagtggcttttaaaatgtaggaagaggaaaccatttaaaaataagtagaaaggaaagcagaaatgtccagaaaaggcaaagccatagggacagaaagggactcgtggtgattggaggctggggacatgaatgtgcaccagagacttgccagggacgtggaaatggacccgatggtcgggtcggggtgaccgcaacctggtgaacttacttaaaaatcttaaaacaaaatttttttttaagagttagggttttggccaggcatggtggctcatgcctgtaatcccagcactttgggaggccgagatgggtggatcacctgaggtcaggagttccagaccagcctgaccaacatggtgaaaccccatctctactaaaaataggaaaatcagccaggcgtggtggcaggtgcctagagtccaagctactcgggaggctgaggtgcgagaatcacttgagcctgggagatggtggttgcagtgagccaagatcatgccactgcgctccagcctgggtgacagagcgaaactccttct

SEQ ID NO: 251253 - DNA, 779 bp, Homo sapiens
cttttacatttgtgtgtccatttttcagatttttattgatttatagaagctctttatgtgcactggagattaatcacttgtctgttacatatcctataaatgattcttcccagtccattactcagttttctaccttaaatttatgatactggaagttatttttataaaatcaaagatcgccatcttcatttttttgatttctttgttgattttgtttattgtttaattatggggaccaaatataactacacttggtaaaaagtctctacatcctgctttgtctccttagctctgaagactcaggacaacgaaacaaaaccctaatgccctgaattcccaaggaaatgacctaaggttctctttctgtcgtgaagctaggagacctctgagatgggagtcagtgtgaggtctccagagatgtaaatttataattgagggccacaaggaatcagggagctggaggagactgcgttccacctggcatctagttttgctgcgaaagcaacccatggagataatcaaacaacttggcaacaagtcatatggaagagggaggaaaaaaagactaacttcccagagctggagggaaagcagaaagccatgcttaagctctcatcagtgggagccattccatcccaggatcctttcagcaaccaatttggaagtctaggcttttcagtaaatagttttatcttgtgtttcgaaaaagccacacttcatcttctgagcctcatattctcttacatgaagttactaaataaatctgtatttcttttatt

SEQ ID NO: 251254 - DNA, 591 bp, Homo sapiens
cttttacatttgtgtgtccatttttcagatttttattgatttatagaagctctttatgtgcactggagattaatcacttgtctgttacatatcctataaatgattcttcccagtccattactcagttttctaccttaaatttatgatactggaagttatttttataaaatcaaagatcgccatcttcatttttttgatttctttgttgattttgtttattgtttaattatggggaccaaatataactacacttggtaaaaagtctctacatcctgctttgtctccttagctctgaagactcaggacaacgaaacaaaaccctaatgccctgaattcccaaggtgagaaagcactggttacctggaagctcttgttgttactgaaaatcttgtcgaggtgcttgacactgctactcagtgtcaaggaaaatcaagtcaggataatcaagaaatttgagttctcctttgctgatgaaagactgcatacagacattatgctaaccacaaactttcagtttcatcattaagaattggaggaagaggagctagtgctgggacagtctaagagacacttagcagtttttttctttta

SEQ ID NO: 251255 - DNA, 385 bp, Homo sapiens
attcacccttgccatttaatatattacaggtgtcacctgttaagatgtgggcatatttgaggggccattattcggcctctcctagccagaactgcatctgacaaagaatccaaagaaaataagacatactcataaagaatccagagtatgaaaacttagaaaaaattcagtgctctaaaagctctccatgtttgaagtttgtgttgtgatttttcccagtgatgatctcaaaaataaaaatcctcatggtttatatttgagggccacaaggaatcagggagctggaggagactgcgttccacctggcatctagttttgctgcgaaagcaacccatggagataatcaaacaacttggcaacaagtcatatggaagagggaggaaaa

SEQ ID NO: 251256 - DNA, 840 bp, Homo sapiens
gcagctgaagaaatagtacagaaaagatgtctacgaaatactggaggacttaaaaattgcatactaattcgaattatacatgtaaatgccaaaatgtcaaaaaatcaaaaattatgacttcagtaattgtgcagaaacaatttggacttgacattgtcagtataaaatatgtttctgaagaatgcatatagcagaaattatgtaactatgaaaaaaaaccctaagcggtaattaccattttaagcagggtttgcatatcaggatttgcataagcaggcggctggtcatttacatgaatgaatgaaggtccaggtagggctgaggtcaacatgcccatcatgttggatagccactgcccagctccagcctatcattgccatgctggagaaggcaaccctctgcctactcttcctgttgtaacagaaaagttaaaaaaaaaaaaaatctgttttcatgtgttatctttcatgtgctgacaagagatttttttaaaaaactaaaatgccctgtgagcaaaacaacctatctacaggccagatagtctggtggcagctagtttaacctctcattaaagcttatagaacttacagtttttattgggattcacagttctatgattatccctttctttgagcagttaggacctttgttatctggttctagtttaactttccagctgatcttgctatttttctgttaatgggtccgtaactataaccacattattatctttctcagttcccaatttatcacgtacttttctgatctggttcctctggtcttacctttccctatttgtattttccatttcttctcccctgaacttgcctttagccacca

SEQ ID NO: 251257 - DNA, 447 bp, Homo sapiens
cagttatacatttattagactctacatgcattttagaatcagcttgtcgattttgatagagaagtcagttatgattctggtagggattacattgaatctgtagattacatatgttacaattaagtaatctacattgatgtattatcacccaaaataaatagtgtacattaggattcactcttggtgttggcttttcatagcttttagacaaattcacaatgatacataaccactaatacactatcatacagaggtttttttttactgccttaaatcccctgtgctcttcctgttgatctctccctctccctaatcctggcaaccactactccttttacatttatagtcataattgctaaaagtttagaaacaaccaagatgttcttcagtaggtaaatggatgaagaaactgtggtgccttgagacaatggaatgttattaccacta

SEQ ID NO: 251258 - DNA, 603 bp, Homo sapiens
  misc_feature (62)..(62): n is a, c, g, or t
atatgtgaggagggcagagctaaccaattgttaaagcaagaaaccacaggtctcttcactantcatttagaacatggttatcatccaagactactctaccctgcaacattgaactcccaagagcaaatccacattcctcttgagttctgcagcttctgtgtaaatagggcagctgtcgtctatgccgtagaatcacatgatctgaggaccattcatggaagctgctaaatagcctagtctggggagtcttccataaagttttgcatggagcaaacaaacaggattaaactaggtttggttccttcagccctctactagtttgcatgtttgctattctagatatttcacatagttcagcgtctgacctgaactaacttctgagccacatagttcagcgtcgtcagacgctgaactatgtggttttatatggaagcatattaataaaatccagggacatgttgagcaacacatgtagccatcaagttttctccctcttgtcacaaatcataacactaaaataaagtcataacaaacattggccaagaaaataatgtaagtgagatcttatcagtttaactttagaaataacagtgagagagaaac

SEQ ID NO: 251259 - DNA, 462 bp, Homo sapiens
tctctgggtatttggtggttcttttgatgctattataaatggtattactctttgaatttcattttctatttattggctgttggcacatgggaataaaatgaatttttgcataaaaatgataaaattagagtattaccgttttgcaactcccattgaattaatgcatctaggtattgaacatcaacagctgttaatatcacagaaaggcagactttatgagctcctgataaaaggaatctaacaggagtctgatcaagcctctgcgtccagctgccaatttgtgggaaacacaaagaatggagaaagacgatcttcctggtgagagtgtaatcagcaaaactgctactatgggaaattctacatatggatcaagatgctccaggctcttgaacagatcaactctaaggaaaataaagggatgcacagggaaacctgtggattaaaagagatttggaagacaaa

SEQ ID NO: 251260 - DNA, 944 bp, Homo sapiens
catgagatcatattgtgtatgctgttttcttcctctttttccctcatttactgtgaacatgttttatatactcttaaatattatttgaaacctagctgttagtagttacttagttgtaccacaatttattaactaatcccttgtagttgaacattaggttgctacccttgacttactattataattaaaatttaaaaagaaatacttcatcactctagttttgtactatctcaatatggtagccacttgctacatgtggctgttaagtaattaaatatggctagtcccaattaaaatatgctcaaaatgtgaatgcacaccagatttcaaagatgtaatttgaaaaaaagatggtacaatatttcattaataatttttatattaattacttagtgaaataatattttggttatattaggttaaatgtgatatatttttaaagtgatttcatttttgcctttttgcttctgaaaaaagcaaaattactatcagaaaattaaaaattaaatgtatggttcacattatatttttattggatggcactatcattaattcttgcttagatttgtgtaacagcattttaacttgtctcctgactcctgcggtctaatgtcaatagagtggccacagtaattcttccaaaacatgttatcagatcatgtctctcctctcctcaaaacactccagaggcttctcatcttattttttagtaaaccaagtcctcagaagccatgtcttagaaagctggtccctgtctaccttttgactttatttctccctatcacaagccaaacatatttccatgttgggcctttttaattgctcctcccccttcctggagtgctgttcctccaggtgtctgcagggcctgtgcagtcacctctttcaggtcttttctttgtaaaacctttaccgaaaacctacttaaactttttttttctcaa

SEQ ID NO: 251261 - DNA, 538 bp, Homo sapiens
aagggatcagtcgatatgaagggattctggccaatggtgttctttcgagggatggttccctgtcagacaagcgatttctgtttacctccaatggttgcagcagatccttgagttttgaacctgacgggcaaatcagagcttcttcctcatggcagtcggtcaatgagagtggagaccaagttcactggtctcctggccaagcccgacttcaggaccaaggcccatcatgggcttcgggcgacagtagcaacaaccacaaaccacgagagtggctggagatcgatttgggggagaaaaagaaaataacaggaattaggaccacaggatctacacagtcgaacttcaacttttatgttaagagttttgtgatgaacttcaaaaacaataattctaagtggaagacctataaaggaattgtgaataatgaagaaaaggtgtttcagggtaactctaactttcgggacccagtgcaaaacaatttcatccctcccatcgtggccagatatgtgcgggttgtcccccagacatggcaccagag

SEQ ID NO: 251262 - DNA, 1154 bp, Homo sapiens
aagggatcagtcgatatgaagggattctggccaatggtgttctttcgagggatggttccctgtcagacaagcgatttctgtttacctccaatggttgcagcagatccttgagttttgaacctgacgggcaaatcagagcttcttcctcatggcagtcggtcaatgagagtggagaccaagttcactggtctcctggccaagcccgacttcaggaccaaggcccatcatgggcttcgggcgacagtagcaacaaccacaaaccacgagagtggctggagatcgatttgggggagaaaaagaaaataacaggtgcagaaaataacacaagtgccaagtgcaggagtagtttcatgactgtaaatgactcgtagttgaaaatacgcttattgtttacataggtgcttctctacctacctccaagttcttgaaatatttgaaaatgtaacaaatctttacattctttctgtgaaaagaatctgtatgcaagttgtaaatatggatatatggattagagagataattcttcaatggtgaaatctttatatggtgtattgtcagtgtgaaaacattaatctgtgaagagatttttaaatgcaactaatataagttggcctgtgagatgatctgaggtttcaaatgagggagaaaaaaatgaaacttgaaattataatagatgttatatttaacaaacttttaaaaatagcctgtaaatattattttcttacaaggaattaggaccacaggatctacacagtcgaacttcaacttttatgttaagagttttgtgatgaacttcaaaaacaataattctaagtggaagacctataaaggaattgtgaataatgaagaaaaggtaagaggtaaccctagaggcaagagaactgagtaggagaacaggcctctatatattttcatcaatgtgtttacattaaatatctcattaataaaagacagtgaggccaagcatggtggttcatgcctgtaatccccaagctttgggaagccaaggcaggaggatcatttgagaccatcctgggcaacatagcaagaccccaccactacaaaaaaaaatttttaattacccaaatgtggtggtgcacacttgtagtcctagatacttggaaggctgaggcaggaagatcacttgagcccag

SEQ ID NO: 251263 - DNA, 2070 bp, Homo sapiens
aaagccttgtgcaagtgctctctgccttcacgcttgcttcctttgggagagaaccttcctcttcttgatcggggattcaggaaggagcccaggagcagaggaagtagagagagagacaacatgttacatctgcaccattcttgtttgtgtttcaggagctggctgccagcgatgctcgctgtactgctaagtttggcaccatcagcttccagcgacatttccgcctcccgaccgaacatccttcttctgatggcggacgaccttggcattggggacattggctgctatggcaacaacaccatgaggactccgaatattgaccgccttgcagaggacggcgtgaagctgacccaacacatctctgccgcatctttgtgcaccccaagcagagccgccttcctcacgggcagataccctgtgcgatcagggatggtttccagcattggttaccgtgttcttcagtggaccggagcatctggaggtcttccaacaaatgagacaacttttgcaaaaatactgaaagagaaaggctatgccactggactcattggaaaatggcatctgggtctcaactgtgagtcagccagtgatcattgccaccaccctctccatcatggctttgaccatttctacggaatgcctttctccttgatgggtgattgcgcccgctgggaactctcagagaagcgtgtcaacctggaacaaaaactcaacttcctcttccaagtcctggccttggttgccctcacactggtagcagggaagctcacacacctgatacccgtctcgtggatgccggtcatctggtcagccctttcggccgtcctcctcctcgcaagctcctattttgtgggtgctctgattgtccatgccgattgctttctgatgagaaaccacaccatcacggagcagcccatgtgcttccaaagaacgacaccccttattctgcaggaggttgcgtcctttctcaaaaggaataagcatgggcctttcctcctctttgtttcctttctacacgttcacatccctcttatcactatggagaacttcctcgggaagagtctccacgggctgtatggggacaacgtagaggagatggactggatggtaggacggatccttgacactttggacgtggagggtttgagcaacagcaccctcatttattttacgtcggatcacggcggttccctagagaatcaacttggaaacacccagtatggtggctggaatggaatttataaaggtgggaagggcatgggaggatgggaaggtgggatccgcgtgcccgggatcttccgctggcccggggtgctcccggccggccgagtgattggcgagcccacgagtctgatggacgtgttccccaccgtggtccggctggcgggcagcgaggtgccccaggacagagtgattgacggccaagaccttctgcccttgctcctggggacagcccaacactcagaccacgagttcctgatgcattattgtgagaggtttctgcacgcagccaggtggcatcaacgggacagaggaacaatgtggaaagtccactttgtgacgcctgtgttccagccagagggagccggtgcctgctatggaagaaaggtctgcccgtgctttggggaaaaagtagtccaccacgatccacctttgctctttgacctctcaagagacccttctgagacccacatcctcacaccagcctcagagcccgtgttctatcaggtgatggaacgagtccagcaggcggtgtgggaacaccagcggacactcagcccagttcctctgcagctggacaggctgggcaatatctggagaccgtggctgcagccctgctgtggcccgttccccctctgctggtgccttagggaagatgacccacaataaatgtctgcagtgaaaagctggagccccgattcctaaattttgtcactcaaattgaaacaaaccagctggccatggtggttgtcatcccagcactttaggaggccaccacaggaggatcactcccgtgatcaaaaccaacctgggcaacatgatgaaactctagctctacaaaacaaaaat

SEQ ID NO: 251264 - DNA, 1744 bp, Homo sapiens
aaagccttgtgcaagtgctctctgccttcacgcttgcttcctttgggagagaaccttcctcttcttgatcggggattcaggaaggagcccaggagcagaggaagtagagagagagacaacatgttacatctgcaccattcttggactccgaatattgaccgccttgcagaggacggcgtgaagctgacccaacacatctctgccgcatctttgtgcaccccaagcagagccgccttcctcacgggcagataccctgtgcgatcagggatggtttccagcattggttaccgtgttcttcagtggaccggagcatctggaggtcttccaacaaatgagacaacttttgcaaaaatactgaaagagaaaggctatgccactggactcattggaaaatggcatctgggtctcaactgtgagtcagccagtgatcattgccaccaccctctccatcatggctttgaccatttctacggaatgcctttctccttgatgggtgattgcgcccgctgggaactctcagagaagcgtgtcaacctggaacaaaaactcaacttcctcttccaagtcctggccttggttgccctcacactggtagcagggaagctcacacacctgatacccgtctcgtggatgccggtcatctggtcagccctttcggccgtcctcctcctcgcaagctcctattttgtgggtgctctgattgtccatgccgattgctttctgatgagaaaccacaccatcacggagcagcccatgtgcttccaaagaacgacaccccttattctgcaggaggttgcgtcctttctcaaaaggaataagcatgggcctttcctcctctttgtttcctttctacacgttcacatccctcttatcactatggagaacttcctcgggaagagtctccacgggctgtatggggacaacgtagaggagatggactggatggtaggacggatccttgacactttggacgtggagggtttgagcaacagcaccctcatttattttacgtcggatcacggcggttccctagagaatcaacttggaaacacccagtatggtggctggaatggaatttataaaggtgggaagggcatgggaggatgggaaggtgggatccgcgtgcccgggatcttccgctggcccggggtgctcccggccggccgagtgattggcgagcccacgagtctgatggacgtgttccccaccgtggtccggctggcgggcagcgaggtgccccaggacagagtgattgacggccaagaccttctgcccttgctcctggggacagcccaacactcagaccacgagttcctgatgcattattgtgagaggtttctgcacgcagccaggtggcatcaacgggacagaggaacaatgtggaaagtccactttgtgacgcctgtgttccagccagagggagccggtgcctgctatggaagaaaggtctgcccgtgctttggggaaaaagtagtccaccacgatccacctttgctctttgacctctcaagagacccttctgagacccacatcctcacaccagcctcagagcccgtgttctatcaggtgatggaacgagtccagcaggcggtgtgggaacaccagcggacactcagcccagttcctctgcagctggacaggctgggcaatatctggagaccgtggctgcagccctgctgtggcccgttccccctctgctggtgccttagggaagatgacccacaataaatgtctgcagtgaaaa

SEQ ID NO: 251265 - DNA, 2192 bp, Homo sapiens
aaagccttgtgcaagtgctctctgccttcacgcttgcttcctttgggagagaaccttcctcttcttgatcggggattcaggaaggagcccaggagcagaggaagtagagagagagacaacatgttacatctgcaccattcttgagacagggtctcaccatgttgctcaagctggtcttaaacacctgggctcaggcaatgctcccaccttggcctcccaacgtgctcagataatgggcatgagccaccacgcctgaccgcttctggatctcttgatggtgctttctcagaatgcactgatagtgatttatcctgcatctggagaatgaagcatgagacccgtgattaatagatgtgctccaggctcccttgatttgatgttgccccaggcagcctcagaaggaattgtatttcattctctgcaaatcagtttgtgtttcaggagctggctgccagcgatgctcgctgtactgctaagtttggcaccatcagcttccagcgacatttccgcctcccgaccgaacatccttcttctgatggcggacgaccttggcattggggacattggctgctatggcaacaacaccatgaggactccgaatattgaccgccttgcagaggacggcgtgaagctgacccaacacatctctgccgcatctttgtgcaccccaagcagagccgccttcctcacgggcagataccctgtgcgatcagggatggtttccagcattggttaccgtgttcttcagtggaccggagcatctggaggtcttccaacaaatgagacaacttttgcaaaaatactgaaagagaaaggctatgccactggactcattggaaaatggcatctgggtctcaactgtgagtcagccagtgatcattgccaccaccctctccatcatggctttgaccatttctacggaatgcctttctccttgatgggtgattgcgcccgctgggaactctcagagaagcgtgtcaacctggaacaaaaactcaacttcctcttccaagtcctggccttggttgccctcacactggtagcagggaagctcacacacctgatacccgtctcgtggatgccggtcatctggtcagccctttcggccgtcctcctcctcgcaagctcctattttgtgggtgctctgattgtccatgccgattgctttctgatgagaaaccacaccatcacggagcagcccatgtgcttccaaagaacgacaccccttattctgcaggaggttgcgtcctttctcaaaaggaataagcatgggcctttcctcctctttgtttcctttctacacgttcacatccctcttatcactatggagaacttcctcgggaagagtctccacgggctgtatggggacaacgtagaggagatggactggatggtaggacggatccttgacactttggacgtggagggtttgagcaacagcaccctcatttattttacgtcggatcacggcggttccctagagaatcaacttggaaacacccagtatggtggctggaatggaatttataaaggtgggaagggcatgggaggatgggaaggtgggatccgcgtgcccgggatcttccgctggcccggggtgctcccggccggccgagtgattggcgagcccacgagtctgatggacgtgttccccaccgtggtccggctggcgggcagcgaggtgccccaggacagagtgattgacggccaagaccttctgcccttgctcctggggacagcccaacactcagaccacgagttcctgatgcattattgtgagaggtttctgcacgcagccaggtggcatcaacgggacagaggaacaatgtggaaagtccactttgtgacgcctgtgttccagccagagggagccggtgcctgctatggaagaaaggtctgcccgtgctttggggaaaaagtagtccaccacgatccacctttgctctttgacctctcaagagacccttctgagacccacatcctcacaccagcctcagagcccgtgttctatcaggtgatggaacgagtccagcaggcggtgtgggaacaccagcggacactcagcccagttcctctgcagctggacaggctgggcaatatctggagaccgtggctgcagccctgctgtggcccgttccccctctgctggtgccttagggaagatgacccacaataaatgtctgcagtgaaaa

SEQ ID NO: 251266 - DNA, 1833 bp, Homo sapiens
  misc_feature (1750)..(1750): n is a, c, g, or t
aaagccttgtgcaagtgctctctgccttcacgcttgcttcctttgggagagaaccttcctcttcttgatcggggattcaggaaggagcccaggagcagaggaagtagagagagagacaacatgttacatctgcaccattcttggactccgaatattgaccgccttgcagaggacggcgtgaagctgacccaacacatctctgccgcatctttgtgcaccccaagcagagccgccttcctcacgggcagataccctgtgcgatcagggatggtttccagcattggttaccgtgttcttcagtggaccggagcatctggaggtcttccaacaaatgagacaacttttgcaaaaatactgaaagagaaaggctatgccactggactcattggaaaatggcatctgggtctcaactgtgagtcagccagtgatcattgccaccaccctctccatcatggctttgaccatttctacggaatgcctttctccttgatgggtgattgcgcccgctgggaactctcagagaagcgtgtcaacctggaacaaaaactcaacttcctcttccaagtcctggccttggttgccctcacactggtagcagggaagctcacacacctgatacccgtctcgtggatgccggtcatctggtcagccctttcggccgtcctcctcctcgcaagctcctattttgtgggtgctctgattgtccatgccgattgctttctgatgagaaaccacaccatcacggagcagcccatgtgcttccaaagaacgacaccccttattctgcaggaggttgcgtcctttctcaaaaggaataagcatgggcctttcctcctctttgtttcctttctacacgttcacatccctcttatcactatggagaacttcctcgggaagagtctccacgggctgtatggggacaacgtagaggagatggactggatggtaggacggatccttgacactttggacgtggagggtttgagcaacagcaccctcatttattttacgtcggatcacggcggttccctagagaatcaacttggaaacacccagtatggtggctggaatggaatttataaaggtgggaagggcatgggaggatgggaaggtgggatccgcgtgcccgggatcttccgctggcccggggtgctcccggccggccgagtgattggcgagcccacgagtctgatggacgtgttccccaccgtggtccggctggcgggcagcgaggtgccccaggacagagtgattgacggccaagaccttctgcccttgctcctggggacagcccaacactcagaccacgagttcctgatgcattattgtgagaggtttctgcacgcagccaggtggcatcaacgggacagaggaacaatgtggaaagtccactttgtgacgcctgtgttccagccagagggagccggtgcctgctatggaagaaaggtctgcccgtgctttggggaaaaagtagtccaccacgatccacctttgctctttgacctctcaagagacccttctgagacccacatcctcacaccagcctcagagcccgtgttctatcaggtgatggaacgagtccagcaggcggtgtgggaacaccagcggacactcagcccagttcctctgcagctggacaggctgggcaatatctggagaccgtggctgcagccctgctgtggcccgttccccctctgctggtgccttagggaagatgacccacaataaatgtctgcagtgaaaaaaaaanaaattatattattaaatttttttattatattcctcgagggggggcccgggtccccaattcgcccttatggggagtgggtttta

SEQ ID NO: 251267 - DNA, 1036 bp, Homo sapiens
aaagccttgtgcaagtgctctctgccttcacgcttgcttcctttgggagagaaccttcctcttcttgatcggggattcaggaaggagcccaggagcagaggaagtagagagagagacaacatgttacatctgcaccattcttggactccgaatattgaccgccttgcagaggacggcgtgaagctgacccaacacatctctgccgcatctttgtgcaccccaagcagagccgccttcctcacgggcagataccctgtgcgatcagggatggtttccagcattggttaccgtgttcttcagtggaccggagcatctggaggtcttccaacaaatgagacaacttttgcaaaaatactgaaagagaaaggctatgccactggactcattggaaaatggcatctgggtctcaactgtgagtcagccagtgatcattgccaccaccctctccatcatggctttgaccatttctacggaatgcctttctccttgatgggtgattgcgcccgctgggaactctcagagaagcgtgtcaacctggaacaaaaactcaacttcctcttccaagtcctggccttggttgccctcacactggtagcagggaagctcacacacctgatacccgtctcgtggatgccggtcatctggtcagccctttcggccgtcctcctcctcgcaagctcctattttgtgggtgctctgattgtccatgccgattgctttctgatgagaaaccacaccatcacggagcagcccatgtgcttccaaagaacgacaccccttattctgcaggaggttgcgtcctttctcaaaaggaataagcatgggcctttcctcctctttgtttcctttctacacgttcacatccctcttatcactatggagaacttcctcgggaagagtctccacgggctgtatggggacaacgtagaggagatggactggatggtaggacggatccttgacactttggacgtggagggtttggctttactgtgcagtcataataagagttgggtcatgtgatttatgcacaata

SEQ ID NO: 251268 - DNA, 216 bp, Homo sapiens
ttgagagactcagggagagagaaacttcaaacaagtgaaacaagcagaaaagttaaatcagccaggctgagcatctatttctggtttttaaccactttcttttgtttctgttcaaacccaggtgggaagggcatgggaggatgggaaggtgggatccgcgtgcccgggatcttccgctggcccggggtgctcccggccggccgagtgattggcgag

SEQ ID NO: 251269 - DNA, 247 bp, Homo sapiens
atcattaagctacaggagtacattgaaacccaatccaaggtagctaaaaatgatgataaaacaatgcagtacctgacagaaaaatttagcaagtatagaaaagagcataactggcctgatagagctgaaaaacacactaatagaatttcataatgcaattaaaattattaatagcagaatagaccaagcagagaaaaggattttgagctggaaaaccaactttctgaaataagttaggcaagaatag

SEQ ID NO: 251270 - DNA, 451 bp, Homo sapiens
tcatgtcctggggtgagagggagtggatggcatgagatttcatcaggctactcagaatgaaacttgaaacttataaattatttatttctggaatttttcatttaatatttttggactagagctgactgtggtaactaaagcatggaaaaccaccagataagggaggactactatatactatcagaaaatagaaatcatttccagtattattgttatggcaaattgaatcatatgatatacactcttttatgtctggcttctgtcactcagcatcattgttttcagattcatctatgtcattgtgggtaccaatagttctttcctttttattacggttgagtagtcttctattatatggataatcaatattggcttcttcattcatctactgatgggcatttggattgtttccagtctatgtctttcacaaataaaaatgttatgaacattc

SEQ ID NO: 251271 - DNA, 326 bp, Homo sapiens
catttgttgtatttccagctttcacacagaaaaattgtgtgtgcatgtgtgcacgtgctcaaataaaagaatcccttcaggggcactatgttgttatgtatccagatattctcttttctccttccacccctcccccaccaccccctcccttcttgtaaattggcttattaaaactggttcccaagccctccttttttccctttgtgattgccttggtcttggattttcagtgtagaactaaaaattcaagtcagatttcagttactaggataattttctttgaattttaaatttttctaagtaaatgcatagatttttaatgaacc

SEQ ID NO: 251272 - DNA, 658 bp, Homo sapiens
cagactgggtgtagaagggaaggatggatgtgagaagtcgcagagtcacacttcctggcatgtacagggagtcagggtattcaatgtcatgacacgcctgcctcccagcagaaatgtgaggtacatcctggtcacctgataaatacttgctgactgtgcaagtgcacaagtctgcctgggaaacatggaaaagtttgagctcacaggtgcagatcagtaggaggaaaggcgagggactggcgaggaacgtcaggcagagagaagagcaacaccagcgatggagatgcagtcccaggacacaaaagacaagtagacctacctttataagaggaggtaaagatggagaagacggctgataaaagaccatgaataagaatatagctaatacgatgagcccggcagtgtcttacacactttgaatggactatcagtataatagtaactctaatcctttcactgaccctatgacacacggtattgtcatcctcatagatacggaaataaaggcatggagaagaatttgtccagtgtcacacagctaagcaaatggcacagtcataatttgaacccagatactctggcttcacagtccttgttcttaggcctgtagtaaggaatttgaattgtgtgctgtagataatggaaagccattgaataa

SEQ ID NO: 251273 - DNA, 1185 bp, Homo sapiens
tactccctctgtgcctgggtgtcctcaatactacatgcaaacagtaacactactcacctcataaacttgtttatttcatatttacaaagcccttaaagagtgcctggaacatgcaagtcctgtgtatgtttgcaacttgcattgattttcatgtttctgccattctttctctgaatgtttaatcctttttttgcctgtcctgtcacccttcaggtatctgtctcttgcctctggacatgcatggtcatgaccacatggccatatcagtgccattagaggactcatagtttggagtctggcctatggtgcggcagtatgtccctgtaaccagcttaactaggaataggcttctcaggttagagtaccctggtacattgagttgtcctgtctcttcttcactggtgcctagacacccttctgtagcgattacttcagcaagcacaatccaaaacctgggttcttcaagggttcccagggtcactctgattggcctggtggtctgggtggcagccctcagctccagtactctggcaggaagtcccaacaggcttccaccacatggactcagcccatggctggactgaggcctgcctactcccatctagggccacagggttcttagtttttgtttctctgtttttagataaatgaagacaatctaggttttacagcaaaaacatgattaatgtacaatccctttacaggatcattctccatatagatagacctgtcaacaaacctgtcccaacaaaactgggttgtaaagcagatcacagaaaggggactgggttttcccataggaaaaatggtagtaacctggagaaagcattccagatccccagctcatatcaacaaaccatgtatgtgatcagcagtgtgttataaaaacaaggctcagcaccatccgagttacactgtttcaaagggacccttatctgtccactgttcccaaaccttagtcactggacaactgctcttgaaaactctgcccatatcatatctgcattctacttactctaaataatttttctttaaatcaattatatcagtatgcttaaaagttaaacccatcccatggaacagcacccataaattcctgacttttctgtgctagttggttttccatgtaaaaatgatgtgtttttaaaaacacatagttattaaactttaaaatgtttgctgtgt

SEQ ID NO: 251274 - DNA, 710 bp, Homo sapiens
tgtgcagggccagcagatactgatggagcagatgttctctgaggctgtaggtgctggggcacagatcttttcctcatcctactacctagtgaaggggagaaatgacaagcgaggcaactgcaggtgaaaagtgtttggagagaggtttctatagggctccagtctatgcactgagcccaggcatagacttcagagatgcttcctgaaaagaagttggcaagatatgagggaggagggcgcagctcctgattcctctgacctttctattgtgggtttgatgccccctccccacctgagtcctcatgggcagctgtgttttgtttttttttgttttgttttgttttgtttgagacagagtctcgcactgtcgcccaagctggagtgcagtggtgcgatctcagcagctgtgtttttaagaagtgtttctactcctttccttactcaatcctgaccctgtaaaattcccacttgctggctgccccctccccaaggaaaggccgcccctctgcccctccacagtgggtggtgcccagagtcaggggacaggtctgggctttcctattcttgctgacccagctatagagaccgtgctctttcccattcagagagtcatagctacttggtttttttttgtttgttttgttttgttttgttttgttttgtttgtgtgtgtgtcttttattttacgcttggggttgtctttttaaaac

SEQ ID NO: 251275 - DNA, 439 bp, Homo sapiens
gagatcccaaacattgtgtagctcaacagggacagggacagggacagtaggatggcagaatatagctctctctctagtttgagcctagttttcattgctattcaaggcctctgagaaaaaactacagggtattgtcctaatttatatcctggatgccatagaggtcagcctgaggaggcagcagttacttgacatcctttgatgtttctgaaagcaacatgaaattgttctcttgttcacaaggaatactgcatcgtgttcagtgccagtgggggaaatctgttccccaggtcctgtatgccttgatatcctgaattccacagggtagcaccacaggtggtaagattatagtaggaattataattgttatagaagtactggattgatagagagtggaaaactgcaataacactgcaataaatagaatgtgcccctttta

SEQ ID NO: 251276 - DNA, 603 bp, Homo sapiens
gagatcccaaacattgtgtagctcaacagggacagggacagggacagtaggatggcagaatatagctctctctctagtttgagcctagttttcattgctattcaaggcctctgagaaaaaactacagggtattgtcctaatttatatcctggatgccatagaggtcagcctgaggaggcagcagttacttgacatcctttgatgtttctgaaagcaacatgaaattgttctcttgttcacaaggaatactgcatcgtgttcagtgccagtgggggaaatctgttccccaggtcctgtatgccttgatatcctgaattccacagggtagcaccacaggtggtaagattatagtaggaattataattgttatagaagtactggattgatagagagtggaaaactgcaataacactgcaataaatagaatgtgccccttttacagaggtttccatgatgttcgttattatggctcttaaggatgagcaggtacagaaatcctcaggacctacagaattgtgtatcttgtgtagctgaggtcattgtcagaaattttatggaatcctgtagcctctgggattttcacctcaaggtcattgctatgca

SEQ ID NO: 251277 - DNA, 474 bp, Homo sapiens
atctgtaaagctgttagtgttctttctgatgctggagcttagagtccacacggcagtcagttaagggaagacgggtgtaaaatgggaggcagttaagaacaagtggaagtaacaagcacagacaaacccatgtccgtttttatcatctctggccttgatagtggttgtcctgtgtaaccccatatccaacacaaacatgtggtttagagaaacctggttagagaaatgagttcatccaacaaccagagggaatttggaagtatatcttctcctagtcaagcctctgataagaacacaaccccagccaatacctggattacagcctggtgagaccttgaagcagagaaccttgataaaacatgtccaagcttttaacccatagaaactataagataaatgtgtattgttttaagcctctaaatgtgtgatatgttaggcagcaatagaaaactaatacagcaaaggtctccacca

SEQ ID NO: 251278 - DNA, 427 bp, Homo sapiens
atctgtaaagctgttagtgttctttctgatgctggagcttagagtccacacggcagtcagttaagggaagacgggtgtaaaatgggaggcagttaagaacaagtggaagtaacaagcacagacaaacccatgtccgtttttatcatctctggccttgatagtggttgtcctgtgtaaccccatatccaacacaaacatgtggtttagagaaacctggttagagaaatgagtgatccagggaagggatgggaagttgtccagctgcagcttgtgagctaacacatgtatgagctataaaacagctgctgcttcacatttatcctccaaattttgctcaagacttgtggcttaccctaaccagaacattgagggaagataattctggaaaatgtagttctgcctaaccaagctgacattacaaaccacc

SEQ ID NO: 251279 - DNA, 448 bp, Homo sapiens
gaagaagaaatgagagacaagttttgggttaaaaactgctgaaatctccttaggggtaataaaaaatgatggtctcgggggtaggcaccttagaccaggaaaattgacatctacgagtcattggagattttgctgtaaaggtttgaaaattaaggactccattgaattaaatcacacatcttttttaaagagctaccctttaggagtgcttgccttatgatttttacatagtcatctttctttaaccatgctactgtcaactagcatgaccagctctcattgctatgtgtcatgtctgaattctagccattaaagaatgcctgcatttgtctggaggcacaaaactgtccttaaaacaagtatctcctctatgaaagaagtccgtgggtagataggaatgcttttcaatctatgatgcatctctttcttgtagtaagaatgtaaaaaa

SEQ ID NO: 251280 - DNA, 993 bp, Homo sapiens
gagtggctctttaccatagaccttgctcatagttctcactacaggcttgctctgagccaacttccaagttctctccttctccttccaaacttccctgtatgtcatcttgctcctgggccacctgactgatgtttaatgcctggatatttgctttcacctctgcatgaccaagccttggccaagtcactgttgactcagttgcaacatctgtcccctgctgagggctgttgtagctttcatagctcacagtccagcttgaatctaaccttttctgtggtcattcagagtagcaagaagcattgtgttttggatttactgcagaactcacacacttaactgtacacagtcagtttttatagctatcactgcatccagattggacagtgaccttggctgagacatcctttacctctgtttcagattaatttaggcggcatataaaatctctgtgcactgccaggggaaagtaaagacttcatgaagaaatggagaagagccgaatagttgaccattgttgctgtataaatcttggatccagggctaaaaggtggcagtataaatgcagatggtgctgctgccatattttcctggcacacctttaagcagcacatttcaagccttcagggttggaatggcatttccaaatatagactcaaaaaatcctcagatgtttgattctagaatagagctgggaattctgtcctgcaaatgccttctgcagcatgggagcaaacccactcttctgtgtctgttgcttcaaactctctattttctggaaactggagaaagatgtgggtctacattttgaaatatatgccttgaacaagaattatgcacctatagaaaacttgtcatacattgaataaactctcagtttacagaaatctatggaaatatcaaaataaaacatcagaaggagcagtaactatagaggttattaactaaggggataacctgaaaaataaagttatatttgctaaaaactgtaaaaaa

SEQ ID NO: 251281 - DNA, 205 bp, Homo sapiens
aaaggctccttaatgggcagtatcattgcaaggctcagacgatttataatgttgctttgtggctgttctatcccactccttctggtaagactgctttgggaaggctgcgtttctaacatgctgccttctaacaggcacacacatgctatggagcagcacctgaaaggcactccccagacctatacacccccaccaaaaaaaaaaa

SEQ ID NO: 251282 - DNA, 83 bp, Homo sapiens
ttctaagcccatgttttatcctgaagtaccccctcgacacagaaaaacgaattcatagcacaaaatacaccagcttaagacta

SEQ ID NO: 251283 - DNA, 490 bp, Homo sapiens
ggagagaccccccctttgctccctcctcccacaaagagaaccaggggtgctcctgaggagggcaatgtcggaaaagctctgaataattgtttctcaactgagtctgaacttgtaacattgacagtatcattaacctaaactctaatattactctggagtccttgcgttgaacatttagtctctaaatattcagtattgatgactcatttccatatatacctgactcccatggatcactatgacaacatcccccatctcatctctgcttaactattgtttaatacttaagtctcatttaattgtgttctttattaagggcagatacttagaaaatcgctttttaaaaggtgagaaccatgtctttaaaattgtctctttcccagaaaacagatatgcatcaatacaaagaatggtctaatctgacatctgtttatttctgtaaggaaccttgattttgctaatacagttctatgcatcagagcaaaaaaaa

SEQ ID NO: 251284 - DNA, 260 bp, Homo sapiens
ttctgaaaaaattttataggtcgaagaaaagtttggctttcacagaagggatgtgaactttcaatgaactatgaaggataacagcatcttccagaaaccattgatatttaaatgtttagaaatcatagactgtgtgggccgggtgcggtggctcacgtctgtaattccagcactttgggaggccaaggcgggtggatcacgaggtcaggagatcgagaccattttggctaatacagtgaaaccctgtctctactaaaact

SEQ ID NO: 251285 - DNA, 786 bp, Homo sapiens
cgcgggcgaggggacggcgagcccccgctgcctaaacagaaaacggaggcgatgatctgggtaactacgggcggagtgggaggaaacctgctctgcacagttaagataacccgggtccccagagcaccatcacttctaagactgtgacctgcttacagatccactcctctgcccccacagttcacatgtccaccctgggggccatggcttattgattcttccatgtatcagcccaagaatcccctgctgccttctgaataaagggtgcaaatacacgaagcctgctcacgaatcaacataaaacttggcttccgatcccgcttccctgcctgtctgcttccacacttttcactcacggactttcctgctcccccgggcaccttgtctccttttccatctgtgctgaccctttggcttagtgactcagcttttggattggccacttggctgggcccttggtccctgcaaaactgagtttcctgtatctgtgctctgtcaactctgagtcagccaaacagctgaggtcattctctacttgtcaccaccgatgaggacggagagccaacaccaccagtcagtcacccaagctggaaatttaagcatcatcatttcttcttttccttcccagccctcccatcgctgcttgcaggccagtgagttccaccccaggaatgttccaccccagtgtatatatttccttctgaagtcccatccccatactgcttgagatcggggctcataattcccccaataaaccactgtccagcctcctgcctcacctctatc

SEQ ID NO: 251286 - DNA, 378 bp, Homo sapiens
aatgtggtcttccctcaaagcgctcatagtccaggagcctgacaagtggacaggtgattacatgcaatgtaagaaaggctgtgatgtcatacaagaagacaagtgggagtatggttttgaccagttcctcctcttagatttattccttcttctttggctataaagcaaaagaattggtcctatttttttttaactgtgcaaattaaaccataaattttaaaaactttataaagataaaagacaagcagccagccgcagtggctcatgccagtaatcctatcagtttgggaggctgaggcaggaggatcacttgagaccaggagtccgagaccagcctggggaacatactgagacctcatttctactaaaaatacaaaa

SEQ ID NO: 251287 - DNA, 390 bp, Homo sapiens
cagcaatgaagattctgtggccatttttgtcagtgctttatatgtcttaaaggaggaggctttctttagcttttctgtctttccaggacaatgccgtctacacagacttccaatggaagatgttgattcagcgacaatttactagaaagctggatgctgtgaaagcaagacacagaaagcagagaacatcaagcagtgggagtgtggaggagagggagagagcatgtgtgcttgagcagaggggtgataggaggcctgaggggagagctggtggaggctgtgaaatgagatggggaagtagggagttgggtggaataatgaggagatggagaagtaattaaattcaagctttcaagcctcctcctggtggtggcttctctttatcaaaaa

SEQ ID NO: 251288 - DNA, 1720 bp, Homo sapiens
catcacaaaaataagttaaaaagaaatatttgtgccttggggagaagaaacatggtgaaaacaggctgaggttgtcagggcagagagctgaaggtggggacagtgaccgcggacccctctgtgcttgaaagatttcctccacggcctttgccccagttgtggggaggtctctgtgcacagcggggaaaatgcttgtgtcgcctttggtgggccatgtcctaattagtttcatctgcttccctgggaacttactaaggggcccagagcactgttggaagtctggttagagtccccagagagttactctaagttaaaatgagccactgaccttggctcaccttagaggaatttcctcgagaacaacagagataagaaaagaaccggcctggccaatccttcaacagctctagagccccttttctctgctggcaggggctttgtttaccagctcactgtttaggctaaatgttagggaccagatcactgcagttgaaaacaggcactccaggcttagtgacagtggcagcagaaacagtgttggctgcctttctgaccaccccactttcctgccctgagacagcagcccagggcaggtgcttcatattcagaccaggtaagcctcatttgcacaacagtcaaattgtttgttcctttaaaaaggacacaattagcctggcacggtgactcatgcttgtaatcccagcactttgggagggcaaggcaggcggatcacctgaggtcaggagtttgagaccagcctcaccaacatggaaaaaccccatctctactaaaaaaatacaaaattaaccaggggtgatggcacattcctgtaatcccagctactcgggaagccgaggcaggagaatcgcttgaacccgggaggcagaggttgaggtgagccaagattgcaccattgcactccagcctgggcaacaagagcaaaacttcatctaaaaaacagaaaatattaagatgattaccatgtgaaaacctttttaatattcaggatttggaaagtatagttgccccaggcatgtggttgttgccttaggtcctgcgaatattgctgaaaatcggattttccacattcactttcttccctgttttagggaagaaaatgatcatagacattcgattttccaaattggcgctcttattttcaatgctaattggattacttctcttccaaccctcctgcccatccatccatcccagtccccaggcatcttaaccttaccatctgagcttcagctgaaatctgtttataggcaacattgaaagtaccagattggggccaggtgtagcggcccacacctgtaatcccagcactttgggaggcggaggctagcggatcatgaggtcaggagttcaagaccagcctggccaacatggtgaaacccccatctctactaaagatataaaaaactagccgagcgtggtgttgcatgcctgtgatcccagctactcgggaggctgaggcgggggaatcgcttgaaccggggaggcagaggttgcagtgagccagatcgtgcattgcactccagcctggccgacagggtgagactccatctcaaaacaagagaaagtaccagatcgtactttctaaatctgtctagcgtattgagaattttaatgggagctgtggatctatttctcaggccatacctgtgccaatctgtctcattgtcgcctctctcttatcattactttgtttggaaca

SEQ ID NO: 251289 - DNA, 392 bp, Homo sapiens
ccggggctttggtttagccaagaacagtcaccctcagaattagtgctggcaacagacagaaagtggcatccctttgatgcccttggaccctttgaattagtgctggcaacagacgaaagcagcgtcccttgtgcttggagcctttggccctgatcatggatgtagggctcggggtctctaacacctttacggagagggagcgatggcactctactgggtcctagcccaggaaaccagacaaggagagacacggctaggtaaacatggttaccagacaaaaagagcaagaaaggtaccaaacgaaagtatttttcatatttctttaaatcttgtcctacattagagccttcctttaatagatataaaaatgttgtaaattggtcattttaaat

SEQ ID NO: 251290 - DNA, 427 bp, Homo sapiens
ccgacaccttacgacacttgtgacgactgactcacgtgtcgagggcaggttcatggttgatattgctcgggtggcgcttccaattaggtgcatgagtaggtggcctgcagtcatgttcgcggttaggcgtccggccagggctatgggttgaatgagtcggctgatggtttggataataactagtatggggataaggggaagcttcagtaggcctgaaaggaagagccaaagtcaactcaattaaaatcaagaagagtacccttccccacccttgatgatggtgcatgcagaaggcggccaaaaaagccaacaaacaaaaaaatttaagagtccatcaaaatgtagaatggagtgaaaagataaatcactccctggaacaaaatattagcaatccctataaatgaaaaagaattagcctacagagtaa

SEQ ID NO: 251291 - DNA, 641 bp, Homo sapiens
agccagcctggtggcaggcacctataatcccagctactggggaggctgaagcaggagaatcacttgaactcaggaggcggaggttgcagtgagccgagatcgtgccactgcacttcagcctgggcaatgaagtgagactccgtctcaaaaagaaaaagaataacaaagctggaagtcacacactttctggtttaaaacttacacaaatctaaagtaatcaaaacaatgtgataatggcataagaataaacctgtagatccatggacaaggatgccaagacaattcaatggggaatgaatagtctgtttaacaaatggtacagagacaactgaatatcacatgcaaaagaataagagggactccctatatcacagtacatagaaaaattaactcaaaatggatcaaagacctaaatgtaagagtgaaaactataaaactcttagaggaaaacataggggtaaattttcatgtccttggacagtggattcttagatatcctatcaaaagcataagcaacagacaaaatagataaatttgattttatcaaaatgaaaaacgtttgtacatcaaaggccattattaaatgaaaagacaaccaatacgagggagaaaagacttgcaaatcatgtatgtgataagag

SEQ ID NO: 251292 - DNA, 491 bp, Homo sapiens
  misc_feature (140)..(140): n is a, c, g, or t
  misc_feature (145)..(145): n is a, c, g, or t
ttgaagtccattagcagtgagagggccagcagagcacaaaggcgtctctgaggggcacaggaggggcgtgggccacgcattcagacaagcctgatgtgcttgtgctgcggggttttttttccccaacccctgggggttcnccctngttcgttcactggtcctgttgtgctcatagctcaaggctgttataaagtaaaagcacctgcgtttctaagagagtgatttcatttctccatacttaatatgttcctgtttcttcttgataaatagcatcattttaacttttcattcagtaatcataaaaaagattatggagaggagacatggaataggttatttatttttttatttttattttcttgagatagagtctcactctgtcacccaggctgaggcaggagaatgccgtgaacccgggaggcggagcttgcagtgagctgagatggtgccactgcactccagcctgggcgacagagcgagactccgtgtca

SEQ ID NO: 251293 - DNA, 449 bp, Homo sapiens
ttgaagtccattagcagtgagagggccagcagagcacaaaggcgtctctgaggggcacaggaggggcgtgggccacgcattcagacaagcctgatgtgcttgtgctcgttcactggtcctgttgtgctcatagctcaaggctgttataaagtaaaagcacctgcgtttctaagagagtgatttcatttctccatacttaatatgttcctgtttcttcttgataaatagcatcattttaacttttcattcagtaatcataaaaaagattatggagaggagacatggaataggttatttatttttttatttttattttcttgagatagagtctcactctgtcacccaggctgaggcaggagaatgccgtgaacccgggaggcggagcttgcagtgagctgagatggtgccactgcactccagcctgggcgacagagcgagactccgtgtca

SEQ ID NO: 251294 - DNA, 265 bp, Homo sapiens
agtaaaaagctaaaaagaataaaatcagtccaggtatcaatgattagcaagataccttgtgatccataatttggttttctgggagaacctgcccactgagaagtggagcccttgtggaggtgtatgctgtgtggtgagatcatgagctggtgggttggtgtgtgggtgtttgcttgtgtggatgcatctgaatacacacacatgcacatgaatgaatagggggagaggtgttctggattctattccataattgcttcatttttct

SEQ ID NO: 251295 - DNA, 152 bp, Homo sapiens
cacttcactttttccaaaagcaaagtcagaagctgcactcagggtacttcacacaggcccactccccctaaagggcaggttgcctggagtcacccctgtccttggcagccatcattggaagattaaagccatacatattttggatcctcaaa

SEQ ID NO: 251296 - DNA, 404 bp, Homo sapiens
caatagctgaagctggagagcgcgtcaaagcgagggagggagcagtctaatccctgaggcttggcagtacctgtgttcacttcccctccctttacatcctgttctgtatcttcccaaaggtctgcggaggcatgcaagaggaggaaagtttggtggttgttaagataaagaggagtgactgtttttgaactctttcttttgcttaagttttggtgcctctttgttttcctcagttgtcttctaaaaacaatcagcactgtagctgctttagactaagaacatatataggtccttaaatggattcttatattaataatcatagtactagtccgaagtgctgctggcttgccaggaatgtgtgtcatgtttattttcacttattaaatatttattgaccccgctat

SEQ ID NO: 251297 - DNA, 340 bp, Homo sapiens
atgggatccttaaggatgcgggctcagctccagcgctcctttcaacttcccctcccaggtgcggatggttcagaattaagggatctcaggtagccaaggactgcaaggacagccattaggtttagctttgaagacccactggccaaaggtttctcgacaatttaatgcgcaaggggagtcaagtgagaaatgggaagaggccgcgttggaaagccactgcgcgtgcggggactctcggggcagccgcggctggcggtcgtggcccagagcccagctccgccgccgggtcccgcacaccccgcgcccctcaacctaaagttgggccgtccgtcagcggccg

SEQ ID NO: 251298 - DNA, 673 bp, Homo sapiens
caggctggagtgcagtggcacaatctcggctcactgcaatctctgcctcccaggttcaagcgattcccctgcctcagcctccccagtagctgggactacagttatgcaccaccacacccagctaattttttgtatttttagtagagacggggttttaccatgttggccaggagggtctcgatcttctgacctcctgatctgcctgccttggcctcccaaagtgctgggattacaggcgtgagccactgcgcccagccccgaatcctccattcttaagggataacaaatccagaatttcagttctccaaaagatataatgtgtttaaacacattgtgcaaacatgaggagttgctatccttaccacagaaaacctctttctctaagcttgaagtcctcaggataagaggaatagtgcccacgctgctctgggcctagaaagggattacagaggtcccaggctggctcagatcagaccaaactcacaatagaccaaggggattggaaaacagagacacagatggaaaaccagtggctgccaccacagcctggtcactaaggcagctctttatctcctatgccattgtttatagcccagaggacaccatccggacctcgtaaatgaaagtgtccattgggaaggggaaaaaaaacacacatgccccctccacacac

SEQ ID NO: 251299 - DNA, 484 bp, Homo sapiens
atttgaatggatgggatgggttattttgaagttaaaggactataaaaagacataggcacttagtggtaggagaaagtgtaggagaaaataaattgcagtagagattttccaaagttcttcctaaagggaggtctgcttcacctgtggtgtgggctttgaggatggtccaagtacggccatctctagcagcattaaatgtagttctctatgttacatttccttactccctaaattatattaaggtaatttgattgacctaaggtggtagtcagtaactgtcactcaccttagcaacattcatcaatatactttgcaccctctaaagagagcaatggtcaggagggtgggtgatgctatttaatgctaaccacactgcctgacttcactgacataattgctttacatgtcaatttccttgtcctgtgtagttaaattagaaatatcccttatctaacctaggagaaaactgcacctgcctaactga

SEQ ID NO: 251300 - DNA, 413 bp, Homo sapiens
gctaaatagtcagagtattttcagtcaaggggaattaccatatggtgttgtctgcagagggaaaggaagggctgaggagcccaactagagcagtaggcaccccagagagtgagttgcagagtgaagatatatcagttgtggctgcaacgttgctgcccaaggctgaaacagaggagatgcacccaccttccattcctcccacttctcctccaaactcctgctaacctgtcccattgctgacttcagtaacaagccagctaatagaagctctgttggggatgtcctccttgccatgcagagctgaagatatacaggaagtagaccagggaaatgggtgacaggaaagctggtgtagaagagaaccactactcacaatgcctagttgaagacatttgtctagtttcttcagtgat

SEQ ID NO: 251301 - DNA, 167 bp, Homo sapiens
cacacacacacacacacacacacaaagatttcctatacctactatagattaacaagattcacgacaattcaattagactttcaggtaaagacggtagactgaacacacacattcaattttagttcattaaaatcattaaaataatggtaaagggatttcataagaat

SEQ ID NO: 251302 - DNA, 351 bp, Homo sapiens
gaggaagaatttaaacccagggcttttccactgtaatgaaatagtcattacctttaaaaaggtaggggaggccaggtgtggtggcttacacctataatcccagcattttgggaggctgaagcaagcagatcacttgagcccacaagtttgagaccagcttgggcaacacggtgaaaccccatttctacaaaaaatagaaaaattagccagacatgttggctaacagctgtggtccagctactcggaaggctgaggtgggggatcacctgagcccggggaggttgaggctgcagtgacccatgattgcgcgcctgcactccagcctgggcaacagagtgaaaccctgtctca

SEQ ID NO: 251303 - DNA, 546 bp, Homo sapiens
gtcagtattagctcttcatatctgactcaacctcttcctcatttactgaagagaaatttaaagtgcagagatggccagtgccttgctggaggtaccatggggtgggggtcagtagtgggacagaagccaggccgctggtctctccaactagggaccatccctctgtgtgcagatgacctgggcactgaggcagggctgaattgtaggcgtggtggggtcaggttgaggggaggtgtgggactggggctcctgaacaccagggccaaaggctggaacactagaaactgggagtggaggtggggaatcccagagagaatgacatcagagtcacagcctcagcctgcactccttagcatgctgccagttagagccggtgaccttcctgagtgtctctaagtctcatctaactcataggatgatggagaatcttagaatcttaatggaagcagcagcatttctgaatgtcagagccagtatggaccttgtagatcatgttaccagcttcctgctctgtggatgcctggctaggctgtgcggccgcttctg

SEQ ID NO: 251304 - DNA, 311 bp, Homo sapiens
ctctcctgccatgcttgtgtcacttaactacctcaagcacactctagttctaaagcatttactgtttctgtattagcaaaaatatatagcttggctgttgacatttttacacaagcgttacggatataaggctggcttatagaaacttctggaaatctgacccaaaaaatggagataccactctgaaaacatggaagaagtgaactcaatagatagattgtaagtgtattatatatccctgtgtaaactgtcacgtctctctttaccaataaagcaagctttggggaaagctttgtatttaaaagttcact

SEQ ID NO: 251305 - DNA, 442 bp, Homo sapiens
tctccatcacattaatgataaaacctaaacccttagaatcttatgagctgctacctatgactgatctcccaacactaacaccctaccatccagccattccacactgatcttactggtcaaagtgccatactattgtatgcctccacttgcctctagtttacctatgcaagagctacatactcaagactcagctcaagcactccctcatctataaaagcctccctgacacttttcccatgacactgtggtccccatcttactgtaccaagagttttccctatgtcctcagagactctgtccatcgctcttcttagcacctatcacacggtgatatcattgataatttgtagccccctgcccattaaaatagggaaggaacagagatgtaacttcatctctgtgtccctgtatttgtcatatgttgatggtttttttttttaaa

SEQ ID NO: 251306 - DNA, 611 bp, Homo sapiens
atcatagacagaaatgtgttctgattgacagcaattgggtcaatgatagcattggatagccttggatagccaaggttcaggcatccactgcgggtcttagaacacatctcctgcagataagggagggctactatataacgtttctttctttttttcttcaattataaagcattctcctttttcatataacaatttgccattgatatcactttaggtataaagatattaggatatctttatagtagataaaaagctaactcattatttgtaagagttaaagtatcttccattatatcagcatataaaatgctaaagtacttttgccaccaaaaatagtgcttctgtaaatattcttttacttatacctttattaatttttacttctgctgaaacaaatagcgtgaggaaacaaatgtatgtgtataaaatgtaatatatgtatatatatttaatatgtgtatatacacatacatacaataacatacccaaatttttggttgttttttgaggtggagttttgctccgtcacccaggttggaatgcagtggtgtgatttcagctcactgcaacctccacatcttggattcaagtgattctcctgcctcagcctc

SEQ ID NO: 251307 - DNA, 166 bp, Homo sapiens
gtaataatgcttaggacctcaataaaacttcagtcctgtccgtttttggtgagcaagagatgagaacatcagggagtctgggatgaaaatgaattcctgaatgagtgaggggttgggcattccctactcagtgaggagaatgagtgttccatgcagacttttatgc

SEQ ID NO: 251308 - DNA, 750 bp, Homo sapiens
ccaataaacccattgtaagttgaaaacattgtaagtcaaaaatgcatttaatacacccaacttaccaaacatcatagcttagcgtagcctaccttaaacattctcagaacacattctaatgcatcatctattttataaaaaggtgttgaatatctgatgtaattattgaatactgaaggtgaaaaatagtagtgtatggataccattgtaatgttgagaaactgtaagtcacatcctcttaagtcaggaactatctgtataaggaaacaagatttccattttatcatttgaaatgtatttgactttgtttcactagttgcattatccccatggaaaacttcacattgagaacttaccattatatatttccataaaaatgcatgaaccatcccttagctaagtaaggattttgtaatgttctctcaataatgttgcttggcaaagttaatattttttgtatgctgatgaaaattagaaaagtccaatattgagcttgattgcaaacttagagcacctttaccttaaacaatattttctcctttaattattgattttgcaacattttgggaaagttggaatttaaataatgaataattttctaaaccagaataccagttcaacagccaaataattctggcttttcatgctgtaattttaaagcattaattttccaactttttgttcatactcaagtgtatgaacttcctggctgggcacagtggctcatgcctgtaatcccagcactttggg

SEQ ID NO: 251309 - DNA, 804 bp, Homo sapiens
ccaataaacccattgtaagttgaaaacattgtaagtcaaaaatgcatttaatacacccaacttaccaaacatcatagcttagcgtagcctaccttaaacattctcagaacacattctaatgcatcatctattttataaaaaggtgttgaatatctgatgtaattattgaatactgaaggtgaaaaatagtagtgtatggataccattgtaatgttgagaaactgtaagtcacatcctcttaagtcaggaactatctgtataaggaaacaagatttccattttatcatttgaaatgtatttgactttgtttcactagttgcattatccccatggaaaacttcacattgagaacttaccattatatatttccataaaaatgcatgaaccatcccttagctaagtaaggattttgtaatgttctctcaataatgttgcttggcaaagttaatattttttgtatgctgatgaaaattagaaaagtccaatattgagcttgattgcaaacttagaaaaactcaagacttctccttttatgttcaaattgttgtatcagtatggtattttgcacctttaccttaaacaatattttctcctttaattattgattttgcaacattttgggaaagttggaatttaaataatgaataattttctaaaccagaataccagttcaacagccaaataattctggcttttcatgctgtaattttaaagcattaattttccaactttttgttcatactcaagtgtatgaacttcctggctgggcacagtggctcatgcctgtaatcccagcactttggg

SEQ ID NO: 251310 - DNA, 680 bp, Homo sapiens
  misc_feature (539)..(539): n is a, c, g, or t
  misc_feature (562)..(562): n is a, c, g, or t
  misc_feature (590)..(590): n is a, c, g, or t
  misc_feature (680)..(680): n is a, c, g, or t
gtggaatctggctcaacggtcaccctctggtagcaagcaagacctgtctctgtgacaggtctcaatcaatggagaagcttattttgccgacgttaaggacatgcctaggctcagcgtcctaaactaagccaagtgcaccaagccaggtgctcaggctcctaaactaaggtgcaattaggcaatcagcatggattgttagactgtacaaaggtggagatgccaattccccaactgttttcctaggggttgtgttcccacacacgcactttctccttagtaacagcgcacggctcctgacctggatgggtggccttagatctgtgaagcacatctaccttgccttgagaaagatgcaactcaatgttggcttccttagctccgtgccactcagcattgcagcaccgaaaggaaaactgtttcctctctactctcccactactctcaattcttccaacaacagatgtgggttgttttcccccccttcccagccaaggcctttgacaaatgagtggtctgcacttaacttctccctttctctnctcttcatgtccagatattcctnccacagctcttacacattgctcccacangggccactacaacctctgtgctgtcagagaagtcattaacatcgtcttatcttacccaagctgtcagcggccttcactcgtgccctcctn

SEQ ID NO: 251311 - DNA, 536 bp, Homo sapiens
taagcagtttaaaacctacaaatagaaaagattatttagtttgactataaaaacattggaaatttttatatggcaatacacagggcaaaaatgatgagaccaggaaaaatgtttccaacatgacaaaagttaatattacaggttgactattctaatccaaatgtttgaaatccaaaatgttccaaaatccaaaactttttgagtgccaacatgatgttccaaggaaatgctttttggagcatttcagattttggattttcagattcagaatgctcaactgttttataatgcaaacattacaaaattggaaaaaaatgcaaaattcaaaacacttttagtcccaagcatttcaaatagggagatactcaacctgtattactctgtgaagaactcttagaaatataaaaaaggaccaaattatcttttgcctgtttttctataaggaagtaatagaataattcatggataaaatatacatgtcaataagcaatagaaagatgtttggtgtaaataaaagaaacaaaactgtaataaga

SEQ ID NO: 251312 - DNA, 168 bp, Homo sapiens
tcaggctgggacttcgataccaaagcagtaggttaaactggcacctgttgtatagtgggattcagaacatgtgcctatcaaggataaaatgtaaaagggcctgttgttaaaaggtcggatactaaaatatatcaactattacttgttagtttttagtaatgtccttta

SEQ ID NO: 251313 - DNA, 1023 bp, Homo sapiens
tcctggctcccattaagatgacatctagcctataggccattgaatagaaaaaagacattccttcctcaagcacttaacttccattcagccaaagcttatgtgtattgattttgttgcaagacacggtactgccgtctgctagaaaatggtgtagcaataaaatccaaatgtaaaatttctacattgtgaatagtacttcccagatgtggtgcacagtctgcacaagcataggcactggccctacatctaaatagatttttctggaatgaaagaatgaatgtattctattgatcctggttatgctttgaagctgtaatctgtcagtaccctctgtggtcactagataggaagttggagaatattcagagtgataaagagaagggtaatgggaaagtctaaatgagtgcttctcaaattttaatgggcgtatgaatcacccaggaatcttgttaaaatgcaaattataatttggatgtggggcctgggattctgcatttctcacaagctcccagttcacttatcatctgataagaatgctgttggtccataggccacacttcgagtagaaagactctaaaacaacagtcaatcttggcttcttgctaagtaaatgttttttagtaaaaattgtcactcttagttcattgaaattgattcagtattctattaatttctgtgttgaatcttggaatggaaagaaacttccaggtgattctaatgtgcagccaaggttgagaaccactggtctagtgaaaagtcatgcatccaaagcacctaaatgtagggactacgtgtaaaaggcattcacaaatgaaaaacatcaaataattgtgattttacattttaaaaaaagaattattcttcgtctgaatatatttatcaccacatgaatgatatacattactaagtattgcaggcgtgtccaaccttttggctgcactgggccacattggaagaagaattgtcttgggccacacataaaatacactaacactaacaatagctgatgacctaaaaaaaaaa

SEQ ID NO: 251314 - DNA, 692 bp, Homo sapiens
tctttaatcttgcaatgttcatcttaaacaagtctgaccatataaaaataggaacattagggagaataactcagtatatggataaatattctgagtgaggaacacagcacctactacaagaggagctttttgctttatcttttttcttaccttatcagcaaatgttactttatctgtgatcaggtcagaagtgtaggaagattgacttagaacaaaacataacaaagacagaagtgtcagcttgactaaaggtgttcctccattgtacaggattttaggttagcttccttccacagtgaaagttatttttaatgtaagtgtatgcttaaaagagaatacggggaggtttttacctttaaaattgatttaggaaaaaaatgccaggtggtgtaatagtccctggagtagattgatttgagaatcaggagtttttaaaaggttttacagaatacagtttagagatgatcagtcagtattgcatagcaatgcaagattttagccaaatctaatacttactttaaaagttttttttatttgagatttgtggacagaactagtattcagtgattagctgcccttatactcattttctgaatgccagcatagttattccttagaacccagataaagcaccatgtttttgtttctcacttatactgtactttgcagacactaacagactaaaaacaaaa

SEQ ID NO: 251315 - DNA, 306 bp, Homo sapiens
taaaggaaaaaataaataaaaataaaaataataaattcttactggtagtggagtaatagtaaagcaataaatcagtatcagcaatgttcatttttctgttagtactgaattagaccatgtaaaactcaaacacacagaactcaacttttcagctggtcgcagtggctcacacctgtgatcccagcactttgggaggccaaggcgggaggatcacttgaggtcaggagttcgagaccagcctggccaaattggtaaaaccccatctctactaaaaatacaaaaagtaaagctgggcgtggtggtggg

SEQ ID NO: 251316 - DNA, 473 bp, Homo sapiens
ctgtctttcatcaagtcagggagataaacagaattgaaaaattgttcacaaaggttgtcagttattagggtgtggctgacgaaccacacctgaagagctacctagatgaaggcaactcacagagttacttaacaacctccaccccagttgatggtccagagtgtttccaagggaggtgaactaagccaatgttgagactgagtgggataaggccatggtgacatgcataatagatgcattcatacacattgcttcaatagagcattttcttggatggaagcatgggaaataacacatgggcgtatactcacgcttgttgttagctttcggggtcactgctgatatccttccttgttcagttaccctttgggacttgaactcctgcaagatcgttgaaaatcttcatgttctcagaactcaaagggaagaagacttgacccctaacccttcagaaagctggctgaaaaaaaaaa

SEQ ID NO: 251317 - DNA, 559 bp, Homo sapiens
attctttataagatactcaatgcttgctttgggattctaaagggaacattaatatgtctcgtaaaaataaggaatccttaaatgagtaatttgtgtacaacactgcagatagtgcctggcacatatggtatatttagtaaaagttggttccttttccactaatcatgttttgagaattcagtatcctctatagttttattttacctttatcagtggtaacctgcatgttttgaacaggagcaggtatagaagttcagtaacaggggggcaggggagggagagcatccagataaatagctaatgcatgctgggcttaatacctaggtgatgggttgacaggtgcaacaaaccaccatggcacacattttacctgtgtaacaaacctgcacatcccacaagtgtatcctggaacttaaaaaaaattaaacacaatttttaaaaaaacaagaagttcagtaatattgtcttttataggagatagaaatttttgtttccgttactagtattgcaaaagggttgtttggattcagaaaattaaactatctagttataaaatcca

SEQ ID NO: 251318 - DNA, 405 bp, Homo sapiens
accctgccctttcactgctgtccccaacacctaatatagtgcctggcccataaggggtcctcagaagtgtttgttgaataaataagtgaagaatcatagggtgaggtggtaaacatgtgtgtgtttgttgggggctaggatgcacataatatttttttcctctctccaaagagttatttgatcattttaaatgtctttagcttgtgaggactctgctgttcttcagtatccaaggggcattggtcccaggacagcactcttccccacaggataccaaaatctgtggatgctcaagtctctgatataaaatagtgtcatatttgcatataacatgcacacatccttccatatactttaaatcatctctagattacttataatacctaatacaatgtaagtgctgca

SEQ ID NO: 251319 - DNA, 398 bp, Homo sapiens
aataaaaatagtctgctccattcagttaggaaaataaattgataactttaaattgggggagtagagtgggaagagactttcttaaagctattaaaaaaaattttagctgggcacggtggctcatgcctgtaatcccagcactttgagaggctgaggcgggcggatcacttgaagtcaggagtttgagaccagcgtggccaacatggtgaaaccctgtctctactaaaaatacaaaaattagctgggtgtggtggcgggcgcctgcaatcccagctactactcaggagctgaggcaggagaactgcttgaacctgggagtcggagggttgtagtgggcggagatcatgccactgcactccagcctgggcaacacagcaagactatatctcaaaaaaaaa

SEQ ID NO: 251320 - DNA, 433 bp, Homo sapiens
tgctgttgacaggtggggaaattgaggctcagagagggcatgtcactatccaagcctgcacagcctgcttcagcactcaaagccgtattgtgcttgaataccttgagctatggggagctcactttcatgcaggactggggttcactttcagggtttcaggggacccataaagaaaacttacctggctttaccacccccaaactggcatgtgggcctaccccctttctctagagccttagggggtgggcatcactgaaccccgctcttgggctaagctgggtgggagacattcagagctcaagttctgagtgggtacatacttggggaagactttgctcctccctgggccttagtttccccatctgtaacaaggataaaatagaccctgcctcagaggaataaatgggacgtggtaacgaaagcctggtacatg

SEQ ID NO: 251321 - DNA, 369 bp, Homo sapiens
cgggatattcttatatttttaaaaaaaatctccatttttctgaaattcaggtttaaatgagctctcctgtatttcgtgtggcaaagctatgttattattatggatatgacaatggatgtgaagtccttagcttctgtaaatcctatgcacattaaattttggatttgatccgtaagtctttttttccctactgcaaacacagtgacttgtttccacagaacatttcagtcaagccagagtaacactactttaagttacagcaatgctttaccgttcctaaagcgctttcaaagccaggcaatggcggaaggtcttgcggaaccccaccataacgtgggggtcgaggaaggtatcctcagcccgggcaca

SEQ ID NO: 251322 - DNA, 543 bp, Homo sapiens
caatgaatcagtattgatctggtcacaaattattaatgatttgaattaaaaagaaaagtttagaaaatgatagctttgacaaattaaggtagcatttcatccacacgatggagtgtgttttattcagtaattgatttaaaaatggaatcaacctaagtgtctaacaggagggagttttataaattgttcacagagcatctgttccaaggagaccttgatgttcatagatttgtaaagaatgctgcttactagcacactgactcctctgcaaatgtctgagggttcctccacttggggcaagttgggggtttgatcgcagagtaaataaatggtgcattttataatgtaatatattctagcaagatgcagcccacaaactgtatagatactcttatgtaccacgtaaagttcatctactactttaaccagaacttgatactgtatgtatgtttttttttagatttggataaaatgacaactcattgttatttccagttcacaaagtaattgtgaggctgaataaattttattattttatagaca

SEQ ID NO: 251323 - DNA, 383 bp, Homo sapiens
agctgggtgccagcgtcctactccgggccctagccaccaatcctaacctgaccgcgctggatatcagcggcaacgccatgggggacgcgggcgccaagttgctggccaaggcgctgcgggtcaactcgaggctccggtctgtggtctgggaccggaaccacacatctgctttgggtctgctggacgtggcgcaggcgctggagcagaaccacagcctgaaggccatgcctctgccactgaacgacgtggcccaggcgcagcgcagccgcccggaactgacagcacgtgcagtccatcagatccaagcctgtctcttgaggaacaaccgcgcagaccctgcctcttctgaccacacgacccgccttcagccacttggtctggtc

SEQ ID NO: 251324 - DNA, 491 bp, Homo sapiens
tagaacagtgctcagtaagctttgggtattattttctcaaaggataaatggactctcaaaaatatatagatcttcctcctgggccccaccacccttaagtcccagacccttaagacagggatggaaagcattcacttcacaataggttttactcttcccaggcgacacagtaggcaagaagattggggaacacatgtctggcattcctggactcttgacactggctcatcctttcactttgggaaggaccaggcctctccatcagggttcttcaagaaaccaacaaccaggaccagaacacaggttctttagaatatcttttctttctaatcagggcaacacaacaatttttgtgaggctgtaactctaagattatcttttaaagatgttccacctagggataaggaattagcctaccacggcctaacttttatataatttaaaggcactctttgacaataagcccacaacaaaataaatgtatcatgatt

SEQ ID NO: 251325 - DNA, 271 bp, Homo sapiens
agagtctatccccaggttatggttcacagaatactgtctcaaaacaactcaatttcagaaaaaccatccatatgtcaaaaatgacaataaagtatcattcaaagaaagaaatgatacactctgtggttctatttgcagcctttgtcaaaggcctatatatttacttaattttcttgacctgtcagaaacttttcttgccttcttcctttatcaaaaatattaccttttgtgccatttgagggaaaaggactatatgctttcaaaactttac

SEQ ID NO: 251326 - DNA, 406 bp, Homo sapiens
aggcacttttatctctgctttcatgagatgttgcttgtccttttgtcctagcacttattactccactgtgagatcctgcaggacgtggtggggaggtggggaggcagttacctattttagcagctgctaatgtttcccaagtgcttggttcctgccaggcaccatgctaagggctaaacattcattaaatcattggatcttcctaattacactacgacatagaaaccttcattttctccattttacagataaggagagggaagcccagacagtgttaagtaactttctcaatgtcacacattttgtaagtgacagagtttgggttcaaatccaggtctgcctaaccccagagcctgtgatcttaaccaccaagttatcaactgccttggaggttaatcaccagtca

SEQ ID NO: 251327 - DNA, 419 bp, Homo sapiens
aaataaatgaaattttaaaattagtagaatgagacagaaatactttttaaagtttttaatttctgatgaatatcagtatataaaactaacaattatatggccgttaattgactaaaaacagtactttagatttcagctagtgaaacagccatatatgatcttctaattccatttttatgtctcaagaatgacttgtttaaataattttttttgaattgttacattttcatcttgaaagagcttcacaaaacttacatgagaatctggattgtcataagaggtctgagtttttaatggtatgttcgtatttctgttatgtacatcgatgtcaaacattcatttcctgagctgttctccagaacacaatttgacttgtaatgaacactcaataaatggttgcttggataatcaaatcaaca

SEQ ID NO: 251328 - DNA, 183 bp, Homo sapiens
aaaaagaggatttgcttttgtaacttttgatgagcatgatacagttgataaaattgttgttcagaaataccacactattaatgggcataattgtgaagtgaaaaaggccctttctaaacaagagatgcagtctgctggatcacagagaggtcgtggaggtggatctggcaattttatgggtcg

SEQ ID NO: 251329 - DNA, 391 bp, Homo sapiens
gcccatgggggcttccaccaccctctgcaggaagctgggaaggggctcattcatgtctagcccacccagaggctcaggtcttaacctctggggttataggttatagcctccccctggcccccagtgaccgctttgaacacttccccagacgctgcctgtaagcactacactcggcctacaatttccgtgggaggatcctcccggggcccccagcaaggagcccttgacctaggttcccctcccccaccacggatttgaaaccgaggccctagaaggaaaggaactggaagaaggtggcacagctgaattgtcactttgctttttagaataggaagtgttgcaccaaggccaaaaacgttcccttctcagtaaagacagaggaaaggcagca

SEQ ID NO: 251330 - DNA, 3180 bp, Homo sapiens
  misc_feature (835)..(835): n is a, c, g, or t
aaaaattacgcgaagatgctaagataccagcttgtgaagaaagcctaagccagaccccgccgagggtgacagggaccagtcctgctcaagaccaggatcatccatccgaggaacagggggggcagggttcctgtagagagccaggtgttaacccctgcctctcccgtctaggacgcctccagcagaagatgctgcttgcctgcagagcccccagcctgaggacacgggtgcagaaggaggggctgagtccaagacgagctcagaaaaccagaagcctgaaactttatctggaaacactgaaggtgccttcattagcagaactgcacagccgcctctgaaaaggtacgtccactcggcatggaggagtcggcgtcccttacccagttaataagatcaatgaatgcgcaggtctttcttcttctagcttccacccacaaataaaatggttccaaaaagaagatgtcgtcatcttaaagataagaataaggaatgtaaaggactacaagtgtcagtatttaagggatagagtcgttttcagtgcttgggtgggagacaaattttacctggctgatctggagctgcggggcaacataaggaaagatgactgccaatgtgtgattagaaacgatgaacctgtaatcactctggccaaagagagaagggaggcatggtgtcacctactcagacagaggaaccccaacgtggcttttgattttgatcactgggaagactgtgaagaggacagccacttccccaaggtagtgaattctaaaaacctgccgtacacagtgacagaggtggttgaagacagtagcagcacttcagaggatgacgncagtgagagtgaaagagaaggtgaatgacgtcctcaagagcggctggaagatgttgaacaaaaatggatattgccatgtgaccgacagttaagaaaacagtcagtcataaccaaatctttttcttttcttttctttttttttttttttttttttttttgagacagagtcttgctctgtcggccaggctggagtgcagtggcatgatcttggctcactgcaacctctgcctcacaggctcaagcaattctcctgcctcagcctcccgagtagctgggattacaggcatgtgccaccatgcctgaccaatttttgtatttttagtagagacagggtttcaccatgttggacaggctggtctcgaactcctgacctcaggtaatcctcccacctcagcctcccaaagtgctgggattacaggtgtgagccaccacacccggccaaccaaatctttctttacctcaaggataaatgattactgtcaccttgtggtgctggacttgataacggtgagaaattcttcattgacttaaaaataggctgatgataagaccatcaaaggagggtggacacagagaaacagcaggtgtggtctgattccgccggcttgtctgtcctgtctggcgcctctcgccactcaccctggcagagcagacatgcatctgggtgatgaaatgcactgtctggagtcagtccattcattttttttcacctagacctttgctacattgctacaaacctgatcttacacatataaattgaggtttctaatgtacacacttagactcagcaactgttgaaccagccctttcaaccatgagatagtgggatttaacataaccatctatgtgaattgatagtgttagcattcttggatagtgatagctcctcagagtaagttgacttctgatgaagagatagtccagggatagaaattggattgctcagtaagacccaggcctttccggggtgaagctgctggttctaaacaatcccttggacctgcagagtcctgagcaaatggcacaaaggttgctttttagtggaaattcacaagggcctgtggggtgcctggaggtgatctttgaatgcctacatgtcgtgagccctgcagacattcgccaccccatctgcattgtggctgcagcactggggggggtcaccaggtttaggggaggagtgtatgtagtcatggccacacccagaggctggcttttgtgctttgggtttctttgttgactgaaaaagcgagaaaggtgagctattgggaaattaaaagtcctgtgcactctgtgtcttgtttatcagctttgcctcggaatggaaaagaatttggatagaacatgagtgttgtgtgacggccccaagatctttattatttttttgtatcagaaagcgccaatgcccaggcttatgtatgtcccagcagaagccaccgcttgaactagaggtgaactttgtcatcaagctgtcctgtgagcaggtctggatcacactctggctcagttttctcatctgtaaaatgagacatcccctcattgtgtggcctggccttgtctcagggagcgcccgccgagtgctgctgggttgggcagtttttctgcccagtggctctgatgggggctcagagccctggcctcccctgggaggacacgctgtgcagccaggacagctgccgggagtgtgcccaggtcactgctatggccttcgcagggtgactggcaggtatcaaatcagcccatgaaggaagatggtgattttccttttttgtagctaaattgggcaggctcttgggaagtagaaagttctggtgtttttgctggtgaaggttttgactgtggagctcttctaacacccatatcagtgtctgtttctctgcatgtggctgctgccctgttggtggagctctgggggcagagaccaggccgccgtccagtggcgccccgtgcgcaccagctgcctgctgtttacacccaggtgcgccgagtctctttcatacagcacagcaaatgataatagctagtgacaatgtgtttcctgtgcactcgtgaaaatgcagggaggacaactgcatgcttagatctgtttcttttttcagacattcaaatgttctaatatctgaagctaacattttgtaggatataggatgctgattatgtgaacaattagtcattggttttctgtactgctatgaatatgtctgatttcaagttttggtcaaatatctaaaatgcaaggtgaaagtgcctttgtctctatgcttctaaaatcgctcatgcttagttgtggtatggatgtcttccgcagtgtatcatcaataaaatttcactgttttcacagaaatgtt

SEQ ID NO: 251331 - DNA, 340 bp, Homo sapiens
aaagagggaaataacctttattgaactaaagaaatgcctggataaattccacacaattaaagaagagaaaattagggaatgtgatatatttgttaacaggttaggccttctttatttataatgtagtgtcaaggtagttcctggtgttacaacattgggcagggtaatgacaaaacatcccagaagacatatctactatcctgaaacccttctagatgttgagttatacatttagtttctattaatcaaaaagaccttggcgacatttccttcaataggtggcaagaaagaaaagttggagaaaacgataaactgaacattaaaaatccatagagcagtt

SEQ ID NO: 251332 - DNA, 593 bp, Homo sapiens
gagatcaggagttcgagaccagcctggccaacatggtgacacccccgtctctacaaaaaatacagaaattagccaggtgtggtggcgggcgcctgtagtcccagctactcaggacgctgagccaggagaatcgcatgaacctggaaggcggaggttgccatgagccaagatcgtaccactgcactccagcctgggcagcagagtaagactctgtctcaaaaccacggcactccagtctcggcagcagagtaagactctgtctcaaaaaaaaaaaaagaaaagaaaagaaaaagaaacatgcaaaatgctcacaggatctgagtgaaagacttggtttgtaagaagaggctccatgtagctctgcccttcgtgagggccccacaccatttcaagcaccctgatgggaacgttcttcctcttggcttccatcatgagtgaacaggaagaactgtatatccggccaggcacagtggctcacgcctgtaaccccagcgctttgggatgccatggcaggatcatttgaggccaggtatttgagaccagcatgggcaacagagcaagaccctgtctctacaaaaatcttaaaaaattag

SEQ ID NO: 251333 - DNA, 494 bp, Homo sapiens
gatgtcctcactctctccccattttcagctcatttggtttggtggagcttcaccctgacctataacctgagcatcactctactctcgacacaagtattgctttaggttaaacatgacacccaatcagagccagtgagacaaaataaatcacttgctgaaaatactgggaaaaagtctcttactcaaaattaaacgtcttgtctgggagtggtgactcattcctgcaattcctagcacttgggcaggccaagacaggaggattgtttgaggccagaagttagaaaccagcctggtcaacatagcaagaccatgtctctacaaaaatacatataaatataaaaaaatttagcaggatgtggtggcacgtgcctgtagtcctggctactcaagaggctgaagagggaggatagcttatacccaggagctcaagaccacagtaagatataatcatgccaccacactccagcctgggtgacagagtgaggccctgtctc

SEQ ID NO: 251334 - DNA, 265 bp, Homo sapiens
ttcctgagaccctttctggggtctattaggtcaaaactaattttgtgataaaactgggatgttgtttgcctctttccctgcattgatatttgcagtggtgggtaaagctactggtgccttttcccaatttaaggctacaactgtagaaactatattcattattgctatgtatcagccattaaagaaaaaaatgccagttacacttgataatgcctttgacaaggaaatataaattaattttattaaatcttgactcttagtaaat

SEQ ID NO: 251335 - DNA, 773 bp, Homo sapiens
ggcaccaatgtattttcagttcatatctgatgtagttaaatccacctcctgctttgtagtttactggcaagctgtttttgatataagacatctagaacactgtaaatatataacatttttatttgtctattatacctcaattacgaaaaagacatctagaagcaacctcatcaagagagatactgaggccgggcatggtagctcacacttgcaatcccattactttgggaggctgaggcaggtagatcacttgaggtcaagagtttgaaaccagcctggccaacatgttgaaaccctgtctctattaaaaatacaaaaaagttagctgggcttggtggtgggcacctgtaatcccagctactccggaggctgaggcaggagaatcacttgaacctgggaggcagaggttgcagtgagctgagatcacaccactgcactccaacctgggcaccagagtgagattacatctaaaaaataaaataaagtaataaaaaagagagatattgatagctgttgttggaaatttcaacttccatctcacttctggtaactttttggaagtttgttgaacaaagtggaatacacgcacatacacacacacacatactctcttgtttgtttaaggtttaatgaaatagctgtcatataatcactgtttttgaaagaggagaattagttgctatctgtacattttgggtatgtgaactatttggatagaactctgagaaatgcattcagaacaacaaacaaaatcataggagaaatagctaagt

SEQ ID NO: 251336 - DNA, 594 bp, Homo sapiens
tcttctccctgacatacaaagtcagcagcatttgtaaattttgcctcaagcctggagtgacttatactattccctgaacttccttacatactaattttcagtgggttatacaactgagtccttcaaatgataaagagcaccatcggccaggcgtggtggctcaagcctgtaatcccagctactccggaggctgaggcaggagaatcacttgaacctgggaggcagaggttgcagtgagctgagatcacaccactgcactccaacctgggcaccagagtgagattacatctaaaaaataaaataaagtaataaaaaagagagatattgatagctgttgttggaaatttcaacttccatctcacttctggtaactttttggaagtttgttgaacaaagtggaatacacgcacatacacacacacacatactctcttgtttgtttaaggtttaatgaaatagctgtcatataatcactgtttttgaaagaggagaattagttgctatctgtacattttgggtatgtgaactatttggatagaactctgagaaatgcattcagaacaacaaacaaaatcataggagaaatagctaagt

SEQ ID NO: 251337 - DNA, 453 bp, Homo sapiens
gatggaggtgggcagactgcttgagcccaggagttgtagaccagcctgggcaacatggcaaaaccctgtctacacaaaatacaaaaattgaccaggcatagtggcacgtgcctatagtcccagctacttggtaggttgaggtgggagaatcacctgagcccaggaggtcgaggctacagtgagctgtgactgagccactgctctccagcctggcaacagaatgagaccttgtctcaaaaaacaaaaacaaaaaacaccagaaaagacaccattttatatagggcccttgagcatctgtggattttgatagtcaaagggatcctggaaccaactccctgcagatactgaggtacaactgtactggaaattaacttaatgaagatattaggacacagaaaatgaataaaccggactgggcgcggtggctcatgcctgtaatcctagcactttggg

SEQ ID NO: 251338 - DNA, 468 bp, Homo sapiens
gagccttaaaaagaaggaaatgtgccatctgcaacaacacagataaacctgggggacattataacagtgaaataagccaggcacagaaagacaaatattgcccggtctaacttacatgtggaatctgaaaatgtccaagtcacagaaacagagagtaggatgcaggttaccagaggctgtgggtgggtaggaattggggagacattggtcaaagggcacaaagtttcagctatgcaggatgaattaagttcagaagatctattgtacagcatgatgactagtcaataataatgtacccttgaaaatctctaagagtagattttaaatgtactaatcacaaaaaatgggatgtgaatgatgggacacattaattagcttaatcactctgtagtgtaaacatatatcaaagcatcagattgtacaatttttcatttgttaattaaaaatatataaatatactatgggatt

SEQ ID NO: 251339 - DNA, 845 bp, Homo sapiens
gcgagaacgcaggaccagcttccgggaggcgctccgcacgtttgccgtgctccgccgggaagatggggaaagtgagggggttgcgcgcccgagtgcaccaggctgccgtgaggccgaaaggggaggccgcccccggccccgcgccccctgccccggaggcgacccctccgccggcctcggccgcggggaaggactgggcgttcatcaacaccaacatctttgccaggaccaagatagaccccagcgccttggtgcagaagctggagctggacgtgaggagtgtcacttccgtcaggagaggtgaggcaggctcgagtgcacggagcgtcccttccatcaggagaggtgcagaggccaagaccgttttgcccaagaaggagaaaatgaagctgaggcgtgagcaatggttgcagaaaatcgaagccataaaactggctgagcagaagcacagggaggagcggaggcggagggccacggtggtggtgggggacctgcaccctctcagggatgccctgcccgagctgctggggctcgaggctggcagccggcgccaagcccgcagcgaggaaggaaaggacccggtttcaggagctgctgtgcagtccggcctacagagccagcccctgtgtggccatcgggcagacgctggccggcagatgcagctggaaatggcggcaagctctgagcagggcagcggggcatgccacaactcctcaggacacatgtgggccaagtagagagcgccggcccctcaaggaccatggcctgagcctggtggacgcccttccctctggtcggttgtggggctcaataaatggctctgtgaacttcccctgcaaaaaaaa

SEQ ID NO: 251340 - DNA, 674 bp, Homo sapiens
gcgagaacgcaggaccagcttccgggaggcgctccgcacgtttgccgtgctccgccgggaagatggggaaagtgagggggttgcgcgcccgagtgcaccaggctgccgtgaggccgaaaggggaggccgcccccggccccgcgccccctgccccggaggcgacccctccgccggcctcggccgcggggaaggactgggcgttcatcaacaccaacatctttgccaggaccaagatagaccccagcgccttggtgcagaagctggagctggacgtgaggagtgtcacttccgtcaggagaggtgcagaggccaagaccgttttgcccaagaaggagaaaatgaagctgaggcgtgagcaatggttgcagaaaatcgaagccataaaactggctgagcagaagcacagggaggagcggaggcggagggccacggtggtggtgggggacctgcaccctctcagggatgccctgcccgagctgctggggctcgaggctggcagccggcgccaagcccgcagaaagcaggggctgtgtgcagttgttcaaacctggggtccatcctttcatggcccagctgcccaggctcgagggtggcaggtcacgcgctgcaggcccaggcagctccaggctggcatcccgcggcggaggcaccagagcactgggtccagaatagga

SEQ ID NO: 251341 - DNA, 568 bp, Homo sapiens
gcgagaacgcaggaccagcttccgggaggcgctccgcacgtttgccgtgctccgccgggaagatggggaaagtgagggggttgcgcgcccgagtgcaccaggctgccgtgaggccgaaaggggaggccgcccccggccccgcgccccctgccccggaggcgacccctccgccggcctcggccgcggggaaggactgggcgttcatcaacaccaacatctttgccaggaccaagatagaccccagcgccttggtgcagaagctggagctggacgtgaggagtgtcacttccgtcaggagaggtgcagaggccaagaccgttttgcccaagaaggagaaaatgaagctgaggcgtgagcaatggttgcagaaaatcgaagccataaaactggctgagcagaagcacagggaggagcggaggcggagggccacaactcctcaggacacatgtgggccaagtagagagcgccggcccctcaaggaccatggcctgagcctggtggacgcccttccctctggtcggttgtggggctcaataaatggctctgtgaacttcccctgcaaaaaaaa

SEQ ID NO: 251342 - DNA, 916 bp, Homo sapiens
gcgagaacgcaggaccagcttccgggaggcgctccgcacgtttgccgtgctccgccgggaagatggggaaagtgagggggttgcgcgcccgagtgcaccaggctgccgtgaggccgaaaggggaggccgcccccggccccgcgccccctgccccggaggcgacccctccgccggcctcggccgcggggaaggactgggcgttcatcaacaccaacatctttgccaggaccaagatagaccccagcgccttggtgcagaagctggagctggacgtgaggagtgtcacttccgtcaggagaggtgaggcaggctcgagtgcacggagcgtcccttccatcaggagaggtgcagaggccaagaccgttttgcccaagaaggagaaaatgaagctgaggcgtgagcaatggttgcagaaaatcgaagccataaaactggctgagcagaagcacagggaggagcggaggcggagggccacggtggtggtgggggacctgcaccctctcagggatgccctgcccgagctgctggggctcgaggctggcagccggcgccaagcccgcagcagggagagcaacaagccccgggccctcagagctcagccgggatgagcgcagcccagagacagcagcttctcgaggaaggaaaggacccggtttcaggagctgctgtgcagtccggcctacagagccagcccctgtgtggccatcgggcagacgctggccggcagatgcagctggaaatggcggcaagctctgagcagggcagcggggcatgccacaactcctcaggacacatgtgggccaagtagagagcgccggcccctcaaggaccatggcctgagcctggtggacgcccttccctctggtcggttgtggggctcaataaatggctctgtgaacttcccctgcaaaaaaaa

SEQ ID NO: 251343 - DNA, 439 bp, Homo sapiens
actctttcaacgaactgccaattggaaaacctcctataacttggaactgtccccagcccgctttgggttgtcctgcctttccagatcaaaccaatgtacatcgtacatgtattgattgatgtcttctgtctccctaaaatgtataaaaccaagctgtagcctgaccacctcgggcacatgtcatcaggacttcctgaggctgtcacaggcatatccttaaccttggcaaaataaacttctaaactgattgagacctgtctcaggtactttcttggtttacaggaatttaagcaaattacaggactgcactacccatgagtttgtgaaaggaaaaataaatctcaggaccccaaaatcactaagccaaaaagaaaagtcaagctgggaattgcatcgagcaaacctgcctctcattttattcctgaataagatagctaca

SEQ ID NO: 251344 - DNA, 418 bp, Homo sapiens
agcccctgcccccgtgtgtggcccgccagccctggccaggtaaccaggtcctcaggtaccttctgtcattgcgttgcctctcagcggtgcaccgtgcacctgatggggtggctcatgtgaggaatgagagatctcacaataggcaggatttacgggagtgtgtcggggcaggaggtcatgtgtgccagcacaaactgctggaaaccgtcccttatcggaggcaaacggccaagcacgggggtctgaggatcatgtgctacctgccgattcacggtgcacctgccagcgttccggaatcaacaacgccagctcctctcagtgacattgtacatgtcattgtgttattttcgcttgaagtttatatccattttagacctcaggcttcttggggccaagaataaactttcttctgatcctt

SEQ ID NO: 251345 - DNA, 98 bp, Homo sapiens
ctctctctctctgtgctgagccacttggagctgcaggtgggctgacacaacatccctatggctaccatcacttagactgcactgggtcagacctaaag

SEQ ID NO: 251346 - DNA, 830 bp, Homo sapiens
accccagtccgtgagcggcttggatcctcgcccgttccctcctggtcgtttccgcagtaacctcttatcagagcgggcagctgtgagtggcgctcacatccgccgctgccctgtcgaatgggggaaagagttcttgtgttctgaggagggtttggctatggtccttgaccctattcttgtctcagacttgcctcccaggaatataggaggattgtatgccctggcctccctgtgatggggttgaactacatgacatgttctccgaattaagtgtgagcatagcatttaattgttgatgcaagaccttccagaactctttttctctttgccatggcaatcatcagtgttccagagagcatatgcacgatcagccttggtattggagggaagatgatgcggaacagagtcccagtcacatcatgaaggacatgtaaagtgagaagtaaaccttggttgttttaagccattgagatttgagttttgttaccagagcagatctttgtcatcctggataatgtgcctgagaagaagaggtttaaggaagaaaacttgtgaacaccaatgtgcttgttagactcctttgcttgctccctgttatacacttgccactacacttctgacttagatgtggtactttgttagtatctgtgaggactgaaaatgagatcgaagagaaaaatccaatcaagcattaagtaatcatatttaaatggaaaatgggaagatactattaacgaattcaatggtggcttggtcctgatgacactcttcttgaattatacgatgttcttatctcttgcggggctgttgaaataatcaaatctttgtac

SEQ ID NO: 251347 - DNA, 713 bp, Homo sapiens
catttttaagagttcgctttctcagagggcagcttctcaaactcattcgctggtttcttttcctctttccgcctgtttaaggaatataggaggattgtatgccctggcctccctgtgatggggttgaactacatgacatgttctccgaattaagtgtgagcatagcatttaattgttgatgcaagaccttccagaactctttttctctttgccatggcaatcatcagtgttccagagagcatatgcacgatcagccttggtattggagggaagatgatgcggaacagagtcccagtcacatcatgaaggacatgtaaagtgagaagtaaaccttggttgttttaagccattgagatttgagttttgttaccagagcagatctttgtcatcctggataatgtgcctgagaagaagaggtttaaggaagaaaacttgtgaacaccaatgtgcttgttagactcctttgcttgctccctgttatacacttgccactacacttctgacttagatgtggtactttgttagtatctgtgaggactgaaaatgagatcgaagagaaaaatccaatcaagcattaagtaatcatatttaaatggaaaatgggaagatactattaacgaattcaatggtggcttggtcctgatgacactcttcttgaattatacgatgttcttatctcttgcggggctgttgaaataatcaaatctttgtac

SEQ ID NO: 251348 - DNA, 399 bp, Homo sapiens
gtagtcatttctgaccaacgttgtagagcactttttttttaatgccctttgcatgcacctgatacataaactgaaaacctggtttttctctagggtgtcagtataccagcactaacttcattaacacactctccgctgcgcctgaatttggagcctcacatttttggacgtatgatgcctgaacctagtaaataaagcaattttgacttcagaaagttttataataatttatattttttttctgttatcaaccagcgtaaataaattacatttgtaaattatttttaacagttgttaccaggaaataaaacttcttaaatatttaaaatgtttaaaaactttttcttctgaaactgttaccttgagaataatttattaaacttttcttcatagaaaaaa

SEQ ID NO: 251349 - DNA, 378 bp, Homo sapiens
ttaaaaataattagggaataatacagtttgcagattttctcccgatgtcatcatggcactcagtaacaaggaatattgtagatgaattttgaaaatgtttttcctggaagagaatcccaaacgtgtggccgaaagggacccaggacctgccagccatgctcctcctgtctttttcccttccagtttgaaccccacagcgctgggcggttgacgaggtgtggccagcttgcatctgctgaaagaaccggggtggcccccctgcatcttgatcagacactgccatgaggtccctcccctctttgatggcaaagggaaacagtgggctctacacatggagctttgaagtcaagagtcattttcatccttagctcagcatga

SEQ ID NO: 251350 - DNA, 523 bp, Homo sapiens
ggggaaaaattgaaggtctttcctctaaggtctggaacaagacaaaaatgcctactttcaccgcttttatttcatccaccctcctctccctaggaggcctgcccccgctaaccggctttttgcccaaatgggccattatcgaagaattcacaaaaaacaatagcctcatcatccccaccatcatagccaccatcaccctccttaacctctacttctatctacgcctaatctactccacctcattcacacaaaaagaaaaccaactgagacgctgtcactagggtttttcaaataggtagagaatcttaaatatccagtaatgatgacaacctcacttactgggagcttactcgtggggctaaggaggatgcatgatgatcccatttttattgtcacagctaccgaaggaagataccctcttcaacccaattttacaaatggagaaatagaagctcagggaagaatctgaagtagtctcaaaggaagtgacaggaaggatgtggagaaagctgagtgtcaaagt

SEQ ID NO: 251351 - DNA, 320 bp, Homo sapiens
ggccctctattctcttccagtggcctatatgtctatctttatcccagtagcacacagttttgattactctatctttataatacattttgaaattagaaaatgtgatgcccctagctttgtttttcttgctcattgttttgactattctgggtcctttgtggttttatatgaattttaaaattgttttttctatttctgtcaagagtgccattaggattttgatagggattgtatataatctataaattgctttgaatagtatggatattttaatattattatgtcttccaattcatgaacataggatatctttctactga

SEQ ID NO: 251352 - DNA, 745 bp, Homo sapiens
agggttcattttgatagcatggaagaaatcaatctcacctggcttatttcttgagaaagagagatcagtagaggcttcctagaagagatggagcctgggttgaatcaaaatatcagtaaaaaagagtttgggtggaattccaggcagcaaaaattgttatgcatagaaatttaaaccagtttagaattgtgatgcaagcagaatgtacacaagaggcaagggtgagaggtgagcttagaaaaattggtcagattatggaaagcattggcctttaccttaaggagtttggcttatatcctattgaggttgaggagtaagtaaagggttataagcagggaacgagatacgcaaattgcaatgtaaatagatgtctccacggtacatggaggataagttggaagggtgaatagagaggagtaggggtgaagaaagtttcatacccagaaaaccatttggattctggtccagtatcctgtctggagggaaagattagttaggaactagagttgtaacagattcaagacatatttggcagataaaatcagcaggatttggtgattgattggatatcaaatgtaagagaaaggaaggatcccaggactaccaggtggatgttagcagtgaattgaaaaccacaggaggaggagctgactcggcaggtaatgattttgagatgcctgtgaattgtttaaatacagatatcctatagattcttacacaatgtgcctctaacccttaacatgta

SEQ ID NO: 251353 - DNA, 478 bp, Homo sapiens
ttgtatccaaatatacatatgtatgttaaaagaagtttctcataaaagtgagattttacaaacttttttaaagtcattaatatatcttagataactttaaaaaaaatgttagtactggccaagcacagtggctcatgcctgtaatcccagcacatttggaggctgaggcgggaggatcacttgaggccaggagtttgagatcaacctatgtaacgtagtgagaccccatctttccaaaaaaacagtcggtacttatggttccatatcatacatttgtagtgtaaaatgacataaaattcagttgatcacctggtaaaatactgttattcaattgtgttcttttaagtggaaatattagtcaaaaatatgatttaacttgcaatacctataaccctagactcatttttgtctcccatgccccagtacacattttatgtgtggtgtagattttgcatgaacactaaagcacatatacaac

SEQ ID NO: 251354 - DNA, 746 bp, Homo sapiens
gtatttttagtagagatggggtttctccatgttggtgaggctggtcttgaactcctgacctcaggtgatccgccctccttggcctcccaaagtgctgggattacaggcgtgagccaccacgcccggctaattttgtatttttagtagagatggggtttcatcgtgttggtcaggctggtcttgaactcctgacctcagatgatctacccacctcagcctcccgaagtgctgggattacaggcatgagccaccacacccggccacacgtgttattttcttagagaggccttccctgatcacttattctaaagtgggaactagtgatcaagtgatcaagtttaatgttttacagtgatccaggtgacatttgtgaggtctcaactgaagaagtagcaatgggggtggaaaagaaagggacagatacaagaaataatttaaaaaaaaagaattgtgagtgtggtggctcacatctgtcatcccaacactttgggaggctgaggcgggaggattgcttgaggccaggagttcaggatcagcctgggcagcatggtgaaaccccatttcttaaaaataaataaatacataaattggccacgcatggtggctcatgcctgtggtcccagctacttgggaggctgaggcaggagtatcgtttgagcccaggaatttgaagcttcagtgagctatgattgagccactccattccggcccgggtaacagagtgagaccttgtctcaaaaaaaaaa

SEQ ID NO: 251355 - DNA, 669 bp, Homo sapiens
ctgtccaaagtcagttcttgactgactgacttatttttgagacaggatctcgctctgtcacccatgctggagtgcaatggcatgatcatgggtcactatagcctcaaccttccaggctcagatgatctacccacctcagcctcccgaagtgctgggattacaggcatgagccaccacacccggccacacgtgttattttcttagagaggccttccctgatcacttattctaaagtgggaactagtgatcaagtgatcaagtttaatgttttacagtgatccaggtgacatttgtgaggtctcaactgaagaagtagcaatgggggtggaaaagaaagggacagatacaagaaataatttaaaaaaaaagaattgtgagtgtggtggctcacatctgtcatcccaacactttgggaggctgaggcgggaggattgcttgaggccaggagttcaggatcagcctgggcagcatggtgaaaccccatttcttaaaaataaataaatacataaattggccacgcatggtggctcatgcctgtggtcccagctacttgggaggctgaggcaggagtatcgtttgagcccaggaatttgaagcttcagtgagctatgattgagccactccattccggcccgggtaacagagtgagaccttgtctcaaaaaaaaaa

SEQ ID NO: 251356 - DNA, 1031 bp, Homo sapiens
ccctccctcatcacccccaccgcctccagctccacatccagattccaaaagccatgagcacccccatctgaccatgaacgcccatctgaccatgaacgcccatctgcggatcgccagcagcaaggttgacacggaactccttccgccttgggaggaggcttccctggggtagtaccctctgggggccgtctgggcaactcttgcagggcttcgtggatgtttggggaaagcactggacagcgcctcgcccaggtgccttcctgggaatcaccaactggggtttactgccccaattttggagcttgcacagagcatcctcccttggtaggagagacgtcgccattgggccacaggacttgtagaggacgccacgagaaaggggttgattggggaatggttgtcctggttacgccaccctgcagtgtcccttgccctcctccaaggcttccagccccatcgcaacctgtcagttttccaggcgctcaggaaagcatgtcaagcactcaagcactctgtgacaattccacccccggcccagtctttccctcttcacccactctctgtgatgtcgaatcccatttcacagatggagaaactgaggaatcgagcaagtgaatgccgcttaaacatcttttccaagccagccagggaccagcccctccagttctcagaatctctctccctctgtaacatattttgacttgaagaacatgtgcgattcgtgactacaaaaccgcaaccccacataaagagttaatatttttaacgaaccccaagcccctcaccctcagccttcgcgggacgcctgcgtctcgcaacttcagtttgtatctccaaactgctgagcattcaaagggttaaatgggaccgggagggggccagccgcggagccctgaaagggttaaaaatccaaacgcgtcgactccccccgactatttggttccaaatggacagccacgcgaccgggagagccagggagcccccctcacaatgactttattaaaatttgagaacttttacttctgacccca

SEQ ID NO: 251357 - DNA, 1835 bp, Homo sapiens
ggcgtggcacgccgcccgctcagaaagcgcgggaaaggcacgcagccacgccccaagggcgcagcctaggacaggggcttctggagcttctggcagccgtctgccctcatggcctttgcacctatggggcccgaggcctcgttcttcgacgttttggaccgacacagggagtccctgctggctgccctgaggagaggtggcagggagcccccaactgggggaagccgcctggcctccagttctgaggttcttgcatctatagaaaatattatccaagacataatcacaagcttggcaagaaatgaagcacctgcattcacgatagacaacagatcaagctgggaaaacataaagtttgaagattctgtgggtcttcagatggtatcccattgcaccaccagaaagatcaaaagtgattcaccaaaatcagctcaaaaattttctctaatccttaaaatattgtccatgatttataaattagtacagagcaacacttatgcaaccaaaagggacatatattacactgacagtcaactctttggtaaccagactgtcgtcgacaatattatcaatgacatttcttgcatgttaaaagtgtcaaggaggagtctacatatattatctacatcaaaaggtttaattgctggcaacttaagatacatcgaggaagatggcaccaaagtgaattgtacctgtggtgcaacggctgttgctgtgccatcgaatattcaaggaattcggaatttagttacagatgcaaagtttgtattaattgtagaaaaagatgcaacatttcagcggctcctagatgacaacttttgcaacaaattgtctccttgcatcatgattacgggaaagggagttcctgatctaaacacaagacttttagtcaagaaactgtgggatacatttcatgttcctgttttcactcttgtagatgctgatccacatggcatagaaataatgtgcatctataagtatggatctatgtctatgtcttttgaagctcatcatctcacagttccagctattagatggcttggtcttctcccttctgatcttaaaagattaaatgtacctaaagatagtttgattccactgacaaaaagggaccaaatgaaacttgacagtatcctgaggagaccttatgttacctgccaaccattttggagaaaagaaatggaaataatggcagactctaaaatgaaggcagaaattcaagctttgactttcctatcatcagattatctttccagagtgtacttacctaacaaattaaaatttggaggatggatataaaaataaatcagaagaacttctgattgccagaggcttttcattagttttgttttgattggcaaatactattgtggaaagaacatatattatattcttaattctgtaaaagtgaaataaaataactttccgttaattatatatttttgtcaaaacaaatgctgtactccaattttctttgcaaggccttattcttgcctctatagagacagatttctgtcctatcttctaaagcaaattataaaagaatatgttattttgacctttaaattatttttgaaaaaataatattttatacatgtcatcaaagtctacaaaatatttaccttctacgatacaactaatgttaacgcataaagtatcttactggtaacaaaaatcataatgatctgaatttgagatgttgcaaatgaattgtggtgtccggtagtttcttcttacattttcctttgcctttatactttaggggtcttactccattaattcatttgttacattagtaaaattcagtatgaataaatatttggatgcgtccagtc

SEQ ID NO: 251358 - DNA, 1721 bp, Homo sapiens
ggcgtggcacgccgcccgctcagaaagcgcgggaaaggcacgcagccacgccccaagggcgcagcctaggacaggggcttctggagcttctggcagccgtctgccctcatggcctttgcacctatggggcccgaggcctcgttcttcgacgttttggaccgacacagggagtccctgctggctgccctgaggagaggtggcagggagcccccaactgggggaagccgcctggcctccaggtttgaagattctgtgggtcttcagatggtatcccattgcaccaccagaaagatcaaaagtgattcaccaaaatcagctcaaaaattttctctaatccttaaaatattgtccatgatttataaattagtacagagcaacacttatgcaaccaaaagggacatatattacactgacagtcaactctttggtaaccagactgtcgtcgacaatattatcaatgacatttcttgcatgttaaaagtgtcaaggaggagtctacatatattatctacatcaaaaggtttaattgctggcaacttaagatacatcgaggaagatggcaccaaagtgaattgtacctgtggtgcaacggctgttgctgtgccatcgaatattcaaggaattcggaatttagttacagatgcaaagtttgtattaattgtagaaaaagatgcaacatttcagcggctcctagatgacaacttttgcaacaaattgtctccttgcatcatgattacgggaaagggagttcctgatctaaacacaagacttttagtcaagaaactgtgggatacatttcatgttcctgttttcactcttgtagatgctgatccacatggcatagaaataatgtgcatctataagtatggatctatgtctatgtcttttgaagctcatcatctcacagttccagctattagatggcttggtcttctcccttctgatcttaaaagattaaatgtacctaaagatagtttgattccactgacaaaaagggaccaaatgaaacttgacagtatcctgaggagaccttatgttacctgccaaccattttggagaaaagaaatggaaataatggcagactctaaaatgaaggcagaaattcaagctttgactttcctatcatcagattatctttccagagtgtacttacctaacaaattaaaatttggaggatggatataaaaataaatcagaagaacttctgattgccagaggcttttcattagttttgttttgattggcaaatactattgtggaaagaacatatattatattcttaattctgtaaaagtgaaataaaataactttccgttaattatatatttttgtcaaaacaaatgctgtactccaattttctttgcaaggccttattcttgcctctatagagacagatttctgtcctatcttctaaagcaaattataaaagaatatgttattttgacctttaaattatttttgaaaaaataatattttatacatgtcatcaaagtctacaaaatatttaccttctacgatacaactaatgttaacgcataaagtatcttactggtaacaaaaatcataatgatctgaatttgagatgttgcaaatgaattgtggtgtccggtagtttcttcttacattttcctttgcctttatactttaggggtcttactccattaattcatttgttacattagtaaaattcagtatgaataaatatttggatgcgtccagtc

SEQ ID NO: 251359 - DNA, 1753 bp, Homo sapiens
ggcgtggcacgccgcccgctcagaaagcgcgggaaaggcacgcagccacgccccaagggcgcagcctaggacaggggcttctggagcttctggcagccgtctgccctcatggcctttgcacctatggggcccgaggcctcgttcttcgacgttttggaccgacacagggagtccctgctggctgccctgaggagaggtggcagggagcccccaactgggggaagccgcctggcctccagttctgaggttcttgcatctatagaaaatattatccaagacataatcacaagcttggcaagaaatgaagcacctgcattcacgatagacaacagatcaagctgggaaaacataaagtttgaagattctgtgggtcttcagatggtatcccattgcaccaccagaaagatcaaaagtgattcaccaaaatcagctcaaaaattttctctaatccttaaaatattgtccatgatttataaattagtacagagcaacacttatgcaaccaaaagggacatatattacactgacagtcaactctttggtaaccagactgtcgtcgacaatattatcaatgacatttcttgcatgttaaaagtgtcaaggaggagtctacatatattatctacatcaaaaggtttaattgctggcaacttaagatacatcgaggaagatggcaccaaagtgaattgtacctgtggtgcaacggctgttgctgtgccatcgaatattcaaggaattcggaatttagttacagatgcaaagtttgtattaattgtagaaaaagatgcaacatttcagcggctcctagatgacaacttttgcaacaaattgtctccttgcatcatgattacgtcaacaccagtctttcagcacctgaaatccaagggaaagggagttcctgatctaaacacaagacttttagtcaagaaactgtgggatacatttcatgttcctgttttcactcttgtagatgctgatccacatgattaaatgtacctaaagatagtttgattccactgacaaaaagggaccaaatgaaacttgacagtatcctgaggagaccttatgttacctgccaaccattttggagaaaagaaatggaaataatggcagactctaaaatgaaggcagaaattcaagctttgactttcctatcatcagattatctttccagagtgtacttacctaacaaattaaaatttggaggatggatataaaaataaatcagaagaacttctgattgccagaggcttttcattagttttgttttgattggcaaatactattgtggaaagaacatatattatattcttaattctgtaaaagtgaaataaaataactttccgttaattatatatttttgtcaaaacaaatgctgtactccaattttctttgcaaggccttattcttgcctctatagagacagatttctgtcctatcttctaaagcaaattataaaagaatatgttattttgacctttaaattatttttgaaaaaataatattttatacatgtcatcaaagtctacaaaatatttaccttctacgatacaactaatgttaacgcataaagtatcttactggtaacaaaaatcataatgatctgaatttgagatgttgcaaatgaattgtggtgtccggtagtttcttcttacattttcctttgcctttatactttaggggtcttactccattaattcatttgttacattagtaaaattcagtatgaataaatatttggatgcgtccagtc

SEQ ID NO: 251360 - DNA, 1666 bp, Homo sapiens
ggcgtggcacgccgcccgctcagaaagcgcgggaaaggcacgcagccacgccccaagggcgcagcctaggacaggggcttctggagcttctggcagccgtctgccctcatggcctttgcacctatggggcccgaggcctcgttcttcgacgttttggaccgacacagggagtccctgctggctgccctgaggagaggtggcagggagcccccaactgggggaagccgcctggcctccagttctgaggttcttgcatctatagaaaatattatccaagacataatcacaagcttggcaagaaatgaagcacctgcattcacgatagacaacagatcaagctgggaaaacataaagtttgaagattctgtgggtcttcagatggtatcccattgcaccaccagaaagatcaaaagtgattcaccaaaatcagctcaaaaattttctctaatccttaaaatattgtccatgatttataaattagtacagagcaacacttatgcaaccaaaagggacatatattacactgacagtcaactctttggtaaccagactgtcgtcgacaatattatcaatgacatttcttgcatgttaaaagtgtcaaggaggagtctacatatattatctacatcaaaaggtttaattgctggcaacttaagatagctgttgctgtgccatcgaatattcaaggaattcggagtatcctttaagtgggaaaactatttaaacttttggaatgttcattcattcattaattcctttgggaaagggagttcctgatctaaacacaagacttttagtcaagaaactgtgggatacatttcatgttcctgttttcactcttgtagatgctgatccacatggcatagaaataatgtgcatctataagtatggatctatgattaaatgtacctaaagatagtttgattccactgacaaaaagggaccaaatgaaacttgacagtatcctgaggagaccttatgttacctgccaaccattttggagaaaagaaatggaaataatggcagactctaaaatgaaggcagaaattcaagctttgactttcctatcatcagattatctttccagagtgtacttacctaacaaattaaaatttggaggatggatataaaaataaatcagaagaacttctgattgccagaggcttttcattagttttgttttgattggcaaatactattgtggaaagaacatatattatattcttaattctgtaaaagtgaaataaaataactttccgttaattatatatttttgtcaaaacaaatgctgtactccaattttctttgcaaggccttattcttgcctctatagagacagatttctgtcctatcttctaaagcaaattataaaagaatatgttattttgacctttaaattatttttgaaaaaataatattttatacatgtcatcaaagtctacaaaatatttaccttctacgatacaactaatgttaacgcataaagtatcttactggtaacaaaaatcataatgatctgaatttgagatgttgcaaatgaattgtggtgtccggtagtttcttcttacattttcctttgcctttatactttaggggtcttactccattaattcatttgttacattagtaaaattcagtatgaataaatatttggatgcgtccagtc

SEQ ID NO: 251361 - DNA, 397 bp, Homo sapiens
ataaattgtgcatgaaatagtccactctggtaatctacagagttatggtaaggaaaatggctttgtgaggaaatacagcaaaactgaaattaactgaaatccagttaaacagaatctctaaagaagctgaattatatgtttgtttatttgctattgtttgtttctatttatattcatctttgggggaaaatagtagtgttgtctggggcttaatcaaaaaattcattttcaggacatttaatgtaattagagatttattcccagctctggtaccttctatgtcctcagtccttacctatgagatttcccatttataatgatgacccagaggccaagcagcacccagaattcacaaataaaaataaaaataagcttatgaatttccatttcctaaaat

SEQ ID NO: 251362 - DNA, 303 bp, Homo sapiens
cccaggctggagtgcagtggcatgatctcagctcactgcaacctctacctcctgggttcaagcgattctccaggcttagtctcccgagtagctgggattacagaatcgcggcatgtcttccaaggaaaaaactgtaactaaatctatggcaagtttttggattagaaaaatctaggcttcatgaagataagagcagagctgtggaaaagtaagacaaagaaatcatccaacaatacaagcaacatacaagaggtttgcagtctatcaatgaaaactgattaaatttacataagtgctaatctc

SEQ ID NO: 251363 - DNA, 440 bp, Homo sapiens
ctgaaaacaaaaagaagaggctatttaataaaatctgtagtaccacctgtaatttgagaaaccactagcttggatgttatatgggcccataaggtgaaatgaaaactgcttaatagagcataaacaatgacataccaggtaatggaaggtttccagcccatgccactgaattggtactagcccttaacatctctgttaattatcaaggagacaagataactgcacatttatttaatgcctgggtggcacagcatctgagagcgacgcaaaagctgtagagagagaaataattcaaagagatctgagtagattaagagattagagagaaagcagtcagtaatttacagaaaggcacctgaatttgctcaatttcctaatcatgcagtttgttttgcatcataacagttgcattcagggagctgttgtacatatttctgaaa

SEQ ID NO: 251364 - DNA, 697 bp, Homo sapiens
agttcaggtgagttttcacaatataaagtaagtggaaaagaatccccagataattgtgacatgctaaagctagatactgagaaccaaaaagatgtgacctcagtatgggacttttaattcaaggatattagctaccaaatgacagtttttcagaccgtaagcattgctttttaaaaatcaagataaaatacatttataacatatcttacttttagtatagcttctgaatttagttctcaatagataagacaaaagagatgaacatctgcttcctttcccctcaagcgatgtattcttactaataggtaatatgtttttttttggtacttaaaggcagtgtttttcaatcttttccatgttagtagctcagatctttaaggacagaggatacaaattagggggcagcttgcgttcttaatcctaagtggctctctgatgtcttagattcttcctttcctttttgtgagtaaaacttctgctctagtaggatgagcctgttcaccttgtgactgcctaactgatcattgctttatgttccagtttttagaagcaggcagattatattacctgacttaaaatgcttttgagactaaaggtagtatcttaaattttaacttacgagtttcctttaagtacaactttgatgaaattatggggattgagtttccatggctttcaccatagtgaaaatggaaag

SEQ ID NO: 251365 - DNA, 796 bp, Homo sapiens
gagaaatagaactgacatcagagaatacattcaaatcaactgaatttaaagggaaaaaatgcaatttctcctaaattccattcaaagccaaaacattcagattttctgacaccaacttagcaaatgtttaaaatacaagggtatacttcttattgataagttaccatgggttccactagtagagctggagagataagcaaacatgctgggtgaaccctagagtaagcctgagactatggctgcacagacagaagagaacacagaacaaaacagaaactcaaaggtttcctcatccagggcagtcttcatgaagacagttcaaattccaaactgttagatcattaaaggaataggcatgtgactagccctatgaattattcaaattcttataaataagaagacaataatggcttagcagttgaggtaattacatagtaaaattctatttttcttcacattacggagactgagtctaaataaatatgagggtgggggacccattactttaaattttcagtgaaaaagttacaagtcatatataatggcttaatactggctagtcactccattctgatgagctcctgcccatcagaatatttgctatttaaagaatctttgttggcatgttaagtgaaaaatgtgttcctcctaagtttcttctgaagtctacacttagagtcttgtatatagtggtccttgtaaaagaagcactagtggttgtgatgatgaacaagtttgagaacgtttagctataaaagaccctctctgtaagagacatcaacaaggtctcttatga

SEQ ID NO: 251366 - DNA, 284 bp, Homo sapiens
gtttgaccgtggctcagtgatcctctggaggcaggagaatcgcttgaaactgggaggcggaggatgcagtgagccgagatcacgccattgcactctagcctgggcgacgagtgaaactccgtctcaaaaaaaaaaaaaaaaaaatgaagtgtagaggtagaggtcagtggtttttagtatttagtattcattgagctgtgcagccatcaccacaatcaattgtaaaacatttcatcacaacaattatcaatataaaacccccggccataacccaataccaaacg

SEQ ID NO: 251367 - DNA, 671 bp, Homo sapiens
cccactcaccatgacttctaccgatcacacttgtctgtgctgccttaaaaatgttcttacaaatttattgctactgacattttggggggcatacctcagaagagatagtccatgcttttaggaagtataataaaaatcctttagggacagctagtgatcatttctattaagtatctaggatccagaacatgtccatatatccatggttctttttaccagcttaataatgaaatacaaacatgttctgataaccaatataactcctatttttgcaattactttaaaagaaaaggcactctgtacccttctgtgataccttatttccatctgagtccttccctccatggagacaatatcacaggctaaaagcaatatttatatgttgagatcttttatgaaatgtgtgaaatagtggaagaagatataggataaactatagaatatacagaaatttgggtaaccttttcataatcatgtgactgctttctgacaaatattaccagaatgtaagctgtaggacaaggactatgtgtgtcttattcttgaatatgtctcaagtgttagaaatgtgcatagaacaaacagaatatttttttactgaatgaattaaaatcagaatctcctagtagataaaggtatgtcaattattaccaaaaccagtttgctcactt

SEQ ID NO: 251368 - DNA, 648 bp, Homo sapiens
cattttatgtcagttagacttctttggttgccagtaagagaagctgactctaatctaaaccaaaaggaattcattggacggatgtgggttggctcacaaaatcaaagggacaactgcggagccgatcttggaatgctctgacaccagaacagctctgtgaattcagataggggtagtgaattgaccatttcatcaaatgctgcagcaagctaggtggtttccccaaaggaaattgaggagtgttacaagaagaccattaggggaacggttatctggtggctgataataacaaatttccatggcagtctctttgctctctgttggaagaggtactccaccatgggccttgagcatctctacacatccttgctaagcgtgtcaaatttcaagtcctaactgtcctctgtctctggaggaggagacaggtttggttactgtttgttgtaaaaattactgagcccttcaccatgggtgcctcagctgtatgcaaagccccttgtattgctgggggacagagcaactggtactgccatgctggtgctctggctgtttgctgttggcaataaactattctgttttggttcattgaatctctgtctactttgggcacctatgtgatcatggtaaatcaacctgcttgcttgccta

SEQ ID NO: 251369 - DNA, 374 bp, Homo sapiens
gatactctgtagccattatatgattatgtgactttttacttaccaaaagggaaagtgttcacaatctgtcaagttaaaagtaaagactaaacagcaatcatagcacaaggcccctccttttgtgtctctctctctctctctctcacacacacacacacacacacacacacggagcatggagggaagggaaggtggttaatcaagaacaatgtatgacagttaataccagttatctctctgggtatgatggatgctttttcttttccttttttctttttttgagacgaagtctcactcttgtcccgcaggctagagtgcagtggagtgatctcggctcactgcaactgcagcctcccaggttcaagtgattctcc

SEQ ID NO: 251370 - DNA, 938 bp, Homo sapiens
tgccgaaaattaagcctggagagatttgtccattgctctagggtgtaaggacttgtattgctcatccacagcagtgctcctagggaaaactgtaggagttgtttgcatgaattgacaaaagtatatgactcttaatgttcaaatctaattcgtttctaaaaaataaaatcacaaggcagctgagtgtatggtttattatgtgtttagattatgtgctcctcagtaaaaaatacttttttttggattaggaataaaaacaaactttagatttaactctgtattcttttagttcatctctaaaagatagagactatatgtgcatgtatgccatcattacattcttatcttatttcaaagagaatgcaaaaaaagtattcaaataattataaatacaatttatttttttaaaaccccctttctgggctagtagtagttactgttatttatttttgtccattttagcttcaactacttgccagtcctagaaattaatgggtttaatttcccctcgaatttaggacttttctagtaacaacttacactcaaatgtagtctttcttataaagattctccccctctctattttatttgctttccattcataacacagacattaccatgaaagttttcattggttatcgatggagttattgaatgtggtaatcaaacaacagattaaaactgagtctccatgaggtgaccagtgcatgaaggtttctttttttctgaagaaatctcacaggaagaattaaatgctacctcttacaaatcagtcctactgatctagtgtgtgtctggacacaccagagtctttgagacacatcctcaccaatagtactttaccttctgggtatgaattgtgggtcatggtgcctgtgcatagcctgtggtctgtagagaagccatattgattaatacttttcatgcaaattattcag

SEQ ID NO: 251371 - DNA, 3407 bp, Homo sapiens
  misc_feature (530)..(530): n is a, c, g, or t
  misc_feature (550)..(550): n is a, c, g, or t
  misc_feature (568)..(568): n is a, c, g, or t
  misc_feature (762)..(762): n is a, c, g, or t
  misc_feature (768)..(768): n is a, c, g, or t
  misc_feature (1308)..(1308): n is a, c, g, or t
  misc_feature (1517)..(1517): n is a, c, g, or t
  misc_feature (1852)..(1852): n is a, c, g, or t
  misc_feature (2343)..(2344): n is a, c, g, or t
  misc_feature (2359)..(2359): n is a, c, g, or t
  misc_feature (2403)..(2403): n is a, c, g, or t
  misc_feature (2451)..(2451): n is a, c, g, or t
  misc_feature (2486)..(2486): n is a, c, g, or t
  misc_feature (2488)..(2488): n is a, c, g, or t
  misc_feature (2500)..(2500): n is a, c, g, or t
  misc_feature (2524)..(2524): n is a, c, g, or t
  misc_feature (2540)..(2540): n is a, c, g, or t
  misc_feature (2564)..(2564): n is a, c, g, or t
  misc_feature (2569)..(2569): n is a, c, g, or t
  misc_feature (2580)..(2580): n is a, c, g, or t
  misc_feature (2599)..(2599): n is a, c, g, or t
  misc_feature (2636)..(2636): n is a, c, g, or t
  misc_feature (3071)..(3071): n is a, c, g, or t
  misc_feature (3171)..(3171): n is a, c, g, or t
  misc_feature (3306)..(3306): n is a, c, g, or t
gaccaagtccctctccttccaccaaggagcgcccagaggccggcgggagctccaggttcacctcctcctcctccaggaaatcccacttccagctagatgtctgcatgaactactgaaagctgctgagtgtcttgcagcaggtgagctgtggccagagctcaaggatgaaggggactccctcactctgtgactgtgaagaggaagcctgaggtgtagcaggcccaggccccagaagtatggaaaaaatgaggtttgacagaattcatgttgctgccatagaggggctcttttcaaactgatgtcttaaatcttgttcaggccattttcaatccagaggaagaccttctaaaagaggtgatggatgggagagtgctgacatactatgtgaagctactatttggagttggacacgagtgcatgtgaccttgtgccacagcgggaatcttgactaccacacaaatgaatccattcaaatgttggcaagtggagcagagtcccaggacaggtgctggagcagcccccctggaagngatgcagcatccaggaaganggaggaaggggcggaganggacctctgctttccaggctgccttttatactgcctctggtcacctgacgtggaacgtaccctaacctaatcagttacatgaggcgcttggaaaccaccgtcaattggaccgcactgggaaacacagatgaacaaagtcaacaccgctttgtccttcagtgcctggctcctttttcagctcgtcttgcgactcnaggtantggagtccagggaggggtacgtcgcctttaccctgtgcttgccacgatcttgtctccttaatcctcactgcagttctctgccatagagtcttatactgctttacatgtgggaaactgaggctcagagagtttcacagcagggcagggagcccagatgtgaatctgtagataccaaactttctaatttttcagtagtttccaagcatcttttatttttcttgtttcttcgttggtgtctttttttttttttttttttttttgagacaaaatctctgtgcccaggctgaggtgcagtggtgtgatctcagctcactgcaacctcgacgtctcacattcaacaattctcatgcctcaacctcccgagtggctgggactacaggtgcccaccacacccaacttatttttgtatttttagtagaaacacggttttgccatgttggccaggctggtcttgaactcctgacctcaggtgatccacccgccttggcctcccaatatgctggaattattgatatgagccattgggcccggtcatgtcantggtgccttaaccaagcctcttttaatttttcaaacggaagagcccctgtccctcagttacggctgctgagccctttcaaggtgagtcagtgaggagggagaaaagcggaagtggtgtgggaagaggcggggtctgggccagctgctggtcctgctctcctccctcctttggcctctaggctcccaggagtggtttcgaacctgcgccntgtgctctggaggctgtggcaaggcaggcgcggcttggaacccgcaccatgtgctctgggggctgtggcaaggcaggggcagcttggaacctgcgccatgtgctctgggggctgtgccagggcagggggagtcctcgtgtcccctgcgcacaacacagacagaaggctgggtccacccagtgggcggtcgggtgccaggccagtgcttaccccgccatgtttgcagcccgaggccagctggctgcaggtgcaggactaggcgtcaggggtcagggtgcacacatccctgcaggtctcggggctcctgggttgcttctggaagggcacagatgggncctgactggagctgccgaggggtggagcttctggggaaaggatccctcctagggggagtgtcttgggcctggggccacgtggcagggacagagacgggtccatggcagtgtctgctcttctctgtgaaggcaaaaggcctctgagggagtattacagccgcctcatccaccagaagcatttccagcagatccaggtctgcaccccctgactgcagggccaaggactacccccgcttctaggtgagaggccagcaggaggctcagggaggaggcggggccttaagcagggggagcaggggtgggcatgatgtactttttctgaaaaggtggctctggaggccacttggggacaggacctgggctctggctgaactcccgggaggaggctacttcctggtgtgccagcccctccctgccaggtcgccccagaggccctttaccaaggggtttgaggaggccacgtcctttcagtctgccacgccctccattcnntcctcttccttcctncaggagggctgggcctgggtttggggccactgttgcccaggtgngggagggcagtggctttgggaggaacagggacgatgtgtcaaacagcntcgcctctcccagtgagatggttctcctttgcctncntctctttccccnttgatttctccaagtggggagtcntggcttggtcctgatncgtctctagagctgcatcttccancttcnagtgagcagancagttggagtctgagggcnttttcctggcaggattctccagctagtctttgttttngacagtcttgctccgttgcccaggctggagtgcacgatctcagttcatgcaacctccgcctcctgggttcaagcgattcacccacctcagcctcccaagtagattacaggattacaggagtccaccacaacagctggcttatttttgtatttttagtagagacagggtttcaccatgttgtccaggctggtcttgaactcctgacctcaagtgatcctctcgccttggcctccctaagtgctgggattccaggcgtgacccatcatgcctggccccaggtagtctttagaaatgttaagctatttggctttattttcacactgacagctggtttgtggtgggtgtgttatggtttattattattattattattatcattattattattttgagacggagtttcgctcttgtagaccaggctggagtgcaatggcncgatcttcgctcaccgcaacctctgccttcccaggttcaagcgattctcctgcctcagccgcctgagtagctgggattacaggcacatgccacggattancatcgctaattttgtatttatttttagtagagatggggattcaccatgttggccaggctggtcttgaactcctgacctcaggtgatccacccgccttggcctcccaaaatgctgggattacaggcgggaggtgancctgggaggtggaggttgcagggagctgagattgtgccactgcactccagcctgggtgacagagtgagactctgtctcaaaacaaaacaaacaacaacaac

SEQ ID NO: 251372 - DNA, 892 bp, Homo sapiens
gaccaagtccctctccttccaccaaggagcgcccagaggccggcgggagctccaggttcacctcctcctcctccaggaaatcccacttccagctagatgtctgcatgaactactgaaagctgctgagtgtcttgcagcaggtgagctgtggccagagctcaaggatgaaggggactccctcactctgtgactgtgaagaggaagcctgaggtgtagcaggcccaggccccagaagtatggaaaaaatgaggtttgacagaattcatgttgctgccatagaggggctcttttcaaactgatgtcttaaatcttgttcaggccattttcaatccagaggaagaccttctaaaagaggtgatggatgggagagtgctgacatactatgtgaagctactatttggagttggacacgagtgcatgtgaccttgtgccacagcgggaatcttgactaccacacaaatgaatccattcaaatgttggcaagtggagcagagtcccaggacaggtacagaaacacccccagttcaagaatcttcacatctgaatttagtcctacacctgcaactaccccagtttcatttcaacttaggtttaaggggttcttgataatctgacatgataagtggtgttggaattggcattaaaatccaccatgctctacagcacttcatccttcttcggcaggcaccaatttgatcttctactactttgcagacatctcttctgcaaacaccagacaaattgagacaatgaccttccgcaggacccaaaccacctcttactgcaggaaagaagatccagtgagatagttagtccacaaatggaatgtaaatccataaacactcttaagtaacagaataaatttagtatgagcatttttatgtgggagctc

SEQ ID NO: 251373 - DNA, 404 bp, Homo sapiens
agcttctgctttgcgtgtgcttctctctgtgtccttttctcattgggtctccggaagaaagatctgtcaataatgcaatgaaaatattgctgtgagatgcagacccgtaagtagactcctccatgccgagcactcttgctcagctgcccttcttttatctgaggcagagatccctgggcttgcaattatggtctttgactttggtaacaattctgtttgaaatgtttccaattacacacaatattggcggcatgtagcagctgcatgccaaaaagcatttcgaagtgtgttccaagaatcaggctgtgattgcttttaatttaaataaaggctatttggtttcctgtgatgttttttataaccacctttccccccatttttgttgcctttaaaaaaaaaagaag

SEQ ID NO: 251374 - DNA, 322 bp, Homo sapiens
tctattcttcctcccagaataaaatcttccatcttctctgagttaggccttcctcatcagaaccatttcttttctcattcagctctctgaggttttctacttatcatccaactgtagtatccactgataaattacacggattcacaatccagccacttactttgtttcctcctaacatttggaataagctacttcctgcaccagagcctctgtctgtcatgcctttaccggatcttattttggggggctgaccagttgcctaaacccacatgcaccctctcacctgggttctcaagaacttctattttggacatccaccaaa

SEQ ID NO: 251375 - DNA, 1008 bp, Homo sapiens
tgtgtcctttacagttactgggatcttaatatgtgccaggaattgcttcaaagcttccatgtactaactcctttcgtctttacaatgatgaggcaaaaacatattaagtagcctgaccaaggttaaatagcgagtaataggcagaatgaagactaggactgcagagcccactctcctctactcctagtgtgttttcatccaatcatgaaaactacaaactgctcactgagggcagacagcagcttggattagattagctacattgaatttcatgggatactcttttaaaatagttttatatcatttactttgtattttgtttatcaaaccaaattggaaaacaattgtattacccagtgaacctgcaaagtttaattctgctagagaatagaattggccacttgtgagctatgccaacccattgataatgacgaaagtgcatttttgagccttcttggcctcttttacatctcttaccatctaaatggcaattgggtgtcttgctgaatcttacccagctggcaatctaaagtcttggttataattcagaatttttgtctgcctgagtgtaattcaaatgcagggccagatattctcttcaaagccaagttatgattaatgctggaagtatcttctatggaaacatgactgggctgggaagcctgaggtttgaattctaaggctggatccactcccaattcgttctgcggtactgggttaacacttttcatttactgagtctcaactcccacatatgtggaaagacagtttgaagtaaatgatctataagatttccttgagctccaagactctatgatcctcatagagttcttaatgaaagaaagaaagaacctattatgtacatggtgaaaagacaatggtatcattttctaagacttatttttagatgactaggaacaagagggataacctaatttctaatatttcaaaaaaattattaggacttccacaatgttaagttccatctttcattatatgttttagctt

SEQ ID NO: 251376 - DNA, 333 bp, Homo sapiens
tgtgggtttgatgtaacaggacttgattactctttgaggcccaagatttttgtcaattcatattagagatgatcaaaatgtccatgtaacagaaagatgaaaactaatgcatttgcttggtaaagactttatcgatttctaattttggctctaatcaatttatcttgcccaagagaaatataatcagtccctaagtagagctgtaacatacaaatatgaatggaagatgagcagttattaagaggaactgtaatttttgtaggaggcttcgacactgcctgccacccaagtattgttcagatggcttgaacacaggtggtgttgctggctaga

SEQ ID NO: 251377 - DNA, 997 bp, Homo sapiens
atttcacagtcagtctcacacagcttctaagttaaatcaaagtgtttatgatagttataaggtcagaattgtacctaagttgggccaagaggacatttcttaagcttgctctcccaaaccattgatttattggtctatttatttaacatcctctgaatgcccatggggttctgcagccctgtgccagatgctgagatacagaaagaatattagtccttaactccacctccaaataaatacaaagatcaagaaataggtaccatccccaaatacaaagatgaaaagctatttttattataagcatcaacctattctactcacgtttatctcaagcataaagaatatcccccactatcacagggcttcttgggcagtaaaaataagtttgtatttctaaaactgtgaaaaatcatctcaggttgtactgttcatttaaaccttgactttggcagtgttaggctgcttggaatcaatcaatgccaagatgcaccatgttaattgcaaccgagaaaggaagtggcaggtgtttccaaccctgatgagctgcaatgaaattgatgttttctgcattctggaggcaaatgacaattcagcagtgtctctcttcccaggaagcagatttacaggcttttccttccaaactgaaaatggcagcatgccccacccaggtggctgatcagagaactacctcagcagggcagaggtggcagggggcagccggggccgccacatgaacagagaggggcagtcattggatgtggtgagctcaaatgtaggagtttattgtaataagaaagttcacatacaggggaaagtgtacgatttcatctactgtttatcttctaacctcactgctcagtagcttgtaaaagattaatttgctccaacaattgggaactattcatgtggatggaaatgtgttatttgtgcactgctatagatactgaaatgaaccaaaaataaatggttttgtgtctcaggaatcaaaacattttca

SEQ ID NO: 251378 - DNA, 810 bp, Homo sapiens
atttcacagtcagtctcacacagcttctaagttaaatcaaagtgtttatgatagttataaggtcagaattgtacctaagttgggccaagaggacatttcttaagcttgctctcccaaaccattgatttattggtctatttatttaacatcctctgaatgcccatggggttctgcagccctgtgccagatgctgagatacagaaagaatattagtccttaactccacctccaaataaatacaaagatcaagaaataggtaccatccccaaatacaaagatgaaaagctatttttattataagcatcaacctattctactcacgtttatctcaagcataaagaatatcccccactatcacagggcttcttgggcagtaaaaataagtttgtatttctaaaactgtgaaaaatcatctcaggttgtactgttcatttaaaccttgactttggcagtgttaggctgcttggaatcaatcaatgccaagatgcaccatgttaattgcaaccgagaaaggaagtggcagggggcagccggggccgccacatgaacagagaggggcagtcattggatgtggtgagctcaaatgtaggagtttattgtaataagaaagttcacatacaggggaaagtgtacgatttcatctactgtttatcttctaacctcactgctcagtagcttgtaaaagattaatttgctccaacaattgggaactattcatgtggatggaaatgtgttatttgtgcactgctatagatactgaaatgaaccaaaaataaatggttttgtgtctcaggaatcaaaacattttca

SEQ ID NO: 251379 - DNA, 652 bp, Homo sapiens
atccctgcaagggtaaatacccttgtccccccccccccccaaagaaaaaaaaaaaaaagagaaggaaccaggataagtagtacagcggacttcttgtcagaaactaacaagcaagaaaacagtggggtgacatctttaacatgctgaaagaggaaaaaaaaaaaaaactctcaacccagaattctatgcacagcaaaaatatgcttcagacgttaaggagaaatactttctcaaacaaaaactgagggaattaattgctagtggacatactctacaagtaatgttggaggcaattttttaggcagaaggaatatgatatagtcagaaagtcagatctacacaaagaaaataagagcatcagaaattgaataagtaaaagtaaaacagcagcagcagcatggagtaagtgccaaaggcaggagccgggacttgtgctgaattcttctatttgctcattaaaatgaatcattacatattgtttaatgagtatggagtttcagtttgggaagatggagaagttctacagatggatggtggtgctggtcgtacaacagtgtgaacatacttaaactgaactgtacacctagaaatggttacagtggtaaaattttgttatattttgctataataaaaaatgcaactgatacatcca

SEQ ID NO: 251380 - DNA, 1300 bp, Homo sapiens
acctccacactgaagaactaacagaggaggaaggcatcctcatctccaagcatgcaatgtgcttacctggaatccactgtcctagatgacatgtttggctttcaacaaaaaattacaagacttacaaaacagcaagaaataacagtctgaagggataaagcagtcatcagaagtagaattagatttgacacagatgttagaactctcagacaaagaatttaaatggctacaatcaatatgttaatggctcttatggagaaggtaaacagcatgcaagattatataggccatgtcgccaaagagatggaaactacaagagagagccaaataaaaaatttttaaaatggaaaacagagataaagaatgcatttaatgagttcatcaatagactggacatcattgaacaatcagtgagcatgaagataagtcaaccaaagttacccaaactgaaatgcaatgagatttaaaaaaaaaaaaaaagaacagatcatccaagacctattggataatatcaaatggtaacattcatgtaactggaatcacagaggggaaaataaagacagcagggcagaagaaataagggccaagaattttccaaaattagtgacagacaccaaaccacataccccagaagctcaaactcaagaggataccttgcaaggtaaatatccatgtacacacacacacacagagagagagagagagagagaaggaaccaggataagtagtacagcggacttcttgtcagaaactaacaagcaagaaaacagtggggtgacatctttaacatgctgaaagaggaaaaaaaaaaaaaactctcaacccagaattctatgcacagcaaaaatatgcttcagacgttaaggagaaatactttctcaaacaaaaactgagggaattaattgctagtggacatactctacaagtaatgttggaggcaattttttaggcagaaggaatatgatatagtcagaaagtcagatctacacaaagaaaataagagcatcagaaattgaataagtaaaagtaaaacagcagcagcagcatggagtaagtgccaaaggcaggagccgggacttgtgctgaattcttctatttgctcattaaaatgaatcattacatattgtttaatgagtatggagtttcagtttgggaagatggagaagttctacagatggatggtggtgctggtcgtacaacagtgtgaacatacttaaactgaactgtacacctagaaatggttacagtggtaaaattttgttatattttgctataataaaaaatgcaactgatacatcca

SEQ ID NO: 251381 - DNA, 616 bp, Homo sapiens
agaagacatggtgacagaagcaagaggctggagtcactcatggaaggggccacgagccgagaagtacaggcagcctccagaaactggaaaggcatgcagccggatgtcccccctgcaatcccgaagcctccagaaggaatgcagctttattggcacctcaattttagctccataaaatccagtttttggacttgtgcactctacaacattcaccaaaatggtacccacagttgaaaacactcataagaataatgaagtcacattgcgatggactttgctctcccagctcaaattatgtgccaactaatacagcatatcgtatgatatatttatcaagtgatttgccacccacgtctgtcccactcagaaaagcctattgcaatgcaagagaatgagcgtgataccattaaagggttgatcttggatctagtctaatttgtgaagaacattttataagtcactcaaccatcatgagtaacaaatcgctggggaagtggcttaggcctcccagccacatgccaggaagcctgtgtttggcaatgactgttgctctgtacagaatggctcaagtgttctattggaagcagttggaccttgtggctttcatgctgtcacc

SEQ ID NO: 251382 - DNA, 281 bp, Homo sapiens
agaagacatggtgacagaagcaagaggctggagtcactcatggaaggggccacgagccgagaagtacaggcagcctccagaaactggaaaggcatgcagccggatgtcccccctgcaatcccgaagcctccagaaggaatgcagctttattggcacctcaattttagctccataaaatccagtttttggacttgtgcactctacaacagtaagagactagatttctattattttaagccactgcttgtagtcattggttagagcagcaaaaggaaactgat

SEQ ID NO: 251383 - DNA, 957 bp, Homo sapiens
ggcactgtttctccacacgcaaactgatctttgtcataaatcacttttataatgagagagcagcctggacacattgccacaccttccccattctccagctcttccttggtgatggagaagttatctccgcatgggcagggacagaaatatgtctccgagtcctcgtcatattggaagtcctcgatttccacctcgtcatgaaatactgccatggtcagcgggggttgctgaaggggtgacgccccagcagtccgagaccagctccgagggtctaacttctccggagccggcccaggctctgactttcatttaattgtcctgaaaggtgaattctatcttgccaaataggcaagtgttttttatatgtaggctttaggtgtcagaatataggaaattatcaaaatgtggggtcattttaaattgcatcctaaaaccttttaaaatttgggaagaagctgggcgtcgtagctcacgcctgtaatcccagcactttgggaagctgaggtgggcagattacctgaggtcaggagttcgagaccagcctggccaatacggtgtgacccccgtctctactaaaaatacaaaaattagccgggcgtggtggtacatgcctgtaatcccagctactcaggaggctgaggtgggagaatcagttgaacccaggaggcaaaggttgcagtgagctgagatcgtgccattgcaccccagtctgggcgacaagagtgaaactccatatccaaaaaaaaaaaaaattgggaagaaaatgagtatatttatatgcaggtgtagattctgagtgcacacagtagttggaaatggcagcttgcttggttggaaagttgcttaaaagtggatgggtggaatgttccagtcactccaggtggttcagaagttaaatccatggcagcatggcgcttgtgtcctcctggacttgaattaagtagaaagttactacaa

SEQ ID NO: 251384 - DNA, 262 bp, Homo sapiens
actaaaccctcagctctcctgtgtctccaacctgcccgctctgcctagtgatcttgggacttcccagactttataatcatgtgcatctcctgctgttcccaatctactcatcctaggaaccaactcaggtcaggagaagcaaggaaagccttacaacctgttactgaccggaggggatgaaggagacagggaaactacaacacatggaatgtggtatcctgaatgggaccctggaaccaaagaatgacactggggaagaact

SEQ ID NO: 251385 - DNA, 1139 bp, Homo sapiens
gtggttcgttatgcagcaaaagataactgattcaggtataaagcacatggtcacaaaggacctaaggggatggggtacatattgggttttgcagtagccttggcatttagctctagagcttatttgtagctcagagctgtgaacatgatgggctcagcatggggagatgataaagtacaggcgagaaagccccttgcaaagtggtcaggcacccgggccaggacaggtctaaccatcctcaggatgtggcacgacctcctatttgtaggttaggtgcaaacaaatgctcttcttcgatgcttacaccaaccccaggacccacagaaggcattctgtctccatcaatccagggctggcataggattttaagagacagggcattttcaaggtaaaagagcatttctgaatcacattcatctaataaatagctacccaatgtcgactatgggctctccactgttccaggcctggaaatgtagcagtgtgcctcatggaaatgtagcagtgtgcctcatggaaatgtagcagtgtgcctcatggaaatgtagcagtgtgcctcatggagctgaccttcccatgtaacctagcaagcccttgaaaaggagagaaaaaagtaatggggaaaggtagcctccctgtggtagttttaaaatgtctgcaaattcttctctccaagaggtggaactgaatttacctccccttgagtacgggctgtacttagtgactcacttctaacaaagtcggaagtgatggcgtgtggcttccaagggtaggtcttaaaagacactgcaagctctgacctgggctccctcttcgatcactagctctggggaagccagctgccatgctaaaaaagacactcaagcagccccacggagaggtccacaacgcaaggagctgagtcctcccaccaacagccagtgaggagccgaggcctcccacctacaaccagtgaggagctgaggcctcctgccacagtcacgggagtgagccttggaagcagatcctccagtgtcagtcaggccttcagaaactgcagcccctgctgacatcttgactgaaacttcaaaatcatccagctaagctgcttccaaattcccagctgggagatgataaatgtttcaagctgctaaaaaaaa

SEQ ID NO: 251386 - DNA, 893 bp, Homo sapiens
cgatcctcagagagtttacaatgtgctttttccgccaatcagaactgtggacaaaacttcctatttcctacaccgcagctgtctgttcaccttcagctcagagagcactcctgacctttcgtaatgaaatggaagcctccccttgtctggcaaataataaactcagtgtctacttttgccggctttgggaccttcgtgtttttccggggctcaggtctcactccagccatcgctgtggccagtggagagccactcccctctgggggcagtcgccgagagcctccttcccctccgtccagccagcaaggctttcccaagcgtcctgggcaggagggttgggccctgctttccaccaagtcactcagaaggtcccaatcacacatgattggcctcattgggtcagcacctgtgaaaggaagattaaaaactcgacaccccaattcactcaaccaagaagaaaaaagctgaaagctgagtcctgcaggaagctgcctttccctttgccctaagcagacagctgcagatgagagggtcagcatctccactagtggctgctctgtgtgccccttatctcatggaaagtgccaatttactgagcacgagataaacaggtaactgactgttcccacctgctccttttctcctgcagcatggagcaatcagtcatgtgaccacaccctcctccctctgccccctccagccggcttttccccttgactgaagccttcaacatcatcttgggagagaggcacagacctgtctcctgggtgcatccttagccttggcaaaataaacttctccattgatcgaggcctgggtcgggtacttttttggtttgcagactcacccacatgcttttccagttgggccttgctcttctcttgtttgagtaa

SEQ ID NO: 251387 - DNA, 445 bp, Homo sapiens
tcagccatcactattatgacaacaagctacctaaacatggtttccatcagatgcccaaagaatacagccagatcctccaacttcacatgaaaggaatcctcaaactgcaatttagcaaatgtgaagtcgcctaaacaaagtatcttaaaatgggaataattttaatataatgcagtaggtgattaacaatgtctccaaacaccaaaggaggtggctaaagagtattttgagatgagccccaaaatttggtttgaccaaagcttccccactcattttgcaatgatggcaagtcattcaatccttctcatcttcattttttctccttataacatggacaccatatctgactcatacaaatttttataatttatgaaaattattggcatggcctttggtgtgaggtagggactcaaagaatatttctttcttactatttataccagcc

SEQ ID NO: 251388 - DNA, 461 bp, Homo sapiens
ctttctgagggtcacagacccacaaaaccaggactggagtataagtctctggactttcaccttgggacattctcagtttccaccccactgtttctgagggtcgaaaggtttgggtgtatatgtagggaaagataattggtaggctctgaagcacacagttcatttgtttttcaataaggaagagtcatgttagaaattttgtcctttcttccagaaggtacactatatagcctggagccacactgtccaaaatggtagtcactggccacatgtcattataagaacttaaactaattaaaattaaatgaaatttaagattctcagtcataaagctgtattttggctaagcattgtgacttatgcccataatcccagtattttgagaggctgaggcaggattgcttgaggccatgagttggagaacagcctggaaaacatagtgagaccccatctctaccaaa

SEQ ID NO: 251389 - DNA, 421 bp, Homo sapiens
ggctctggcaaattaaatattcaaagtgaagaactcagaatttattgaaagcctgtcaccatttaaaatgcataattttagcataaatactctagaaatattccttttgtttgctatgtgttattgttaataaaggagatcctacatctagatttgtcatacgtcattaatgaatcaaccataggatgtaaattataattattttgaattatctatttactgtttaattacatttaattttagattctcctaaaatggcctaataaaaattttgggtgctaaatgactgcctcatctgcttactctgtgctacttgctaaaattagttatattaattgtttggggattctttttcttaaaaaaaaaaactaaccctgggggcatggtcctaaataaaatatcctaaaaatttaatgctttt

SEQ ID NO: 251390 - DNA, 381 bp, Homo sapiens
tttcctgaaagatccagaataagatttttctctttttaaaatttttgtagcaacacttttgcatggtagattttaacacgtctctgagacttttttatttttgaaggtaatagagaaaatgtaagcagaattgtaactccaaggaggttgtaaagtatatgtagtttcaggagttctttcctcctcacattgtataataggcacaaactctcttttaagaccctttcttttttcctcccatgcaatttacttccacatacacatcatcattaatcactcctctgctgtttcattaacctgatttcctgggaagctaaagtaagtgtgtttgacttgtattttgtcaataaaaccatattatattctcccttatctttcact

SEQ ID NO: 251391 - DNA, 200 bp, Homo sapiens
taggtcatacatgggaatttgtgggtaatgaagattcctgggacccacccctagagagtttgactcagtaatattgttttttaaataagacttcagatttaggggtggaggaggaacaccggatcgcactgtgggagaaacgctggcctgatgatttattataaataaataatgtgccctactgctttcacagtttaata

SEQ ID NO: 251392 - DNA, 535 bp, Homo sapiens
ctcctgtgttctgagctgacgggctctttccatgtggtgacgaacatcctgagctccctcccacacatctggccacagttggtgcccacagccttctccaagcctggacttggctcaccgcgtttacatgtctctctccaaacagaggagaggatgtaagcagagcgtaccatgccagggctcggcacacagtaggacttcgatatgtatctcttcccttgaatgttctcaaccctggttaggtaagaccagatagaaatgtggtgatggaggaaggaaggagaaagggaagagaaagagaggaggtgcgggaaggcggaggggagcatctgtcaaatcataaaaccatccaggagctcctgaaggttctagatcctgaaggttctagagaccagctccatttggcatcccctgggatttcattagaaccacagaattcctccattgcagacttcctgaatcagaatctgcatttttacaagatctgcaggtgatcatgtatacattaaagctcgagaagccccatgctagaaga

SEQ ID NO: 251393 - DNA, 527 bp, Homo sapiens
ccagcttctccaatctgtgcttttttctggaagcttcaggattttgagctttgtccaggaggcctttcaagtggcactggacttgtttctaaaaaggttcacttcaaaagtacaaatgtagagggatacccaggacagggaagggtgcaggtactaaccactcagcagcaggagcagtttctacctcgtgacacctatggagccctcttatctctggaaacagtaagtagagtcatcttgtggcaggagttggtggggttgtggttttaggagagtgttgaaggtctgggatgagctctgtgggctgatggaaggagtggggagacagcagtgaacaggctacggggcagcactgtggcctgttgtggttgagggagcagagaaggcacatctacagattcaccacagctgggctttggacaggggagaattgaaagaaaaaaaacatgagagaactgaaggcaccagcatggtatagtgtctttggcatcagacaaacctgtgttctgtacctggctccaccacca

SEQ ID NO: 251394 - DNA, 334 bp, Homo sapiens
agtcagtcccgacaggctggcacccttcagtgtcttgtcttaggcagcacagtggtgtatctaccacctcaactggatagaggaaggctgaccgattcccacagggaacccacccaccaatagtgtaaaagtcttaggcttgttgctgctgactgaggaggtccattcagtagtgggaacaagagagaagtatttcttagcaaaatggaactaactttatttatttatttatttagagacggagtcttgctctgttgcctaggctggaatgcagtgagcctagattgtaccactacactccagcctgggtgatggagtgagatgttgtctcaag

SEQ ID NO: 251395 - DNA, 584 bp, Homo sapiens
cttcttccttccaaggtgtctgtgtcatgggtttagtgctctacagttcacagagtgcttttccagacattaagtactctgattttcactacaagcttgagagtggattttactagtgcactcgttgtacacaggaggaaactgagggttacagggattagagagtgtactagttttttagggctgcagtaacaaagtgttataaacagagtagcttaaaacaaaagaaatttattgtctgtcagttccagaagtcctaaatcaaagtatcaatagaataggttccttttaaggtccctgagggcaaatctgttccaggcccctctccttctggtggtggctggccatccttggcattccctggtttgtagctgcgtcaccccaatcttgcctctgtctttatttggtgttcttccttcctgtgtctctgtccagatttccctcatcttataaggatactagtcatattgtattaagggcccgccttagcctagtaagacttcgtaacttaactaactacatttacaaagatctcatttccaaataatgttttcacattctgaagaactatgagtgagaacttt

SEQ ID NO: 251396 - DNA, 629 bp, Homo sapiens
gcacaaggttattgagaaaataatcattaattttccccctttttaccttttctgtgtaaccctgttttcttctacctccctgtctttcttttttccctgttctctctttctacttcttaaaacatgcccattttcatcacaggaatgcttgagtttagaggactaaggtgatcttctaagctctgggattccaaattcctcaaaattgaagtccttttttataagacaataagtggtgtctatgctgaacatttgaaacaactatcacatatgattcatttgtccttcagctaaaattcatcttatatgtgtctaaaacaacgtatcctaaaatggaatgttgcaaagaagacaatccgtttcctgaattatttcagtcttcaaatgtctaattcaactaaagatgttcaatgacattgattagaaacatacggaagactttagataacattataaatctagataaatataaataaatggcacaaaatacttttgatttctaacatagatgttttgatttattgcatttcatcatagaattttgacttaaaccttagaatctgtgggatctttgcaaaagtacttcatttctgagctacacacttgaaatctaatgttccttactacca

SEQ ID NO: 251397 - DNA, 633 bp, Homo sapiens
agtgacagctgacaggttgctatgaatccaagaggtagaaaaagagtcagtcccggaaccatttcaccacatgatacaaaaatggaggtttacaacaatgactttgaaccaaatcaggttaaatcacattcagaatcttgtatccaaatagcaaggaagtatataacacatttttaaaaatttaagctaggtgtagtggcacatgcctgtagtcccagctacttgtgaggctgaagcgggagaatctcttgagcccaggaattcaaggccagtctaggcaacatagtgagaccctgtctaaaaaaaagaaccacagaaaaacaaacaaaaaaacaaaaaaaaaacccaaaccaaactttatcttataaaaaacgagaacataaagattaaaattttaaaaaaaccttggccaggcacagtggctcacgcatataatcctagccttttaggaggctgaggccgaaggaacacttgaggccaggaatttgaaaccctgtctctacaaaaaataccaaaaatacccccaaaatgagctgggtggagtggtgcgcacctgtattgttagatactctaggagctgaagtgagaggattgattgagcccaggagctggaggcttcagtgagctacaatc

SEQ ID NO: 251398 - DNA, 268 bp, Homo sapiens
tccccaaaggaaactacagccatcagcagggtactgtgctttgggaaaatgtcaacatttagattttttcagggattactagacagtggctctcaatagaaattatacaaactgaaaaaagaatgaacagagcctgaatgacctgtactaagtactgagaagtctagcatgagtgtaattgtagtcccagaagaagaggagaaacagaatgggacagaaaaaaaaatttgaagaaatactggacaaaagtcttccaaatttgataaaa

SEQ ID NO: 251399 - DNA, 616 bp, Homo sapiens
gattttgtggtaaggggtgatattgtggggttgttagaagaaacatttgttgtgtagaattattggtgatggcctggatatggttttgtatgaattgaaaaactaaatggaataagagaaggagaaaaacaggtataaaaggtctaagaattgggacgactcaggacatctgattagagagtgcctaaggagattcagcatagccctgccagcaaagattatttacttcaagagttaagaatggcagtttggggatagcacgaggcaagcgtgatcagggtgaggaacagcaaagaaggaaatatggggaaatggggtgaatatcaggtggatcagagagatacagtcatgggggtcaggtgtggtgtgaagtaggccttatttctcttgtcctttcgtacagggaggaatttgaagtagatagaaaccgacctggattactccggtctgaactcagatcacgtaggactttaatcgttgaacaaacgaacctttaatagcggctgcccattgggatgcctgatccacatcgaggtcgtaacctatggtgattggctctgatagggttggctgtatcctagggtacttgtcacatatcctatcgatctgcgccggg

SEQ ID NO: 251400 - DNA, 558 bp, Homo sapiens
gattttgtggtaaggggtgatattgtggggttgttagaagaaacatttgttgtgtagaattattggtgatggcctggatatggttttgtatgaattgaaaaactaaatggaataagagaaggagaaaaacaggtataaaaggtctaagaattgggacgactcaggacatctgattagagagtgcctaaggagattcagcatagccctgccagcaaagattatttacttcaagagttaagaatggcagtttggggatagcacgaggcaagcgtgatcagggtgaggaacagcaaagaaggaaatatggggaaatggggtgaatatcaggtggatcagagagatacagtcatgggggtcaggtgtggtatcaggaataatgtgggaggccagattgaagtccgggccaggaacaatggtaattgtgggacttaaagagtgagtacagctgaaggagccggggagcagaaagtatatgtgtcaggtatgaggaagaaaatagattttggaagttatgagaaatgtagagagtgagttgagcatagtttgtgatttttaggg

SEQ ID NO: 251401 - DNA, 437 bp, Homo sapiens
agtgaaagaggagggaggagtggctgtcagtgtgggcactgggctattatcagtgagtgtattcatttgcttgggctactgtaacacagcacctcagactgtaacacagcacccatgggtttgccgacagggatttactgtcccacagctctggaggctggaagccaagatcaagatgtgcgcaaggttgtttcctgctgagagctgtgaggggagcttctgctctgggcctctctccccggcttgcctgtggccatcttcccactctctcttcgcatcatcttccctctatgccattgagtgtaagatgtcctaccaagaaagaaacatcacagccaactatgttgtgccatccaactgaaagatgcatcccagtttcagagatgttaacatgtacgtcttcaataaatgagatgccgcgcatcagggacaaaaat

SEQ ID NO: 251402 - DNA, 365 bp, Homo sapiens
cttctgcccccttcctcgaggacaggggtgtccagaatctgcgtctgagatctctctgggatttactgtcccacagctctggaggctggaagccaagatcaagatgtgcgcaaggttgtttcctgctgagagctgtgaggggagcttctgctctgggcctctctccccggcttgcctgtggccatcttcccactctctcttcgcatcatcttccctctatgccattgagtgtaagatgtcctaccaagaaagaaacatcacagccaactatgttgtgccatccaactgaaagatgcatcccagtttcagagatgttaacatgtacgtcttcaataaatgagatgccgcgcatcagggacaaaaat

SEQ ID NO: 251403 - DNA, 230 bp, Homo sapiens
cttctgcccccttcctcgaggacaggggtgtccagaatctgcgtctgagatctctctgtctctcttcgcatcatcttccctctatgccattgagtgtaagatgtcctaccaagaaagaaacatcacagccaactatgttgtgccatccaactgaaagatgcatcccagtttcagagatgttaacatgtacgtcttcaataaatgagatgccgcgcatcagggacaaaaat

SEQ ID NO: 251404 - DNA, 994 bp, Homo sapiens
ctatgaagaaatttggcagagaaactgctatttaaataattcttcatgaatcacaaatatttttcctcaatttatctgctattttatgtcattacctgtgactgttagtattttaggacaatttcatttgactcctgttggaaataagtgttgcccttttaactatgacttcagtaaaactctcagtgagctgataggaaaggattctgattactcagctgtctaggctggtatacacagagcagtgagtctgtattgttgggaaatgaagttggaataaaataaagttgaagacgagagactggaatttgcctcactgaaactagaaagagtttgcagctttactgaatatgcagggagagaagaggaagccagaactggcctggggtgtacagctaatggccaaagaatgttctcctgaagaccatgtgcacttaggtctacgggacccctcagagccaatcttcagagcagagacataggtagccttcctccttggatgactcccagctttcacttgagaacccagaatcactcaggtgcctttgccaggcaccagcacagtggcagttaactcccaagagaggggaggacattctgaatgaccactttgcccccctgtcatccattttcaggagttaatctctgccgtagttcattgttttcagagttggaacttgtccatttctctaaaagtactaaaagatgaccattttaaggtagagcagattggaaagctgtttcagagtatttggacaacgattttccccaagatacctgggaatgtgaagttggaagccagtctgaatggggctctcggatatttctgagacatcatcaggacaaaggaacatctggtagagaaataattctttttttttcttccagcattgtgggactgtcagcttctgtgtccctctgggtctagcttgccctgtggtccgctgtccatgttaagggtgctaggaaccggggtggcgatattggtttaccc

SEQ ID NO: 251405 - DNA, 886 bp, Homo sapiens
ctatgaagaaatttggcagagaaactgctatttaaataattcttcatgaatcacaaatatttttcctcaatttatctgctattttatgtcattacctgtgactgttagtattttaggacaatttcatttgactcctgttggaaataagtgttgcccttttaactatgacttcagtaaaactctcagtgagctgataggaaaggattctgattactcagctgtctaggctggtatacacagagcagtgagtctgtattgttgggaaatgaagttggaataaaataaagttgaagacgagagactggaatttgcctcactgaaactagaaagagtttgcagctttactgaatatgcagggagagaagaggaagccagaactggcctggggtgtacagctaatggccaaagaatgttctcctgaagaccatgtgcacttaggtctacgggacccctcagagccaatcttcagagcagagacataggtagccttcctccttggatgactcccagctttcacttgagaacccagaatcactcaggtgcctttgccaggcaccagcacagtggcagttaactcccaagagaggggaggacattctgaatgaccactttgcccccctgtcatccattttcaggagttaatctctgccgtagttcattgttttcagagttggaacttgtccatttctctaaaagtactaaaagatgaccattttaaggtagagcagattggaaagctgtttcagagtatttggacaacgattttccccaagatacctgggaatgtgaagttggaagccagtctgagggggccccggtactggaacctctccggcacacggcccctggttgctcttctttctccgcatgtggcgcgctcgtgtcc

SEQ ID NO: 251406 - DNA, 940 bp, Homo sapiens
ctatgaagaaatttggcagagaaactgctatttaaataattcttcatgaatcacaaatatttttcctcaatttatctgctattttatgtcattacctgtgactgttagtattttaggacaatttcatttgactcctgttggaaataagtgttgcccttttaactatgacttcagtaaaactctcagtgagctgataggaaaggattctgattactcagctgtctaggctggtatacacagagcagtgagtctgtattgttgggaaatgaagttggaattttgcagctttactgaatatgcagggagagaagaggaagccagaactggcctggggtgtacagctaatggccaaagaatgttctcctgaagaccatgtgcacttaggtctacgggacccctcagagccaatcttcagagcagagacataggtagccttcctccttggatgactcccagctttcacttgagaacccagaatcactcaggtgcctttgccaggcaccagcacagtggcagttaactcccaagagaggggaggacattctgaatgaccactttgcccccctgtcatccattttcaggagttaatctctgccgtagttcattgttttcagagttggaacttgtccatttctctaaaagtactaaaagatgaccattttaaggtagagcagattggaaagctgtttcagagtatttggacaacgattttccccaagatacctgggaatgtgaagttggaagccagtctgaatggggctctcggatatttctgagacatcatcaggacaaaggaacatctggtagagaaataattctttttttttcttccagcattgtgggactgtcagcttctgtgtccctctgggtctagcttgccctgtggtccgctgtccatgttaagggtgctaggaaccggggtggcgatattggtttaccc

SEQ ID NO: 251407 - DNA, 454 bp, Homo sapiens
acagagtgagactctgtctcaaaaaaaaaaaaaaattattttaaatgtaaggatgcaagaatagtacaaaaaattcttgtatatccttcactaagtttcctgattattacattttttaccatatttgcctgattatattctctctctttataagcatgcacatatatgtattattttgctaaactagtcttgagtaaattgcaggcatgatatcccattattcttaaaaacttaagtctgcacttgccaacattaataccgtttattttatagtccccattcaaatttttccaattgtcctaataatatccttttttaattatttttaattaatagagatgggatctcgctttgttggccaggttggtcttgaactgctggcctcaagcaatcctcttgcctcagcctcccaaagggctaggattataggcacaggccactgcacccagcccta

SEQ ID NO: 251408 - DNA, 399 bp, Homo sapiens
tatagttatcaactcctattgatatgtgagtgtgtatactcccgcaggagagaataaactttgaatgcaaccataacttattacccctttgttccagtgtcacttctgatagcaaacaatgccaaaacagtaacaaattgccattgtattttccattagtcatcagagtataaaagatttgataaatagcgagaaaacacattggctctttcgggtgggaaatccgtgttattgacagtagcaaattacatgtctttgaaaaagatggtgtcacggttcttagagattatttgcattgctactgagacataagaaaacctcaaggagcttttaaaggccgtgtctgtgagatgaatggtctggtgtcctcacccagccccccttgttccagcattcgtg

SEQ ID NO: 251409 - DNA, 245 bp, Homo sapiens
agagatatgattattatagtatactatgtagcattgagaaatgtaaatagatgccaatacctggaatgtatttgcacagcagtgatagttttgttatattcatggtgttcacataattcttgattactctttgttcagccaacagtcagaagaatgaaaaagaagtcccagtttctgaaatatagaatataatgtgcatctggtgcttcacaactttgaataaaatctcagtattgataaatatt

SEQ ID NO: 251410 - DNA, 424 bp, Homo sapiens
aactgctgataggaaagagttataggtctcactgttcaagaggcttgggttttaaagtcatatagcctcaagagataaggtcttggggtccttaagagtccagtggttagaaatgagatgcctgcagttagacctcttaacatcatcacggatatatttgtgtttaatcccagcactttgggaggccgaggcgggtggatcacctgaggtcaggagttcaagaccagcctggccaacgtggtgaaaccccatctctactaaaaatacaaaattagctgtttgtggtggcgtgcacctgtaatcccagcaacttgggaggcagaggcatgagaaactgcttgaacccgggaggtggaggttgtagtgagccaagatcgtgccactgcattccagtctgggcgacagagcaagactccctctcaaa

SEQ ID NO: 251411 - DNA, 697 bp, Homo sapiens
ctcggtcctgcaagacgttagcatgcaggatgcgacggccagatgtccatgctccagttcatcagcagcgggctgtccaaggtggctggcgctctgactgaggctgaagtgggaggattgcttgatgagccctggaggtcaaggctgcagtgaactaagatcaagccactgcattccagcctgggcagcagagtgagatgttgtctgaaaacaaacaaaaccccttttttgagaggcttccttttaggtcagccatacctgtctgccatgggaaatttctccctgccccctctttggcagaggagggtcttagagataagttaaacacactaagcctttctgtgtgtaaattatattagagccatcccacaaatcactgagaagagcatcgtaggttgcacatatttgaatatgacatttcttaaggctgttagagaggatccagttagtttaggtttggtttggggtttttttgctgccttagtaaatgttaaaatgaaacatccaccaacagctctgtggatgtgtcctttaaacaaaggtttattgattctaattattcaagcctaagttaagaatgttagcgaagaatgttaggtggttttcttgggcttaatgtttaacaactggattaaggggcaaacacacttaaaggatggatacctctgagtagttggccttccacctgattcattgc

SEQ ID NO: 251412 - DNA, 513 bp, Homo sapiens
acagcaggaatgagaaactttgggtgtatgtagaaatctgatttccagagttgacacatatatgtacagtttttaataaaaattatgaaagatgaaaagaaataaagtatgacccaaacacaagaaaaaggtttcaatagaaagtgtctttgaaatggactccaccaagttgaaagcatcctcaataatcatcttttggctctgtggaagtctggccattttgtgctcagttgaatgggtggaagagggaaagggggagtggaagtggcggggaggatgtctacagaagtaggggtggacaaaagataggaaatcagagactgcccccccaactgacctaaaactgtgcagttgcagttgttgtaagcccagatgttggatttactagatacaaacttttgtaaatttatagctattgtaaatatatttaaagaactaaaacaaaagtctaaagaactatagaaaagtattaagaatgttgtcttaccaaatagaggatatcaatgaatattt

SEQ ID NO: 251413 - DNA, 652 bp, Homo sapiens
attgagcgcgcgcggtcccgggatctccgacgaggccctggacccccgggcggcgaagctgcggcgcggcgccccctggaggccgcgggacccctggccggtccgcgcaggcgcagcggggtcgcagggcgcggcgggttccagcgcggggatggcgctgtccgcggaggaccgggcgctggtgcgcgccctgtggaagaagctgggcagcaacgtcggcgtctacacgacagaggccctggaaaggaccttcctggctttccccgccacgaagacctacttctcccacctggacctgagccccggctcctcacaagtcagagcccacggccagaaggtggcggacgcgctgagcctcgccgtggagcgcctggacgacctaccccacgcgctgtccgcgctgagccacctgcacgcgtgccagctgcgagtggacccggccagcttccagctcctggccactgcctgctggtaaccctcgcccggcactaccccggagacttcagccccgcgctgcaggcgtcgctggacaagttcctgagccacgttatctcggcgctggtttccgagtaccgctgaactgtgggtgggtggccgcgggatccccaggcgaccttccccgtgtttgagtaaagcctctcccaggagcagc

SEQ ID NO: 251414 - DNA, 610 bp, Homo sapiens
attgagcgcgcgcggtcccgggatctccgacgaggccctggacccccgggcggcgaagctgcggcgcggcgccccctggaggccgcgggacccctggccggtccgcgcaggcgcagcggggtcgcagggcgcggcgggttccagcgcggggatggcgctgtccgcggaggaccgggcgctggtgcgcgccctgtggaagaagctgggcagcaacgtcggcgtctacacgacagaggccctggaaaggaccttcctggctttccccgccacgaagacctacttctcccacctggacctgagccccggctcctcacaagtcagagcccacggccagaaggtggcggacgcgctgagcctcgccgtggagcgcctggacgacctaccccacgcgctgtccgcgctgagccacctcctggccactgcctgctggtaaccctcgcccggcactaccccggagacttcagccccgcgctgcaggcgtcgctggacaagttcctgagccacgttatctcggcgctggtttccgagtaccgctgaactgtgggtgggtggccgcgggatccccaggcgaccttccccgtgtttgagtaaagcctctcccaggagcagc

SEQ ID NO: 251415 - DNA, 844 bp, Homo sapiens
aacatgatgacactaaaggcagaagtcgatctccatgtataaacattttaacacatatgttttttgttatcgtggtttctgacctgtctctttgccctgactttctgatactgcactagggttcctgttgctggactccattccatatgacttgctctcgtctaggctgctctttggctcatctttataaatcatgatccaaaatgaagcacatatttattttttaaataaatatgaaatgaagtatagacatcaaactgaagatgagtagatcatactgagtttcactgtctgtgcttggatcaacatcaggccttatacaaatattcaagtccagaggcaaaaggtaataaggaaaatttgtagcacaagccacaaggagataacatgtcaagtctatgcgattggaaataaactaaagatgaactgctggggatgctcactcatcacagagctcagtctaaagcaccagatttcacaagcattttttgggggaaattctgttaaaatgaaatatgagtcacatggtggtgtttcactcatcatatgtgttcaatattaattcattttaaggtttagttgcacaaaaggtaaatgagaattagaagactccatgggtaagaggagccacagaagtaaagcattgtcaagggttctatgtctatatatttagatattaggcttctgagaaaaaaacacaataggaaggaagatgaacacaacagagggcagaaggtctatacgtcctgaggccttttatgcaacgtttgtttgtggaatgttttttaagaatgtgtgagagtcattttaatgtgaaataaagacctacgtctacagacttgcc

SEQ ID NO: 251416 - DNA, 459 bp, Homo sapiens
aattctgtggctactggaggtcactgtgtcagctgtcccgcttcactccacctaaagatacaactaagaaaaccataaagggatagagtgatagaatgaggatcccaccatctgcctaagggcttacatgtgacttcggaaactggcataaagaggaaggcgagggccagacgtggtgactcatgcctgtaatcccagcactttgggaggccgagatgggaggatcatttgaggtcaagagttcaagaccagcctggctaacatggcgaaaccctgtctccacccaaaacacaaaaattagccaggtatggtggtgcacacctgtaatccaaggtactcaagaggctgagacaggagaatcagttcactgattctccaggaaacggaggttgcagttagctgagatcgtgccactgcattccagcccgagcgaccaagtgagactccatctcaaaaaaa

SEQ ID NO: 251417 - DNA, 382 bp, Homo sapiens
ggcaccactaggccctgcctccttttgtagagcctccagccttatttggtgagtttgctactggccagcctccctggagcctccccatgatgtcaccagaagggaatgtaaataagtgagctctgtgtcaggctagggagagtgctgcaggctcttttgggatcctgaggtccctccttcaggaatttcctcgttagtggcagagaaagcatgctccctcctcccccttctcatgcttcagtgttgacccctcctgctaggggtcgtttggcaaaagtcagcaaaattcagccacatttcttttaactcgccgatttcacctctaggaattaattcattggaaaactgtagcctgggcaacagagtgaaaccccatttattt

SEQ ID NO: 251418 - DNA, 399 bp, Homo sapiens
actaagctgaaatccaaaatattccagtgagcatttcttttgagcatcatgtcagcacttaaaacattttgggttatggagggtttcagattctggattttccacagtaggggtgctcaacctgtaccgtgtaaactttggatcagttaaattctccttagaatgcctaggcacatcttagtttttgacttgaaaagcaattctggcactgatgtatacatttcaaaaatggcaatttttaagtagaaaactttcatggggtcagtaaaaattttttttattcccatttttttgcacattataataattacatgaaagactttttgacttgaaattcattcaggatatctggagtttgagaccagtctggacaacatagtgagacctcgtctctacaaa

SEQ ID NO: 251419 - DNA, 731 bp, Homo sapiens
gtccaccttgtggcatcacataaaggggagggaaaacgagctaaaagatcaggaagagtaaatattttgaaaaccatgtctatattattctgaaaagatagaaaaagagatctcttcgggttagtgcaaggttgctgtgatgttaacctgagcagcttcagtgaaataaggtacttatacctagaactcaaagatatttccctgtggattaattttttagattttacgtttatattcataatccattttgagttaattttttctataaatcgtaaggcatacagcaatattgttttgtttttacattttgtgtctaagctccaggaccatttgtttctaactcaaaggtatcagtagagtgaatttgtgttggttgatttttgtgttttctagactgtttcatttttatatctgttcatctttgtgccagtgcttcactatcttcattactgtggttatataataggtcttaatattggacaaagcaattctttattctttttaaatattgttttacctattgtagagtctttgcctttctatataaattttagaataagcttgtctagggctacagaaaaccttattatgattttgatatgttgtgctaactatataaacaacagtgttctaatatctagaatacatatctacataaatatgcttgcaatgtaagtaacaggttaataaaattaagaaaattggcatctttaatatgttgagtatcccag

SEQ ID NO: 251420 - DNA, 612 bp, Homo sapiens
gaaaacccatctctactaaaaatacaaaaaaaaattagccgggcatggtggtgcgtgcctgtagccccagcttttcgggaggctgaggcaggagaatcgcttgaacctgggaggcggaggttgcagtgagccgagattgtgccacagcactccagcctgggtgacagagcgaaactccttctcaaaataataataataataaatattcaccaaggtcctactctgtactaggcactgggaatacagtaataagcaaacagccaaggtctgctggcctcacagaatttatagtctagctggagtgatagataagtaaataatcataagactctataattatgaaggataataagagctttgaggaagtacagggaccttggcctcctccagttcgttagtgcctggtctggtttcttcaagatgcctaagcgttaaccaggtgaaacaggggtgggagagagaaagaagagtccctccaaaaagaacagcatgccgggcacagtggttcacatctgtagtcccagcactttgggaggctgaagcaggaggattgcttgagcccaggagctcaagattagcctaggcaacatagtgaaaccccatctctaccaa

SEQ ID NO: 251421 - DNA, 381 bp, Homo sapiens
gctgtgataactgtattctctggactgtaccctaggcccactataggagaaaaaggtcccatccataaaccagcaacccaaatacccaccctgaaaataatgccacacagtatgtctctgggggaaattctgcccaggagagccagcaacaggggctgtgaatccaggaagcctgtaacacacattgagtttccaggccatggttgccgttctttacctttggatggttacagaagagcttggaactaatgaagactcctgcagaggctagggccagatggctgctttcctgaaacttaggaaattcagatgctagtgatacagcaaatgaatccccccactcccaactcacctcccaacaaatagttatgacttctaagc

SEQ ID NO: 251422 - DNA, 477 bp, Homo sapiens
aaacttctatacaacaaaggaaacaatcaacaaaatgaaaaggcaacctatggactaggataatatacttgcaagccacatatctgataagggattaatatctaaaatgtataaagaacccttacaactcaatagcagaacttttttaaatgagcaaaggatctgaataaacatttctccaaagaagacataaaaatggccaacaggtatatgaaaaggtgcttatcatcattaattgacaacacataggtcctttatccatgtgcacattgcactaacgtgcaaggtgaagactatagttactaaaactgtactgtattaggaatttttgttaagtaaattttagctgctcttgtcatgaaaaagtaacaatgtgagatgtcagataagttaatttgtgtcactatagtaactattatctgtatgtatcccacaacatcatgttataaacctcaaatatactcaaaaaaatttact

SEQ ID NO: 251423 - DNA, 352 bp, Homo sapiens
cagtacatacatgttggtgggtgaatttcttgtcatgagaactattaaggaagctttacaatacagaaccctgcctggtgccattccttgctgagtgggattctgcacagtcttgcttagcaagtcccagcttctgatgcaaagtttagtgtgcacagcacacatgactcacatggtcaggaaggatactcacttcctgaagctggaggtgagtatctggcttttcaacacctacagtgagagcaagtcttgactttccacctacatgtataaagtagaaaattacttaagcataggaatggagatttagatgctggtgggcaatctctagaaatagtggtaagtgctacaa

SEQ ID NO: 251424 - DNA, 355 bp, Homo sapiens
aaagacctcgtttcagttcccactccatctgccgataaacaaccatatcaccttgggcaagtggctcggcctctccaagctttagtgttctcatctgtaaaatggagcaactaatactgtccctgtagaactttacagggtggcgtaagaattgcttgaggaggcagaggttgtagtgagccaagattgcaagactgcactccagcctgcgcaacagagaaaactctgcctgaaaaaaaaaaaaaaaaaaaaagtgatctcttcatatcacgtaaccaaaaaattcatacctgaccttgagttttcccaggacgggattctgtgacataaacccttccatgcttctaccttaaaa

SEQ ID NO: 251425 - DNA, 456 bp, Homo sapiens
gttagaacccactctggcatcgacctttcccggtaggagtgccagggagattgtacacccttctgctctagaatcatagagtcactggcagaaagcacctcaggatatggaattcctgggcctccccaggtttctaacatgcaaattatttcataagatgaaaataagcaggccaggcactgtagcccatgcctgtaatcccagccctttgggagtccaaggtgggcagatcacccgaggtcaggaattcaagaccagcctggccaacatggtgaaaccccatctctactaaaaatacaaaaattggctgggcatggtggcagggacctgtaattccagctactcgggaggctaaggcaggagaattgcttgaaccctggaggtggaggttacagtgagccaagattgcgccattgcgctccagtctgggtgacaagagcaaaactccatctcaaa

SEQ ID NO: 251426 - DNA, 371 bp, Homo sapiens
atttatttggttaattctgctttggtcctggattagggttgccggaatttcacaaatacaggacatccagttacatttgcatttcagataagcaacaaataatttttttagtagagttcttggaagggagaaaaatgaatcagccttgcagatgtagaaagagctttcttttcaactctagaacatttgctgcaaaaattaagggaagtttactgtaacagttgcagggtcttttggagatagtagatacattctaaaactggtttgtggtgctgatcgcacaattctataagtttacttaaaatcgttgaactttacacttaccatggatgaccttgatggtatgtaaattttgcctcggaaaaactggt

SEQ ID NO: 251427 - DNA, 381 bp, Homo sapiens
ctgggttcaagcgattcttgtgcctcagcctcctgagtagctggaattacaggcgcctaccaccatgtcccactaatttttgtatttttagtagagatggggtttcaccatgttggccaggctggtctcaaactcctgaactcaggatatctacctgcctcagccttgggattacaggcgtaagctaccgtgcccagcagcagagcagtcgtatccactcccatggctttaaccacctccatgaatatctctgccccagatttcctaagctctacaactgcatatccaaatgctatctgtacatttatacttcgcctatatgagaccaagtgtctagttgcaagcaacagaaagcaaccttcgtgaatttacacagaaaaa

SEQ ID NO: 251428 - DNA, 399 bp, Homo sapiens
cctccttctgggacctgggccacaccagggcaggcaacaagtgacttgtagcggaaaggcttcagccgtatcctttaagtgacatggccatgcctaacttccagggggtggggagcaccatttcgccttgtccctgggagaaagagaaccaggcactcgtgcctacgatgggagtttcccagcttgcttcactgggttgttaggatggagagggaattgtgtatgatgtgccttgtgagatatcaagccctctgcagatgtaaattacacacacgaaacacaaatgtaaattacaaacataaaccatgaatgtctcatcattgttgttgtcactcccatcttcaacaccattccaagaatcagccgtggccgtcggacgcatccccttcctgtcaggac

SEQ ID NO: 251429 - DNA, 365 bp, Homo sapiens
ttaggaatagaacagtgaaagaaggtcccagtagtcccaaggactcgggaggctgagacacgaagactgcccaggtgagactacagagactgaagttgcagtgaatcatcacatcctgctactggacttgaacagtactgctgctgatgagagccatctgggcgaccttcgacatggcaaggtgcgagccatctgatcagccttagacatggcaaggcaagagccatctggtcaaccttagaagtgacaagggacagccacctggtcgacctttgacatggcaggatgacagccatctggtcgaccttagagatgggaatgcaagaggcttcaggtccaccttcaacatggtaaggctaaagcca

SEQ ID NO: 251430 - DNA, 248 bp, Homo sapiens
agggaggttgaagcctgttctcaagaccagtctgggcaacatggcgagactctgtctctacaaaaaataaattagccaggcgtggtgtcgtgtgcctgtagtcctagttactaaggagcctaaggcagcaagattgcctgacccaggaatttgaggttattgtgagccatgatcaatgccactgcactccaccctgggtggagtgagaccctgtctcaaaaaagagacagaatcagaccctgtctcta

SEQ ID NO: 251431 - DNA, 293 bp, Homo sapiens
acttttccttaaaacacatggatcaaatcagaaatgaaagaggggacattattaccaacctgtggaatacaaaatattatagaggaatattatgagaagttatatgccaggaaattagataaactagatgaaatgaacaaatttcaagaaagaaacaagctacccaaactgattcaggaagcaatagaaaatctgaataccctataacaagtaaagcaattcaattagtagtaataattttttttaatgttccacaaagaggagcccaggttcagatagcttaatctgtgact

SEQ ID NO: 251432 - DNA, 474 bp, Homo sapiens
aattattttgctgtgtttcagcgttatctgtggtcctatggtgagtggcgtctgttctatttgtgtggtagaaacactggacaatggcgtgtccccgcacatccctttccaacgcccatcagtgacacgacgtgggtagcttgaactcagccagggcggagtgtttacaccacagaaatgggcaaacacggccgggcacggtggctcacccctgtaatcccagcactttgggaggccgaggcaggaggatcacctgagatcaggtgtttgagaccagcctggccaacatggcaaaaccttgtctctactaaacattcaaaaattagccgggcgtggtggcagatgcctataatcccagctacttgggaggccgaggcaagagaatcgcttgaacccgggaggcagagattgcagtgagctgagacggtgccactgcactccagcctgggcgacagagcgaaactccatctcaga

SEQ ID NO: 251433 - DNA, 485 bp, Homo sapiens
atagcagtttcggaagtgagtggaggctgaatagctcattgcgtagagatactgtagctgtaggtcagatgggagcagggcagggggtgggggatgggatggtggcgtgaattaagatcacatcctgtcacttatacattcaaaagacatttgagcacccagctttatgctgcagaaggagattactaatatgacccagtccctttcctcaagttgcttataaactactaatagaaacagacatgttctactagtagttgcaaaccactataagccaagcacaagattctgtgactgcataaaggagaaagtaggcaggaatcaggagattgctgaggaaaagtgggtgagacagttcatggttacttgtgtcccatgaagacagagctggtgttttattcaactcattcaacaaatacttatgaaggatctactgtatatggctgccactactctaggagttttggttacattggtaaattaaa

SEQ ID NO: 251434 - DNA, 355 bp, Homo sapiens
tccagagtggcaaaaattaaagctgatattatcaggtgttggtgaggctgtggggcatcatgagtgctcatagcctgctgagcagactacatagcactatagtcactttggaaacagtttggcctgcttagtcaaattgagggtacatcttgcctgtgtgtgctagaacatgtatgcagaaatattcactgaagcagtgtttgtaattgtcccaaactggaaacaactcatatggctatcagtagactgcattaaaaattgtatagttagagagcagcaattaagtaaaatcagctcataatcacatggatgagcctcacaaacatgttgacagccccccacccaaatacatgca

SEQ ID NO: 251435 - DNA, 333 bp, Homo sapiens
aggtgggttccatcaattctgtgtccccaggtcccccagcaaggtggggatttgccttcagctccatggagcagggctctagggcctcagtagtgcccaacagcacagccaagtcaccaaggggaccaagcccatgggcacctcccctctggtgggcatttcagataattttcttcaggagccttgaacaaaagggaaatcacaactgaataaatgaaggtaccaaaatttacatcaatcagtgttatatgatgtatgttggacagtaatatatatgtttcaaagtaataattttgtatatattttaaataaagtattattgctctttcggtg

SEQ ID NO: 251436 - DNA, 449 bp, Homo sapiens
ccttgaaatgtgaaggagaatgaaatgtttgagcaactggaaggattttagtttggtaggattatttaaattttttccattactaaagaagtataccttcactggtaaataatctgtcaaaagtaggaagtaaaaaaaatcagcattgttccccacccctccaagtttccaatataaaccactattaacagtttaatgagttttatttcatatcctttactattcttatgaaaatacacacacgtgtgtgtgtatgtgtgtgtgtgtagttttctttagtaactggtttttataaatatattattttacaaaaacattctactatggtctgaatgtttatttcctccccaaatttacactcccaaagtgatggcattaggaggtggcaccttgggaggtgatttggtcataagtgtggtgcccttatgaataggatcagtacccttatt

SEQ ID NO: 251437 - DNA, 409 bp, Homo sapiens
gttgtcaatcgtttttgctgctgtggatccactttggctctgtgaaggcctggcccacgtgaggagatgtgtcggtctcggagcaattgaagtctcatccccatcctgagcggcctcttttctagcatcaaaacgaacacactgcagatgaggagaagaatcccacaggagctctttgtcctacaggagagcagcagacccatgtcagagaagatgcttgagtcttttcacggctcttctctgagaaatgaagccacaccacgatacagtcagcaagaggaagccgggaatgagagatggcaacaatccctgtccctggctccaaactcccgaaaggaactattttacaggtgccaaaaaggggacagtgttgataataataataaaatgaaacaatctgaaaaaaaaa

SEQ ID NO: 251438 - DNA, 616 bp, Homo sapiens
gggattttgttttttctaacatcccagcttattcccaaaagggtttgagccggacaggggctaaacaggccccttcgacttggcgggccggccagacgtgacagcaatgccaaggaggccaagtttctttgtccatttctcacctcccccttttccatccctggacctcctggcgcccccagtacacagaggcccttgagcagcccggctgcaggttccctatctactcagagttctccccctcacgtgcctatccccaaccctgcagtgtctgcggaccaaaggggaagggagcctcaggccaacccccaaggtacagccagaccagctcatccagcctggaagccaagcattctttactaaattcattgtttggatcttggaatgtgtctcccttagaaacaatgttataaatggtgatctgcttcccaggccagccacaaaagtctgttgaacccaaaatgcagctgtagggtggtgctgagaactgtgtcagctaccctgaaaaaggaggccactgatcagctttatttgtagaaaaaatatgtatatatcttctggttctttcttcttgggctataaacactataaattaaataagttaaagttctcccat

SEQ ID NO: 251439 - DNA, 478 bp, Homo sapiens
cccctttcaaaagtaatcttagaaaacagaagcttctgtttcataaaagtcctaggaaataccatttcacatctcatcagctctgatctgttatgcctatctttagatgtgagagtaaggtcaataatattaaatagagaaaaataagtaagaatagaaaaagtcttggcagtgttcagtggtggcttgcatctgtaatctcagcactttgggaggtcaaggtaggaggatttgaggccaggagttcaagaccagcctgggcaacacctgggtgacagagcaagaccccatctcaaaaaaaaaataaaactaggtcaagtgcaatgacacacgcctataatcccagcaccttgggaggctaagacaggaagatcacctgagcccaggagctcaagattgcagtgagctatgaacaccactgcactccacctgtccacttgttcttgtgtgacagaacaagaccctgtctctaaaaaaa

SEQ ID NO: 251440 - DNA, 363 bp, Homo sapiens
tcaggctgttataacaatgtaccatagactgggtggcttagaaataacgtaaatttatttatcattgttctggagctggaagtccaagatcaggacaccagcatggtcagattctcgtgggggtcctttgaagtcctttcattattacctccctgcatggtagaaagaaggctggagagttccctgtggtctctataggaacattatctcccttgatgaggactccaccctcatgacttaattatcccccaaggccccagctcctaatgccatcacactgaagattaggattgcatatgaattttgggggcatacagtcaatctaacacactaaataaacatgatttcttaaaacaaaaaaaa

SEQ ID NO: 251441 - DNA, 204 bp, Homo sapiens
gcaataaggatttttctgatttcctccatattgtgcaaccaaaaatagtaaagaaataaattggaagcagaggttgatataaatcaccaactatgctgttcatcaaaacagcctcctactgttcacagagttcctactgattaccttgttaataagtacattttataaacggaaataataaatataacatttaaaaacatcatt

SEQ ID NO: 251442 - DNA, 431 bp, Homo sapiens
cagatgaatggataaataaaatatggtatatccatataatggaattttttcagttttaaaattgtatgaaattcttgtacatgctacaccatgggtgaaccttgaaaaaaatatagtaattgaactaaaccaggcagaaaaagacaaatatttcatttatatgatttcacttatgtgtggtgacccatagaataggtcaattcatagagacagtatgtgaacaggttactgggcctggggttagggtaatcgatgttattgtttaaaaggtacagagtttctgtttgagatgatgaaaaagttctggaaatggatagtagtgttggtcgcacaccaatgtgaatgcactgaattatatacttaaaaatcactaaaatggtacattttatattgtgtgtattgtattttaattaaaatttttttgattgttt

SEQ ID NO: 251443 - DNA, 542 bp, Homo sapiens
tttgatacaccataattatcaaagttgattaatagacaaatattgaattttgttccctagcaacaaagaatatgcctttctgatgtattatttgaaaaccagagcaaaacaaatactataaaggccacaaagagaacttttgtccaaaatgcaacaaaactagacaaaaattaccaaagtaaataaaattttaaaaactcacccttccaccacttagaaactaaaaaaatatgtattatgactgcattaaaaagaaaatgaaaactataatcaccagctatttagaaagtaataaaaatcagaaagttatatataagcattcatagaatgtgactagatcagtacaaaagaggtacgttgaggcccccacatgctatcattattaagccagagagtaaacatatgactaaagcatatggctaaaaaatgagaaatagaagaataaaatccaactaagcagaaataaaaggaaaagaaagataatatggcaatttataatcagaaaataaagtataattgataaatccaagtgtttttaattt

SEQ ID NO: 251444 - DNA, 347 bp, Homo sapiens
ttcctaacactgactttgccttcactcagtctccttccagctcttagatgtcagtcatagaacccttggcaaacctggctcaattttggcccactgtggtagaactgtccttgatccagaaggcattagggatggtagcaattaagtatgtggccagggtagcctcccaacactcatatctgctttgagacagctgcttgttagccctcgttccctcactttcaatatctgtattcctgtctggcaggccccaaaaaagttcagagcaagcctaggctcacacatgggcttgttctctggggcaacattgcctgagatcatggggaccttcctagtacacctatacc

SEQ ID NO: 251445 - DNA, 410 bp, Homo sapiens
agctccctgggaagctgaggcaggagaatcacttgaacccgggaagcagaggttgcagtgagctgagattgtgccattgcatgccagcctgggcaaaaagagtgaaactccatctcaaaaaaaaaaaaaaaaaaaagaggtggtacctttaagaggtgatgacctcatgaatgcattaatgccattactgtgggaccaggttagttatcttgggattaggctcctgataaaaggatgagttctgcctgatttcttctttctgtctcatgtatttgcttacccttctgccttctgccttctgccatggcatgatgcagtatgaaggcccttgccagatgccagtgccatcctcttggacttccaaacatccagaaccatgagccaaataaacttctattattaatatatta

SEQ ID NO: 251446 - DNA, 416 bp, Homo sapiens
cgcttgtaatcccagttctttgtcgtgtcaaagcaggcagattgcttgagcccaggagttcaagaccagcctgggcaacatggtgaaaccctgtctcttcaaacaaatacaaaaataagccaggtgcctgcctgtggtcccagctactcaggaggctgaggtgggaggatcacctgagccctgggaggtcgaggctgcggtaagctatgatcgcgccactgcgctccagcctgggtgacagagtgagtgaggccctgtctcaaaaaaaaaaaaaaagaaaaaatttcttccgaatattcttccctgagtcttggcaaaactaatttctgtataaatagaaggggcagtatgttccttataatttaggtatgtggaagaatgaccagggacaacttaaaaacatttttttctaaaaa

SEQ ID NO: 251447 - DNA, 482 bp, Homo sapiens
agaggccattgtagggttaataattggcctaatttcaatgtaaatgtgtctcagggaatatggaggccaacagagagggagagagatgggagaagggcggagcagtcagaacacacaacatttttccattaagttgaccttcttttctgggtgtggtttgtggtaccccaaaacaattataataaaaacacaaaagatcacagatcaccgtaacagacgtaataataatggaaaagtctgaaatattccaagaattaccaaaatgtgacccagagacaaactgagcacatgccattggaaaaatggctccaattagcacagggttgccatgaaccttcaatttgtaaaagacgcaatatctgcaaagagtaataaaataaagtgtgcctgtaacttttcttttagtttatatattattttaaatatcacagtacatcaaatccaaacataatagctgatccttgattgaactctggacttta

SEQ ID NO: 251448 - DNA, 454 bp, Homo sapiens
attaatttatttttttagagaagtggggttttaccacgttggccagggttgtcttgaactcctgaccccaagtgatcctcctggctcccaaagggttgggattataggcatgagccaccatggccagccatgtggtgtttctttaacccctatattttcttaagaataggaagatctggccgggcgctgtggctcacacatgtaatcctagcactttgggaggccgaggcgggtggatcacctgagatcaggagctctagaccagcctggccaacatggcgaaaccccatctctactaaaaatacaaaaattagccagacatagtggcaggcacctgtaatcccagctacttgggaggctgaggcaggagagtcacttgaacctggggggcggaggttgcagtgagccgagatcgtgccacttcactccaacctgggcaaaagactgagactct

SEQ ID NO: 251449 - DNA, 453 bp, Homo sapiens
ttttgtcttctccgtgaaaatctaagctcctagaaactttgtgagggaggcaatgggtctgttttgtttacctctgcatctgcagggccgagtacaatgcccagctcatttgtaaatgagtgaaggagtcccctactagcaggctgcctactcatcaatcaagtagttgttgggtttctcatttttacctttggagatgttgtcttcgacctacgggaaggaattggatctatttgagggtaaagaaattcatcctccctgggtttatgtattttccaacccatgcacccggcccctccttgctgtcttaatagaaagtggaaaatagaaatcttctgcacaaggcctttggtttgaatgcaacatgcctagagatagggaactggaatccaacaccgttgcctacagatctttggagactaaaagagaaaaaatccaggaaagaaaaaaaaa

SEQ ID NO: 251450 - DNA, 450 bp, Homo sapiens
agaatatcagtgattcaaaacccatgatacaaaataactgctgtttttgacatcacaacacgcttgggttcctgctctgcactcctcactgagtagtcctaactggcactggtggtttagattggcagggaaaactgaaaactgttcaactcccttgactttagctggcatttcccctcatttgtaataaacaattctttaaaatgttatccaggcagcattgtgatataagtgtagtgaaagtgccctgttaaaagtaaaatttagtgggtttttttttgatatctacaactttcttttttctttttttgaagtatatacttatgaggataatgttatttttttatgccctctgttctaggcctacatttgtatttcctccacaaaatgatcctgagtctaatttttttctatttgttgactttattattagagataaattcctttaaa

SEQ ID NO: 251451 - DNA, 1099 bp, Homo sapiens
atggttcaaatatactaagcattttattagaagttgttcaattatattaagcatactctaggcaactagaaatgatcatgtgattttacttctctggcctattatcacaataaattatgttagtagtttctcaatactggattatttctgcatgagatgtatcctgttaaataatggtggtttttccctttttttcttgtaacaatgttgaactcaatttcttacattttatttggattattgcatttatatttatgaataagattgggttgtagttttacatttttgaattctacctttatcagcttaaaaacctagattggtacatagcatatgaattgcctattctttggggtctggagaaactcacccataacattgtttaggcctcaatctctttaagggaggatgagtagaagacaattctctgaaaacttaaaaaacctttttctatggttttactgtcacttcttgagtatcaatttaaaaaatcatatttttaaagaaaaacatgcattttcagagaattttaaaattctgtgtctatatataattataattaaaaatatttttctctgtatctctggttatggcttctttctcatttctggtctttttagttacttttttcctttcttttattagacttgccagtctttttaaggaaccagcacttgagtatttcatcagttctattttttctatttgttataatattaatataacttttcatctttaattccttccttatttttaatgtttattttgttgctttatgaatgttttgtactaattgatggcttagttcatttattttcattttttaatttaataataggacacgtaagactataactttgcctttgggcacagctttgactgcatctcaaaagttttggtatgtagtctcttaattgttgctatttaaaaataatggattatattactgtttttattttatttttgatgtattatttaggatagtattgtgaggtttttgttatttgttaatcctactttctttttaataaagaataaacttattaatatttatgttgctactttaataaagagctgattttgtttggaaaaagtgaaa

SEQ ID NO: 251452 - DNA, 618 bp, Homo sapiens
atacccttccccacagtgagatgtgtcagttccccagaaactgagtcaaaatactaagtaggaagcttgacaatcaccttgcctaattcttttccttttagaaatgaagacatggaagacccagaaaggtagtgactttcccaaggtcacaaagttaaaagcaatgagacctggggacactcttgttgcatcacaccattctgtcaaaaaaactggtgtttactctgtaaacaatgtaataaaaatgaaaaatatgccttttccaatccttttctgaaagaattggcacctggttatggaaacagcacagctctcattcatttactattagtaactcagaaacttgctatcaggtatttagagattatgcctaaagcttttatagtaactgagagaacaacccttccattactgttggtgaacaaccattctgtccaggaactttgtatacaggaaagtgtttttctactgtaaacctataattggtaaagttattttggcttatagagaagacgagagaaatgtcaatctaagtcttaagagaaagcctgggaagtagagaaccaaagccagaaagggcggaattactcactgggctgaggaaatgacaatcatagt

SEQ ID NO: 251453 - DNA, 886 bp, Homo sapiens
acatcagtaaaagataccatctgcaaggctactttattccccaaccttccaaagaatgagaacagtctgagtaaactagggcatgatcaaagatacatgtcttcaatgtaaaccaaacaaaacgtaggtgattccctgtaagaagacatggcatcagggaaatttcagatggcatacaagaccttagtgaggatatcctgagaaatgtgaagaaaggggttgctgattcacaaagcgtacagtacagatgggcagagaatactaggtacagcctctgataaaaaccagcaagacaaccaaattttcaaccatttgagcagccatctgggctggcaagagggtgtacaggtccatggaaaacatcctgagaaatgaagacatggaagacccagaaaggtagtgactttcccaaggtcacaaagttaaaagcaatgagacctggggacactcttgttgcatcacaccattctgtcaaaaaaactggtgtttactctgtaaacaatgtaataaaaatgaaaaatatgccttttccaatccttttctgaaagaattggcacctggttatggaaacagcacagctctcattcatttactattagtaactcagaaacttgctatcaggtatttagagattatgcctaaagcttttatagtaactgagagaacaacccttccattactgttggtgaacaaccattctgtccaggaactttgtatacaggaaagtgtttttctactgtaaacctataattggtaaagttattttggcttatagagaagacgagagaaatgtcaatctaagtcttaagagaaagcctgggaagtagagaaccaaagccagaaagggcggaattactcactgggctgaggaaatgacaatcatagt

SEQ ID NO: 251454 - DNA, 2147 bp, Homo sapiens
tgcacggccgcagctgaacagcatcaccgctgtcccaaggacaaccccaaagaggggcctcgactgcacctcctcgaagttgctgtctggctttggccaagtgcaggaatggtttttgtgagggcatggatggagaagtgccaagggccccttttggtcacttccgaagagcaaaaacgtgttgagaggagaccggtttaagatttcaaacagaacctccccagcgcgcatgaaaggacttgattagcatatgtcaagaggacccgcttatatactcggtgtgtatgtacacaggactctgatctgatcagtttgcggaattggagccccagccaacagccctagtcctagtattggcagcggcagctatagatatttctgcagagccagcagccggctcccacctacccaaggagagaagatcgctccaagacagtgagagcttccctgccatttcagtgcaaagtccctccggagcgacctcagaggagtaaccgggccttaactttttgcgctcgttttgctataatttttctctatccacctccatcccacccccacaacactctttactgggggggtcttttgtgttccggatctccccctccatggctcccttagccgaagtcgggggctttctgggcggcctggagggcttgggccagcaggtgggttcgcatttcctgttgcctcctgccggggagcggccgccgctgctgggcgagcgcaggagcgcggcggagcggagcgcccgcggcgggccgggggctgcgcagctggcgcacctgcacggcatcctgcgccgccggcagctctattgccgcaccggcttccacctgcagatcctgcccgacggcagcgtgcagggcacccggcaggaccacagcctcttcggtatcttggaattcatcagtgtggcagtgggactggtcagtattagaggtgtggacagtggtctctatcttggaatgaatgacaaaggagaactctatggatcagagaaacttacttccgaatgcatctttagggagcagtttgaagagaactggtataacacctattcatctaacatatataaacatggagacactggccgcaggtattttgtggcacttaacaaagacggaactccaagagatggcgccaggtccaagaggcatcagaaatttacacatttcttacctagaccagtggatccagaaagagttccagaattgtacaaggacctactgatgtacacttgaagtgcgatagtgacattatggaagagtcaaaccacaaccattctttcttgtcatagttcccatcataaaataatgacccaagcagacgttcaaaatattaaagtctattttctactgagagactggatttggaaagaatattgagaaaaaaaaccaaaaaaaatcttgactagaaatagatcatgatcactctttatatgtggattaagttcccttagatacattggattagtccttaccagtagactgaagccaaaaatctgttaaactgtggataatgggaaccctcacatggttgctgctggtgcctcacctctctggattatgtttactttaaaatttatgttaaaaatagagacttcatgttgaagaaatggattgacttagccaagagcattgctacataaattctgaggaccttgtagaattcacaggttatggcattataagttttaagaaaaaaaaaaactaaacaacacctgggtgaaacatgaactatgaaacatgccacaccaagacagaacactttttaaaagaatggacctatttatacactttcaatttgaaaatatttattatatatatttatttattaaagagtttattttttactgggatatgaagataatacaaagagtaaaaaacaacaaaacttccgttattgtgccattactttattgtggtgtcttgctctgtaaagaggacattattataccaccttaaccatagaatcagattttgaatttctttttaaaatatagtatagattatattttttatgcagtcaattgccttctaaatgtaacgctggtttcttttggcctagaaaaatgcctcattgatttgtattaaattcaacacacattcaaaagggaattaaacattttcatgtagtgttttggc

SEQ ID NO: 251455 - DNA, 340 bp, Homo sapiens
tgagtttcataatctcatcaatattttaagataggcgagcacacactaataatatctatgcctaccttcttgggtggactcaactgtaaccacagtttattagttgcttagaagtggatttttaaaaaacagttaaatgtgtgtgcataacacacaagtaatgacacactactattattattacctaagtagtgctcatcctctctttctgtgttttcttaggatgtgcactttaatttaggattgtaacgcctaataatatttctgtgagcctttaatgtgatttataagatggccgaattactgaaatcaccattatacctcttccataaaacgactc

SEQ ID NO: 251456 - DNA, 814 bp, Homo sapiens
tgtattttactgcatgcagaggcagcaaggcgacgaggtggcagataatgatcacatcactgtgtggcaactagaaaggcacttttaagaaaaagcagagggaaatcagcttaagagaaaactaaaacatttttcctttgcttttttccacttaaaaaaattaaatagaattaaactgtgtgcagtaggcacttttcatgaactctgatacaatgtcattgattttacccatttgatagattttcatattgcagcaaagcccattaccccacagacaaatggccaattttctccatgtcccacgtgcacaagaggcccttgtgaagttgtgtgtccgtgcacggcaatgcctgccggaacgttcgctgcgcctgttctttcactggctccacaccttggtgcctatggtatgtctgagatgagaaaggggtggagtggaaagccaggagggtattagcaaagattactaaataaacacacaaagtttatctcaactacaccttctccaaagcattaatacatcttgataaaatgagcgcgagtcagtaactatgatcggaccccgcagccaggcgagacaggcatttgattaacacttaaatcagcgatgcaggattcaaatgaacgacaggggggcttaatcaatcaccaccctcctccctccaacctcaaactgcccttaaaaatgtgcactctagctggctgtggtgatacatgcttgtaaatcccagcaactcaggaagctgacatgggaggatctcttgagaccagggatttgagactagcccggacaacacagtgagatcatatccca

SEQ ID NO: 251457 - DNA, 729 bp, Homo sapiens
cccactcaggccatttcgtccctgtgttctaggcttctcttcttcctcatggccttttctctctgagttcctgttgatagatgcagttgcctattgagcgactccagcttcctgtctgcttatgatctgccttaaccatttacacagagacagctctgagctattcgtgatgctggccactcttctcatttaccttcccacctctgccttggagtgggtggtatttcagtttgtaatgaagacagcaaggcgtagaaaggctaagggacttgttctaggctatgcagctaacaggtagtagactgagatggataagcctgggtgctgccctgcctccctgttttggttacctgcctgggcctgacacccccattaggctgtgaactccttgaagtcaggaactgtgtgttactcatcgttcagtcacctcacagggtctggctttattatttttggttgaataaatgactacaatcttattagaacataacgtattcattttcttgcagatatactggaagcaggtcatgtcttccaaaacatagtgcatactgaataaaacctatggtgatattacataatgtcacctgtacacagaggtattgttctgttcctgaatgacaggcctaaagtaggggagaagggtggggagccaagtgaatgcagaggggcagaattgtactgcttacatttttgcttgttttattaagtattagacataaaaaatga

SEQ ID NO: 251458 - DNA, 761 bp, Homo sapiens
  misc_feature (578)..(578): n is a, c, g, or t
  misc_feature (678)..(678): n is a, c, g, or t
  misc_feature (733)..(734): n is a, c, g, or t
  misc_feature (758)..(758): n is a, c, g, or t
  misc_feature (761)..(761): n is a, c, g, or t
agggagagagagagaaagcgagcttcaacctaaaaaaaaaaaagtctcagccaaaggaagatacagagaagtcagttagggactatctaaaagcctccttcctaatagtgtcatctacttttgtgtgacacacatactttacataattgaccttaatcttcagcttttactttacagatgaagaaacgaggcggaaggcactaactaacttgatcaaggccacagctggttaagttgacagagacaggcctagaatgtcagatttgtctggcaccagtcctctttcctatccaccttcagattctttggaatttaaagcctactgcaaccacacataatcctatttcatttcccttccctcgacctttagactgtggtggactgaagggtttgaagtacactaggagtcaagagcagatccagaggaaattttcccgttgaggtggaagctacaagaaaactaactcagtgatgtttttcaacctttgggtcatggacccctttgagaaacatatagaaatggatcctagctcgtgccgaattcggcacgagattttcttaacaggtctttaaatggngcagttctgaaattctgtttggtcagttctagatggtacgtcatgtgaatgcaaccaagcactgtagttgaaattggtgtatgccagtactcatatgttngctaagtactacgcataatggtaatagctgagatgttaaagactttgaagtctannatattaattccttacacatgcgantcn

SEQ ID NO: 251459 - DNA, 618 bp, Homo sapiens
agggagagagagagaaagcgagcttcaacctaaaaaaaaaaaagtctcagccaaaggaagatacagagaagtcagttagggactatctaaaagcctccttcctaatagtgtcatctacttttgtgtgacacacatactttacataattgaccttaatcttcagcttttactttacagatgaagaaacgaggcggaaggcactaactaacttgatcaaggccacagctggttaagttgacagagacaggcctagaatgtcagatttgtctggcaccagtcctctttcctatccaccttcagattctttggaatttaaagcctactgcaaccacacataatcctatttcatttcccttccctcgacctttagactgtggtggactgaagggtttgaagtacactaggagtcaagagcagatccagaggaaattttcccgttgaggtggaagctacaagaaaactaactcagtgatgtttttcaacctttgggtcatggacccctttgagaaacatatagaaatggatcctagaaatatgcacatacggccgggcgcagtggctcacgcccgtaatcccagcactttgggaggccaaggtgggtggatcacgaggtcagga

SEQ ID NO: 251460 - DNA, 460 bp, Homo sapiens
agttcaagtatcattttctctaggaagactttcaagacccctcatcttcctgtggtgggaaggcttatcttattcattattttcttagtgtctagtgagtgcttggcacatagaacataccgaacatatgttgaagaattatttacttctatctgtagacttagaatacaaattgtattacgaacatatgagggtcttaagttaaaatttttgttgccaaaatattgatagattaatcttagcaagggaagatttttgctaggtaacactttggtctggattattttacttttgaaaatagcaactgggtgctgtggctcacacctgtaatcccagagctttgggagactgagatgggggcattatttgagtccaggaagttgaggctgcagtgagctatgatcgtgccattgtgtcccagcctgggcgacagagtgagaccctgtctcaaataaaaaaa

SEQ ID NO: 251461 - DNA, 422 bp, Homo sapiens
gactcacctcagtctcaaagataaaataaaataaaaataaataaataaaaattggaggtcttggtcctctgtgtagggactcagtctctgtattttcattcattcattcaacaaacaaatattgcccatcttctgtgtgccaaggactagactggcactggggacacagcaataaaggagagataatttcctctgagtctggtgaggcagatagacacataactaaataaatagagtatagcatattgggtgataactatagacatgttcacagaggagttcatgtttgaaccaaagccagaaggataggtaggagttcttagcagagggctcagtctatgtgaaagcacagaagcgtgaggtgtatggctagtttcagtaaaggcaaataatatgaggtggctgaagcataaggttcttag

SEQ ID NO: 251462 - DNA, 476 bp, Homo sapiens
gactcacctcagtctcaaagataaaataaaataaaaataaataaataaaaattggaggtcttggtcctctgtgtagggactcagtctctgtattttcattcattcattcaacaaacaaatattgcccatcttctgtgtgccaaggactagactggcactggggacacagcaataaaggagagataatttcctctgagtctggtgaggcagatagacacataactaaataaatagagtatagcatattgggtgataactatagacatgaaaatattgagaagatggggaaaggaatgaataacaccactcagaggaagaatcttcacagaggagttcatgtttgaaccaaagccagaaggataggtaggagttcttagcagagggctcagtctatgtgaaagcacagaagcgtgaggtgtatggctagtttcagtaaaggcaaataatatgaggtggctgaagcataaggttcttag

SEQ ID NO: 251463 - DNA, 310 bp, Homo sapiens
agaaggtccttggttccttggtagatgagtatgtgttctctttttctgtgtagcattgattaccaccttgtagaaacacaaatgctaattctggaagtgaattatagaatcatatagtccgcttatttatggagaaattaagaaagattaagtcactttctcaaggttaatccatcagctagatagtggtgaaagaaagaacagatcctggatcttgtgatacagaagtctcattgccacagaaatggagccatgtttttgaaaacagaacacatgaaatacgtgatttagaaagtctggtatgacttac

SEQ ID NO: 251464 - DNA, 1575 bp, Homo sapiens
aggaggctgaggcaggagaatcgcttgaacccgggaggcagagtttgcggtgagccgagatcccgccattcattgcactccagcctcggaaactagcaaaactccatcttaaaaaaaaagaggaggccgggtgcagtggctctgcacaacactttgggaggccgaggcaggtggatcacctgaggtcagaaatccgagaccagcctggccaacatggtggaaccccatctctactaaaaatgcaaaaagtagccgggcgtggtagcgggccccagtaatcccagctgaggtgggagaattgcttgaacccgggaggccaaggctgcagtgagccaagatcgcaccactgcactctagcgtgggtgacagatcaagaccttgtctcaaaaaacaagaagaagaaaaactactttttttttttcagatggggtctcactctcacccagtctggagtgcagtggcgccatctcagctcattgcagcctctgcctcctgggcttgagtgatcttcccacctcgacctcctgagtagctgaaccacaagtgcatgcctggccaatttttgtatttttggtagagatggagtttcaccatgttgcccaggctggtctcaaaactggcctcccaaagtgctgggattacagacacaactggcctacctgcaggattttcagtttatggacatgactgactggagacatggagaagctgttgttattggagatttttattactcgcatttcctgagcgatggggacactcactgtggggaaaagcaagagagatcagattgttactgtgtctgtgtagaaagaagtagacataggagactccattttgttctgtactaagaaaaattcttctgccttgggatcctgttgatctgtgaccttacccccaaccccgtgctctctgaaacatgtgctacgtccactcagggttaaatggattaagggcggtgcaagatgtgctttgttaaacagatgcttgaaggcagcacgctccttaagagtcatcaccactccctaatctcaagtacccagggacacagaaactgcggaaggccgcagggtcctctgcctaggaaagccaggtattgtccaaggtttctccccatgtgatagtctgaaatatggcctcgtgggaagggaaagacctgaccgtcccccagcccgacacccgtaaagggtctgtgctgaggaggattagtataagaggaaggaatgcctcttgcagttgagacaagaggaaggcatctgtctcctgcctgtccctgggcaatggaatgtctcagtataaaacccgattgtatgttccatctactgagatggggaaaaaccgccttagggctggaggtgggacccgcgggcagcaatactgctttgtaaagcattgagatgtttatgtgtatgcatatctaaagcacagcacttaatcctttacattgtctatgatgcaaagacctttgttcacgtgtttgtctgctgaccctctccccacaattgtcttgtgaccgtgacacatccccctctttgagaaacacccacaaatgatcaataaatactaagggaacgc

SEQ ID NO: 251465 - DNA, 1151 bp, Homo sapiens
aggaggctgaggcaggagaatcgcttgaacccgggaggcagagtttgcggtgagccgagatcccgccattcattgcactccagcctcggaaactagcaaaactccatcttaaaaaaaaagaggaggccgggtgcagtggctctgcacaacactttgggaggccgaggcaggtggatcacgctggtctcaaaactggcctcccaaagtgctgggattacagacacaactggcctacctgcaggattttcagtttatggacatgactgactggagacatggagaagctgttgttattggagatttttattactcgcatttcctgagcgatggggacactcactgtggggaaaagcaagagagatcagattgttactgtgtctgtgtagaaagaagtagacataggagactccattttgttctgtactaagaaaaattcttctgccttgggatcctgttgatctgtgaccttacccccaaccccgtgctctctgaaacatgtgctacgtccactcagggttaaatggattaagggcggtgcaagatgtgctttgttaaacagatgcttgaaggcagcacgctccttaagagtcatcaccactccctaatctcaagtacccagggacacagaaactgcggaaggccgcagggtcctctgcctaggaaagccaggtattgtccaaggtttctccccatgtgatagtctgaaatatggcctcgtgggaagggaaagacctgaccgtcccccagcccgacacccgtaaagggtctgtgctgaggaggattagtataagaggaaggaatgcctcttgcagttgagacaagaggaaggcatctgtctcctgcctgtccctgggcaatggaatgtctcagtataaaacccgattgtatgttccatctactgagatggggaaaaaccgccttagggctggaggtgggacccgcgggcagcaatactgctttgtaaagcattgagatgtttatgtgtatgcatatctaaagcacagcacttaatcctttacattgtctatgatgcaaagacctttgttcacgtgtttgtctgctgaccctctccccacaattgtcttgtgaccgtgacacatccccctctttgagaaacacccacaaatgatcaataaatactaagggaacgc

SEQ ID NO: 251466 - DNA, 1167 bp, Homo sapiens
tcaaaaagaaattagccgggagcggtggtggcgcgcgcctgaggtcccagctactcaggaggctgagacgggaggctctgcctcctgggcttgagtgatcttcccacctcgacctcctgagtagctgaaccacaagtgcatgcctggccaatttttgtatttttggtagagatggagtttcaccatgttgcccaggctggtctcaaaactggcctcccaaagtgctgggattacagacacaactggcctacctgcaggattttcagtttatggacatgactgactggagacatggagaagctgttgttattggagatttttattactcgcatttcctgagcgatggggacactcactgtggggaaaagcaagagagatcagattgttactgtgtctgtgtagaaagaagtagacataggagactccattttgttctgtactaagaaaaattcttctgccttgggatcctgttgatctgtgaccttacccccaaccccgtgctctctgaaacatgtgctacgtccactcagggttaaatggattaagggcggtgcaagatgtgctttgttaaacagatgcttgaaggcagcacgctccttaagagtcatcaccactccctaatctcaagtacccagggacacagaaactgcggaaggccgcagggtcctctgcctaggaaagccaggtattgtccaaggtttctccccatgtgatagtctgaaatatggcctcgtgggaagggaaagacctgaccgtcccccagcccgacacccgtaaagggtctgtgctgaggaggattagtataagaggaaggaatgcctcttgcagttgagacaagaggaaggcatctgtctcctgcctgtccctgggcaatggaatgtctcagtataaaacccgattgtatgttccatctactgagatggggaaaaaccgccttagggctggaggtgggacccgcgggcagcaatactgctttgtaaagcattgagatgtttatgtgtatgcatatctaaagcacagcacttaatcctttacattgtctatgatgcaaagacctttgttcacgtgtttgtctgctgaccctctccccacaattgtcttgtgaccgtgacacatccccctctttgagaaacacccacaaatgatcaataaatactaagggaacgc

SEQ ID NO: 251467 - DNA, 187 bp, Homo sapiens
tcaaaaagaaattagccgggagcggtggtggcgcgcgcctgaggtcccagctactcaggaggctgagacgggaggctcgcctgagctctggaggtggaggctgcagtgagctcagattgcaccaccgcacaacagcctgggcagcggagccagagtctgtcccaaaaaaataagaagttttatatta

SEQ ID NO: 251468 - DNA, 465 bp, Homo sapiens
ctctcacaacttgagctcaattttattccggagccatgacctgcagcacattggtgaccagaagacgcccaaagctttgaaaatggacttatcgacctcaaaccaatgggacatattcctacatggccttctcccctgttagggttcccagggtatgtctttaatgtctggtttaatagaagaagacttggttctcctttctgcttctatgtttaatttcttgtgacatcccacgtcaggtagctgggaaactccaattatacttgtgagagaatgaaagtggaaaagatgtgcctgagacaggtttgaccaggcaactgaaaagatatccctaagagaagacaaagcaaaggtatgaaaggaacacacgtccctgactgactaggaggaacagagctgcctgctgtctggaaccgcttcctcccagactaagagagaaataaacttctgttttctatatgctac

SEQ ID NO: 251469 - DNA, 513 bp, Homo sapiens
ccttctagcttcttcgtctccaggactgacgctcaggctcctctctcgccttagcccaacttgctttcccgcctcgcaaactccggtttccctccactcccaactcttttcactacacgtttcccctcctctatctcccacgccacgaaccccgatccccagactcctctctcccgccctcctccttcctctctcctcccttcaactcttcatccgcttccacctcagactctgcgcgcacccaattcagtcgcccgctcccgttcggctcctcgaagccatggcgggacctgggggctggagggacagggaggtcacggatctgggccacctgccggatccaactggaatattctcactagataaaaccattggcatggtacttatggcagaatctatttgggacttcatgagaagactggtgcatttacagctgttaaagtgatgaacgctcgtaagacccctttacctgaaataggaaggcgagtgagagtgaataaatatcaaaaatct

SEQ ID NO: 251470 - DNA, 279 bp, Homo sapiens
gctatcaaatgcatttcatattttctgtttgaaaaatatgatgtaaaataaattaataccaaggaaatattggtagttcacaaagtcatttgcaatagtctcccaagactgaatactttggggcaccaaattatggaaggctagataagtgcttctgcattttaataagtgaagctgatactacaactttttaaagtaatgatgtattttcatggctcctgtctctgtaaaagccaagtgttcaaagaaatgcattaaaaaattaatggatatacgaat

SEQ ID NO: 251471 - DNA, 441 bp, Homo sapiens
gcctctcccagccgcacatgggccagagcccctgctggcagaagacagggcctggggaaggtgaggctccctgacccgtccttgtccgaggccagaggcagccctgctcccacctgggcccagcctcacctcattcaagcctagggtggatggcacccaggtcaggacacctgggagggctgcccaagcccaggggctgctgagggccctggctccccagagcgagggccactccttcttcatctccctccacccagcccttctaccctggggctgagcccaagaaacacacttcatcttttattttttcttacaaaaggccttcatatcatcgtttgtcttacaaaaaccaaagtccttgtctctgagtttgaaaaacatcttcccagaataaatgggaaaggatctcttataaatatatatatattttaaaaaagcaaa

SEQ ID NO: 251472 - DNA, 579 bp, Homo sapiens
agaccctcaagtctgcagatatcttgatgcatgtaacatttctaagacactgagctacatgctgaagaatgtacaggatgtccccatcaggcttttcagcggagttgtgagaggtgaagtatgagtacatggaaaggtggacagtaactgcagtcgatggcacggcatggtgtgctgccagatgaatggttcagaccctaagtgctggccggtggaagagaagagacttcgacttttggaagattgaataaaaactacttgaagacaacaagaaagcattctagacaaggagaatggagggaatagagtttagaaagcacaagtcatatgtagcgtgtctggatttttctgtttatgtcatttctactagtataaacaaatattgccttttttgttgttgttgttttgactgttactttgttcaggttgtttctgctcagaactctttttttatttgggttcttaagattttccacttaatccaaattctactttcagatctattaaacccttaagattttgtctgtgacctagtggagtattggtgtgtcttgcattataataaacatagttgtagaa

SEQ ID NO: 251473 - DNA, 453 bp, Homo sapiens
gcgcgaattcatcatcctgcttcagccatgtaaggcgtgtcacctccctcttcacctcctgccatgattgtaaatttcttgaggcttcctcagccatgcttcttgttcagcctgcagaatcgtgatccaattaaaccacttttctttataaaattacccagtctcaggtagttcttcatagcagtgcaagaacagactaatacagaaaattggtactgggaagtagagcattgctatgaagatacctgaaaatgtggaagcagctttggaagtgggtaatgggcagaggttggaacagtttggagagcttagaagaagacaggaaggcctgggcccagtggctcatgcctgtaatcccagcactttgggagtctgaggtgggcagatctcaaggtcaggagattgagaccatgctggctaacacggtgaaaccccatctctactaaaaataca

SEQ ID NO: 251474 - DNA, 220 bp, Homo sapiens
gttatacaattcagtgggtcaaattttacttactcatataagattttgcattcataatacttagagtcttgtcttttctgcaatgacaaaaaatatgtgggtaacctgttaataccagttctttggttgcatgtcaggatcatcttgtatagcttttagaaatgcaggctgggggtggtggctcacgcctgtaatgcccgcacagagtgggactctgtca

SEQ ID NO: 251475 - DNA, 667 bp, Homo sapiens
ggggcacttgtgaatttcaaagaataatgacaataaccaaaagaagctacatttgtggcattggctaaatgttttataaattttatctcttaaaattcaaaccaaaaaaccccctgtattcacacctgtaatcccagcactttgggaggtcaaggcgggaggattgcttgagcccaggagttagtgaccagcctgggcaacatagtgagaaccccatctctacaaaaaaatttaaaaattagtcgggtgcggtggtgcatgcctgtagtcccagctgcctgggaggctgagtgggaggatcgcttaggcctgggagtttgaggctacagtgagctgtgattgcgccactgcactctagcgtgggtgacagagaaagaccctatcttaagaaaaaaaaaagaaaagaaaaagaaaaaacaaacaaaaaaaacacccaaccctatataggtattattattacttctataggacacatagaggtttggaaagattaaatcacttgaccaaggtcacaaaataagttctgaggctgggatctgggattcagtcttattatatgcccttcctctaccactccctaaaacttctcattccctcaatccccatatatcatcttaaaatctgcaataaatagccccatacattcgttggcacttaggaaactgtt

SEQ ID NO: 251476 - DNA, 286 bp, Homo sapiens
tttatacacactttccctttggccgtccatgtgctctggaggaagaagggagttgctgcaatacaggtccacacccttacgtcagtttataggagcggccctcacatatgtgaataataacaatagtggcaccattgattgatgacctgtgctggactgattacataggttaagtcacatcttcacacaacccttcagggtcgcttcctttttatagatggggatgagggttgcaaagattatttaggtatcacatccacatcacagagccaataagtggtgaagc

SEQ ID NO: 251477 - DNA, 741 bp, Homo sapiens
gtcaaaacctgtgaaaagctaattagcagtattaagcaacacaaacattagtgccaaatgcatgataaaggctaaagaaggccagagcatatattactgtagagtagaatagtaagggaagactttgtcctttagtaaagagataggaggtggcctggcccttgaaatagtagtgtttaggtagatgcttgtgtaggattcctgataagagcaactgaaaagaaggagaggggaagtagtaaagggacaagaaacaattttttttttgaggaaccataagcaaattatagtttgacaagacaagattgggggacatatatggttaccagggaattacctcttatgtgttatatctttatattatttatctctggaaaagagtaccctgcaaaattccctacagctgcaagcagatgtcacttgatggacagagggggaattctgcccctccggtatcgggaaatacatactaaagacattgcgaaacgctgaacctcttcccataaataaaaggtttgtttgtaaaatgggaaatccacccataataaatgaacaataggcactgccagtttaggcctgttcatgaatggatctgcaagacagcatcttcgtttaacaacattatctgtgatttgatacatttatccttattacaatattgtttagttggtagaaattctatgttttctacaaggaaattgatgtttattaaataaaactgaaaataattaaaaaaaaaaa

SEQ ID NO: 251478 - DNA, 688 bp, Homo sapiens
gtcaaaacctgtgaaaagctaattagcagtattaagcaacacaaacattagtgccaaatgcatgataaaggctaaagaaggccagagcatatattactgtagagtagaatagtaagggaagactttgtcctttagtaaagagataggaggtggcctggcccttgaaatagtagtgtttaggtagatgcttgtgtaggattcctgataagagcaactgaaaagaaggagaggggaagtagtaaagggacaagaaacaattttttttttgaggaaccataagcaaattatagtttgacaagacaagattgggggacatatatggttaccagggaattacctcttatgtgttatatctttatattatttatctctggaaaagagtaccctgcaaaattccctacagctgcaagcagatgtcacttgatggacagagggggaattctgcccctccggtatcgggaaatacatactaaagacattgcgaaacgctgaacctcttcccataaataaaaggtttgtttgcctgttcatgaatggatctgcaagacagcatcttcgtttaacaacattatctgtgatttgatacatttatccttattacaatattgtttagttggtagaaattctatgttttctacaaggaaattgatgtttattaaataaaactgaaaataattaaaaaaaaaaa

SEQ ID NO: 251479 - DNA, 387 bp, Homo sapiens
ttcttaattccaaaatttttggaaaaattgaagaacctttaaagccacagtaacattgattccaggagctgcttggtttttccaacagataatttgaccttaataactgttaattttggtatactgatttttcaaaagcacttaactgctaagagaagaagaaaaagttgctttgcctgtacatgacacttatatttttaacttgcctagaggtaataaggatgattgaaaatctatttagattctttattgctatacaaaaattttaagtattttctaatatttctctttggtacagaatcagagtagcaactaaatttaatgtctaatgttagttataatgtaacattggaagcaaagtagcctatttggtcagtttagtttctt

SEQ ID NO: 251480 - DNA, 455 bp, Homo sapiens
cagctgcgcagtctgccacaaggcccctggggctgccaaggtcgcacatgtcctcccaggacttgaagggggaccaggggagggtgagctgttgctgtggactgtggactttgacatcactcatagacaccccctctctcacccttgcatcccagacagtgtcccccagggccatgcaggcagggacacacagcccccttgtgccctgccccaagtccctgtgtgtaagtgagcatgctctcatcagacttggtccccactgccatggcactcttatctgtgtgcctgaatatgcatgcttattcatctcgaaaactgggccgtagggccaggtgtggtggctcatacctgtaattctagcactttgggaggccgatgtgggaggatcatttgagcccaggagttcgagcctgggccacgtagcaagacccccatctctataaaataaaatttaa

SEQ ID NO: 251481 - DNA, 864 bp, Homo sapiens
gacctcctgggagctgtttcccagcagtcagggagagctggcctcagagggagaaggatggggcctcgtgacaccgttaagtctgtttctgtagatgtgtggttggggtcaatatatccctgtagcctcccttaagccagtttcagttgggtttgtttcttaccacctggaatccaagctgaaaataaattttcactcctgttaccaggagtggggtgctgtgagagatgctaacgtgtagacttggctggaggtgagggcaggactgaagccccccatgcctcagtaagaagctgcatcagcctggccaacatggtgaagccctgtctctaataaaaatacaaaaagattagctgggcatggtggtgcatgcctgtaatcccagctactcaggaggctgaggtgggaggatcacttgaacccgggaggtggtggctggagccaagatggtgccactgcactccagcctgggcgacagagcaagactccgactgattaaaaaaaaaagccgcagcctctgttacgtggtacaagctgtggccaaactgttggtcactgtatcttcacgtggagctgctatgagaacttgcacctgtgtaaagccacgggaccgttgtcacgaacaaaaaaggagcacggctgacctgtgcgcctttcccagcaatgagtcagggagcaggtttcccttctccactcccttcccccatctgcccacttgatccgggatccttgaggccctggggagcaacagagccctaagagcttcaaaggggcctgggtccaggaataacttggtgaagagctgcctgccactctgaacatccacatgtgacaataaacatctcctgtgttaggacattgaga

SEQ ID NO: 251482 - DNA, 316 bp, Homo sapiens
ttcctccatcccctcacccacgtaccagtgaacaaaggcacgcttggcatacatcaggtcaaacttgtggtccaggcgagcccaggcctcagcaatggctgtggtgttgctcagcatgcacacagctctctgtacctcggcaaggttttcccaagtaagaactgtgggaaggtggtactggatgccaactgaaaagccactggggcactaatgcacatactgattgcagcgattggtgtgtgtaactgggtgtcaacaggcgagcattaatcatcgtttagggaacaacgtccccaccggtgcatgcaaggcggga

SEQ ID NO: 251483 - DNA, 455 bp, Homo sapiens
tacaacaacaaaagcaaaaataatagtgggattaataaaaaagaaagaaaattacctcaaaatggattaaagacctaaatgtaagaacttaaactataaaactcttagaagaaaacataggggaaaagcttcatgacattggatttgacaatgatttcttggatataacaacaaaggcacgcttggcatacatcaggtcaaacttgtggtccaggcgagcccaggcctcagcaatggctgtggtgttgctcagcatgcacacagctctctgtacctcggcaaggttttcccaagtaagaactgtgggaaggtggtactggatgccaactgaaaagccactggggcactaatgcacatactgattgcagcgattggtgtgtgtaactgggtgtcaacaggcgagcattaatcatcgtttagggaacaacgtccccaccggtgcatgcaaggcggga

SEQ ID NO: 251484 - DNA, 262 bp, Homo sapiens
caacacccacatatctttaatggtcttccagacattgctttcttaagatgtttacattctttatcagattatcttttactcctggcgccaaccactttagcatgttttcagttattagagtcttaggatagtattttctttgagattcaaacaaaaaagtattctacatagtacttgtaatctctttcacaattgtaattgcctttcacaaagccgacattgtctgattttttgattctgctgtttatatcttggtagtgtt

SEQ ID NO: 251485 - DNA, 352 bp, Homo sapiens
cacaaatttagttccattaaacaaaatgcagcaactcttctcctatagcgcaaactcctttaggtcctattttgaaactgagaagctaattccagtgttctcttgttagctctcggtccatgtcaaccaccccacaaggttgtttacttgaatagtttgcagccttgctttaaaagttctagtaggcaaataggtttgttgatgatgaagtggtttgtgttttataagagtccttatggtctagatggcatttgaacttgtggttccagtgattaccaggaccctgaattgaagaatacatgctgtggccttttcagctcaggaaactttttactttctattgccaaaaaaa

SEQ ID NO: 251486 - DNA, 482 bp, Homo sapiens
gcatcaggaagaataactaatggatgctgggcttaatatctaggtgatgggatgatctgtgcagcaaaccaccacagcacacatttacctatgtaacaaacctgcacatcctgcacgtgtaccccagaacttaaaagttgaagaacaaaagatttttgtaaaaaaagcaacttcattttgttgatcctttgtatttttttaagtctattttgtttaattctgctttgatctttataatgtctttccttctacttattttgtgtttgttttgttcttgcattttttagttccttaaggttcattgttaggttgtttatttgaagtctttctctttttttttttttttttttttgatgtaggcatttactgctatatatttccctgttagcactgcttttgctgtgttccataggttgtggtacattgtgttttcatttctgtgtgttgcaataaatttcttaatttccttcttaatttctgca

SEQ ID NO: 251487 - DNA, 576 bp, Homo sapiens
acccgaaccccacattctgttagcaccagggccctgtggatctgtccggggcactgtactgacctgtcccccaggcctaggggtcttcctgacacctgaggctccgtttggatttctcctgccgggcccttgacatctcagatggtagagagccctggcggagctcggggagcaggactagctcacactggaggactgagtgtgctctggtgatggaactctgcagctggtcagggtgggggccgcctgcccagccagcgctgacccctcaacacacctgctcctccacgttccagcctgcaggcttttgcgcacgcagctcactctgctgtgggtgtagtggactcttgaatttcactcccaaccacccgcttccatgcttccctcgggaagtgacccctcttccaccctttgcccaggtaaaagccacgtatcggcctagattccgacctctccctcctccctacagcatgtcttgccagctcaccccgcagagctcagcccttcctctccacggacaccacctaagacaccatcatctgctttagccactccctaaccacactgaaccccaac

SEQ ID NO: 251488 - DNA, 1170 bp, Homo sapiens
attgggctgcacatagagacttaattttagatttagacaaaatggaaattatttcatcaaaactattcattttattgactttagccacttcaagcttgttaacatcaaacattttttgtgcagatgaattagtgatgtccaatcttcacagcaaagaaaattatgacaaatattctgagcctagaggatacccaaaaggggaaagaagcctcaattttgaggaattaaaagattggggaccaaaaaatgttattaagatgagtacacctgcagtcaataaaatgccacactccttcgccaacttgccattgagatttgggaggaacgttcaagaagaaagaagtgctggagcaacagccaacctgcctctgagatctggaagaaatatggaggtgagcctcgtgagacgtgttcctaacctgccccaaaggtttgggagaacaacaacagccaaaagtgtctgcaggatgctgagtgatttgtgtcaaggatccatgcattcaccatgtgccaatgacttattttactccatgacctgccagcaccaagaaatccagaatcccgatcaaaaacagtcaaggagactgctattcaagaaaatagatgatgcagaattgaaacaagaaaaataagaaacctggagcctgtccctaaagctgtggcctgtaatctacaaatggctctatagcgaagaccacacggaagagtagctacatacacttcatcagctatggatcatcaacggcaatttttccttgtcagtacagctataatagtatcttgaaagttgtaaaaaaattaaagcatatttgttacgtaaagttaaaatgatttttgtctgaataaaaaaaaagcattgcaaatgctttagaaatctctgataatggagagagagacagaggaccctcctcactaccctatataaaaatcattggcacagttacacttaataaaaaaaattaaacagaagagcaccctgaaaaacattatgatggaaattaaatagtatgccagaataacatggttgacaaataagtgaacaaggattaaaaatcacttacaaacgtgtttctgtacaccctttctatcgtgtcaaatgttaatgaatctgtgatcaattgaaatgtaaatgtctgtgtaaaactacaaaataaaaactcttagacttta

SEQ ID NO: 251489 - DNA, 483 bp, Homo sapiens
gaagtaattatatcttgtagtagcaatttcatatctctacttatacctgggtcatttgacttttgaggacctcaggaaaatgagggagcttaaaaaattctatggttcctaatgaaatacttagggatgaaattacagttctgggatttgcttgaagacacaatcagccatggtttgtcactgttgatgctgagtaatggatatttggtgttctattgtgagtctttggtacatgtttggaattttccatgaaaaaaccttctgcttctaaaatgcacaccttgattcttcccatcgccctcctactggctggtcctgtgcagctcactcatttctcaggaacagcagcagactcactactctgaaggaaagaaagccctttgctttggtctgttcctaatgtacatattattagagacttttccgacaccctccccattttttatttcttaacagctaatacgatagctgtgctttcataat

SEQ ID NO: 251490 - DNA, 671 bp, Homo sapiens
ccagccccaggcgcactgggcacggattccctcaagaacctgaccttgagggacttgagcctgaggggaaactccgagacgtcgtcggacacccccgagatgtcgctgtcagctgagacacttagcccctccacaccctccgatgtcaacttcttattaccacctgaggatgcaggggaagaggctgaggccaaaaatgagctgagccccatggacagaggcctgggcgtccgtgccgccttccccgaggtttccacccccgacgctccagccagggtgccacacagatgcccctctactcctcacccatagtcaagaaccccttcatgtcgccgctgctggcacccgacagcatgctcaagagcctgccacctgtgcacatcgtggcgtgcgcgctggaccccatgctggacgactcggtcatgctcgcgcggcgactgcgcaacctgggccagccggtgacgctgcgcgtggtggaggacctgccgcacggcttcctgaccctagaggcgctgtgtcgacgagacgcgccaggccgcagagctgtgcgtggagcgatccgcctcgtcctcactcctccgccggagccgggccgagcggggagacgggggctgcgggggtagacgggggctgcggggggcgacactaaaagcctgttgttcccatctgcg

SEQ ID NO: 251491 - DNA, 418 bp, Homo sapiens
cagtatggaaaaaaaggctaacaaaagttgtaataatataaaaaatggatttgacattttttgatgaaaatgatcttcctagtggatattcattgacacaaaaaatgaaaataccttttatggtagtaatgtcaacaaactatatgaaacacccttgccccaagtctctccctactcattctttgagacccagctcaaacataaacattccgagttgaggctgttggatatttcctgttctgaacattcacagcacatggctcatattcaattatagtacttaaaacattgtattgtaacttacttgcttacagtttgattttcctacactactaagagttctgtaacagtagctgtgcctgacacacagtagacaataaatgactgttgaatgaataaaaggcttttttaaagaaac

SEQ ID NO: 251492 - DNA, 1004 bp, Homo sapiens
  misc_feature (221)..(221): n is a, c, g, or t
  misc_feature (436)..(436): n is a, c, g, or t
tgacaccatgacccactgttgctccccttgctgtcagcctacctgctgcaggaccacctgctgcaggaccacctgctggaagcccaccactgtgaccacctgcagcagcacaccctgctgccagcccgcctgctgtgtgtccagctgctgccagccttgctgccgcccaacttgctgtcaaaacacctgctgtaggaccacctgctgccagcccacctgtntgaccagctgctgccagccttcctgctgcagcacaccctgctgccagcccacctgctgtgggtccagctgctgtggccaaaccagctgtgggtccagctgtggccagagcagctcctgtgcacctgtgtactgcagaagaacctgctactaccccacgactgtctgcctgcctggttgcctaaaccagagctgtggctccaactgctgccagccntgctgccgcccagcctgctgtgagaccacctgctgcaggaccacttgcttccagcccacctgtgtgtccagctgctgccagccttcttgctgctgatcacgttccaagagaaccaccatcctcacacaacaaatttctgctcaactgactcatcttttgggggactaatttaatttgctgctgacagccaccatgctctcacccaaatttttatgaattctctacatgtttaaaatcttggaaatctgcttgagggagggcagaatacttcatcctgattctctttttccttacaccttgtggatcatgtgccagcttcatctgttctcaagtttgagtcatggtctcagctttgactctaaagtcaagagcttcattccctgcttctaaggaatttaggtttctgcaactgatcgatgatctttgcaatcttttttttgttttcaatatcctcctcatcgttcttgtatccttctttcttcttttcatgataaatttgtgttgtgtccctggtagcagaaatccttacctatatgtttctgaataaattctgaaccatcctcatctc

SEQ ID NO: 251493 - DNA, 940 bp, Homo sapiens
  misc_feature (221)..(221): n is a, c, g, or t
tgacaccatgacccactgttgctccccttgctgtcagcctacctgctgcaggaccacctgctgcaggaccacctgctggaagcccaccactgtgaccacctgcagcagcacaccctgctgccagcccgcctgctgtgtgtccagctgctgccagccttgctgccgcccaacttgctgtcaaaacacctgctgtaggaccacctgctgccagcccacctgtntgaccagctgctgtggccaaaccagctgtgggtccagctgtggccagagcagctcctgtgcacctgtgtactgcagaagaacctgctactacccgacgactgtctgcctgcctggttgcctcaaccagagctgtggatccagctgctgccagccctgctgccgccccgcctgctgtgagaccacctgctgcaggaccacttgcttccagcccacctgtgtgtccagctgctgccagccttcttgctgctgatcaagtcccaagagaacaaccatcttcacacaacaaccttctgctcaactgacttatcttttggaggactaatttaccttactgctgacagcaaccatgttctcacccaaatttttatgaattctctgcatatttaaaatcttgtgaatcagcttgagggagggcagaatacttcatcctgattctctttttcttataccttgtgaatcatgtgccagcttcatctgttctcaattttgagtcatggtctcagctttgactcaaaagtcaagagcttcattctcttcacttaagaaacttaagttgctgcaaatgattaagaatcttcacaactatgttttcttttcaatatactcatgattcttgtatcctgcttccttcttttaatgatcactttgggttatctccctataaccagggatcttacctatatatttcttaataaataaatttggaactattattcat

SEQ ID NO: 251494 - DNA, 500 bp, Homo sapiens
cgatttcactgaatctttgccaacactgagtattagccttaaaaaaataaatccttgccaatgggatagatggggaaaaaaaaatctcattgttattatatatcttagctgtagctcatttggtcacttctccaatgcctgttgattatgtgtttctttgagtaactgttaatatcttttatctcttttttttttgccatatttctgtcttggtgttatcatttattgtttgtttgcttttaatatactttttcatacatagattcaaactatcttgagacccaggtgtcaggaaaaaatggttttattctcagtaaattcaaatttgggtcttaaagcttctttatagtttttataatttaaaaaaatttactttggaaaattgcatacatttacaaaattggaagtaatagtgtaatgacccccccccccctttattgacaattattaatttgtagtcagtcctttcatctgtaagctcccttacctcctcctcaggc

SEQ ID NO: 251495 - DNA, 358 bp, Homo sapiens
tgggtcccctgggggccacccatcaagggcacatgctacaggcaccccaaggcagagtggcctggcctgcccggggctgacccttagggtgaggagaggacactaactgggcaagagagactagtctatcagtgcaaaaaactcccaatagggataggaactaggaaggaaataccaagaaaagtgatgatggaagatgggggtaaccatactgcagatggggtactcagggagggcattttaacatgcttcccaatggacagaaatcattttttaaaaatcctgcacatagctcaggctcaccagacagactaactcctagtacttggaaatgaattaaaatctggcagtgagttaa

SEQ ID NO: 251496 - DNA, 303 bp, Homo sapiens
tccatctcaaaaaaaaaaaaatcacatgtatcaagatcaaatttcgcaactagcttagtacaaggaggtatgcccttatttcaaggagtgagttaattaggaagtaaaataagaaaaactattttcctgaggcaggggaaggggaggactctctattcaggtgccagtcttttcccattcacccgtgaataaaggtcatgttcgtgtaatggaacccacactattttttcctgaacctttagatttctttgggaagaaataaaatactgcctattttatagaaataaaattcttcattctaaa

SEQ ID NO: 251497 - DNA, 423 bp, Homo sapiens
ggaagtcttgaatatagttactgaaataatcatgaatgtcttcttggggcccaaatgccaggatggggctgaactctcaatgattgccttgacttcagcagtgggctgcagcccaacagaggagagtgtctagcaagtattactctctgaccctttaaaatttttcctgaatctatatgggctattggcactagtaactatacatttgcttctggtaaacatggtccaaacacctccaacagaagtctgtcttctcttactgtttttcaaagtctgcaagcgatagcttgccatcattgtcataatcttaggaagatgtttcttggtaaatactagttttaaattttgcatggcaaatagctctctagactaaaaaaattttaccaaataaaagttcacacttctgtagacaccctacataca

SEQ ID NO: 251498 - DNA, 372 bp, Homo sapiens
gttgaaatgtcttttgttatttttaatgactttttgatcacatctcagtttataccaatgagatggcttagggtggagaccctagacagcctcaagatgaagctggtcaccagaaagattagagagttggaactttcagtcctacccaccaacctctgtgaagtggaaagggtgggatggcttgacatgaagctctataaaaactcttggacaacaagattttagctttccagattgctgaacacattcagtgttcctggagagggcatggaagctccacacctcttctcacataccttgccctgtgtatcttttctgactgtttgtttgtatcctttgtgatatcttttattataaaacagtaaacataag

SEQ ID NO: 251499 - DNA, 368 bp, Homo sapiens
attaattaagaaactggctctcagcagacactgagtgtgcctgtgccttgatcatgaacttcctagcctccaggactgtgagaaataaatgtttgttgtttataagccacccagtttatggaatttttaaatagcaacccagaaggactgagactgtaactagactgaaactgaatgcagaggagagtaaggttctctgcccccaaggtatgtgccattttgtgagggcacagacacttataagacattgagggagcctaagagaaagagtagctccagctcggcctaaggaggaagaggcaggacggctctgccaggtgatggtatctgtactgctcttgaagatgggagggtttggacagatgaat

SEQ ID NO: 251500 - DNA, 570 bp, Homo sapiens
ggatgatcttgttttaaagcaattttaaatatttaaattgcattgtattttaatttttctgctgtatgcaaaattgtcatatgaataaaaaacttttaaacccttaaaaaaaaaaaaaaaaaaaaaaaaaaaaaaaaaaaaaaaaaaaaaaaaaaaaaaaaaaaaaaataaataaccaggcacaatgtttaacttaaccaaactttgaaaaaccctcctatctccagccttggtcacctgtaagagaccccccctttaaacctttatactctatcacttaagccttgtgccgaatggcatatcttaaccctgcttatccggaataacaaatgcttaaatcttagactaaactttgaactgaaaatagccctgaggcattagtgaaaataccctatttaaaatcaattttcaggactcacgaggtcccctttttgaatccatgtatttcccgattcaaatttcacatttcctaaatttggatctagaggccagtataaaggaacgcgacctcaaacaccaatgtgtcacaatcggacttaaagtccattgtactttggtgccatatccttt

SEQ ID NO: 251501 - DNA, 439 bp, Homo sapiens
gtcagtatgtcctacaggcatatgggaaaggtggctttttagttttttagttagtactacattttatagtacaaaatttattcaagttactgagccaaatcacaatctaacaaataaatgccaaaaatgtatcagttcaccaaaaatcctggtcaccactcaatttcatcacataggaggatcaaatagaattaggtgctttctactcacttttgataaacttcagcaaacgtgacaggctagtagaagactgccctttactgctgtattgctgagataaatattctcagaaaagtcttgttagccaatctgatcttaattttctgtttccaaaatggggattatgtttatcagggccaaagtgtggaataggctacatttatctcaagatcacataaacaccatgcacccatatgcaacatgtacacacatacacaca

SEQ ID NO: 251502 - DNA, 394 bp, Homo sapiens
tccaggctctgggaggacagaatcctgacctcaacagtggccggcacggacacagcgggtcccatcccggggacgctgaccagcgctgggcaacttttcccttccccgacgactgagccccgagcacccaccctgctccccctaccacctccctttacaaggctgtggcctctgcacagatgaaggtgagtccaggtcatgccggactctttcttctgttgcaatagttatttctgttgagaatccgtccttgctacatgacctagtgcccagggggatgctgagacaggatgaatgtattctgcatgtgagaagaacatgaattttgggggccagagtctggactgtgatgggttaaatcgtggcccctacaaattcatatattcaagtctta

SEQ ID NO: 251503 - DNA, 310 bp, Homo sapiens
cgaggagctggctgtggctaggccagaggataccgtgggtgccctgaagagcaaatacttccctggacaagaaagccagatgaaactgatctaccagggccgcctgctacaagacccagcccgcacactgcgttctctgaacattaccgacaactgtgtgattcactgccaccgctcacccccagggtcagctgttccaggcccctcagcctccttggccccctcggccactgagccacccagccttggtgtcaatgtgggcaggccgtaaaggagaaagaccatgcctttcattttcttccgggtaccg

SEQ ID NO: 251504 - DNA, 1427 bp, Homo sapiens
  misc_feature (156)..(156): n is a, c, g, or t
  misc_feature (176)..(177): n is a, c, g, or t
  misc_feature (255)..(255): n is a, c, g, or t
ggtcttattacggaggctggggccaggcagcccttcggttcgggtgggcccatggaccccagtccaacgccgagggaataggaccatccaaaagcggaaccttcgcctcagaaaaagggtgcgggacccctcctcaccgtgcggtcacggtacggncagggtagatcacaggctgnnggacagagcaaagacccctgaggccggacacctggggtcctgccgggcccctccccacgagagttccctgtgtctgtnccaatcgttttcgtctttctttgccgcagtttcttttcctgtaaatcatggttaatgacattaaccttcttaccatcaggggttagttgtggttgtgataaataattactaccgttattaagcaattgcaatttgcagtgtgccaggcactgtgccaagtattttgcttcgatgatttcacgtcatcttcaaaacaacctcatgtagggctgggtcagttagaacctaaacaaactagagacctggttgcaacccctcaggctctgctgatgctgtccccctttgttcctgcagcgtggaccctgccagcagccaggccatggagctctctgatgtcaccctcattgagggtgtgggtaatgagcaaatacttccctggacaagaaagccagatgaaactgatctaccagggccgcctgctacaagacccagcccgcacactgcgttctctgaacattaccgacaactgtgtgattcactgccaccgctcacccccagggtcagctgttccaggcccctcagcctccttggccccctcggccactgagccacccagccttggtgtcaatgtgggcagcctcatggtgcctgtctttgtggtgctgttgggtgtggtctggtacttccgaatcaattaccgccaattcttcacagcacctgccactgtctccctggtgggagtcaccgtcttcttcagcttcctagtatttgggatgtatggacgataaggacataggaagaaaatgaaaggcatggtctttctcctttatggcctccccacttttcctggccagagctgggcccaagggccggggagggaggggtggaaaggatgtgatggaaatctcctccataggacacaggaggcaagtatgcggcctccccttctcatccacaggagtacagatgtccctcccgtgcgagcacaactcaggtagaaatgaggatgtcatcttccttcacttttagggtcctctgaaggagttcaaagctgctggccaagctcagtggggagcctgggctctgagattccctcccacctgtggttctgactcttcccagtgtcctgcatgtctgcccccagcacccagggcttgcctgcagggcagctcagcatggccccagcacaactccgtagggagcctggagtattcttccatttctcagccaaa

SEQ ID NO: 251505 - DNA, 475 bp, Homo sapiens
ctcggggttgcttgtgttccacagaatggtggcttatggacgcttttaagacactaaagaaccccacatgttagcatgctggttgcggctggctcacgcctgtcttcccttgtctcccacaagctgaggcgggcggatcacaaagtcaggagttcgagaccagcctggccaacatggccaaaccccgtctctactaaaaatacaaaaattagccaggcatggtggcatgcacctgtaatcccagctactcgggaggctcaggcaggagaaccacttgaacttgggagacagaggtgcagtgagccaagatcgcaccattgtactccagcctgggcaatggagtgagactccgctcccacaaaaaaccacaaaaaagaaagaaagagaaggaaggaaggaaggaaggaaggaaggaaggaaagaaggaaggaaggaaggaaggaaggaaggaaggaaggaaggaaggaaggaagga

SEQ ID NO: 251506 - DNA, 293 bp, Homo sapiens
cgtgcagagaggagctgcgccttcctcacaattaattgaaacatgaccaaaaaacgggggataggcaaaaaagtgacatttaaatagcgtatgagggcactgggaggggcctgcctgccatccagctctcgagaccacggcgagattcagaagggaattgggccattccttctccaaagcagaacgtactgcagctgtgagagttctaggagaaaattgcagatgaactttcaaatcagcttctcaagtgtcaacatcctgttgcgattttcattgatattgaactgaattta

SEQ ID NO: 251507 - DNA, 358 bp, Homo sapiens
gtcaggaaacttgacttctactcttgcctctcttttgcagttagctgtgtaactttggataaggcattttatctcgtggtgcctccatttttctcattctctagggaacaagagaattagtttaggtagcgtctaaaattccgcccagctctcatttggttctcatttgaccattttataatcattattttggtctcatttttattcttcttattcatcccatgaactagatcaacttgtattattttactagatcaacctgtattattaacgtcatttacatgtaaattgatgggattcagatattttatcaactgtttttccattagtgattttaagtaattttaaagaaggaaaa

SEQ ID NO: 251508 - DNA, 479 bp, Homo sapiens
tcttcttggctaatattaaaacccaaattcttcagcttctccgctttagtgtatgtactgaaaataaagatcaaatgcttgccatttcttacaggtgtggtatgactttcaagcaaccctcagggcatgtatagttgcactgagatgtggccaggtgccctatatgaagcatccagtctaaagagtcagcctggccaagtgcagtggctcatgcctgtaatccaagcactttgggaggccaaggcaggtagatcacttgagccaggagttcaagaccagcctgggcaagatggtgaaaccctgtctctacataaaatacaaaaaattagttgggcatggtggcacgtgcctatagtcccagctactttggaggctgaggtgggagaatcacctgagcccgggaagtcaaggcagcagagagccaagattgcttccgcatttgcactccagcctgagtgatagagtgagaccctgtctta

SEQ ID NO: 251509 - DNA, 443 bp, Homo sapiens
agatggggtctcactatgttgcccagcctggtcttgaactctgggctcaagtgatcctcccacctcagccttccgagtagccaggattacaggcacacaccaccatgcccagctccatttccattgttcttcatgcttccttattgagttccttccctgtcccgattattcgtctttgattgggctttgactacctgggcatttagtagggtccataactgaatgcagcattccagccggggtctaagcaacagaatagagcaggaccatcatctccgcaatttccaatatcatactttcatcaatgtcttccgaaacaacattcacttttttatgttcatgttaaactaaaagacagggctgaaggcagcatcctggaacagtggaaacattcctataagttgacttgaatcctttaaataaagtccatgtaccaaccagag

SEQ ID NO: 251510 - DNA, 550 bp, Homo sapiens
gtagggaagtaagactggatggtgggttagcaggggactcgagaaaaggcagtcagtgctacaggcgcagggatattaacctcaggagtgaccagtgggatgcaaccagccgttggggcttaaaactcaagcacatttctcggatgataatttcaaagaagtagctagttttggttgaggctgcctctggactatccccagcttctcagtggaactcggtgtttctgaatgaatcacaataaagaagcattacttgtgggatgtggccaacctttctgttcagcttttattgcagagctgatggcagcagctggactttacaaaggtgatggtggctcaaagcctttctgttccactgtgtctcataaagcttttatgaagcctcagtcatctcttcagcagatcctgtgtcatgaagaaggatgcagagaacacaaggagcaccccatccatggtgcatcccaggtttctaaaccttccagggaggggaaatcagcatttttggctctggccaagaagccaaattgctgaagctatgggacttgttcca

SEQ ID NO: 251511 - DNA, 464 bp, Homo sapiens
gcacctagatcactttgaggcactaattcctttccacgtctattcctttgctctctactataagtcccttaaggacaagctttatgtctctcattttttgttttgtccatggctggcggtatctgacatggagtaagaatttaataaatgtatgttcaataaatatatttgtctcatcccacaactaggcaaaagggcagatattgtatcacatgtatttttgtgtccccctgagtggttggcatcaagagggacagagttagtagtggataaagatttcaagttcttaaacagatgaaagcaccccgaagttttggctcaagctatacttggtctttgaacctttgttgaaaagatacaacggaaagatggggaacagccaaggttagagagagatttacacaataaagagagtcagatttttcagggtgttttttgggatttttcagtagatcaaagttgga

SEQ ID NO: 251512 - DNA, 502 bp, Homo sapiens
cggaccccagccagtgcagcatgggctagctttgacttttctttcagacatgagcacctttggaaaagcctggacacctgaggttccaggcagagggctccccattaggctatctggcttcctttagttatttagaggaagtgctgacttcagggaccctggaagtgccacactcctcagctaggacaggacaggaacaattctgcatctctctgtgacctgcagaggtgccgtaggcttggctctaagttcaggacgtctgggctggagctaaagtggaagcaaagattcttaattccttctgactaacaagttgctatgtaatgcccaaccttgtttttactaaccctgtctttagactctccctttcctttaatcacctagccttgtttccacctgaattggctctcccttagctaagagagccagacagactccatcttggctctttcactggcagccccttcttcaaggacttaacttgtgcaagctgactcccagc

SEQ ID NO: 251513 - DNA, 275 bp, Homo sapiens
tgttgaaactgaactaccttaaactggtagttttcatggtgtcaaacagatgttaagggggcaacttggcacaaagtttggtaacaatggtttaaatgataaagctagtgtcacaaatgtgtctagtagaggaggatcatgtaattaattaacaggtaacaatttgctaattgtttaaaattatatctgtaatatgattttagaatccaataccaaaagtattttcaggtaaattaaaagaattttaatttttaaagtagaaacagaaaaaaata

SEQ ID NO: 251514 - DNA, 256 bp, Homo sapiens
gagagagaaagaatagaaaagaaagaaagaaaaaggaactgtccagccctggagactagagctattttgatcgcacaagaacataatcagagtcaggaacacagtggaggaaatattcccaaaggaaatcaagattaagatgcacacttcggcctcttcctacaagcaccaacctcccaagcccacaggtcattttgtttgacaatgtcacatcgatttacatttcacaatgcacttttaactttagaatgttaat

SEQ ID NO: 251515 - DNA, 473 bp, Homo sapiens
atgtatggtgtgagaaaggatccaatttcattctgctgcgtatagatatccttttctcaacaccgcttattgaagaagctgtcctttccccattgtgtgttcttggcacctttatcaaatattatttgactataatataaatgtgtgggtttatttctggatttctaatgctattcccttggtcaacgtgtttgtttttatgccaggaccatgattttttattacaatagctttttaatatattttgaaatcagtaagtgtgatgcctctggctttgttctttttgttcaagattgtttcagttatttgaggtcttttatggctccatataaatttaataatttgttttctattcctgtaaaaaatgacattggaattttggtaagaattgcattgaatctacaaattgcttcaggttgtatggacattttaaaaatattaaatgtttcaatccatgaacataacctatcttt

SEQ ID NO: 251516 - DNA, 129 bp, Homo sapiens
acttactttaccattcagaagtaggaaatccatcccaggtctgagttatataaaaacagagtgaactctgaatttctccataacgcacaccacagttattattaaatgatgattctctcattatttaaa

SEQ ID NO: 251517 - DNA, 488 bp, Homo sapiens
aagtgaagtcctctctcctccctccagctttcagggcacggagcgctcttcctggcattagaattctgagcaaccctcctagcaggcccagctcaagccgcagcggggaggaagagttcaaaggaagctgtgccaaagatctcgaaggcttagtgggagacccagcaacaggtggcaccaggtctgggaaagattcctagaaagcggagcgggtctcggagggggaggatttagccccaggcgcccgcgatcagcgaacgagcgcctgcgcggaggggccgggctgcagccccggggcaaggggagcgcgagctctgactcctcagcgcggccgggccgctccgagacccctcgaaggaggccgggcgccgtggggcaacccaggcagggcggggaccacagcctcccgggctcgtggggtgcagctctgaacctgaggcgctcggaagctcaaggccaagacccgctcgggtggcggccgagcgccc

SEQ ID NO: 251518 - DNA, 374 bp, Homo sapiens
aagatgaatttagctgtcgttattgtcaaatgtcaaaacttgcagaaacataaatcaatactgatttcctaactggacatcattttttgaggaggccaacttatcatttaatggttagttcattacatcagatactttataccctgaaaaagcagtgcagttgacctatgaagaatgtgggggttaggggtattgaagctcctacttagttaaaaatccacatacatcttttgattccccaaaaatgtaaccactaatagcttactgttgactggaagccttaactgattacatgaacattgattaacatatattgtgtatgttatatgtattatatactgtattcttacaataaagtaaactagagaaaagaa

SEQ ID NO: 251519 - DNA, 643 bp, Homo sapiens
aacagattaaaaaaatgagtgagaagagtggcactgttggatatgttttggaaatctccttaatgtttggcttgatgggagacagctggattctcttatctgcttctgcattcaatctgttgcaacactgcatttcatgcggcctctggaaaaccctattgtacacttgtgggagaatgagtgtgaggcaaaaaacaaccaagtgttactatcaaaatagttttgacctggcctctgaaagggtctcaggaaacctgcatagtcctgggaccacactttgagaattgctgaaatacagtacttaagacaatgggtcactgggagaggacaaacaggaatagaagaggcaggcaaatcctggtatacataactacctgatttatgaccaaggtagctctacaaagcaggaggagatggccttttcaataaatggaactaaacatcatcatcatcatcttcatgtcatctagaataacaaactgaccccatctcacaccacacagacaaaaattccagagattgttgatctaaatgagaaaggcaaaacagtaacagaaaataatgtagattatcttcacaccaggatacaaaaacccccaattacaaaggaaaaggcagaaatattcaactacattaaaattaa

SEQ ID NO: 251520 - DNA, 415 bp, Homo sapiens
gagtcccttaggagaatgtccagaaggatttgcaaaggaggtactaatgtgggctgaagcagtgagatggaacaggtgcagggaaactttgtttagtgggagcaaatgaggaaaaatgtcctttttgaattaaaaaaaaaaaaaaaaaaaaaaagataccagaggtataaagactgaagtttcacttacaactccataaaacactacttcatacccaattctgttttttctatattacctaacagctgacatagtcgaccagttctcaccttatactttcttttctttctcacaggtgtcttttttgttcccattgttagttctgtctggtctctgaatttcatttctttttgttttttctttcctttctttcttcaaatggacatacatttctattgcctgaattcaacctgag

SEQ ID NO: 251521 - DNA, 443 bp, Homo sapiens
ctttacattaatgtcacataaaattcacagctaattattgtcgactcagttcataacatttccaccttttcggtaactcttctttttttactccacagtccgcctggttaacagtgaggctttgtaacagcataactttaactatggctacagtttattggctcctattttggaaactgactcatgctgaactaatcccctttccctgggagtttaaaatcaaggttaggagatttttaacgtaccgactgctctccaacagcagcattataacctttgctatttttttcccttgtattctgaaaatagaagagaaatacagaaaactctctgggttatgtatagtgcactagagtctggtacagttcatgagcagcgtctctatctctggtttctgagacatccttgcatccttataataaattcctctttaactttagaaa

SEQ ID NO: 251522 - DNA, 145 bp, Homo sapiens
tcttaccctctgtctttttatctttctgggcccttctttacccttgttcttcctcttctcctctcttaattctataatgggtcttcacatattgctgtaccttctcatgttacttgaatagaattttgatacttaatctgaaaag

SEQ ID NO: 251523 - DNA, 341 bp, Homo sapiens
gcaattaattgcatacatactcctaccaaaaaaaaaaaaaaaaaattaagtaaagacaagaatttgccagggaggaacacaaatacctgtgcccacactggaaactcagagatggtctccttaaagcctcttccagttgatgcaaaccacaaggcagcccagggaacagtcccaggtgaaaatgctactaaatctttaaggatttcttctctaaatccttccacgttcactcagcaaagctcagaaagaattttggcagtcatttttcaaatcctctgcctgatctgcatgttaccatagtcacattcattcggaaaaacaggtgtttctgttaaaattag

SEQ ID NO: 251524 - DNA, 485 bp, Homo sapiens
gcaattctcctgcctctgcctcctgagtagctgggattacagacacatgccgccacgacctgctaatttttatatttttagtagaggtgaggtttcatgttgaccacctggtctcgaactcctgacctcaagtgatccgcctgccttggcttcccaaagtgctgggattacaggcatgagccactgtacccagccaaaatgtacattcttaatacattttgaaaaggatgatgtgaattctgtcagccttgggcttgtttcacactttaaaactgtctttgcctacggtataaacaacttgaatgttctatttatttttaacattgccatctgtcactgttagatgccaaatctgaaagatacagctatagtttgagactgaaaatttcaagttcctatactattacacaacaagggtaacataggaaaaatattctctttgaatctgttcttaaatgttattaatatgttcaattatttgtgtg

SEQ ID NO: 251525 - DNA, 428 bp, Homo sapiens
ttttagaaaatttgtacctaccactatgagtctgacagtttcctagtattgaaaaacttttctgatgagtggtggtattaacacatacgatttttcagatactgtgtaatgaaatgtgtccacacagggaatatctgcataactcagtgattcaatattttccaaataaacaacaaataatgttatcacatcatgcacgggtaaaagatccactcaacatgcaaaacagactagtgaattttaatgtaacagtaagaactgttcaccgatagggcttcagattccatgttgcaactaacctataacgattcagcatttgtcaagttttagtgtggtagaataaaaaagaacattggtagatatctgcaaatgctattaaaatacttcttcattttctctcatgtatgtgtgaggatgaatttttttat

SEQ ID NO: 251526 - DNA, 1187 bp, Homo sapiens
ccaattataaaaaaaaggtatatacttactattggaaaaaaaatccagatgatgaagaaaatatagagaaacacccaaaattttgccatccaccctaagtcagctactttcattgttgtggtgtatattgttccagtcttttctgcctgcctgtgagtgtgtgtatttttataaaaccgagatgattatacttgttattctacagcctgccttttccaacaatatattgtagagagatctccatgcctataagtattgatctgtatcatttttcttggctgcgtagtattttattgaaagaatgaggttgtgagggaatagccaaaaaatctattaggtctgtaatttggactaaggaaagaagtttgtgttagtagattaactcacttatccattgaaaggatgctagtttttgagaattttgactcgacccttctgaatgaggtttaaatatttctggtggtatatcttcacttgctagcttttatcaatttagagtgattaaatgttcatgttgatggtgttaaaagattctagatggcatcctagaatctcagaaatgaggaatgataataacagacaagaagttggggcccatgattcattcaatgttaatggaagctgaccatcatagttccttctaatggagctgcattcaaattgaaatcagtttggaggtttgaattgaaacaaaacagacttaaaattatttttgaacctttgaaagttacttatggaaaccttcatttctgtttaacttcgtaattttgtctttccatttatttgtattgtaaaagcaagggttagcaataagatcaaatataattactttgaatttactcagaaaaattgtaagttaaaaattcatggaaagcacttagcgattgcacagtagttacctgctgtaagaggagaggaaacattaataagtagatgtttccctgataagagatttaaatgaagtcctagttttttctaacacctccatcacttgtcatactttcataatttataagcacttttatcttaactcattaaatcttgggaggttatcataatcataatcgtggtagtattagtaaattattgctttctgtaagccaaacactattctaaatactttacatattttaactcatgtaattttcacaaccatatgaggtagttaagatgacgaggtcaggaga

SEQ ID NO: 251527 - DNA, 1988 bp, Homo sapiens
caattcagtccttgtaattcataagaattcatactggagagaaacaagtgtaatgaacgttgcaaaatttttaatcaacaagcacaccttccacgtcatcatagacttcatagtggagagaaaccttagaaatgtgaagcatgtgacaaagtttacagtggcaaatcgagcctcaaaagacaggagaattcatactggagagaaagcttacaaaggtgaagaatatcacagagttttcagtcacaagtcaaaccttgaaagacataaaataaatcatactgcagagaaaccataaaattgtaagagttcgtgacaaggctttcgggcatgactcacacctggcacaacatcctagaatttatactggagagaaaccttacaagtgtaatgagtctggcaaagccttaatgagcagtcaacacttactcaccatcaggcaatccatggtgaaggaaacttgactaatgtaatgattgtcaccaagtcttcagtaacgctacaaccattgcaaatcattggagaacccataaggaagagagatcatacaagtgtaataatcggcaaatttttcagacatcgtccataccttgcagttcattggcgaactcatactggagacaaaccttataaatgtcatgattgaggcaaggtcttcagtcaagcttcatcctatgcaaaacataggagaattcatacaggagagaaacctcacgtgtgatgattgtggcaaagcctttacttcacgttcacacctccttagacatcagagaatgcacactggacggaaatcttacaaatgtcatcagtgtggcaaggttttcagtctgacttcactccttgcagaatatcagaaaattcattttgagataattgttccaaatgcaatgagtagagcaaaccatcaagcagtaattgacattaaagtgtttatgttaagaggattgggccaggtacagtgtctcacacctgtaatcccagcactttgggaggccaaggcgggtagatcacttgaggtcaggagtttcagatcagtctggccaacaaacatgagccacttttcccagtttgctttttgttctttaacaaaaactgatagggatttttatgggtaccgtgttgaatctaaatcacattgggttatataatcatttaacaatattaatttttccaatccatcaatatgggttatatgtctgtatatgtttttaatcatattgatgtatatttgtagatttcaaggtacaaacttctcacctttttacttttatttctatttctttaagttctctagcaaatggaagtgtttttaaattttcttttaaaattgtttattgttacaaacttctcatctttttgcttttattcctaagtatttcttactttaagttctctagcaaatggaagtgtttttaaattttcttttaaaattgtttattgttaatgtatggaaattcagctaatttttggtgctgatattgtactgtgcagatacactgaatctgtttattacttccagtagtattttggttgagtctttgtgattttctacacagaagatcatgtcatctacaaacacatataattttacttctttctttctgatttggatgggtttgatttcttttgctatttcattgctctggctaggacagccagtatttattgaatagaaggggtgagagcattcttccatcatgtgagatcctacaggaaaatcattccatgttccctgcttcgttatctactcgttggtcatttcatggatggcctttctattgttgaggtaaatttccttttctgtctattttgttcagaatttctatgatgagtggattttgaattttgtgaaatactttttctccatctattgagatgatgtggttttcatctttcattctgttcaagtggcatatcacattgatttgcttgactatgttgaaccatcctggcatcccagaaataagtggcacttgagtatctacagtcct

SEQ ID NO: 251528 - DNA, 679 bp, Homo sapiens
tagggatcgctttgaccaggaagcctttttggacacaccaggcacagccaggaatcccttctctgtttaacctgtgcacctaggaccatctacatggaatcatcattgtcatcaatttgttagtctgcacaagactacatgcatcttaacacagggtccttctctctcccctgcacccagtacaggctccacacacagtaatccattaataaaaactgtcataagggaacacttaaataaaagaaatttcagtacaaaacagatttgaagcacggaagcatgaaccttcaagctgaaaggagacaactgccatctaatctcttcattttacagatgaacatgggaacagttagctgtgaagccttgggctgtcgtccgcctccaacccctggggctctgaccacacccagccccagctcagatcatcttgctcaaagggccgaaggaggacccatctccacaccttccacatgtagatatcctcaacgttcttcacagaggggatgcccgcaccccgccccaccgagttcgcggctgctgtgcccatcttcctagagaggagttctccgccacacccgacaccacacacttccaacttctgcggtgcttccctctcacttatctccacccccaatccttatccccgctcgtttaatcacacatttattggtcacctaaa

SEQ ID NO: 251529 - DNA, 431 bp, Homo sapiens
gcccctggaacctcccaccagcccagcacagctctcacagcctcagcgccccaggtcgggcagtcagaagcagaccatgccacagatgaacatgggaacagttagctgtgaagccttgggctgtcgtccgcctccaacccctggggctctgaccacacccagccccagctcagatcatcttgctcaaagggccgaaggaggacccatctccacaccttccacatgtagatatcctcaacgttcttcacagaggggatgcccgcaccccgccccaccgagttcgcggctgctgtgcccatcttcctagagaggagttctccgccacacccgacaccacacacttccaacttctgcggtgcttccctctcacttatctccacccccaatccttatccccgctcgtttaatcacacatttattggtcacctaaa

SEQ ID NO: 251530 - DNA, 465 bp, Homo sapiens
agggcttttaccagcagcaagagtgcagaagtgtctgctagttttgagaaatgtgtctggttctccttttcctttccttataggcttccctccaccaatcctggagctaaaagaatcatacccattggcagggactgacattaatgtgacctgctcagggcatgtattaacatcacccagccctactcttcggcttcagggagccccagacctccctgctggggagcctgcctggcttctacttactgccagggaggaagatgatggctgaaatttctcctgctaggcctctttggtggtgcagggtcagcggttgatgaaaaccactgtgatccagctccatatcctatgtgagtggaggcctgatctttcttgtcaaaataaggattattattttcccatttctagagagcttcttggccagcagtgcttcattattacagttgccacatttttctcattaaa

SEQ ID NO: 251531 - DNA, 463 bp, Homo sapiens
  misc_feature (57)..(57): n is a, c, g, or t
ttttaatgtggcttgtgtgttcatgtctggtctggtctctgttagaatgaaacatcncagccaaaagatgtgggagtaggtagcagcttcaaattgtagtcttttacattagacccaaaatccgcttccaaattttgcgtgcccgccaccacacctggctaatttttgtattttttttttgtatatatgttaaggtttaatacccaaagtatataaaaaacttctacaattcaacaacaaaaagacaaaacattttaaaacaaaatggttgtaaacaaacaacaaaaagacaaccatttttgtccatcttacaatggacaaaaggcttgaataaacatttctccaaagaagataaacaaatggccaataagcacttgaaaagatgtcaacatcattagtcaatggagacatacaaattaaaactccaagctatcacttcacacttactatgatgactattatt

SEQ ID NO: 251532 - DNA, 293 bp, Homo sapiens
ggcttctttctccccaatctcagctacagccttatccagttttcaatccagaagtgtttgtagattgaaagatgctggctagtgctgctcaatattcaaggagtagggggtgttctgcttactgcctgcctgattgacacttgtcccttggaaacaatatgcaaaaggcttaatttaaaaattctggctcatgcctgtaatcccagagctttgggaggccaaggtggaaggattgcttgaggccaggggttcaagaccagcctgagtaacataggaagaccccatctctaccg

SEQ ID NO: 251533 - DNA, 475 bp, Homo sapiens
gcttagtaggtgctcagggctgaggaacataattgatgttagcttttattatctttatttacttcaaataacctacttaattgggaaattttccgggtctggagggactctgagtttgagtccagtatcttccctgggagtccttgcttgcacaaatgtgtgggatagactcccgctgtgtctgtggactcaacgtctcagctccaggctctttgctgccaggcatagtgagccgtgacatttataaatctctgggctcttaatcccctgctgatcctcggagaggagtagacatttgttgctaaacacattgccccactttgaacaaagaaacgaagagataccccaagcatcaatacaacagctgcctgcgatggctgtgacgtcccttctatcctaaggaggagggtactgggactcagtcctgtgcactgacctgccccactcacctggctggtgaggggtgcagttacta

SEQ ID NO: 251534 - DNA, 336 bp, Homo sapiens
cctggcaggattctaagcacttccatttcagaggaaacgctgatgtttctgcctgcccaagttgctatcatctattctttgggaatggccccttaatactcccttgaagaaagcaccctcttttcctctgagtggggttgtgtggttgactccatctcctctacctccctcaaatcatacagattggttcaggaatagggatgtggcccagcccaaccagtgagacccagccttggaagttttgctggaaagagttgctgttgctttgtgggggctgccaggctggtagaagctagaatgctggggagcatgttttccacctgctggaggatgtct

SEQ ID NO: 251535 - DNA, 357 bp, Homo sapiens
gtctatattatatatttgtatatgtgtttaaagttttgcctatactgagttgtaaaatcaaatgcgttctactgtgggtcattgccaaaaagtttgaaaataactggtttaagcattctgtaaaagccaatctctgtctaaattctgtccctgacacagttccaaaagttgctgtccatcaaagtatttttaaacatttgagcctatggttttgctagataagcaacatggaactgcatttagaattatgttccaatgaaaaattcagtgaatttaattctgtatgtatatttctaaaaatagttgttattttcctctgtggtgaataaatatcaatggcaagtagttcaaacaaat

SEQ ID NO: 251536 - DNA, 383 bp, Homo sapiens
acccacacatatttgccaaattggtttttggctaaggggcaaaagcagtttgataagggaaagataggctttccaacaaatggtgctggagcaattggacattcataggaaaaagacaaaatagacccttgaggtaagtacctaagtcttacatactaagtaaaaataatactaaagtagaatataaatttaaatgttaaatgtaaaactataaaactttgggaaaatattctttaaaataaaaattgattaattggacttaatcacaattaaaatgttttgctctgtgagagaccctgttaaagggaggaacagacaagctacagactgtaaaaaaaaaatttcaaaccacatacccagcaaaggactagtagctagacaca

SEQ ID NO: 251537 - DNA, 537 bp, Homo sapiens
tctttaaaaaaaaaaaaaaagttaaaaattgacttaccatttgacccagaagttttgctcataggtttgtacccatgagaaatgaaatcatatgtatataaatattcatagcagcattattcatgacagccaaaagatgaaaacaaccaaaatatccatcagcttatgaatggataagcaaaatgtggtaaatccttacaaggaaatagtatttgaccataaaagtaatgaaatactgattcatgttacaatatgaaagccagttacaaaagactacatattgtacaagtgcatttatatgaaatgttcagaataggcaagtctatggagacaaagtagattagtggctacatgtggaggggaaggatgggggtattgggggcgacgggtaaaggatatgggatataaccattctaaaattgattgtggtggtagatgcacaactctgaatgtactaaaaatcattgaattgtacacattatatgggtgaattatatttcaataaagctattaccaaatttttctaatcttagagaa

SEQ ID NO: 251538 - DNA, 351 bp, Homo sapiens
ctattctttactttgaaagaataaagtccttcttgatttggaaaagaagaattactagtaactttattacttatgaaaaggatatatttttaaatagtaactttccacatcccctggtactgtcaggtaacttttggttgtggtaaaaactccccagtgaaaatttgttcaaattgttcttttcagagacttaagtttgtaggatttttataatgttaatatgttaatgacaaatacatttttcagttttgaataagaaatgttgaatattgaacccatattgaattggttgactgttcagccagtattgtaacttacagacaggtatgaaaataaagatgttgactttga

SEQ ID NO: 251539 - DNA, 418 bp, Homo sapiens
tccttttaatatatccaaaaaagtatgttcagcccaagaaccatgttccttcttgatgttcttgggggcctcaatgtacttacttatgaagaggagatagatttatggttgaaatacattgtctttgtcttctctaggaggaggttagatagatatctatccccagaaggattagatgtcctggtccaaatggtggtcagtattcaaaatatctaagccatgttggtgaattaaatgtagctaaactactgaggacagatggcattttcctgaggagttctgagagaactcaaggatgaactgggataatgatgtcccagaagtgaaaactgctaccattcctactctgcagattgcaaaggtgagccagttgaaaacaaactaattaattacttactaattagttttaaaagtctcc

SEQ ID NO: 251540 - DNA, 440 bp, Homo sapiens
gtctcagatgtctttgttgatgcatttgatactgacttgacttctggaaacaagagatgcctgaacaatactggcctaaataacaattcattttttcctctcccacttggtgctgggtgaaaagtggggaacccaaacctcccttctgttgctgggcatctctccagttgtcactcagatgctgtggtcctccagggctgctcaagccaccattttagatgcttccatttcagctggaagaaagaaagaaaagaccagagagctgtgcttccttgaaaacatgcttggaatctgagcccatgtcatgcacacttggccctttttggccacaagggaagctggagacctaaactctaagtgaacacctgctactgtggcagaggggagtgggatgaagactttccacctctgtagagaatatagtgtctctgtatttccat

SEQ ID NO: 251541 - DNA, 159 bp, Homo sapiens
ccacatgttttgtattttttttttttggaagttggagaaatttgggtataggtttggattagagataagttaaaagctataaaagacaaatatgttgtgacagatgtgacatttctagaaggaatgggaggagagttaaagacatggaaacaaaatggt

SEQ ID NO: 251542 - DNA, 595 bp, Homo sapiens
gactctagacatccccttatgccgtcttctcaaagggcgctgttttttagatcaggcttatgacccagagcactgggtgtgggcgcgagatgcgctcgctttctagagctcagggaccgtggaggctgaggtcatcggcctgagagaaggtcatctgcatcttccggggtaaaggcagaatattggggtctattttggaaatccgaggaacccaattgcttgatccggcttcaagcctgggcaacgtggcgagatcccctctccacaaaaatacaaattttagccaggcgatgtgggacgcatctctactcccaactactcaggaggctgaggcgggaggatcgctggagcctggaaggtcagggctgcacggagccctgattgggccactccattccagcctgagaggcagagcaagactctatctcaataatcaaacaaacaaacaaactgtccaggtgtggtggcacagccctgtagtcggagctaataaagaagctgaggtgggaggatcgcttgagcccaggatatggaggctgcagtgagctatgatctcaccactgcactccagcttgggggacagggcaagtctgtc

SEQ ID NO: 251543 - DNA, 881 bp, Homo sapiens
gtcagtttcatgagccagtaggcacacgcaccatttgttcctagatatatctttccaaacacatcaagtaaggttcacgacattagcctctttctcactcccaggcctctttctctttctctttttccagttagtggcagcttgaagccattatcttgtgagaagactcgattttttgcttcagggttcagtcttgatgggcctttggcattcaacttttttctcaatgtctcttattctttagcgtttaggagcaggtggcttctccaaccctgccactctagtcctctcagacccggacaagagaggtggctccctgaatcccacactttagagggttcttctgtcactcaagatctggtactcagcactagcacagcacaacccataacctcaaacatctgctcacataactcacaccattcagacctcagagaaacaccgctctacatctttcatatgccaccaaaaaagtgactgcatcaaagagttgtgaagttttttgtgggatgtgtcattgccagtgtcagagatgaacactagtttatagttcagggaagatctgagtggtggaagtacttaggtaagaaaaaagaaaaattaagttgtcaaatattttctctcaatgtgaatgcaatgtattcctgcacaaagaagtttcatttcccagttatctcaaatgcttattttcttcttttcctggtccagtttgtatattgtcaaaagatgcacacgctgcctgagaaacattttgcagtactaacaattcatattactcttaaatgtgtagtatatcggctctaaatgcatgtgtgaagtgaccgattccctttgtattggcaactatatggacattaaacactggaattgcaataagaatt

SEQ ID NO: 251544 - DNA, 340 bp, Homo sapiens
ctagagtcaaatgctctggagaactttgtctataacaagtttcagtagaataactgtgtttggccgggcgccgtggctcacgcttgtaatcccagcactttgagagggtgaggcgggaggatcacctgaggtaggagttcgagaccagcatagccaacatggggaaaccccgtctctactaaaaatacaaaattagccgggcgtggtggcacgcgctggtaatcccaactactccagaggctgaagcaggagaatccgttcaacccgggaggtggaggttgcggtgagccgaaattgtgctgctgcactgaagcctggacaacaaagtgagactacgtct

SEQ ID NO: 251545 - DNA, 314 bp, Homo sapiens
taaatcccaacagcccagggtggggaccacattgcaaggaactgtgggcagcctcttgaagctgagagcagaattcagccaatggcaagaagccaggcacctcaatcctgcagccacaaggaaatgaatcctgctagcaacccgagaaggcttagaaatggatccttccccagtcgagcctctgatgagaccatagtcctggttgacaccaaaactgtaaccttgtaagaaaccctaatgcaggggccccagctaagccatgctcagattcccaatccatgggaactgtgagataataaatgtgttgcttgaaa

SEQ ID NO: 251546 - DNA, 277 bp, Homo sapiens
gttttctattgagcgttctctgaatattcttgccttcagtcctgctgggagccttttctcagatcaccagtgcaagcctacagtcatacattgtttgtagttgatacaacctcaatgatataagttttttgatgattttaaaatatgagtaattaatcatttataacctataggttaaaatgaattataagtggatgaaggtgggaacccaaatgaatcaaagctatttaagtttggtattgacattgtgcatcttcccattatttattataccaaa

SEQ ID NO: 251547 - DNA, 568 bp, Homo sapiens
cagagtatgctactgctgactcaacagttccacttggatgtttgataaactcaaacctaccattcaaaactgactgttcatggtccccccaccaaacctaccccatgcataagctccttacttcactcaagggcagctctgtccttttagttgctcaggccaaaataggggcagagggagctggggtaattctcaacacctttctctctcacttcacattaaatcctacagaaaatcctattggctgaattgtcagaatatattcagaattcaaccatttatttccctttctactgttaccatcttgatctaagcctccattctgttttgtccagattaatgcaataggttcctatatggtctccctgcttccatccaattccaatccctcctcccaacatagtctgttcttaataaaggagccagagtaatccttttaaaattagattgtgttactttttggttcagcgtcctaaagctcctcagtttacttggggtaaaacccaatgtcttactgtggtttgaaaggatgtgtggccgggcgcggtgactcacgcctgtaatccta

SEQ ID NO: 251548 - DNA, 830 bp, Homo sapiens
ggcaaaagtgacaccacaacattcattataggaagtaagagacattcatcactggaatattttagcaaatgaatcacaacagactgatagcataactcatgttctaaggccaagaacaagaattgcatagtttattttaagacagcagaagagtaaaaaacagattgaaaaacatatgataccctctccagctcagagctctacaaacagcagtggcgtttgcaaagttctatgtatcttctcaaatgtggtttcagttttaatgtgtgttgacatctttgtgtgcagaactaactggaggaacaacagtttgtgctttttttcccttcttgctacaagggtgagaacagggaaagaaccaaacggtctgtgtttactttgagcagccatacaccatgcatggacactaaggtatggttttccttcaattattccaaattagtataatgaaaacatgcttatccctcgagccattggatgcgtataatgcagaagagatgcagtaatggagttgccttatatgctcctctgaagcagaagcaagtgaaagagacaagtaagatgattagaaaaactttgactttctaaaacaaataagcagtaaatgaactgattgagtgcaaaacttcacagaaccacacaaagaactggagcttcaaactgtaactttaaaaatagtagggtgaaaaattaaggggctctaacatgaaacaaatttaggaagaaagagaaagcaacagcatgccaagaactatactgattaggaagtaggcaatttaatttcttcaggagagtaaatctccaacatgaattaatttgcttcacgctga

SEQ ID NO: 251549 - DNA, 490 bp, Homo sapiens
gtgttggatttaaatatgcaagtaccaaatgttaaaggagtgggtctttgaagcagacacagatatatttagactgttggagatactgctgcatgggggtgattgttggaggaataatatgaggaaagtggaattgtccttgagtgcaggggcacaggggtgactagcagatcccaagtttggaagatccaagttagaaatggatcttaggctggatgtggtggctcatgcctgtaatcccaacactttgggccaaggcaggaagattgcttgctataggagtttgagagcagcctggggcaacatggtgagattctgtctctacgaagaatttgaaagttagctgggcatatttgcacatatgcctgtagtcctatctactcgggaggctgaggtgggaggattgcttgaactcagatcgagcctccagtaagctgtgattgcaccactgcactccggcatgggtgacatggggaggtcctgtagaaag

SEQ ID NO: 251550 - DNA, 485 bp, Homo sapiens
tatctgttggacttctttctgtcatcagtgtctgtgcctctttaccatagtaagtcttggtggagatcagaaaagctgggtctctctagatcaaagataaaggaaccaaatcagaaactgaagtcagagctcttatgaaatttgacaatgccctgaaggtagattctgaggggatagggttggagaatcactggctgtatatattatgtggattcaataaggatttgttgatgacttcataaaagacgagatgcctgttctaataataacacatgattaaatctatcatgactttgaaaatggctttactgttttgcttgagtttttttcatgctaactctggatagcctctattttttggtatttgctgtcgttataatttttattagtaattgttgattatttaccagatatgatcttgaatttttctttagaattgtttaaacattaatgaatctaactgtaaaggagtagatacaaatttc

SEQ ID NO: 251551 - DNA, 683 bp, Homo sapiens
attgtaaggcatgtaccactctggcgtgggatgttgatagcaggggaggctccgtgtttgtggggggcaaaggatatatgggaatgctctgtactttctgctcaattttactgtgaacctaaaactgccttaaaaacagtctattttctaaaaatatataactatacagaaagctgactcttctgcttagtttcctgttcctaatgacagatgcaatgttctagaggcattttagtcagaaagctctctctacctggacatccattcccactggtctgctgttactgatttgtcttcggggtgggaaatttagtttggaagtaccatcccaccaaggcctgcagtgcctaagagcgtctctcttggaggatggttaaagtagtcagggtattttacaaccgcatcttcctgcacaaccattatccaaaaacatttattttttagtctaaaggtgttcttttcatatttgtctgtgtagagctcaggaatgtatttcaggttaaaatatagtaggaatcaggtaaacaacatgcatgaatgaagaatataataaattctttcagtaccttttttcatagcatagagctctgctatgaagaatacataacacatacacagtatttaagattacatgtgcacacatgaacacacacacacacacacaccaccccttctttaaagaa

SEQ ID NO: 251552 - DNA, 394 bp, Homo sapiens
gtagacccaatggacctaacagatatgcagagctttctacccaacagcagcagaatacactttcctctcaagcacatggaatattctccaggacagatcacatgtgaggtcacaaaacaagtcctaacaaatttaagaggattaaaataatattgtgtatatttttccaatcataatggaatgaaactagaaatcaacatcagaaggaaaactgagaatatgtgaaaattaaacaacattctctcaaaaaaccaatgggtcaaagaaaaaaaaaaaagagaaaatttaaaatcttgagataaatgaaaacatgatataccaaaacttaggtgatgcagcaaaagcagtataaacagggaagtttatagaattaaatgtctacgttaaaaaagaa

SEQ ID NO: 251553 - DNA, 451 bp, Homo sapiens
acacctgaggtcaggagtttgagaccagccttacccaacatggtgaaaccctgtctctacttaaaaaataccaaaaatttagctgggcatggtggcgggcacctgtaatcccagctgcttgggaggctgaggcaggagaatcgcttgaaccagggaggcagaggttgtagtgagccaagatcacgtcattgcactccagcctgggtgacagagcaagactccgtcaaaaaaaaaaaagatattaaatccaggaggtcgactacttttgtccagcagcactgataagaaagatagctggtctgggcacagtagctcatgcctatgatcccagcaccctgggagactgaggtggaaggatttcctgagtccaggaatttgaggctgcagtgagctatgattgcacaattgcattccagcctgggtgacagagcatgaccctgtctcaaaaaaa

SEQ ID NO: 251554 - DNA, 476 bp, Homo sapiens
  misc_feature (217)..(217): n is a, c, g, or t
acacctgaggtcaggagtttgagaccagccttacccaacatggtgaaaccctgtctctacttaaaaaataccaaaaatttagctgggcatggtggcgggcacctgtaatcccagctgcttgggaggctgaggcaggagaatcgcttgaaccagggaggcagaggttgtagtgagccaagatcacgtcattgcactccattttgggcaacagggtganactccagcctgggtgacagagcaagactccgtcaaaaaaaaaaaagatattaaatccaggaggtcgactacttttgtccagcagcactgataagaaagatagctggtctgggcacagtagctcatgcctatgatcccagcaccctgggagactgaggtggaaggatttcctgagtccaggaatttgaggctgcagtgagctatgattgcacaattgcattccagcctgggtgacagagcatgaccctgtctcaaaaaaa

SEQ ID NO: 251555 - DNA, 619 bp, Homo sapiens
ttccaagctgggaaagagattaatttaacaaggtccaactattgttttcaaataactttggaaaatcctatatacatatattcaaagccagatgatttttgacaaaggcaccaaaaacatacattggagaaacaacactctcttgagtaaatagcattaggaaaactgaatatctcgatgcagaagaatgaaagtagacccctatctctcaccatatgtaaaaatcaaataaaaatgaattaaagatttaagtgtaaggcctgaaactataaaactggtagaagaaaacataaaagaagcacttgaggacattggtctacacaaatattttagggctaagacttcaaaagcataggcaacaaaaacaaaaatagacaaatagtactatattaaactaaacggctcctgcacagcagaagaaacaacagagtaaagaggcaatctgcagaatgggagaaaatatttgcaaactattcatttgacaggggactaatacctagaatatacaaggaacttgaagatcaaaaaaataaatcccattacaaagtgagaaaagaatctgagttgacatttcccaaaatgaaacatacaaatggccaacaggtatatgaaaaaaaaa

SEQ ID NO: 251556 - DNA, 848 bp, Homo sapiens
catgcaaaaggaaacggcgggaaacacacacgcactgcctgaagcaaccgattaaaaaaaaaaaaagcgggcgggggagttgggtgaagagccagcttccgagccaggcctgctggccgcccctggttttgcgagcgaatgtcagggcaggatggaggtgccgaactccccgccagctcctgagtcctgaaggtcgtcttctccccaccgtactccccaggactccgaggcccggcgcaatcgcgcgctgcggagggcggcggaggagaggcaccaggcgggccgtcgggaggtggaggcgctgcgtctgtggacccagctccaggagctacggcgggaacacgcgcggctgcagcgccggcttaagcgcctggagccctgcgcgcgcctgctggagcaagcgctggagctgctgcccgggttccaagaggttccggagctggtggcgcgcttcgacggcctggccgagacgcaggcggcgctgaggctcagggagcgcgagcagctcgcggagctggaggcggcgcgagcgcggctgcagcagctgcgggacgcctggccggacgaggtgctcgcacagggccagcggcgggcacagctgcaggagcgcctggaggctgccagggagcgtacgctgcagtgggaatccaagtggattcagattcagaacacagcagcggagaagactctgctcctgggacgcagcaggatggctgtgctcaacctgttccagctagtgtgccagcatcaggggcagcctcccaccctggacatcgaggacacggagggacagctagagcacgaccagaccatctcttttcaaaatcaactctctgccctccgtggag

SEQ ID NO: 251557 - DNA, 1054 bp, Homo sapiens
catgcaaaaggaaacggcgggaaacacacacgcactgcctgaagcaaccgattaaaaaaaaaaaaagcgggcgggggagttgggtgaagagccagcttccgagccaggcctgctggccgcccctggttttgcgagcgaatgtcagggcaggatggaggtgccgaactccccgccagctcctgagtcctgaaggtcgtcttctccccaccgtactccccaggactccgaggcccggcgcaatcgcgcgctgcggagggcggcggaggagaggcaccaggcgggccgtcgggaggtggaggcgctgcgtctgtggacccagctccaggagctacggcgggaacacgcgcggctgcagcgccggcttaagcgcctggagccctgcgcgcgcctgctggagcaagcgctggagctgctgcccgggttccaagaggttccggagctggtggcgcgcttcgacggcctggccgagacgcaggcggcgctgaggctcagggagcgcgagcagctcgcggagctggaggcggcgcgagcgcggctgcagcagctgcgggacgcctggccggacgaggtgctcgcacagggccagcggcgggcacagctgcaggagcgcctggaggctgccagggagcgtacgctgcagtgggaatccaagtggattcagattcagaacacagcagcggagaagactctgctcctgggacgcagcaggatggctgtgctcaacctgttccagctagtgtgccagcatcaggggcagcctcccaccctggacatcgaggacacggagggacagctagagcacgtgaggacccctctttatggcacctccagcccccaaacactccctctttggaaaaatgagcctaaaaccccacagttagtgacaccttctctgggttaagcatggccctctacggtcagagcccttgccccagccgtggctcgattgtcgggcaggcacccggtctaggatggattcctgggtgcatcttggctctgacagtggccagaagaaagccatgcccctctctgcgacaaagctagactctatctc

SEQ ID NO: 251558 - DNA, 488 bp, Homo sapiens
tctgaccaccactccaggacactgcagacaggtgtgcatttactcagcatccagtaaacacctgcaaggtgcagagtactacactaggcacagggaacagagctactgactgactgccagagtttcgaagaatacagataagtcaactattaaagctaggaaacagaccggatgcggtggctcacgcctgtaatcccagcactttggaagaccgaggcgggtggatcaactgaggtcaagagttcaagaccagcctgccaacatggtgaaactccgtccctattaataatacaaaaaaattagctgggcatggtggcacatgcctgtaatcccagctattcgggaggctgaggcaggagaattgcttgaacccaggaggctgcagtgagctgagatcgcgccattgcactccagcctgggcaacaagagcgaaactctgcctccaataaataaataaataaaataaaataaaataaagccataaaaca

SEQ ID NO: 251559 - DNA, 906 bp, Homo sapiens
ctaattagatatatatttaggtatggtaatagttacttaggatggggaggaaacggggtgaactatggggataaaatataattaagagaggactcttgcgtgaccagtgatgaaaactggaataacaacattatttattgaatacaacacaccaattataagaatgaaaagattggaataattctagaatgccacaaaataacatatgtcatgtggcctggtacagactataagcataatagttcagaaaagggagatttgcagatagaatcatgtggaagcccttcctgatgaaggtgtcacttgcactgggccttgaaagaaaggaatttagacagatgaagagaagcttcaggaggccaggttccaggtcagttttgttttattcatcactgaatctccagtgcctgcctagcattgtgcctgctgatgtctgttcaactactccagccaatgaatggtagaagaggtatatataaattaaaatctttaaagattcatctgtatggcatttttttctttctttctttctttcttttggagatggagtcttactgtgtcgcccaggctagagtacagtggcactatctcagttcaccgcaatctctgcctcctgggttcaagcgatcctcctgcctcaacctcccaagtagctgggactacaggtgtgcaccaccatgcccggctaagttttgtatttttagtagagacgggggtttcaccatgttggccaggctggtctcaaactcctgacctcaaatgatccacccgccctggcctcccaaagtgccaccgctcccggcctgtgtatggtatttttctatggcatgtaattttctgtacacaccctctttctttcttaggcttttttgtcagcagcccaagatggaaaaggcagctttatgt

SEQ ID NO: 251560 - DNA, 471 bp, Homo sapiens
ctaagaattttactttgggccctatctcctatactcagagcaagcataaaccttcccagggccctacacaaacatattcccatcgaggcatcacataaaataaaatcaaccatttaaaaaggtataatttagtgacaattacttcccatttataagcaagggatgcatgagtgctacccatagaccggatatgggccatgtcgttagcgtttcttgatctcgttagataaattatctgaaattttgaggagacttcagcagaaagaagcaggggatatgctgtcaaatgcctgtggatttatactaagaaagaaagaaggggcataaggaaaattttctttatctcgattttggaggtggttacatgggtatgtatttgtcaaaattcattgacctgtatacttaagatttatacattttattttatgtaaactatatctcaataaagttgagttttttaatgtctagaaa

SEQ ID NO: 251561 - DNA, 473 bp, Homo sapiens
aacatacctaagttatacagttagtaggtggcagaattggaatttgaacctagtaggataggattggattgatgctttctaaacccttcacttagggattttttcttgaaataacatggttatagtgatagaccttttttcttttaaaagtggtggcaaagtactaaacataagctatatttttgttccccagaaagagaaatctaaattttatttttatttatttatttgagatggatggagtcttgctctgttgcccaggctggaatgcagtggcgcgatcttggctcactgcaacctctgcttcctgagttcaagcaattctcatgtctcagcctccctagtagctgggattacaggcgtggtggcacggacttgtagtcctagctgctacttgggaggctgaggtgggaggattgcttgagctggtgaaggttgaggctgcagtgacagagcaagaccctgtctcaaag

SEQ ID NO: 251562 - DNA, 432 bp, Homo sapiens
taacttccttctctgctgctattgttgcatggcactttccctgtgtgtgtgtctgtgcctcttctcctcttcttacgaggacaccagtcatgctggattaaggccctccttactctgatatgacttcatcttgattacatctataaaggtaacattcataggtaaacaggatttggacttcaggacatgtttctgaaggatacaattcaacccacagcagtcctttttccttcatgagaaaaaaatgaagtgcactccagagtcttactgtggttatagctatgtagtttggtggttcctgaattaattgaaaatagtttaactatcactcagtggaatgtgttcagcttctcaactaatctttttgttccctttgaaataactcagagctttcaacagccccatagtgtgcaagaactccttgaaactagt

SEQ ID NO: 251563 - DNA, 294 bp, Homo sapiens
ctgggtgacaagagggaaacatcatctcaaaaagaaaaaaaaaaaaaaagcaaagatgcctttgttagaagagaaaggatgagtgtcaatattcttaatacttgttgctcaacagtgaacagaaagttatcgggttttgcgtgatggattccagcttgtctgtaaagaagaggatggatcattcattatttaataactgcattaagtgctaggaacagagtggtgagaaaagaagcatattctttgctttcatgaagcttatattccaaagagggaaacttaccctgcataagc

SEQ ID NO: 251564 - DNA, 2987 bp, Homo sapiens
  misc_feature (2943)..(2943): n is a, c, g, or t
gatcagaagaattaatattgttaaaacgaccatcctgccgaaagcagtgtacagattcaatgcaattcctatcaaaataccaacatcatttttcacagaattagaaaaaacagtcctaaaattcatatgggaccaaaaaaataaaaaataaaaaagcaaagcctaagcaaaacaaaacaacaacaaccaaaaacaaagctgcaggcatcacatttcctgacttcgaactatactgtaagactacagtaactaaaacaacagggtacttgtataaaaatagatacatagatcaatgaaacagaatagagaacccagaaataaagccatatatctacggagtgccagctgatctttgaaaaagttaacaaaaacatgctctgcgtattctgagatgttctcaggagtatatgttagtccttctccacatacctgttttccaggttggtcttgaactcctgggtgcaagcgatttacccagcttgacttcccaaagtggtaggattacaggcacgagccatcatgcctagctaggctaccttttaaatatatatcatggccaatttttgtttattctgattatttattagttcctttttgatgtctggaagaacttattttctagccagacagactcttatatcaaatatcaaatttccagccttccaaatgggttttcctaccttgtctcaagccaaagcaaaacaaacccccaccccacaaaagaaaaacaaaacaaaacaaaaacttctcctccaaaatcagccgttacaccacccacctctggtgtggacatgacttccttgttcttcctcaggagttataaattatgctacggggttatgatggtatttagccagaagaaggagaaaaaaaaaaatgaaacatgttcaaactgggatcgttttttcattcctttttatggattcaattttgtgatatatagtgtttataaagtccttcagtgaaaatgtactctggtttcagcttggccttgagtttatgctggtacactgatttagctaaaacaaaacaacaacaagaaaagcttatcatcattattcactcaagcatcaatcattgcatgtgcttccacccactcccccaccccacgattaaatgctagccattcttcacttcagctcctccctctgcccccttcttcatatcggattagatttctcttccctgtattcctgaaagcaacagtgctcccttctctcctggcatgtaacacttaccactgtgaattataaaacggttgctttgctttttctcttttaaaatagactatgagctcctccagggcaggggccatgtctgatttacttttatctcttagtgatgctttgctaggcatatggcagagctcaataaatcttgtatgaatgaatggtctcatgactggttccttctcatacttcagctcttagctcaaatacggtctcttcaagaaaggcttgcatgatcacccaacataaagtagttgtgcatccccggcacagcctgttccattgtcctgcgtcattttcatcacagaagttaccactctctgaaattgtttgctaagttgtttattctgtctccccacagaatgtgagcgctgtgaaagcaggaccctgtaggtcttgcccattgctttatttcatgccagttcctaggctgtcagcacagtttggttacatgagtgagtgaattttccctgttttccttcctaccctcagtggaaactgtgaaggctaaatgtataaggaagactagatattaaagcattaatcacgtgtaactgtctgtaaacagcggttttgtagttttttgcttttagtaaataggctcccccgtgtgatcaatactaaactgacagcaaaagagcagtccattcttattagaccatgcttggggagataagttgctgctggctcatgaaggacacattcttcttgatgtagggaggtggaatgaggatttaggcgctgtcttcctcccctttggggtagggtaccttgctgtcttttgacagaatgaggatgagaggaggtggtaggaaggcgggggaggatcagtgatgagatggcactggggacagtggagagaatggttgtgcatatgatttacggtctttcttttcagtatactacagtgcttagatgtgtatgcagaaatcaagagttatcagtgatgtttgaaaattagatgttgctggcatggaacttccgttttcattgagaacagagcgtgcttagtgacgtgtatatttagtacagtaagacagttgcagaaggatggccctgatggtgacagtgataatcctaaccctagatgctcactggctgggcacaagtacaggatctcactggaacctcactaggtatctgttgtcctccttttatagttgagaaacagaaagcttaagtaatttgcccaagatcatgtaactaataactggcagggatttgagtcaggatctccaaagctacatctcttcctaaagctagttttaaaatttcatttctcatatatggagtagcccacaaaggctgtatgcaaggtagtcttcagaaagcttacatcttcaccaaggcacatgaaactgcagaaagaagcaatgttaggcgttcctgataataattatctgcctggatgacagcagtcctgctttatggtcacagaccccagctttctgccagaacatggctcaggactcctgaaaatcatcccattcgggagcaagtgggtttaatttccttttcatgaaaggaaagattagctttcatgcaaacacttggtccatttggccatttaataagaagactgaagtctcatgttccataactttatcagcctaaaagtccctttgttgtatcataaacacataggctgaaacccctgtccttccaactcagagcaaattctgttgtattaaataaccatgccatgtactgaatntttttacacttatttattggacttgactcctacctccttcccgc

SEQ ID NO: 251565 - DNA, 2951 bp, Homo sapiens
gatcagaagaattaatattgttaaaacgaccatcctgccgaaagcagtgtacagattcaatgcaattcctatcaaaataccaacatcatttttcacagaattagaaaaaacagtcctaaaattcatatgggaccaaaaaaataaaaaataaaaaagcaaagcctaagcaaaacaaaacaacaacaaccaaaaacaaagctgcaggcatcacatttcctgacttcgaactatactgtaagactacagtaactaaaacaacagggtacttgtataaaaatagatacatagatcaatgaaacagaatagagaacccagaaataaagccatatatctacggagtgccagctgatctttgaaaaagttaacaaaaacatgctctgcgtattctgagatgttctcaggagtatatgttagtccttctccacatacctgttttccaggttggtcttgaactcctgggtgcaagcgatttacccagcttgacttcccaaagtggtaggattacaggcacgagccatcatgcctagctaggctaccttttaaatatatatcatggccaatttttgtttattctgattatttattagttcctttttgatgtctggaagaacttattttctagccagacagactcttatatcaaatatcaaatttccagccttccaaatgggttttcctaccttgtctcaagccaaagcaaaacaaacccccaccccacaaaagaaaaacaaaacaaaacaaaaacttctcctccaaaatcagccgttacaccacccacctctggtgtggacatgacttccttgttcttcctcaggagttataaattatgctacggggttatgatggtatttagccagaagaaggagaaaaaaaaaaatgaaacatgttcaaactgggatcgttttttcattcctttttatggattcaattttgtgatatatagtgtttataaagtccttcagtgaaaatgtactctggtttcagcttggccttgagtttatgctggtacactgatttagctaaaacaaaacaacaacaagaaaagcttatcatcattattcactcaagcatcaatcattgcatgtgcttccacccactcccccaccccacgattaaatgctagccattcttcacttcagctcctccctctgcccccttcttcatatcggattagatttctcttccctgtattcctgaaagcaacagtgctcccttctctcctggcatgtaacacttaccactgtgaattataaaacggttgctttgctttttctcttttaaaatagactatgagctcctccagggcaggggccatgtctgatttacttttatctcttagtgatgctttgctaggcatatggcagagctcaataaatcttgtatgaatgaatggtctcatgactggttccttctcatacttcagctcttagctcaaatacggtctcttcaagaaaggcttgcatgatcacccaacataaagtagttgtgcatccccggcacagcctgttccattgtcctgcgtcattttcatcacagaagttaccactctctgaaattgtttgctaagttgtttattctgtctccccacagaatgtgagcgctgtgaaagcaggaccctgtaggtcttgcccattgctttatttcatgccagttcctaggctgtcagcacagtttggttacatgagtgagtgaattttccctgttttccttcctaccctcagtggaaactgtgaaggctaaatgtataaggaagactagatattaaagcattaatcacgtgtaactgtctgtaaacagcggttttgtagttttttgcttttagtaaataggctcccccgtgtgatcaatactaaactgacagcaaaagagcagtccattcttattagaccatgcttggggagataagttgctgctggctcatgaaggacacattcttcttgatgtagggaggtggaatgaggatttaggcgctgtcttcctcccctttggggtagggtaccttgctgtcttttgacagaatgaggatgagaggaggtggtaggaaggcgggggaggatcagtgatgagatggcactggggacagtggagagaatggttgtgcatatgatttacggtctttcttttcagtatactacagtgcttagatgtgtatgcagaaatcaagagttatcagtgatgtttgaaaattagatgttgctggcatggaacttccgttttcattgagaacagagcgtgcttagtgacgtgtatatttagtacagtaagacagttgcagaaggatggccctgatggtgacagtgataatcctaaccctagatgctcactggctgggcacaagtacaggatctcactggaacctcactaggtatctgttgtcctccttttatagttgagaaacagaaagcttaagtaatttgcccaagatcatgtaactaataactggcagggatttgagtcaggatctccaaagctacatctcttcctaaagctagttttaaaatttcatttctcatatatggagtagcccacaaaggctgtatgcaaggtagtcttcagaaagcttacatcttcaccaaggcacatgaaactgcagaaagaagcaatgttaggcgttcctgataataattatctgcctggatgacagcagtcctgctttatggtcacagaccccagctttctgccagaacatggctcaggactcctgaaaatcatcccattcgggagcaagtgggtttaatttccttttcatgaaaggaaagattagctttcatgcaaacacttggtccatttggccatttaataagaagactgaagtctcatgttccataactttatcagcctaaaagtccctttgttgtatcataaacacataggctgaaaccccggcttcaatcaagcaatctgggataatacctgctgtcggtatttacttttttggatgaccaccctcc

SEQ ID NO: 251566 - DNA, 478 bp, Homo sapiens
tggggacttttgtccagggagagcttttgtccagatgggagattatagccctttagctcagcacagcagagccacgcatggctattgaaatcaaaattaattaaaatgggataaaattagcaattcagttcctcggttgcatctgacacatctcaagagctcgacagccgcttgtggttggcagctcccctcctgggcggagcagacagcgaacacctccctggctgcagagtgctctgttggacaacagaacgcgctgccctgcgatgctgatgctcagattagacagatggaaggggccccagggagggggcggctggtttaagtagcagtttctcaccagagactctgattcagctggtctggggcagagcccaggaatccgcatttttacccagccacccacttgattctgacgcaggcaatccaaagatgaatctggccattaaaacataatttttcattttaaaacttctcg

SEQ ID NO: 251567 - DNA, 648 bp, Homo sapiens
ccaagagggctctgtagctaaggactgagcttgcaatttcagagaccataattccagatgtggcacatttgagggcttgtggctgtagcagctttctgggatgaaacccagtcccctgcacaacccctgcaaaaagtcccttaagtcaacaccaaggaaccagctgagcaaatcaaaagtgacatttcttcttagatctgtcagaaaaacgaggtcacagggcaaaccactgtccccagaattgaggagttgggcagggtaatatagagaatcacaacttcctgaagccaaaacctctgtgggaaccagtgccggggaaggaaagcctgcactgtaattgaagaatttcttgaggctcagtgtgggccagtcttagacacaaactcgaggaggacccaataacggaggtctcccacacttttgtgagttttatctctgggagcttggttagctcgtcagagtgaatataggagaaatattcacttgtgctcccaggacacggaaaggaaaagcaatcacttaaaaatataccagagtgtcctattgttctttcgcttgttccatatagtaaatatgcaagacaaaggcaagcactgttccaactactgttgatacatttttagaaagaaataaaacaatttaactctc

SEQ ID NO: 251568 - DNA, 709 bp, Homo sapiens
gggaatggctcctctcaatttgagaaattctgaaggaatttccattggcaagttcagcaaggccaactgacggagagaggaagcaccctgactgttccagttcagacactcttggggcttgttagtaattgagtatgtgtctggataagtgagtgtcatttgtgggtccagacagcaggatctgcttttctcaatttgagaaattccgaaggaatctccatttgcagattgaactagcccaacaaacagggagaaagcaactcaactgtttcagtttggactctcttgggacttgcttattgttgtagcagttagattgtattctggtggttgtttgtgtgttgatgtagttgtgggagatcagggtttgatctgagtgcagaccgcttgggtgtattcttcagggttggtctgcatgtggctgtgggccagtggagtgagggaacatctctacccgtatcacgctgaacatgcccaatctcatctgatctcagacagtctttgaattgtagcactgccttatatttggatttattttgctgttgaatgtgaatatgggatggaagtccatgtctccaggcttctatgctgctgctctaaggacaggcaggcctgattagtatgtgctgctgtttggctacagagttctttggagtctggagagatttggcctttaaaaatcaaactgtcagaccctgtctcaaggaaa

SEQ ID NO: 251569 - DNA, 429 bp, Homo sapiens
gttcctagtgccaaaaagtttggggaccactgctttatagtacctaaaattatatgtttttgttgacagagttttctagagggatctgcaagaagctgttacgatttattgcatggggagggaagctcagggtggttagaattctttacttctcctgtgttgattgcactttctacattgtatgtatgtacctttaatattttataaatgtgtgttttttagaagagatatgctgacataggacacagaaagatttaaaataaaatgaaagaaaagatatattaaaccaatattacccattagaaagctgctgaattgctatgactgtcccatgaaatagacttaaaggcaaaaagcatcatgaacgttaaagaaaataagaagaatgactcaccagcaggacaaaaactgtgatggacaaaaactgtg

SEQ ID NO: 251570 - DNA, 358 bp, Homo sapiens
gaaagcttccccggctcgatagacccaagcaagccctgcctaccaggaggcctgagtccccacagtgaccttaccctgccttgggccagccccagctggcgcccagcctcagtggctgaaattcctgaaccagatcagggccatttggaaagaagatgttgctccacattctcctctcctggaagctgcagtgccattttggacagaaagaggataatcaaggatcagcctacaattctgagttgccacttaatcaagggtatgcaaattaatgagcattctttccgccaaattactttttagtatgaaggtttgaactcctggacatcctgggcgacgagagagaaactccatctca

SEQ ID NO: 251571 - DNA, 737 bp, Homo sapiens
ccgagccctcagtgggaacttgttccggtgctattccagtgtgtggaagcttcgttctttggctctttgcaagaaatcttgctactgctcactcttgggtccatgctgcctttatgagctgtaacactcaccgtggaggtctgcaccttcactcctgagccagcgggaccacgaacccaccagaaggaagaaactcccaacatcaaaacgaacaaactctggacaggccacctttaagaaccgtaacactcaggcgaggttctgcaatctcattcttggagtcagtgaaaccaagaacccaccaattccggacacgagtgcagagttgatgtgagaagaagctaatatggtatgaaatgcacccatctcggtttttgacctatagtattaaatgcacccatctcagtttttgacatatggcaccaggattacaaagcttaacaagtcatgatttagattcagaagttacaaagagtggaaaaggtcatattctttcttatgaggagacaagaactcaggttgctgcagatccatatggaggatatgcctctggttacatattttggtgccatgtgagcatgtcctactccggtggatttttttttttcatctctgagcttgacctgagattgaccatctgacctgagctataattttgacataaattttgactaaaaggtgagcatgtcctactccggtggatttttttcatctctgagcttgacctgagattgacc

SEQ ID NO: 251572 - DNA, 732 bp, Homo sapiens
ccgagccctcagtgggaacttgttccggtgctattccagtgtgtggaagcttcgttctttggctctttgcaagaaatcttgctactgctcactcttgggtccatgctgcctttatgagctgtaacactcaccgtggaggtctgcaccttcactcctgagccagcgggaccacgaacccaccagaaggaagaaactcccaacatcaaaacgaacaaactctggacaggccacctttaagaaccgtaacactcaggcgaggttctgcaatctcattcttggagtcagtgaaaccaagaacccaccaattccggacacgagtgcagagttgatgtgagaagaagctaatatggtatgaaatgcacccatctcggtttttgacctatagtattaaatgcacccatctcagtttttgacatatggcaccaggattacaaagcttaacaagtcatgatttagattcagaagttacaaagagtggaaaaggtcatattctttcttatgaggagacaagaactcaggttgctgcagatccatatggaggatatgcctctggttacatattttggtgccatgtgagtcggatacgttctgttgctaacaatacagtacgtaaccttttgagaatggcttccttcactcaacgtgatgcttttgagattcatccaagttgttatgggcatcagttgccagctctttttaatggaaagtaaatctacttgcaaagcctatctg

SEQ ID NO: 251573 - DNA, 241 bp, Homo sapiens
gttagccttcctctttccccttatgtgaaagttttcaactgacctgaggaaaccatctggctgtcttgcagccgctaggggtgtcatgttcattttcaaaataaaaagtaaaataggaaagtaggcactttctctcttttaattctgaagattgctcatcatcgatatactgatagattcccctgaaacttttaaactttaatttaaggaaatctgctcatggtttttcatcattggttgt

SEQ ID NO: 251574 - DNA, 372 bp, Homo sapiens
atattatgcttttcccaggctagctatgcaaatctcatttcccttacatttgaaagtcatttcagaattgtttcattagggttgaggcaagcacaaatcatgaatgcctgtgtcttctaccaccaaacagattctgttggacccacaactgatatgctttcagccaggttccatttagcattcaccctggacttagggactctacaagagtgctgggtatttagttttgttttgttttgctttttgagacagagtcttgctctgtcacccaggctggattgaagtggcgcaatctcagctcactgcaacttccaccccctgggttcattctcctgcctcagcctcccaagtagcagggattacaggtgccca

SEQ ID NO: 251575 - DNA, 636 bp, Homo sapiens
ccgaggcccagccgccgtccccttgcccaccctctcccctgtgagtcggtctccccttgcgcctggccagcatgcttcggaccgtccggactcccgcagcgttggcccaaggggcggctcccctcggcggagcaggtgacgaaccacttcggaggacacggaattgacactgcggccctagagatacgggacaaggggccagaacgcggggagtctaggctcagatcggagtcgggatcccgggaaaatcccccatctcccttgcccgcagccctagaatcccagaaacccaactccgcgcagctttcggtttggagagcccgccctggtttgcaagcacagatacatgtgcccacacccgaacacacgcagacaccgccagagagcgagacagcgagcgggcgcctccgtagcagcggcctgcggggcggaaccggagctggcgccgcctcaaggggaaaccgaactgtagtgaccggaaatgtccccaggacagaataagccattccttctgtccacgttgccaggacttctccagctcaacacaccttggtttgtttaatgttacacgagggagaagatttagaggcagagacacatgctggctcaatcggcgaggaaatacgagcagagtct

SEQ ID NO: 251576 - DNA, 370 bp, Homo sapiens
caggcccagaaaacttgggggcagatatgagagttaagggaaatgtggttatgaaaccacaggctgaagaccagcacatggtttaccttagaacagttatttaatctttcttgtatccaaatactggtattacctagcgttaaagacttacccctgattagacagatctactcaaaaaacctactgtattcctcttctatgcgaaacatgctgggtgaccaagagatacataacctattaaagccttgagaaggaacagattcagtcagaggggatgtagtaagttaaaatggtgttatccactcactagatgtatgacctatttctgataaatacatcaaaatactactttctacatcaaaatacaact

SEQ ID NO: 251577 - DNA, 404 bp, Homo sapiens
ttttaaattaaaatgtcaagctataaaattttatatggagtaagatctcatcttggttggaagaaaaacacattctggaggaactaaaaataaaagctagaatgtgaaataatacctgtggctgaaaagaagctcttttgacccaggatcctggtcctctgcataacagtcaagaccattctcatttgcctgaaagtgttttagagaagaaagagaaattcaggaccaatcagcaattcccttttccactcttatgaagaaagaaaaaggatttgtgttatttgagatttaagttacttccttttttcctatgacaggttttggtaaatgcccagctccaataatacgttaacattttcagagtcaatctgggttataagtaaataaactccattttgatcttg

SEQ ID NO: 251578 - DNA, 531 bp, Homo sapiens
actgggaagcagaccaagaatgcagaacttctcaggatccctgatctctctctctcaggttagtcacaccaccatatatgagcatttccagctgcaggcggccaggctcaaagaagagatgccagaaaactctgacgctgggttgaggttgagagtgcggtaatcggcgtcacggggtgtcctcctggtgtcatgacgatgctccgctgatttgcatgtacataatgagatatcttggggataagacccaatctaaacacaaaatttgttgatgtttgagatacaccttatacatgtagcctgaaggtaatttcatccaacatgttaaaataattttgtgcatggaacaaagttttcactatgttttgactgcaacccatcacatgaggtcaggtgtggaattttccacacgtggcttcagggcagtgctcaaaaagttttggattttgaagcatttcggattttggattgtcagatcagggagggccaacctgtgcttaacaaaataaaacaaaatgccaaagtgagaaa

SEQ ID NO: 251579 - DNA, 751 bp, Homo sapiens
gtccatttaatcttttcctattgcccattttttttacagtaagcatgtcgctttggtaactgaggaaaagaacatacataattaatttttgcttctttttaagaacagatgactggagcctctgacaaaaatctcctcattaaaatactctatttctcaagttgggtgaatgtggctttttaaattttgttgaggaagtgtcttgctcctatctgtgcctcttgtttacatttagaactcacctggagaacacctgctcaggcacatgcacacaagcacacacacatttactcactgtcactccttcctttaatcgtggaaatggccaaacaagtaatccaggctcccgccacatggcactgggagtaagccagctgatcacacccccattttatggtgaactgtccctagtgctgggctccgggcattcagcactcagatcaaaccatcatctttaaacaaaaccaccgcccttggaaatgtcagatgcctctgaactcaacacctgatggaagctggggtgggcaggagagaggaagggttaagaagtgaatggagaaatgaggactcaaaaagattataggagtcaactgcactgcattccatatacttacaccttggagagcaggttgcattgttgagggccattgccatacaccaagtccatgggtttatcatcatggtggtggggggcatactgactcttccatgctctcccacgtggcatctctctgtataattaccaacctat

SEQ ID NO: 251580 - DNA, 761 bp, Homo sapiens
atcccctggctgtacatagtattgatgtctgccttctgccaggctgtcggacatacttctggtgggcactgtgcggaaacttgaggatgaaatcagtgagctgcatgcacttgaaaggcatggcctgtctcctcacttgagtgcaaggtccatcgaccaaagccctgttctgatcaatactcatgtacagccagctggctgtacatgagtattgatgaaagatatgagcccacagataaagaaggcacattatatattaaacaggataaacagctctacacaagattacaaaagcctactcaaatacatcaaaaatcacactaaacagaaacagaacaaactttacagctgaaagattgaggttgtcaaaaaggatgaagaaataaacctcctagtgatttgctatttaatagaggcatgcctatgataaataatagaaaagggttagaagtaaaaggatagaaaaaataccaacactacctaaaagagacttgaactataaaaatgccacttcaaaatattagcaacttgttacggttatataaatgtactgaatagcaacataattgaataaattttctatttttctatttttatttttattctatcatttgacatcaaattaggaagttgaatcaatcacttaattttattttattattattattatttttttttagagactgggtctcactctgtcacccaggctggagtgccaaggcatgatcattactcattgcagcctcaaactcccggcctca

SEQ ID NO: 251581 - DNA, 218 bp, Homo sapiens
agaagctgaaatttgtgaacttttatgactaattttctatttttctatttttatttttattctatcatttgacatcaaattaggaagttgaatcaatcacttaattttattttattattattattatttttttttagagactgggtctcactctgtcacccaggctggagtgccaaggcatgatcattactcattgcagcctcaaactcccggcctca

SEQ ID NO: 251582 - DNA, 241 bp, Homo sapiens
tttgttttgttttttttttcaggagtggggatatgttctacgctatcgccataccctttttgcaaagtgttagtccagccaccttgagagcaaagtacttggccacaggagttaaattcgtttcttcattgataccaattggcaaatgatatgagacatgaattgtcttttttctttcttttttggggggtggggacggcacgtccgcagaccattttgacaagcaaaaaaaacacttctg

SEQ ID NO: 251583 - DNA, 184 bp, Homo sapiens
agggtttgtttgtttgtttgtagacaatttattgtctctaggagaaagccccatttcttgaatttcttcccatttggatcagagaataatattttgagatctttacagcagtgttttccaaattgaaaaatacaacttataaatcggttgtgatattgatttgataggcctagacaaccaatta

SEQ ID NO: 251584 - DNA, 814 bp, Homo sapiens
aggtcgagcgcaggccgaaagctgttcaccgttttctcgactccggggaacatggtgggatttcctttctgcgccgggtcgggagttgtaaaacctcggccacattaagatctgaaaactgtgatgcgtcctttctgcagcgacgcctctttctgaatctgcccggagcttcgagccccggcgtctgtccctcagcctggcatggcttcttcgggggtctgctttgcatggggagaggggccacgcagcggcggactaggtttggggattctcggtaatggacccggagcaatgactaacagccgctccctctcactttcccacagcgatcaccctctaacaccctccctcccattcccggccccgcgcgtgacaaggtcggctgctttcagccgggagctagatcggtggcccggctcttcggagccttagcaggcgttcgccaaggggtgactggctgtcattgggagcaatatttggccttgaggagaccctggggaggaagtggcggggagctcgtgtttgcttgtgtgtgtgtgggggggggtgtgtgtgtacacgcgcgtgggcagggtccctctgcgctttcctttttaagtgcctctcggtggtgaggctttgggcgggtgagactttcccgacctcgctcccggccccacttaagccgggttcgagctgggagacgcagtcccttcagtgcgccccaaatcctctggcttcaggtggcccggcgcgggggcccagcacgacgcaccgcgccgagaaccgggttctccgtgcgctgcgccagtagccctgggagcgcggcggccgc

SEQ ID NO: 251585 - DNA, 392 bp, Homo sapiens
ttatagtatcttttgtcatgtggaaatttaaaattctgatgtaatcaaattaattaactttgtgccttatgatttgtgtattttttatcttctttaagaaatactttatcttaggccaggcgtggtggctcacgcctgtaatcccagcactttgggaggccgaagtgggtggatcccctgaggtcaggagttcgagaccagcctggccaacatggcgaaaccccatctctactaaagatacaaaaattagctgggcatggtggtgggcgcctgtaatcccagctactgaggaggctgaggctagagaatcgcttgaacccaggaggtagaggttgcagtgagccgagatcacactccagcctgggtgacaagagtgaaactctatctcaaaa

SEQ ID NO: 251586 - DNA, 393 bp, Homo sapiens
caaagccttgtattgctgatgctaataacataatattcagcgactcacagagatggaaaggatgttagaagtcattaaactcaacctctaagcctcactcttccaaccccagtggtgttaggaaagtttataatgttgtgggtggtgaatggaacataatgagcagtttataatagatgttcagtaaagaagtcagaatagtgattgttaatgttaaagtggactatgtccacaagagaaggatcagtacagtaagaggactaaaaccaggaactgtgatggtgagtgcagaggagaaacattttagaaggtggaacatgatacatgtcattaactctctggacagctatcatgtagtgcaataattgttttttttatgtagtgctaagaaca

SEQ ID NO: 251587 - DNA, 443 bp, Homo sapiens
attctgctcagagaattgcttctcaccttggaagctcctagctcatgtaattgtgtgttatgaactagacatttctgaaaagcacaagtattgtgctactcatcgttttatggcaaaatcaattaattaacagatattttttgagcaggtgttaagtatttcaatattggtaactctaccagccatgggaggtatacaaagaaaatgtaaaacctggaccttggcctcgaaacttggcagctggtggtagaggaaaggagaacacacagaagatcatcagagagcaatacccaacccttccatcactgtcggggaaagccatgcacccccttgtgatgtctccttctgcttgtgacttttggttcaggtgactcccagatagattggaagtaaggcctgcactccagcctgggcaacagagcaaaactccatctcaaaaaaga

SEQ ID NO: 251588 - DNA, 592 bp, Homo sapiens
tcagtatttggggaaggtggtttgagcagtatttattgacaatttcattagtggggatgtttctattaaaaacacatagtaagatcattaagtgttcttgcaatataaagtaataataccaccagtgtttatcttactgttttcgtgttctaaatgcatgcacctgagtaaaaggatctgggctgcagtctaggctgagagatgccagcaaaggctgcctaggccagtgcagtccagtaaatccctctttaatcttctcttccacacagacagcagtgatgagcatgcccacgaacccacatgattattttgggaaaaatgaaagagttgtattctttttgtggtagtaattccacttccaggggcaaatacattttgattattttatcacctttcagtgagttgtttttgttctttaaccaaggatgtatgtttgaggtaagaagtaaagcataaagtatatgattttttgtgtgtatttttatcttgctatacccatagggaatgtttaattctgccttggaagtggccatatttgaaggtgctgtgattcaaactgtcagcgagataaggcagcagatcaagaaagcac

SEQ ID NO: 251589 - DNA, 252 bp, Homo sapiens
tttttcaaaagcgacataagaatagtctctgaatcattaagttaattaagagaattttttaaaattacataaacctactagcaaatgctagtagcaatggctcatgcctataatcccaacagagcttttctttttaccttgtatccttctgtactctttgaatattttgccatgaatgtgtatttcttttataatattaaaaacagttaactaaaatgaataaatacatttccctgatctgatttattctat

SEQ ID NO: 251590 - DNA, 420 bp, Homo sapiens
aaatctataatttctttaatcattgtgatcaatgtgaatcatggcatgattaatgtggccggggtaataggtaatggttaaacagataatcaaaatatttggatagtgataactcactatacagcagtgtttctcaaccagcgacaattttgtccccccaggggacatttggcaatgtctggagacgtttttagtcatcacaactcttatctactgggtagagaccaggaatgctgctaaacatcctgcactacagaggacagcaccctacaacagaaaattggcccaaagtgttaatagttccaaggttgaaaaatcctggtgtagagaatggataacacgtataatgatattgacattttaaaaagtttggtgactaccaaaatatagatagctctgtagtgtcgttaatctagatga

SEQ ID NO: 251591 - DNA, 524 bp, Homo sapiens
aatggataaagtaaaaacagacttggcttacatggtaagagactgtaatatatatttcagtaaaatctccagattgaaaatcagtaagtctgagaacaggagcctcaatggaacatgaacaggcctaggctcttttcctgaactataatcgtttaaacacacatccagatccagggcacgcagcacgggccttggcagcaggagggcaaataagagattagcatttagccaaacgcaacatatgtttcggatagattcagtgtaatttgtctatttacagtgactgtctttttcccagaggaaaaatcagtgggctctgtccatgtttgtttctaaacattttaaacacaaaatgttcccgactctgctttgcttgaggtcctttcttaatgacaacactggcatcagtcacagattcacaaccatgggtgcaggtaaaaacgccttttctggacagagatgaaagagcatgattgctggtttgcttaatcccttttgctgctaattaaatcagtacccagaca

SEQ ID NO: 251592 - DNA, 539 bp, Homo sapiens
accagcattgttacctctttctgtggctcccttctttgtgctcttaaaaaggccgacatctggctagtctttaaaggagaaagctactgtgctgggacttgtctttcagcaatatcataggttaaacaaatgccttccatttatttcagtttacttcaatcccaccactcatgctaccaacaattgctctggacttcatactttggaactttctttccactacagttgatagcgtttattacacttttcagcttggacatctcagatgttctgatattttacattgggttttttgtttttgattttgttttttcaaatcttgctctaaccacgtaacctgataaaatgtttctcaatggttctaaccactttctagcaactaagaattttaatactgtaattattactatgaaggatcctgagttttcctttacagccttgaatttacatggttaagattttaatttgacgaaaacagaaaaaaaatgtgcctttgcaaccagtcaggtgataaagtgtgattcaggaagtaattttgt

SEQ ID NO: 251593 - DNA, 347 bp, Homo sapiens
cagggcagcctggcagggaccctgggaggtgctggtgggcaagctggcctgcaaaacagacatgctgcaggccctgttctctccccagcagttagctggggccagagtctctcagagggagacaggcagccttgaggagtaggcacttatggccagtctctgccagagctgccccaaagtcaaaggtccctagctctgagcttgctttaactccatctctgtcgaatctctggggagatccccctgccacttcacacatctgtgggagtgtggggtcccctgtagcagctaagatcctagaggtacatggcgagagtgccttttggggccaggaaccagccatagca

SEQ ID NO: 251594 - DNA, 228 bp, Homo sapiens
ggtgcgacagagtttcagttcagtaagacaaaatgggagtgctggatttaggtatagctgatgaactgaaactctaagcctgttgcaaacccattaatgagaggaactatagaaccaatgtgtaggaagaaggatataaagccaaaagaagcagttaaaatgacacaattctatcagtggtttgttgggtttttttaaaccttaaattcatgtattaaactctaagaa

SEQ ID NO: 251595 - DNA, 459 bp, Homo sapiens
ccagctactcagcaggctgaggtgggaggatcacttgagtccaggaagtcaaggctacagtgagccaagatcacgccactgcactccagcctgggtgacaggacactttgtctaaaaaaaagaaagaaaaaaaaaagtgtgtaaaaaaaaatactggtaatcattttgagatctttagttattacttagtgatatgttccaaaactggagctgagactccaaagagattcctgtaattgaaatattacactttaatactggagttgccctctctataaagcactgacaacattagcatttattttaaataatagcaatatccctggaaaagcagcaggacccagagtgaccactaagccttagtgataataaatggcatctcataactggatgcaacagttatctctaatgaagcctaggatcagatttgtggcataccaacagcacatgtgaaagtca

SEQ ID NO: 251596 - DNA, 571 bp, Homo sapiens
atttggtcacaagatagaatcagtaacgttaggaaggggtggtccactaaatactttcgctttttatctccctgctttctgtatcatctcatcaatcatacacaccagctaatatccccaaaatacagaattacctgtatcatgccatctttctacttgataatgagtcttaaaatgtttctgttgcctgcaggactaggttcacagtttccaaggcctttcactatctggcccctttctgttcattaggccttatcttttattttttgcttttgtgaatgttttccaggctagttttttcactggtactttaaaacttactcaaaagtgtagagatctgagatgtctggtattcctttactcctgttactcctctgttttgagtaccttctctttgtttctacccatgtcttaccaatccttagtgagtaatcttaaatcccacctcttctatgattctcaataacataaggtaatgtcaacttaaaaaaaaacttcctaaatatttttatgtcttttattatctgttatgtaagcttaagattcctaaaattaatgacagatctctttt

SEQ ID NO: 251597 - DNA, 534 bp, Homo sapiens
cagagatcccagaaattatgtaactgcagttcttcatttcctcttccagcatttctaaactttagcctgtaatttaaatttagcatgaatgtttcaaaaggcaacataagttagtatcatggccccacttgcttgcatatgcttgcagtttatgacttttgacactgctattgaatacggtgtggctgtgtcttaaatcatgttagcttgtcaatcaacaattaaattacttcattcagaaaatcagctcatgatagaatgcccagatgttgttgtcagcatctggaatagtgtaagtatgcagtggaggaaatctcatcctttaaagtcttttgatacgtaaaataaaataactccatagactctacttgaaataatcaaaatatcaaaatgtttattattttctttgttaatgatttataaatacactatacaccccactggaaaatgttactctgataaataaatgttttgcaatagatgcttcatttgtattttaaaataaactactgcaacaaagtatataagtgtata

SEQ ID NO: 251598 - DNA, 558 bp, Homo sapiens
gcagttcaaagctgtgttttgtttgagggtcagttttatttttatataaagctctagaaactaccaactaatctataatgacaggaaacagatgagtggttgcctgtggattgggcagggtgaggaagggcgagatgtaaggattacaaaggggcacaaagtacttttggggtgatgaatatattcattgttttgaatgtagtggtggtgttagtatacatagtcaaaacttgtcaaattgtaaacatcaaacatacgtagtttattatatgtcagttatacctcaataaagctgcttaaaaaataaaaggctaatatcctacttaatgttgaaaaactattggtatgataaagaaccaaatggaatttatagaaataagaaatgaaattgggccatgctcagtggctcatgcttcagtctcccaaagtgtgattacaggtgtgagccaccatgcctggcaaggcattcttttttattaggggggtgttgtttattacctcttctatagaaaagtaaagacattaaaatgtaagatgcataataaaaatctaagtgga

SEQ ID NO: 251599 - DNA, 765 bp, Homo sapiens
  misc_feature (715)..(715): n is a, c, g, or t
taccagggaggctgaggcaggagaattgcttgaacctgggaggcagaggccgcagtgagccgagctcatcccattgcacttcagcctgggcaacaagagcaaaactccatctcaaaaaaaaaaaaaaaaaaaaaaaaaaagaactgataaaccagttcagcagggttgcatggtatgagatcaatatgcaaaaattgtttttctgtattctagcaataaacaacctaaaaattaaattaagaagaccgttctatttacaatagcatctggaagagtaaaatacttaggaataaatttagcaaaagaaattcaagacttgtaaagtataaactgtaaaacattattgaaagaaagaagacctaaataaatggaaagatgtctcatgttcatggattgtaagacttactattgttaaagatggcaatacaccccaaattgacctacagatttaacacaatctctatcaaaacctcagctgcttttttttatagaaaatgacaaatctaataaaatttctcacggaaatgtgggagacccagaatagccaaaacaatcttgaaaaggaacaaagctagagggctacaacttccaattgaagcagtactacagagctacagtaatcaagactgtgttgtgctggcataaagataaacatacaggtcaatggaatacactgagatgccagaaaaaaaaaagcactacatttatgttcaantgacaactcattggggaaaagatttgccctttccaagatggtgcttggaa

SEQ ID NO: 251600 - DNA, 434 bp, Homo sapiens
cgagtccttggaggcccttccagttctgccagtcacatgttcccaaacatttgtactccgtggttcattctcagacaaaacctcaacccaaactctggcatataaaattgcaagccaggcactgactcacacctgtaatcccagcaactaaggaggccgaagcgggaggttcatttgacgccaggagcttgagaccagcctgggcaacatagtgagaccccccatctctacaaaaatttaaaaattagccaggcgtgatggcttgcacctgtagtcgcagctgctctggaggctaacgtgggaggatcactgaagtccagaagtttgagggtgcactgacctatgatcatgccactgtactgcagcctgggcaacagagtgagacccccaactctaaaaacaaaataaaataaaattgcccattccccaggcct

SEQ ID NO: 251601 - DNA, 474 bp, Homo sapiens
agccacaactttcgtgcattcccacatgcatatggataaactttgtttattttcctgcgaatatgtcagtttcagtttagttcacatgtccgcaaacactgaacttaagagggtagagacaaagtttttcttcctcagtagaacacatacagaagtgccagtacttaacagttcaagtgctgagactaaattctcacctggaggctgggcatgatgtggctcagacctctaatcctagcactttgggaggctagtgctgatcccttgagctcaggagtttgagataagcttgggcaaccccggcgagagccatgatgaaaccctgtctctacaaaaaaattaaaaaattagctgggagtggtggtctgcacctgtggtcccagttacctgggaggctgcgggccaggtggaggtctcagtaagctgagatcgcgccactgcactccagcctgggtgacagtgagaccctgtctc

SEQ ID NO: 251602 - DNA, 426 bp, Homo sapiens
agggatggagacagatcagtgggaagagaattgagagtccacaaatgctatgggttgaatgtcccacccaaaactcaatgttgaaatttaattgccatggtaatggcatgaaaggttgagacccttaaaatggccatgaaggggctggtcgtggtggctcacacctgtaatctcagcactctgggaggccgaggcgggtggatcacctgaggtcacgagttcaataccagcctggccaacatggcaaaaccccgtctctactaaaattacaaaaattagccgggtgtagtggcacacacctgtaatcccagctacttgggaggctgaggcaggagaattgctccaacccaggaggcagaggtttgcagtgagccaggatcgtgctactgcactccagcctgggagacagaatgagactctatctca

SEQ ID NO: 251603 - DNA, 459 bp, Homo sapiens
tagtttatatctttgttcaaagatgaccttagcaggagacctttttttttttggagttgatcggtaggtcaagccatgtgctaacctggcttgtctgggtatgtctgggaagcagagcaggaccaaggctgcagggcctttatggaatttctgtgctaggaagggagatagacatttaacacaaatatctctatatcttgacatttgcgatatggcaggaaagtacaggcacctatgggactataaaactgatcctaaaacaagcaggcatgaggaggtagtgaggtcacctctaggaatgcctcctcaatggaaacatttgcactgaaccttgaagattaggtagatgagccagtgcttttgcacaccttgttccatgaaagcaagactgtttttttactgttgtattccccagtgtctgcttccttgtaggtgatcaataaagatttcttgaataaa

SEQ ID NO: 251604 - DNA, 245 bp, Homo sapiens
caggcaaaaaccacccagccaagctctgttgaccaacagaatcatgagagataataagaaataacaattatgtaatgccactaagcttcaagatgacttgttcagcagtaagagataactagaacagtgtccctccccttttataacctgtgtttttagatttcaaaaagaaaattctagatttatttcttccaggaaatcataatgctaagtagcaaatactatgacgtagtaagagataacta

SEQ ID NO: 251605 - DNA, 393 bp, Homo sapiens
aattgatgcaccaaacttcatggttgtcttatttttagaaattgtcacagccactccagtcttcaaccaccactaccctaatcagtcatcagtcatctacatggaggcaggaccctccaccagcaaaaagattacaattgcattgttatgtttgttcgcatttttttttgcaatgcagcattttaaaattttgtgtacatttttagacataatgctattgcagttaatagattataatatagtgtaaacataacttttatatgctttattgcaatttttgctttatggtggtggtctggaactgaatacacaatatctctgaggtatctctgtatacagttgagagttgcatataaatataagaataaaattatgttttgtactattttataa

SEQ ID NO: 251606 - DNA, 1120 bp, Homo sapiens
cagcgcttaggattactcaaaaaccaccaatttcgtactactcttcattagctatataaaaataatctatgtcttagattcgtgcttgacttcacattcttagaagtaactaaaggactttacattctcttctttgatttaggttctgtataattttagatcactcagcttagtcaagtttgaacaaaataataaaatggtttggccaaattttataggcacacaactcaaaatgcaaaaagcagtgaagaatgtaaccatctccaccttcaatacggggcaatgctgttccctgctcccctcaactgtactgccggtactcaccaaacagcactatggatatgaaaaccttagactttaccacaatgcttccaaatctgctgacttggaataaacataataaatcagtacacttccacgagaagaattactattgtagtgttaggaaaactagcaatttaactaaacagcatcaagttacaaaccaggaaagtgatttaaaactaaatgctggcttatctttctgaaacaaagcatctaaatttgacagtccaaaatggcacttattgaggtaatccgtgaggggcctcacggcttacccaagacaagtaaaactgctagtgttgaagaggctagcagttaggtgacaggaaagggtaggttttggtgggatggaatctggaggttaaatgaacagaaaagtcacaagggtcccgagattccagtcaagagacctacagtggactagtgtatcacaggagtaggtaagacttagacagtttggacccagctgggtaaatgaaacccctgtcagttgcatctgtttaaactaagtgcatttgatgaagaaagctttcactggggattgctttgcagctgcaggaatgaacaaaagaacagaaacagttaaaagacacaactgtggtcagtgaaactgctgcttaattgccaatgcttgagaaaaaggaaaaagaaaaaactcccggagagttggtaatatgcttgttagcatattcagatttcaattaaagccaaatagccctctgtagtctgaatgctctggcctgctaggctgcaaacaatatctctctaagtagagagcgagagcggcagacgtgtg

SEQ ID NO: 251607 - DNA, 791 bp, Homo sapiens
gcaagactccatcgcattaccactactaccactactactaaactaaccattaacccaccaaatgatagcactacacacctaccagctaataaagaattcctttgttttaataacagctttattgagatacagttcaaataccatacaatttattcatataaagtataaaactcaatggcttttaatatattcacagttgtgcaaccatccattttagaacatttttattcactcccctaagaaattcatacccattagctgtcacttctcatttcctcccaacccctccaaccctagacaatcactaacctactttctgtctctatagatttacctattctggacatttcataagtggaagataatttcttttccaaaatattagtcattttgggaaaactttttcttaattaacacccagtttttcctttttaaacagattataagaatcccaagttaaccattcttgatactcaatgttcatcactataaataacaaatacaaaaatactataatgaggtgatatccttatgggcttttgagatctgtcaggtggtttgagttttgattgccccaggatgtggtgcctaaaaactagaaaacagaaagaaatgtccttcctataattctaatagctcttttctctgtaggcagctgtcactctttactcccatcacctaagttctgcggtataatcacaatatataacttcttgaagttgcttatgaaaagactttacctttttatgaattaaatttcactggttcggtttgacacatagacttaatga

SEQ ID NO: 251608 - DNA, 1337 bp, Homo sapiens
atggaggttgcagtgagctgagatctcaccactgtactccagcctggtgacacagcaagactctgtctcaaaaaaaaaaaaaaaaattaaaaccattttaggaacatggaatatttcaactgagaattttcttaaaaattagtccagtgtagtagaaaaaaccacaacttcagagctaggaaacttggtttcaaattctgggactctaccatttaatagcttggacaagtcagataactttctggagcctcagtttctcatctgtaaagtgaggattatactaatatctccctcacaggactatactaatttgttgtgaggagttaatgaaataacatgggaaagcacccagcagaagagttgacacttattaaacactcaataaatattttttgaatctgagtggcaaaaaaaaaaaaaaaatgtagaacacatgtttgcatgggttgaagcctaaaagcaaacacctaaatatattattggtaaaagtgggaatattctcacttattttggtttttatctctttctgtgtgcctgaagggaaatggctttgtcatctttcctagcccaggtttctaatgggagggggtaaagaacacagtcctgtcattgtgctgaaacatgtaaccacacacagcaaataggtttggagtatggtgtggttgttgaggtgacatttattattgagagacaatgaagaatggtgtcttgttgcttcatcacagctactgaactcacagactgcctgcttgccagagcctttgactcctcagggggtggagcaaaagatttctttcctggatggagcagtcagtctatggtcagtgtaagagttgctgtagcaacctcacagctgtgctctgtctagcagaaacttggtatgatttcacggattttgttcacttaagtaaaaaacagatttgtttggtttttatgtaattagaaattgaaataatggaattggaattttctagccaaggcaggtctcaattttgatgaaactgaagccagaaagttccagtgtttgaagcagcaggtattgtgactatattctgatactggaaatgggagttggaatcctgaattaactgtacttgggtggatcattggcaacccagccatttttattaggttgtagataaagacaggagggtcagagggaaatgttcagttttcaacaatgtaagattaaagtgggagatacttagtacatagtaagttaactggctgggataatgtagataatgtacttgaaaattatttttgagcttttttggtagctttcttactttattcctttttttctatacctgccagtagatgtgagagcttttctt

SEQ ID NO: 251609 - DNA, 1364 bp, Homo sapiens
atggaggttgcagtgagctgagatctcaccactgtactccagcctggtgacacagcaagactctgtctcaaaaaaaaaaaaaaaaattaaaaccattttaggaacatggaatatttcaactgagaattttcttaaaaattagtccagtgtagtagaaaaaaccacaacttcagagctaggaaacttggtttcaaattctgggactctaccatttaatagcttggacaagtcagataactttctggagcctcagtttctcatctgtaaagtgaggattatactaatatctccctcacaggactatactaatttgttgtgaggagttaatgaaataacatgggaaagcacccagcagaagagttgacacttattaaacactcaataaatattttttgaatctgagtggcaaaaaaaaaaaaaaaatgtagaacacatgtttgcatgggttgaagcctaaaagcaaacacctaaatatattattggtaaaagtgggaatattctcacttattttggtttttatctctttctgtgtgcctgaagggaaatggctttgtcatctttcctagcccaggtttctaatgggagggggtaaagaacacagtcctgtcattgtgctgaaacatgtaaccacacacagcaaataggtttggagtatggtgtggttgttgaggtgacatttattattgagagacaatgaagaatggtgtcttgttgcttcatcacagctactgaactcacagactgcctgcttgccagagcctttgactcctcagggggtggagcaaaagatttctttcctggatggagcagtcagtctatggtcagtgtaagagttgctgtagcaacctcacagctgtgctctgtctagcagaaacttgggatacagaaaaacagcaaatacaaatcatggatgaaatttataagatcacttccacagaaagggtccagctgttggagaaaaaactggctgtgcaactgactgaactgaagtctgagatagaagagcagggagctcttcagggaacagctaatcgagtttacagctctattcaaatgccaaaggatatttattactttagaagagagagggaactagcactgaagaaaaccttacaggtggccgagtcgaagccccttgttgttcaggcagatgccgtgcagagggagctagagagctgcctaagaagggagtacacccctgaaaatttacctttgcttctgttgcagtattacacagagagaattgcccagctggcccagagtaaatatttacacatgcttaggtggaagaggttttgccaacacagtaagatcatggagcaactttatcctctttacaagaaacaagttggctacattatgca

SEQ ID NO: 251610 - DNA, 641 bp, Homo sapiens
gttgtcctccattactgaaagaagcagtacagccggctaatggatggagacacaggggagagattttctttgtgggagttcattacagaggcatctgcagacctctaactctctcctgcatgccctttctctttcatagcttccatctctaagctgtaatggatgcaaaattactgcagcattttgttctgccgggctgaccccattacgcatacaccacagtcataaagctctggcttagttactgtttgcatgttcaagactactctgaggcagggaggtgtgaagtttggctacattttcaaacagagtggatgccttcttcattttaaaaacaaggaatccagcctcctttcagagtgaatattgttttgattactgctggactaatccatacttatttaccccttaatgatgatgtttctctggtgtgtgaagggtctttaaataaatgttagggcagtgatgccaggaagtcatcatttcacatgcattagttgcagaagtttgggagacttcatttccaccccaacatcctgttgtcttgataatattttattaagacatagcaaaagatatagcagggtcgttagataatggttaataaaatataagagtttggaaaggtagtgattctcaaa

SEQ ID NO: 251611 - DNA, 380 bp, Homo sapiens
ctcaaaaaaaaaaaaaaaaaaaagaatttttctaagcccgcattgaagtttatactgtagaatatccatcaaacttgagctgatttcttatcaaagacccaggttgcacagataggggttagaagtttggattcggttttgcattttcagtatttaaagtcttgtttcatcttgttcattcttacctttcctttgattgtattagtagctcaggacaaataagaatttataattttccaaggaactaaggttgctgttgaggaatatgggtttcagagacaagagtttaggcactggctcattggtactaagcttcaggggtttgtagtgttgttagagctaattggattttacaaataagccaagattattaaaaaaaa

SEQ ID NO: 251612 - DNA, 722 bp, Homo sapiens
catccaggagcaccctggcctgtccagccgttcaggtgaccttgctgtctctgtgcagatggacccaaggcttccagtgctccctttcctccacactgtatagagaatgggcaagtccctcctgctgacatcccagctcctaagcccgtgtcctagaacaccccacttgggcctgcagaaccctttctacttccctctcacagaatctcgtttgggttccttgtcctggtggaggcggtatgcgctcaaaacccaggttctaaagtcctgtgtgtgcgtgtgttaggcctcagtatcctcatctggaaaatgggtactttgcagatgaggaaacagaggcccagattagggatgtcacttgttcaaagtcacatggctgggaaatggtggtgctgggcttcagtcccaggcattatgactccagagcccaactatttaactcctgctctacagggtccctttaaaccacagcaacaattgctattgttcagtgatgggaaaatattggctaattcatactaaggtcttcatgattgctcgcaatccgtggagataaccaatctaaagggcaatacaattaactgagaacaatgctacagtgaaggactgggaggccaggcggggtgactcaagtctctaatcccagccaaggtcacaggattgagcccaggaggtcgatcacaccactgcatgcagcctgggtaacgaagcagtgtctcaaa

SEQ ID NO: 251613 - DNA, 491 bp, Homo sapiens
tggtggtgtgggcctgtagtcccaaatacttgcagggctgaggtgggaggatcacttgatcctgggagggggaggctgcagtgagccaaaattgcgccactgcactccgggctgggtgacagagcaagactgtctcagggaaaaaaacaaaaaagcatcagttttgttttcccttcctgggagacatctctcaaaccagggatattcttgaaaagagcatgagcaaggaaactgctggtgatattacaagtttctctccttatcttgcctgttgacttcaatagatttgagaataggctgaagagggaggaaaacttcagtgattgagattctagatgaaatatcaggactgactcctgataggattatggtccaggttaaccaaaaaccaattccttgaatgttgaaatctaactttttatattatctttattattgttataaaaacagttcttcatcttttctgttttatttttctaaaactgctttca

SEQ ID NO: 251614 - DNA, 567 bp, Homo sapiens
ccccctaattcttcctccagcgatgtacgcactgtcagttacaccaatctgaagtttatggctacccaaattgcctctggcatgaagtacctttcctctcttaattttgttcaccgagatctggccacacgaaactgtttagtgggtaagaactacacaatcaagatagctgactttggaatgagcaggaacctgtacagtggtgactattaccggatccagggccgggcagtgctccctatccgctggatgtcttgggagagtatcttgctgggcaagttcactacagcaagtgatgtgtgggcctttggggttactttgtgggagactttcaccttttgtcaagaacagccctattcccagctgtcagatgaacaggttattgagaatactggagagttcttccgagaccaagggaggcagacttacctccctcaaccagccatttgtcccgcactctgtgtataagctgatgctcagctgctgcagaagagatacgaagaaccgtccctcatccaagaatccaccttctgctcctcaacagcgacgagtgtgcccctatgcggg

SEQ ID NO: 251615 - DNA, 321 bp, Homo sapiens
ggcactgaaaaatggaagtctaattcacctgcctcgttttaaatatgagaaaactgagggtcgggaagctgcattgacttgcacaaggtcacacagccagtttggatgccttttagaaagctgaaggtcatgattcttgcaccatgtcccatcttcaaacttggtattccaattctcttatctgagataatttttgtataatcaaaacaacatgttaatatagttttgacccctaaactagtcttttaagtgaaacactaataaaaataactcaactaaaaaaatcaataaaaataatagtccattggctggatttcctca

SEQ ID NO: 251616 - DNA, 1217 bp, Homo sapiens
  misc_feature (988)..(988): n is a, c, g, or t
  misc_feature (1082)..(1082): n is a, c, g, or t
  misc_feature (1098)..(1098): n is a, c, g, or t
tcctacgggaaggtgaaggtgctggcaggtcttcagcaccccaatatgttggctatcacaccgcgtggatagaacatgttcatgtgattcagccacgagcagacagagctgccattgagttgccatctctggaagtgctctccgaccaggaagaggacagagagcaatgtggtgttaaaaatgatgaaagtagcagctcatccattatctttgctgagcccaccccagaaaaagaaaaacgctttggagaatctgacactgaaaatcagaataacaagtcggtgaagtacaccaccaatttagtcataagagaatctggtgaacttgagtcgaccctggagctccaggaaaatggcttggctggtttgtctgccagttcaattgtggaacagcagctgccactcaggcgtaattcccacctagaggagagtttcacatccaccgaagaatcttccgaagaaaatgtcaactttttgggtcagacagaggcacagtaccacctgatgctgcacatccagatgcagctgtgtgagctctcgctgtgggattggatagtcgagagaaacaagcggggccgggagtatgtggacgagtctgcctgtccttatgttatggccaatgttgcaacaaaaatttttcaagaattggtagaaggtgtgttttacatacataacatgggaattgtgcaccgagatctgaagccaagaaatatttttcttcatggccctgatcagcaagtaaaaataggagacttggtctggcctgcacagacatcctacagaagaacacagactggaccaacagaaacgggaagagaacaccaacacatacgtccagaagtgggtacttgtctggtacgcttcacccgaacagttggaaggatctgagtatgatgccaagtcagatatgtacagcttgggtgtggtcctgctagagctctttcagccgttggaacagaaatggagcgagcagaagttctaacaggttnaagaactggtcagttgcggaatccctccgtaaagggtcaggcaagccaagtatatccagcacttaacgagaaggactcatcgagagacatctgncattcagctgtggagngacttctccaaaattcctggaatggtaactcaccctacagatgagatatagagcagaaaaagaattgcgaactaaagagcgtaaactcttctcaaacaagggtgaggatgacgaaggat

SEQ ID NO: 251617 - DNA, 962 bp, Homo sapiens
  misc_feature (733)..(733): n is a, c, g, or t
  misc_feature (827)..(827): n is a, c, g, or t
  misc_feature (843)..(843): n is a, c, g, or t
tcaggtgttaaagaacccctacaacagccaaccttccctttgcagttgcaaaccaactctgctggtttctttgctggagtcacttgagccacgtgcatgaaccaaacccacttcgttcaagacaggtgtataagctactttgccagacgtttatcaaaatggggctgctgtcttctttcacatccaccgaagaatcttccgaagaaaatgtcaactttttgggtcagacagaggcacagtaccacctgatgctgcacatccagatgcagctgtgtgagctctcgctgtgggattggatagtcgagagaaacaagcggggccgggagtatgtggacgagtctgcctgtccttatgttatggccaatgttgcaacaaaaatttttcaagaattggtagaaggtgtgttttacatacataacatgggaattgtgcaccgagatctgaagccaagaaatatttttcttcatggccctgatcagcaagtaaaaataggagacttggtctggcctgcacagacatcctacagaagaacacagactggaccaacagaaacgggaagagaacaccaacacatacgtccagaagtgggtacttgtctggtacgcttcacccgaacagttggaaggatctgagtatgatgccaagtcagatatgtacagcttgggtgtggtcctgctagagctctttcagccgttggaacagaaatggagcgagcagaagttctaacaggttnaagaactggtcagttgcggaatccctccgtaaagggtcaggcaagccaagtatatccagcacttaacgagaaggactcatcgagagacatctgncattcagctgtggagngacttctccaaaattcctggaatggtaactcaccctacagatgagatatagagcagaaaaagaattgcgaactaaagagcgtaaactcttctcaaacaagggtgaggatgacgaaggat

SEQ ID NO: 251618 - DNA, 751 bp, Homo sapiens
tcctacgggaaggtgaaggtgctggcaggtcttcagcaccccaatatgttggctatcacaccgcgtggatagaacatgttcatgtgattcagccacgagcagacagagctgccattgagttgccatctctggaagtgctctccgaccaggaagaggacagagagcaatgtggtgttaaaaatgatgaaagtagcagctcatccattatctttgctgagcccaccccagaaaaagaaaaacgctttggagaatctgacactgaaaatcagaataacaagtcggtgaagtacaccaccaatttagtcataagagaatctggtgaacttgagtcgaccctggagctccaggaaaatggcttggctggtttgtctgccagttcaattgtggaacagcagctgccactcaggcgtaattcccacctagaggagagtttcacatccaccgaagaatcttccgaagaaaatgtcaactttttgggtcagacagaggcacagtaccacctgatgctgcacatccagatgcagctgtgtgagctctcgctgtgggattggatagtcgagagaaacaagcggggccgggagtatgtggacgagtctgcctgtccttatgttatggccaatgttgcaacaaaaatttttcaagaattggtagatggggtatgattttgctgaattttaaataaaatgaaaaccataaattacatgatgcttttattgccccttgccaactggcctaaataaaaagactttgc

SEQ ID NO: 251619 - DNA, 421 bp, Homo sapiens
gagaaaacactttgagccccagttttaggaagcagacaccccacttgtatgcatcagcctctcccttcagctgcatccctagaaacagatggatgtggcctcaaccggcacctctgtcccctccacccttggaacagagaatagtcttgtgtttcctaccgtgaaggcagagtgttctctctctttctaagaaagataataattgaagacacaatttaagaggactgtattgctaatacaatgaagaaaggaaatatctgttgtccgtatttgcgcaatcccagataaaaggaaagaggaagaatttttgttgtttgtttaactctggccccatgataataaaagtatttttaaaaggtgttctaatgttactttgttctatatggagctgtaaataaatgaaatgtaatattcttaaaaa

SEQ ID NO: 251620 - DNA, 968 bp, Homo sapiens
ggttttgttttggctctaggcacttcccactccaaaagccctctgttctaactcctgtgcatgctggttttatctgattttctcagtggccatagcaactttcttagttcaggccacctgcaacctccttctagtagcaatcacacccccagcagcctggaactagagtattctgccaaagcagaaaccctgtcactctactcacctatataatgattttctgtgaacttaggtatgaagttgaaaatcctcaacttgtcatacaaggctctttatgttgctcctgctttagtggccaccaatctaccaccccattcactctcccactcccaaccctacacatgcacaccctcttcacattcaatttcttctcctttctccctctccgctcagcaatactacattactttcaactttgcagaagtttcatgttgctgtgtctacaaatcttctgtacatacatgctttttatatatcctggaatcctctccccctaattcccacctgctgcatctctacctgctaagtccttcttatcttttaggtgtcagtgtagtctttactttttgggtctcttgtatgcttttgtaatctctggagctacttctgttacagtatgtatcacacactggacaggaatgatatttgcctgttttctggtctctcttactaggcctttggtctaggaattacagaaaccttatctgtcttgtttacttttgtttccccagggtccagcacatgtgtagcgatactacgcccggcggagtatcgcactccgaggtcaactccatgtcaaaggtgagggactcaaactgccctcctgctgagggttcagcaccttcaccattatttccaaactgcatcaatgaatctaaagtgcggggggacatcggcaggtcaatggtattgctgcaggtcgttggtgtcacacagataaacttggtcttcaggtattctcagccggg

SEQ ID NO: 251621 - DNA, 705 bp, Homo sapiens
  misc_feature (84)..(84): n is a, c, g, or t
tggtcctgataccaaagcttggcagagacacaacaaaaaaagagaattttagaccaatatccctgatgaacactgatgcaaaantcctcaataaaatactggcaaactgaatccagcagcacatcaaaaagcgtatccaccatgatcaagtgggcttcatccctgggatgcaagtctggttcaacatacacaaatcaataaacataatccatcagtgagagagaaccaatggcaaaaactacatgattatctctacctgctaagtccttcttatcttttaggtgtcagtgtagtctttactttttgggtctcttgtatgcttttgtaatctctggagctacttctgttacagtatgtatcacacactggacaggaatgatatttgcctgttttctggtctctcttactaggcctttggtctaggaattacagaaaccttatctgtcttgtttacttttgtttccccagggtccagcacatgtgtagcgatactacgcccggcggagtatcgcactccgaggtcaactccatgtcaaaggtgagggactcaaactgccctcctgctgagggttcagcaccttcaccattatttccaaactgcatcaatgaatctaaagtgcggggggacatcggcaggtcaatggtattgctgcaggtcgttggtgtcacacagataaacttggtcttcaggtattctcagccggg

SEQ ID NO: 251622 - DNA, 361 bp, Homo sapiens
tggcccttcccaacaccttgattttggacttctagcctcaaaattgggaggtccttaaaattggagaatctttcccagctttggtcaaagagagagatgtgactgtgggagaatgattagagatgcaacattgctggtctgaagatggaggacgggtccaggagaccaggaatgtgcacagcctctagaagctgaaaaaggcaaggaaattaacttcctcctagtatctccagaaaataatgcagtgactttagcccagtgagatccatgttggcattctaacctatagaattgtaagatgattgttttaagccactaatctgcagtaatttgtaacagcaacaattgaaaactaattgta

SEQ ID NO: 251623 - DNA, 497 bp, Homo sapiens
tctcattgtcgccctgccttctcagcttgaatcctaagttactggaatgcagagtttcacaagctagccccctgcccactctgggcctggcccttgtttggctctcaagtggggctacgtaaccaaaggaggtgacagcatgctacttggtcaggctgttacctctacatttctgaaatgtatggtttagggtttgtggttaagaaatacattatagttcacagcagtatgctatgatgtaggggctgggtttttgccaaattgcagtatatacaaatggagtatctcctctctactgtgtagagttccaaatagtacttcatttattgcgtagatatttcactgattcgtagaaaatgtaggattttccatttgccacagataggcactattcaccatagataatcaaatttctatgacaattgtcatacagtttatagtatttcatctaatacgctatttattgtaagaaataccattattacatgtactacaaa

SEQ ID NO: 251624 - DNA, 791 bp, Homo sapiens
cattgctttaattttaatgtttttactctaatttggacatctttttttttttagacagacgattgctctgtctcccaggctggagtgcagtggtgtgatctcggctccctgcagcctccacctcccaggttcaagcaattctctgcctcagcctcctgaggagctgggattacaggcgcctgccaccatgcctggccaatttttgtatttttagtagagatggagtttcaccatcttggccaggcaggtgttgaactcctgacctcatgatccacctgccttggcctcccaaagtgctgggattacagacatgagccaccgcgcccggccgacatcttcttattaaatttttattaaattaaatcttactaaattttattaaatataaaatcttttatcattagttttcaaatgtacaacaatgatttatttttcctgttttggccgtttcagaatacttgtagttttcctgaaaatttatgacttcttaaatattctctttcgacgtgtgcctgccccacctccttccccgcagctaattcctatacctctttggagaagtagcttagggatgcaggtggagcttggatcagtctacctgttagtcacatgctttacttgcatcccactattagctgttcatttatagaaaggggatggttgcagagtctgggcagggatgggtcagctgtggcactgtggtcctggagagtcataccctactcttggacaaaaatgtttctcttagcagagaactggagtgagcatattttttttactctgctttctct

SEQ ID NO: 251625 - DNA, 892 bp, Homo sapiens
acttgagatttagttttaactttagatataaatatctgagaatttgagtaccagttaacccattcaaaagataactagatttcaactgtgacccaaggaaaggttacataaacttactctctcctcccctcctcccgcttctttttttcttctctcttcctcttcctcccccttctctttttcttgtcctctgactcctcctcctccccgctctttcttgcctgaagatcaagggcttcgctagtgatgtgctcacccttaaccaacatgtacattatgaatctcctgaaagggtgtcgggaacgtgggaaacagctccctctgtccggtgaggactgaagaagtagtatttatacttatgtttttaaaagatgcagaaaaacatgctcctgcttttttccagagcaaagacataaagcaatgggtgtcatagaaacagtactggaatcagagacagattcctacttcgggctctatcacagactagctatgtggcatcttgggctagtatgggatgttcagtgctttatctttatctataactctgcttcattcgttcattcatataaaaaacatatgtggcgaacctagactgttctaggtgctatgctggcttctggggaatgtgaaggtaaaaacatcctaccttgatagagcaaagagtggatgggggggagggctcccacagggtcgataaatccagagataagcaaatttactatgatagtgggatgatatatatgctatgagacaggaggacgtgagtatctacaaaaacaaggaggagtgtctcctaacagggactggagaaccaaggttgcagtcagggaagtttttataagggaagagatgttggatggacaacatagaatgagactctgtttcaaaaaac

SEQ ID NO: 251626 - DNA, 435 bp, Homo sapiens
gacatttttcccctagcttttaacaacatgttcaaatattctcaatgcacagttgttaatgagtaattgccgttaaaatatatttcataagaagtctcaatctcaaactctccatctctcaatcctcctcctcctcctctttcttgctttctcttttccctctctctttctctcctccccttctctctttctgtctttcaaatgttcttttggctttaacattctattaattatattttttctagattgaatactgtgaatgctaagttttattaatctggtcatcttattttgattttaaaaattaggatgctagttgcattctgaattactgtttctggtttgaaacatggagaaaaacattttaataattcatatttcatgttggatggtttctaataataaatatctcaaaagtgacttaacataaaaaga

SEQ ID NO: 251627 - DNA, 400 bp, Homo sapiens
gggctgcctgatgacagagatggatgagacccagtcctgtgccttagctctgaatcttggagggaaacctgccaaactagccatgtaacctggggaagtcagctcacctttctacacctcggtttcttcttctgtaacatgaggatggtgacatccacctagactgttaccgcctagctctgctccactgcctggtgctggtttccattcttcccacctctcagacttcccctttactgagaacagctacttggatgctcaccgatggcagggatgatgaagaagatcataatgagctcgaacactggggcctcctgagacctcccgcctcctctctaaactctggcccccctcctcccacacactcccctcccctccaacctgatgctgaaattgctga

SEQ ID NO: 251628 - DNA, 704 bp, Homo sapiens
ctcctacactgctaccacttgagtagaatcctttaatcttttctatcctgaacaacagcaaatgcctctttatgggacttcttgctgccttcagcagctagactaataatgaaaagctttaagtgagatcatttaaatcctctgccaaatattctccaacaccttactaactcactgaaagtaggaaacaatcttctttccacaggcttcaaggccgcacaggatctgataccaccgacctgtctgattttccctccttttcttaccccttggttcactccccagctactttgcctctctgctactctttacggcatcaagtttaaaccttttccagaatcttttgcctaaaacgctcttctccagatatacactggcttcctggcttccttcaagtctgtacttaaatgttatccctcagagagtccattcctgaccaccctaaattaaatagacacatttctccttcatttttgttcatgtcacttgtaaattcctgaaatttcaccatatcctcgtttgtataagtctgttatccctatcatataaccagatgtagaaatgtacatactttgagaccatactctttattttgtatcattgctgtattaccagctcctaagaaggtacctggcattcaataagtacttgttgaataaatgactgaatcaataaattgatggcaacccagtcaaataataatt

SEQ ID NO: 251629 - DNA, 372 bp, Homo sapiens
ggtggagagtagcccttgatgagctgttgaaggtctacaaagcacgaatttaacgaccctttcttaaaaagtaaaaaacaaggctttccacgtatagatattcaaagcactcccccgcccatagcctccagatgcaagccatgaggactgagtacaatgcaagtaggaaggaacacgtgtgagggacagtggggccttcgtccttaagactgaaaaaaaatcacagaaatagaacaaaagtacagcccggctgggcggagtggctcaagcctgtagtcccagctactcggaaggctacggtggtaggattgctcttgagcccaggagttcgagaccagcttggataacatagaaaaccccatctctcctaaa

SEQ ID NO: 251630 - DNA, 448 bp, Homo sapiens
caaccccacctgatgctgggagaagaccactcatcaaaatcagtgactaagaaatgatacaagtgtagttactttttcttcctaaaagacatttcctgagttcctaaaattaatcaagtattccttattagtatgtttttttttttcagtttagacgtggcttctctttctctcaacaaacacatatttggaatcagatgtccacatatctaattctattgtattcattttggctgataaatgtatagagcataattttagaggtgggctgcacagaccatttattttatgttattacaccttacattctagatcaaagtagatctttaaatattttctatcattaaatgcttttacatgctgtaagtaaaataatacttaatggtcatttgtggggaaaaaataagaaagtaattaccaaaaataataataaatgcatagacttttg

SEQ ID NO: 251631 - DNA, 527 bp, Homo sapiens
gaagaactgctgaaattgagggcttggagaagatacagtaattatgtaaggtcaaatagttgtttagttccaaagcccatgctcattctgttgcaccaggaagtgacttggttaggaatgtgcaccaagatggatctgaaggcagatctgtatcagacagaaggactggggaagggaaagcagtaggtaaggtgctgtaatagtttaggtagaattctaggcaggaactaatacaaactgcattcagggtagaggaagtgggatgtgtaaggtattatggtagcatcagaggacttagcaatcgtctagatatggggactggatgctggggaagaatcagttgccaagtgttggtgactgggatgatgttgctccactaacaggtaaccaagaggaggggctttgggatggagaatgggcagagctgatttttggcttgaatacattacagttgagagatctatgagatattttgttggagatacccagcagctagctggaaaagtgaaacaggaacttgttaaaaa

SEQ ID NO: 251632 - DNA, 412 bp, Homo sapiens
ggttgtattaatagacatacagtagccataataaagaagataaacgttcccccatcttctataacctaaatgagaaaggaattggtgatggttagcctggagaaagaagggattggtggaagcacggtgacattagaacggcatcataaacatatctgtagcatgggacaactgacctgcctagaagacgactgggccaggagcatgacataatttcaagtcagttgaagaaaatagaaaaggaactgctgagtagacgtactggtccaagaacagtgaaagacatgtaaagcagatgtaaccccaaacaacagctgaagaagagttgcccaactccgccagcctagatcaaactgcagtcaaatgtacacccttgagcatgggaataaattcatgtttttgtaaatcaaag

SEQ ID NO: 251633 - DNA, 406 bp, Homo sapiens
tacagatttacagtgaagaagaagaatcaagtgtacatcccaatctgaactactgcattcaaagaaaaattaccactgctagccactctacaagaatagcacaggattggtggaagcacggtgacattagaacggcatcataaacatatctgtagcatgggacaactgacctgcctagaagacgactgggccaggagcatgacataatttcaagtcagttgaagaaaatagaaaaggaactgctgagtagacgtactggtccaagaacagtgaaagacatgtaaagcagatgtaaccccaaacaacagctgaagaagagttgcccaactccgccagcctagatcaaactgcagtcaaatgtacacccttgagcatgggaataaattcatgtttttgtaaatcaaag

SEQ ID NO: 251634 - DNA, 232 bp, Homo sapiens
tacagatttacagtgaagaagaagaatcaagtgtacatcccaatctgaactactgcattcaaagaaaaattaccactgctagccactctacaagaatagcacaagaacaagaaagtcacctaacttgaagacttggtgaccaaaactcatccagcaaagataaataacaaagaacaatattgctgattaatctcttcctaggatgtacaaagagaaaacacaaggaaaaaca

SEQ ID NO: 251635 - DNA, 565 bp, Homo sapiens
cttccttgcttgctgcttaggttatcacctggagcggaattacaggatgttttgttgtattgcttcctgcacttctgcaggcctttcactcttctgagcctgatagtgcctgctagagttggtggtaggaggaagagtggatttcttcctgagggcacctgctttctcctccaaggcaggaggactgaggggagggctgtgagactgtgaatgtgtgaatgaggggcccaccggctatcaggctgcagtgagctaatggtgacagttttctaggagaggggccagaggagaattgtttgctttaccctgtttttcactactggattttgacattttcttctaatgctgacccctcatccagctctttggcatgctgggttagtagctgccttttcctcagtgagtccctggggaaggagagggcttcttgtggctatctggaacccagcaggttcccgcacattctgagccctcgcccccagggagcccacttagtggctctgtgacccatgaagagcccaggagcccccagatgtggcttgctcaggacgggagtggcggccgc

SEQ ID NO: 251636 - DNA, 613 bp, Homo sapiens
tggggagcttgccaagaattcctcgggagcacaggactgcaggcacctcttgccaaccacaatacccctctccagctgtgtcacagacctccccctgcagatgcccgtgaatttgcacaaaacttgccgctgtttgagacggtgtgactgagcaatgttcttccatactaaatcttccctaaagctcttaaatttaaatctgtatagttggagaaggggtctgaatgaagcacgatatcagttctttatctggtcaactggatggatgctgagtaatgaacttgtgatatgttttattgtatataaagttatttaataatttatttgtaatagtttcatatttcttaattataatttctattttgtgttctgatgttaatagatatttgactattttagaaaaaagttttgcaatgtataaaataattatactttttgaaattttatatttatttcaatttttgataaatgttcaagtttttttgaatgccagtgaattttatttttaattctatgtaacattactgtcaaatatacaagttctaaagaaaaatgcaagctctaaaatgctccttaattacatcataattagacattttgctgaaatgaaagc

SEQ ID NO: 251637 - DNA, 129 bp, Homo sapiens
tgcagaatcctcattctcctcatccacgtgaccttctctggcattcgggcattggctgtacccttccgcttacctatgcccatatgcctgcccttccggcaggccaaggtgtttttccggcatcaagcg

SEQ ID NO: 251638 - DNA, 502 bp, Homo sapiens
tgagaaagtaatatgttgagagaggagtctttgtcctgccagatgttagaacattacacagctactgtaataaaaatatatagcattgctatgagaaagaatacataagagaaatggaatagacattccagaaatagatgcaagcatatttgggaacttaacacaggcttatctaatcttagggaaagccgccttcataaaaacagcaaactcaggaacctaaggaaaaaatgttcggattgaactgagtttatgtatatataaatactatatgtatataaaatatatatatagtattatgagcaaagttttttttaaagcctgagaaaacaaacttgggaaaaaatatttcagcgcatatccctaatgtacaaagagcgaataaagtgacaagtaatagaaaaatggacaaaaaattaatatatatcaagcaatccacagaaaaagaagtatcaatggcccaaaacatggaaagtatccacctccacctttcgctatagat

SEQ ID NO: 251639 - DNA, 235 bp, Homo sapiens
acgcacaccaagaaggctgactcaggtcacacacttagggtgagtgctggggtttgaatccagcctctagttcagcatttggtctcctctatgatgacacataaaccactacccttgcattgcttcaaatccatccagatgcagttcatagttcttacaaagaggaccagaccagctttctactgaagaagcttaacttttgtttttaagagatcacataatcttctctcttttt

SEQ ID NO: 251640 - DNA, 415 bp, Homo sapiens
acaagactggatgtctggcagtgaggcctgggaagctgtaagttgtaaaagccccatctcgggtggttctgatgaagtggtgggcttgggaatcctggggacaggagttgaagatgtgaagacatgcagcccaatggacagatagcccccagcggggagatcagagcttcgagatcagagcgtcaggtctgagtgaaagctgataaattgtttcttcacaagtgtgcttagaccccagcccaattccccttacgtgtttccccagaacacagatctgtggggttgggattcttccccaggcaggttgtggcagcaggcatcaatgtcagctcactatgaattttcctgagtcttgcaaaaatgaggaatgtgtagtaatgagcattttataaagcttaagtttattctctataaa

SEQ ID NO: 251641 - DNA, 440 bp, Homo sapiens
ggttttttttttaaatcatgggctattcaacatacaataatcaagctattttacaaatctgtgacctcagtcttaacagttttccaaggaatatactgttctttactgagtttttttttcatgacatctggaatacatttagatctttatgatattttgtgctcatttcttatcttgccagctgctaaggagcagaaattatcaaagaagatcaccgaactgacagacaactgtatttccacactcctgccctttgaaatctgccttctagtatgtgaggcaaccttcatcagcatgtagtagcatgtcggtgctggctagttactttccaagagggagataaacacctcaaaataagcaatgaaattgcttcaagtcagttttaaaatcgttagttttaataaaactaaaatgagaaagtgttttcacattaactgctg

SEQ ID NO: 251642 - DNA, 497 bp, Homo sapiens
cccagtccttgtccccatgccctagcttgcccctctgtgagtagggcaggggctggcatttctgaggatgacctcggtgacctcagcaagctgctccacccctagggtggctccattctcaacgtaatgggttagacctcgctggcacctcagccagctggagtgggtggcactaacctcccccagacaaataactgtccacagggtacctgccttacgagtcactccagggccactggttagtcactgacactgaagccactgcatcagccccctgatgaggacagggaagttgggcagagatggggacatacagggcccaagccacagccagccaggaggggttacactagggctcccccactttccctctgggcagagccctgggctgggggtgggtgtcactcctctgggcagttcctgattcctcactggtcaaatgttcagccacacgctcaggccctggggtgcctggcccagttccaagtgtgtgccgg

SEQ ID NO: 251643 - DNA, 301 bp, Homo sapiens
gagctggtgcaagattactgtggttcccaggaacctgtccaagacctccaaaccatctacactaaagaagataagcccaagaaggcagctaagcattggccctgtttctgttcctagcttctaactgcagattttactttggtgttggaatactttttcctttgttattcagtttttatcaggacctgcctcattacaggatcacacactttttaatgaatctgggttcatctatatcctgtttctttccttcttcatttcataaatgtttgcattaatacatattcattggacacttact

SEQ ID NO: 251644 - DNA, 445 bp, Homo sapiens
agggattccctggggcttcactatccctggggtgggggcaatggagacctcacagggcaagcactctccatcctgggggtcagtgggctggcacatccctgaggctcaagcgtggaggagaaacggacagaaacctgggcccggaggccttttgcccctgtgggtcctgagcaccgaattcggcttttgaggacagagtctggcgtgatttcagggagagaaaaacccctccccaaaacggcaggagtgctgcctaataaagccagctgctggaccagggaaaacagccctttgaaaaaaaaaagcctttcattagaaaaataatgcatttcatccaaataaggtaaaaatattcggaatggggcagaagtaagcagcaggcagcgcctgtcaggccctttctggaagggagaagattattaaactcaattacaatgtattttta

SEQ ID NO: 251645 - DNA, 447 bp, Homo sapiens
acagcacattgaaagcttctgctcttatgtctgcttctgttttgttgaacaaagtaagatacctggccaagctcaaagtcaatggaataggaaagtataattgtcctccaggggaagaaggaagggaattaatattttgtaaaaagttgaccagatcagctgggcgcggtggctcatgcctgtaatcccagcactttgggaggctgaggagggcaaatcatgaggtaaggagatcgagaccatcctggccaacatggtgaaaccccgtctattctaaaactacaaaaattagctgagcattgtggctgcgtgcctgtaatcccagctactcagtaggctgaggcaggagaatcgcttgaaccagagtgtcagaggttgcagtgagccaagatcgtgccactgcactccagcctggcaacagagcaagactctgtctcaaaaaaaaaa

SEQ ID NO: 251646 - DNA, 724 bp, Homo sapiens
ctgaacaggcagaaaagctctatgcagctatccagacccaagaggatccgacagctctggaacttgtaatatttgcagcatgtcttgccctcttaatgtctaagaagtcaaaaaaggacacgtatgcctagaaaacgtgaataattatcatctatcaaatttttaccatgtgccaagcatagtcatatttggctaacgaaaacaacaaaatcaaccgtgacaaggttttattagtaatgaaactgaggcttctggaggatctgtaactgttgcaaatttccagtggctagttcagggacagtgccggggcttgaacccctgtctctgtgtctcccagctcataaggtgtgctaccaagtcacccatgagtagcaattaggcgacttctaacatgtccagctttaaacctgtgacctcaaggcaaatgacttccacatctcattagcactccccagagccttccagccccctgtaggagagggaggttaatcagccacgcgctgaatctgcttataaggctgtttcatgtatgatttttatatcttggctcctaataatggccccgttgtaaatgattgtctcactatgatatacgggttccttaccttctaggaactgatttaaaaggaagccctagacttcttgtgcctgtagagtttattcatatcactctttgcttgctcagcagttgaaatgggatggaggaaagccccctaactccaaa

SEQ ID NO: 251647 - DNA, 549 bp, Homo sapiens
gtttcactatgttggccaggctggtctggaactcaagccagccacctgcctcggcctcctaaagtgtgggattacaggcgtgagccaccgtgcctggcctaaagcccttatcaaagtgtatactgtactgtacaaattcaggtattccattctttcatttattcaaaaaatattttaattcctactgttaacgtgtgcagtaaaagaagttcaaaaatgaaaaaaaaaaaaaaaaaaaaaaaaaaaaaaaaaaagataaaaaaaaaaaaatgaaaaatacgtgtctgacgttttacagcctatgaaagggggagaccttggcttaccgacagcttgtccctttgtacggattgacactttgcacaatgggcatgtttacataatggcccctacgttaggcccttcaaacttttttgggctcagtctgtgaaagggcacccatgtatcctccctttaatgtttaattcgcgtcgaaaacgtgtttaaattagtttatatcttaccatttaccgtattctgggacctccttttttccttgtggccctgttt

SEQ ID NO: 251648 - DNA, 400 bp, Homo sapiens
aatataatatcctgttcctggcctcttggagtggagcagatttgccaataacgtgaacactctaccatttttttttctttaagtacttaaaggttttggggccacctaggttccattaatgtattaccactcatattaaatgattatagtgtcaaaaatggtctggaaatttgtatagaccttcaaaatgctgtgttacatccacggtttgttctagaggttctctccttttctgggtaatattaacaaatgcttaagattcacattttggtaaagagatccatcagtgataaatgcccctgattttgaacccagaccaccctgctgttgaaattataagcagactttgtctccttccctaatcaatactgctgccttaaatttcccagtagccacttta

SEQ ID NO: 251649 - DNA, 352 bp, Homo sapiens
aataaatcttagccattacaaccctaagctgatcccatgagtccttctagcaaatctccaaacatggaggcagtcttgtggatccctgacacaaatatagtgttgtgatctcttaaggtttatccttcctcttaaactataaagagctggctgggcacagtggctcacgcttgtaatgccagcactttgggaggccgaggcgggtggatcacgaggtcaaaagattgagaccatcctagccaacatggcgaaaccccgtctctactaaaactacaaaaattagcagggcgtggtggcacacatctgtagtcccagctactcgggaggctgaggcaggagagtcgcttgaacc

SEQ ID NO: 251650 - DNA, 380 bp, Homo sapiens
gggtcctgtcgggggcggtgctgcccctctggagcgcgcttccgcaatataaaaagaaaatcacagacaggtgcttccaccactctgagtgctacagtggctgctgcctcatggacttggactccggtggagccttctgtgcccccagggccagaataaccatgatctgcttgccccagaccaagggagctaccaacatcatctgcccttgccggatgggcttgacgtgcatatccaaggacttgatgtgttcccgccggtgccatatgatttagaggaagatgcaggctggtcactgctcccttggggccataggccctggttgccaccaacttgctccaaatccagctcctgagacattaaagtcacttcctgtcaaa

SEQ ID NO: 251651 - DNA, 359 bp, Homo sapiens
gggtcctgtcgggggcggtgctgcccctctggagcgcgcttccgcaatataaaaaggtgagccggggagcgcgcccagccggccgcgaccgcaggagagggtggccccgccgccggggcactggagcccgaaggcgccgggcagcctgaaagggagagaccaagggagctaccaacatcatctgcccttgccggatgggcttgacgtgcatatccaaggacttgatgtgttcccgccggtgccatatgatttagaggaagatgcaggctggtcactgctcccttggggccataggccctggttgccaccaacttgctccaaatccagctcctgagacattaaagtcacttcctgtcaaa

SEQ ID NO: 251652 - DNA, 773 bp, Homo sapiens
tgtggtgagactatgaaaaatgttagagacctagtaagagaagcagattcacatttctgtcttcttcttcaagccaaacagtcatagagtggagtgggcagaatggaactcacttttgaaagcctagtgctttgtccaatcttactgcaagccagacaggaaggttatagaaaatgtttctggatcagtcttctctgagtcatatgaaattgtggtttcagccaagatgacattaggaattagagacatgggacaaaaactttaagattgtaaaaaaattttgactctagtaggaaacatgggtagaattgtaatgacacttgattgaattttaaaagatgcctgtataagatcttaaaattaggaaaaaaattatggcctaagcaattaaaggcataggaggcatctttttgggatgatggaaatatcctctctcctgattgtgatagtagttacatgaatattcatttaacaaaaaccataaattatagacttagaaaacagtaaatgttactgtatgtgacaccttaataaacgtgattataaaaataaatcctaagcatctaaaaaaaaaaaaaaaaagaagaagaagtgaaccagaaccacaccattctattttggagacacttcaaaagaaatgacctcattcttaattttgtttaaagaagaatataacatgatttgaatatatttagctaggatattttagtgcctgctagcacttgaagccagagttcactgtgagcattctgactatgaagtgagaagctaag

SEQ ID NO: 251653 - DNA, 250 bp, Homo sapiens
gaaaaataggagcctctgcatcttcactggaaaaccagatgatggcacttcatgtaggggtgaacaatagcgtaaggacatttcagaattctgatttgatcctgtatgccctatcattctaaacaaatgagacctgttctcttcaaatttcttattatttggtcttcccaccccaccccaagttacagccacagtgattagtttggtgtttgttcttccagattatctaataaatatactaatacgtatc

SEQ ID NO: 251654 - DNA, 893 bp, Homo sapiens
  misc_feature (330)..(330): n is a, c, g, or t
  misc_feature (351)..(351): n is a, c, g, or t
  misc_feature (401)..(401): n is a, c, g, or t
  misc_feature (403)..(403): n is a, c, g, or t
  misc_feature (422)..(422): n is a, c, g, or t
  misc_feature (434)..(434): n is a, c, g, or t
  misc_feature (444)..(444): n is a, c, g, or t
  misc_feature (490)..(490): n is a, c, g, or t
  misc_feature (514)..(514): n is a, c, g, or t
  misc_feature (527)..(527): n is a, c, g, or t
  misc_feature (529)..(529): n is a, c, g, or t
  misc_feature (544)..(544): n is a, c, g, or t
  misc_feature (548)..(548): n is a, c, g, or t
  misc_feature (551)..(551): n is a, c, g, or t
  misc_feature (698)..(698): n is a, c, g, or t
aaaaaaaaggtcacgtggtatcattaagagaacactaaatacagagacattttacaaataaaaaatattatattgctcatgttttaaaagtctaacatttgaacttttatataaactattgaatttgttgtagactagttttctttttttggctagagaaacaaagctatggactgcatcaggaaattatttcttcattaatttcaaaaacaaaagcaagaaaaatggctaatgtcaaataattgaggttaaaattctaaaaatgggttgtctctcgtgccgaattcggcacgagagtcaacagtaagttcttttaatgaatatcagttntaacttatagactggcatggnctttaaaaatatctgtacaatatactggactgtgttgcacagacactacntngctttctctttgagcatgntgcatacaaccntggtgggatngatgggtctgtaaatgaaggatattaaaccttgtactggtgtcacnaacattatggtcatgggaccattncacaaaatggggnancttgtgtgcctaaangaanatntggactagaaaggggcacttggggactgcgtaagttgtaattgaccaaagtaaaccttaagggtgggggggaatcactctgttccattaaggagatcaaagcttttccaaaattattgtgatataacctgtgggggaaacctataangcctggacattgaaaaatgagatcttttatatggagcgcttttgtgggaacggtcttacccttataataaagcgtttatggggggtggcggttattaaaagctcttatggaggggcgctttttttgttctaagggtgttcattttgtaaaaaaaacctaaaaagagtgggcgttaaaaaaattcatatctcaaaa

SEQ ID NO: 251655 - DNA, 469 bp, Homo sapiens
agctcctgtggttgtgacatgggtaagtactatttgcaccttaggcttggggaagttaaatagcgggatcccttagccagtgaggggcagagctgagactcaaaccagtgcttctgattttgtgcttcatgctctctcagctgtgtcgtgtgggatctagtgagtgtgaatctcagacctggacagcagacagctcagtttggtgttcccgcaaaagcacgggcactggaactggttctgatcctggttctgccccatcctattttatctctctgagccttactttctttaccataaagttgagataataataatgcctactttgaagtgttattataaggattaaatgaaaaatgagtaaattgcctgatacataggaagcacttggtggatggttgtcctttcctttgccacccttttcctttatcccccacatttagatactaagatggatttcccttacgggtta

SEQ ID NO: 251656 - DNA, 470 bp, Homo sapiens
tttacaatttcagagtattccactatctggatgtatcatgctccttggcttgtgtttgttagtcactaaagaaagcaatatgcttgtcgcacttctagggctggcaagggcctcttccctggtttactctcccaaaagcagattacaacaggaatggagtatggaagatgtggtaaagatgaaattggctatgtgttgatgattgttaatgttaatattaatacatgggagttatgttaacttagtctctctgcctgtgtgttttgaaatttccataataagagtttttgaaaagtaagaccacgtatacaaatgcatcttgtagaggctagaatgctgcagatgaaagagagcttaactaaagtgtccaaggccaaacaagtcatagtttaattctgaggtcagcagcacagcaaaaaggtcttaagaggaaggggagcaaataatgaagataatcctaggctgtcacc

SEQ ID NO: 251657 - DNA, 467 bp, Homo sapiens
tcagtccatagcatgctctgtggcaagtaaagcctagcgagaatctacactttaccattaatcagctgcgtgatgacggtgaaggtacccaacctcccagtgcctcacttgccttatctacaaaacatgagcaacagtacttaccacataaatctgttgtaaggatcaaataagataaacgcttaaaacagtgcctgcatacagtaaacatgcaataaatatgtcattcttactgttataattatatataaatgtgtgtgtatgtgtgtgtgtgtgtgtgtgtatatatatatttatttagagacagagtctcactctgtaacccaagctagagtacagtggtgtgatcataactccaactcctgagctgaagtcatccccccacttcagcctcctgagtagcagagaccaagcgaacccccttcgaccttgccgaaggggagtccgaactagtctcaggcttcaac

SEQ ID NO: 251658 - DNA, 478 bp, Homo sapiens
gtcagttcattacctgaagaatgtatccagaaaatagtgccattattttatttcctccaaatacacacctttattaaacaaagataaagctttcattttaaaaaaacacagataatagcacttaggttaatttataattcaatagtacagaaagttgggaaatttctgatggaattgtcaaatacaataaatatttgtttaatttgttttatagcttgagcctaatgtatgcagtcacagagttaccagaaaaagtaactgaaatctttaaatagctaatttattatcatatattcccccaaaagctaaaagtgagtttagatttatgagttccacaaatttaatttaaaattttttgagttttaaaaatgtttaaaatattttggcagtgggttatttgtatgtttgtgatctgctaagtgatttcaatgttaattctttattaatgctaagaacattaaactatttcttccacttc

SEQ ID NO: 251659 - DNA, 495 bp, Homo sapiens
  misc_feature (45)..(45): n is a, c, g, or t
  misc_feature (53)..(53): n is a, c, g, or t
tgcactcagccagggcgacagagcaagactgcctcaaaacagaanagaaaacnaaggctaattctcaggctctacaccgaacctactggatcagaatccctggagctagggaccagaatctgtttattggtgattctgttgcatgcttttgcactattctaaaacctatgtgtgtgtgtgcgtgtgtgtgtgtgtatgtgtagctgggctgtcccagcgctatccacagggaagctcctataaagggctgcatctctggactcacagctatcagaccattgagatgtggaagctgttgctgtgggttggtgagtgtggcaggtcccagcagtgtcactcagtccaggaagtgccaggctttatgagttcgtcatctctctggtgcctgagagagcagcctgagactcagggaagcctagattaggtagagatgggatgggccatagttaatggtcagaggtcagagggacccagggagaagtggtggacagcagt

SEQ ID NO: 251660 - DNA, 734 bp, Homo sapiens
ctgagctgtcatctccattttacaagcatggaaactgacctcacagaggcaggtaatttgtgcaagattacaaaacttctaagtggtgacactgagattcaaactttgaattcaaaccttggattcaaagcctaaatccaaagctatggtttaaactttttttaaaaattacgctgcttcccagccaataatcttttaataatagaattgctgctaccatatggggtttctcccccatattcagtccctgtggtactgaataccaggaagaccctcttcctggtattcagtgccaacctggtgctgttgctttgttggagagggaggccaggtcgttctggggtcactgtgactctcataaattactgatcctggcactggggtgtgtgtgtgtgtgtgtgtgtgtgtgtgtgtgtgtgcgtgtgtgtgtgtgtatgtgtagctgggctgtcccagcgctatccacagggaagctcctataaagggctgcatctctggactcacagctatcagaccattgagatgtggaagctgttgctgtgggttggtgagtgtggcaggtcccagcagtgtcactcagtccaggaagtgccaggctttatgagttcgtcatctctctggtgcctgagagagcagcctgagactcagggaagcctagattaggtagagatgggatgggccatagttaatggtcagaggtcagagggacccagggagaagtggtggacagcagt

SEQ ID NO: 251661 - DNA, 333 bp, Homo sapiens
  misc_feature (45)..(45): n is a, c, g, or t
tgaaactccacgcacctcaggtgtgtgtccccgttctctcctccntgcggtccttggtaaccactaagctgcttcctgtctctatggccctgccgctgtggacatctcttgtcaatggaatcactcagggctcgtccatgccgcagctccttttttttttcttttctttttttttttttttttttttttttgagatggagtcttgctctgtcgcccaggctggagtgcagtggcgcgatctcggctcactgcaacctccacctcctgggttcatgccattctcctgcctcagcctcctgaatagctgggactacaggcttccaccaccacgcc

SEQ ID NO: 251662 - DNA, 441 bp, Homo sapiens
cacaaaggtgcggatgaagaccgttcgctgggcttcactagtacaaagacaggctgacagtgcaaagacgaagaggaacggtcccagccatcagggaactcagcagcttggaagatactaaacagccactcctccaggatgtaagttccctcattacaaagctgccatattaagaaacatctttataaattaaaggaagcagggttggcaggattgaagggtcaatgcaagcactgaaacacagtagcaaggaataggtagaggcagaaactgtgacgtggtaatcatcttctacccacatgtgctgtccccatacctcccatgacacactctcccctcagtcaccactttccctggtctctatgctctcaggtaccctcttcgtagtccctttttcttatgtttaaatgaggagtaacgtgacactagacatctgtactt

SEQ ID NO: 251663 - DNA, 444 bp, Homo sapiens
ggataaattccaaagccagagttccctggatgctgctccataattttgccatttggggtcaagagcggcatttccagcaggctgttcaacaaaggggcaggctgccttgggtggcagtgagcctcccatgcccggaggtgtgcaagacaattggggcggcaatccattgatctgacaactatttgttgggtctcacagtgtaccaggcagggttaggggctggggaagctcaagactggtgactccctggctcatgctgtgaggaccgcactccatgcagccacggctctgcatgtctggatgaatagtgcctgggcaaggactatggtatcccatgcttcaggaacctcagctccatcagcctctggctctgtcttcccctggtgaccttgcaattcagagaggccattgcgtgagatatgattgttccattcaatcctgact

SEQ ID NO: 251664 - DNA, 350 bp, Homo sapiens
ggaaaaatattaaatttagaaaatgatggatgcatcatattgatttttactttgaaaaaaatggcagtgtaacaataatagcacttgtttcttgcttaactaggtttggaattatatttatttgtgtggcttttaagtaattccagtatggaattccacaagggtcaagatcacattttctagaagagtacattgcacctaataggcattcagtaaaaactgttaaaggaatgaatgaaatgagtttgcaaatatatttccatcttagttatcgttttctcaggactcttctgattttagagtcagaggaggcagtgctggactggctttgggccagcactaaaaaacaa

SEQ ID NO: 251665 - DNA, 501 bp, Homo sapiens
tcttccagaaaggatttagggagcttaggtaatgtggaggtctgaaggtgtagatactcatgaaagcctcagattaatatctagaacatataatgtgtccagatagttttcaattatcaatgcattaatctaagcttggaaaggacttttaaactgcaatgaaacctcaactagtttcaaacctgcattttttagtaagctattttgtcatttggagacccacacaaaaaacctattgttcctttaaaaaggagagagagaaaaaaagaaaaacaacctgctggtgttgctttgttcatcttatcaccttatcattcagcagcctattcaggatcaaatgtgggaaagtctgtgtgtgagattaagccctatactcagcacaggaatttcttggataaatgtctttcttaaatggatagctatgtaaaaaacagaagagaaactctattattacaatgcagttgggtttttttgtttggtatgtttcaaatcaaaaaaaaa

SEQ ID NO: 251666 - DNA, 247 bp, Homo sapiens
agatattaaagcattaatcacgtgtaactgtctgtaaacagcggttttgtagttttttgcttttagtaaataggctcccccgtgtgatcaatactaaactgacagcaaaagagcagtccattcttattagaccatgcttggggagataagttgctgctggctcatgaaggacacattcttcttgatgtagggaggtggaatgaggatttaggcgctgtcttcctcccctttggggtagggtaccttg

SEQ ID NO: 251667 - DNA, 789 bp, Homo sapiens
aacggtggccgcctgttgctcgcaggcatccagtgctttttggtgttggggtcaatctggaagacctgtgctccggtggtgaagatgggctgttcttccatccccggcactgctccggcggccactccgagccggcctctcacgctcactgtccgcccgcttggcgtctgctaccggcgcggcacgtgcggaggcccctgcgcgcctggctcagcccaggctctgctccattccaccaggcgcgggcaggcaggggctctcgaaaaatcattctaagagataaattaaaagagtaatctgtaataaggggaataatctgtaataagcattccaactcagaaaaaaactgaatatatgtaatacatataaactcctgagaagaaaggtcgaagcacaagaagggtctcatgtgtagcagcctgttgagaaaaatgaagagccctgtaatcctgaggagggggcttaatccaaagagagatgctccaggtcctgtgcacatgaaagatttgcctgcttctgcccatccaggagcttacttcctgaagcctttgaagccttcaggaggcaggaggctgaatgagtttctcaggacaatctaatcatatcctgacagggagaaaaaaatcatgacctaggacggattaaaaaatgtataattaaaatttcattgaaaattgagaaattttgactatgtatttatagagtgcaaagctatgttatgatttatgaatgcaatatggaataactgaatctagctaattgacatatatatcaactcaaatcctcaaa

SEQ ID NO: 251668 - DNA, 684 bp, Homo sapiens
caggcatgagttgtagtgctgttggctgtgagctcagcatgaatgagttaacaatacagtccatccagaaaaaggaagaagactgccaatctgtgatgaagctatggagaagtggctacatttgtggattcctgagatgacgacccatttaacaaaaccaaccaaacatagcagacagcactgtgaagctgaaagcccaagaaacttccagtcacgtgatacaggattagaacattgttaaacccttctcagccactgctggtcagcaagcgtgtttcagaaggtgacatggagtgaaaaacatcaagttgcaggtgaggcatgttctgcagatctggaagaatttttaaaatacctgctgagtgatattttaaaagagtcctgtggaagaacaggttttcaatgctaatgaaactggtttgttatgcaaggaagttggcaaatgaacctgtacaagtggcatttcagtttataaaaatgtggccagaggctcataggaacttaaccctgtatttccactaggaacaataatttagtattaacagattcagtgtttgcaatgactttatagaacataactgtggtgaataatgagaatcagctatttcaggcataaagcctgatatttaaaatattaaataatataaagcctgatattataaataaaaaaaatcaacttcttca

SEQ ID NO: 251669 - DNA, 433 bp, Homo sapiens
tactctgtctcaaactttatatatatatatatatatatatatatagttttagtataaaggttattttaggaagctttcttctttgaagattttctcaggatcatattattcttaggttacaatgtgggtttttgttactgacttttgcctttttatctttataggaacatggtacattcatgaatcaacttcttgttcgtctttgcctgtattgttcagcctatgttcaggcacataatacttagtcaataaatattttttgaatgaataagtaaggctatatagagtaacattttactttcaaaagtctattcttttattttattttttttagacaatctcactctgttgcccagactggagtacagtgggccgggattgcgctactgcactccagcctgggcagcaagagcggaaatccgtctcaaaaaaa

SEQ ID NO: 251670 - DNA, 922 bp, Homo sapiens
gccatgttggccaggctggtctccaattcctgacctccagtgatccacccccctcagtctcccaaagtgctgggattacaggcgtgagccaccacgcccagccaatagtggaattgttgccggacaatatttatttaaaagacattattgtaaagagtaacagtgtaattctggctccttgaaatttgaggggaatgatttttctggacattcgaccagtgctttctaaatttctccactgaattctatctaatgacagatgagaggacactgaaagtaggagtagccataagtcaccagtgcaaaatgtcttttgaagtttgcatttattgattgctaccatttatgtaaagttttacagttttgacagtcatagggttcaccaatccaccatagaagagaattaagtcatgcggacacagcagggtttagaatggatgagtagaggagtgtgtgcaggctccagtccccaaagtctctaggactgtcctagaacctgcagctcatctgtcaattctgtcaactactcaggatcctctcaagaattatccccccatacccaccttttaaatttcctcaagctagtttcatttgagttttgtcacttgcaactgaatgagccctgctaatgcagatagattcaattgagaaggggaattctaggctaggagtacaaggttacaggcaaggagacaggaacatagcttgggatttcctggggcagtgagaaaactgactttaaaaaaatggaatggtttctaaaatgtttgtacaacttctctgtatggcaatggggtaggagtataaattctttcagcttcttctgagggcagctgaacaagaagtataaaaattttgaatgctgataacatttgacctagcaattccatctctagaaataaattctacagtagtaatctta

SEQ ID NO: 251671 - DNA, 446 bp, Homo sapiens
gagaagggccagccaggagtctgtgaaatggtccagttgggaaatgcctaatgcataaacacaaatcttggtgacaggtaggttagttatctgtgaactttctaaagattaaataaacaataataggattttgttaatgtgccaaagtgagtttaaaccatgaaagacacgatgcaaatatgcaagtacctttaattgggcataataaaaagtagtgaggtatggttaaaataacatttagaacaagagagaagttagggagaatttttgtctaaaaagccaaaaagtgatagttgattggtgattttgttgttatcaggagagagaattttcttaatgtaataagttaggtactttggcaagtgaaatgggttctaggccaattgcaagtccttaggattccctggcagctagaaaccttggcactcccaaaagacagcttcagt

SEQ ID NO: 251672 - DNA, 391 bp, Homo sapiens
gctacataaatgttgtaagatcatatcttatgtatagaagtaataagaccatttggaattactggactaattgaatagttaaggtttctattcgggacaataaaatgtattttgaaagtgctgctaactattgatgctgacagtgtttcactcctatgagtgacccaaacatattataaatatgtggtaaagggaatggagcctgtggggttgagcagaatgttgtactagctgtgcctggactgagtatagcagctttatgattatgagaaaacaaattctttatttttttttctgttccaaagattcatcctatggggtggccataaagtctagaattagatactaatattttgtcattcattataacatatcaataaaccatttgtta

SEQ ID NO: 251673 - DNA, 340 bp, Homo sapiens
aatgagaaggagtgcggtctgtcctagtcctcatatctttcagcccctgccagcctgatcagatcagtatctggttctgccagggtgtggcagcccctggccggtggcctctttgtctctccgccttggccatttccctcattgccttatggacatttatccttccagtgtcctttctttttgcattgtgcacattgatccttctctaaccttggtcagctcttgaatccttgtcttggcctcttccatgtccatgtccacgtccacttcctcatcctctcacattgctagtgtctctctctatgagggctgttgccaacagatcggctttctttttaag

SEQ ID NO: 251674 - DNA, 5554 bp, Homo sapiens
  misc_feature (2109)..(2109): n is a, c, g, or t
  misc_feature (2548)..(2548): n is a, c, g, or t
  misc_feature (2809)..(2809): n is a, c, g, or t
  misc_feature (3193)..(3193): n is a, c, g, or t
  misc_feature (3559)..(3559): n is a, c, g, or t
  misc_feature (4170)..(4170): n is a, c, g, or t
  misc_feature (4206)..(4206): n is a, c, g, or t
  misc_feature (4364)..(4364): n is a, c, g, or t
  misc_feature (4555)..(4555): n is a, c, g, or t
  misc_feature (4861)..(4861): n is a, c, g, or t
  misc_feature (5011)..(5011): n is a, c, g, or t
  misc_feature (5030)..(5030): n is a, c, g, or t
atgtttctaccaataaacagtaactaaaatataaactatgctccaatgaactaatttttttttactgctatttgtcttctcttttagaaaattattactatatgtttatttgaattctgtagttttttgttttctaatttgaatattaattctccttatcccaattgtgagattaccccagcacttaattattttgatttctctttctctatcctatgaattcttgttttatttttatcgttttaaacataatctattgagggaaagttaagtaattttctgtattccctaaacctagagatatcaaagcaggaaatatccttctgacagaaccaggccaggtgaaacttgctgactttggctctgcttccatggcatcacctgccaattcctttgtgggaacgccgtattggatggccccagaagtaattttagccatggatgaaggacaatatgatggcaaagtagatgtgtggtctcttggaataacatgtattgaactagcggaaaggaagcctcctttatttaatatgaatgcaatgagtgccttatatcacatagcccaaaatgaatcccctacactacagtctaatgaatggtctgattattttcgcaactttgtagattcttgcctccagaaaatccctcaagatcgacctacatcagaggaacttttaaagcacatatttgttcttcgggagcgccctgaaaccgtgttaatagatctcattcagaggacaaaggatgcagtaagagagctggacaatctgcagtatcgaaagatgaagaaactccttttccaggaggcacataatggaccagcagtagaagcacaggaagaagaagaggaacaagatcatggtgttggccggacaggaacagttaatagtgttggaagtaatcaatccattcccagcatgtccatcagtgccagcagccaaagcagtagtgttaacagtcttccagatgtctcagatgacaagagtgagctagacatgatggagggagaccacacagtgatgtctaacagttctgttatccatttaaaaccagaggaagaaaattacagagaagagggagatcctagaacaagagcatcagatccacaatctccaccccaagtatctcgtcacaaatcacactatcgtaatcgagaacactttgctactatacggacagcatcactggttacgaggcaaatgcaagaacatgagcaggactctgagcttagagaacaaatgtctggctataagcgaatgaggcgacaacatcaaaagcaactgatgactctggaaaacaagctaaaggctgagatggatgaacatcgcctcagattagacaaagatcttgaaactcagcgtaacaattttgctgcagaaatggagaaacttatcaagaaacaccaggctgctatggagaaagaggctaaagtgatgtccaatgaagagaaaaaatttcagcaacatattcaggcccaacagaagaaagaactgaatagttttctcgagtcccagaaaagagagtataaacttcgaaaagagcagcttaaagaggtacttatgtcataaaactttccaagcaaattttctgcttattaattatatccaatggtgaccaactcatagaagcattaggataaaattatcttttgttgtttatggtcactaaatgggtattagtttaaatgatgacattgattataatcagttacccttaactgagtcatttagttgagtaggatttaaaatgaatcatttcctgaaaatatactttttttatgtttttattttatatttatttatttatttttgagacaaagagtctcgctctgtcacccaggctcgagtgcagtggcgcgctctcggctcacttcaagctctgcctactgggttcacaccattctcctgcctcagcctccctagtagctgggactacaggcgcccaccaccacacccggcaaacatttggtattttttttagtagagacggggtttcaccatgttagccaggatggtctcgatctcctgaccttgtgatccgcctgcctcggcctcccaaagtgctaggattacaggcatgagccatcgtgcctggccttatgtttttatnttttgtgtgtattttttgagacagtcttattctgttccacgggctggagtgcagtggcacaatcatagctcactgcagcttcgacctcccgtgctcaagcaatcctgctttagccttccaagtagctgggaacacaagcacacaccaccactcctggctgatttttaaatttattttttgtagagacagggtcttgccatgttgcctagtctggtctcaaactcctgggctcaagcagtccgcctacctcggcttcccaaagtgctgggattataggcataagccaccgcacctgatcacatttattactttaaaagtaaacaataatgtcttacttttggatcagaagattataataatttgtttttatgccaatttaaatgtagaataagggagatatttgcttatcaggttttttttaagtagaatatgctgattntttctttgtggctacagggtttcatatttgtttgccctttcttgtgctgcccggcctcccccctaccccccgctttttttttgagacggaagtctcactctgtcatacaggctggagtgcagtggtgtgatcttggctcactgcagcctcccctccccccaggttgaaaggattctcctgcctcaacccccccgagtagctgggattacaggtgtgtgccaccatgcctggctaatttgtatatatttttttagtagaganggggtttcaccatgttagccaggctggtttcaaactcctgacctcagacaatctacccacctcggccccccaaagtgctgggattacaagagttagccaccactcccggctcttgtgctgctttttgtttgtttggtttggtttggtttgagatggagtctcactctgttgcccaggctggggtgcagtggcatgatctcggctcactgcaacctttgccgcctgggttcaagtgattctcctgcctcagcctcttgagtagccggcattacaggcgactgccaccacgcctggctgatttttgtatttttagtagagatgagggtttcaccatcttggccaggctggtcttgagctcctgaccttgtgatccacccgcctcancctcccaagtgctgggactacaggtgtgagccacaacatccagctgacaacttttttttttttttggagacagagtcttgctctgtcacccaggctggagtgcagtggcgcgatctcggctcactgcaagctctgcctcccaggttcacaccattctcctgcctccggctcccgagtagctgggactacagggacccaccaccacgcccggctaattttttgtatttttggtagagactggatttcaccatgttagccaggatggtctcaatctcctgacctcatgatctgctcgccttggcctcccaaagtgctgggattacaggcgtgagccaccatgcctggcccgacaacttcttaaagagnatcattattcaagatagtcactaggacagaaaaatgatatgtcttttaatttacccacccccccccccgtcttataggatgattgaaatttttagttcatataattaattagcatactgtgatacatcgattgattttgataaaataagtataatcaatttgatattaatgatttttgtatgtgtaggaatttgccttataatcagatatgtatgtcttgttgtgtacctattggtggcacaaagacttgctctataccttgccacgtgagcttcactgacaagatttttacaactctaaatggtataatttgcagtatactcccatgactataattcgaaagccaaactctactggaagtttgagtttgaaacaatagtaaatagagtttccaactataataaatctccaacaaaatgcagttgttttgttttccagtgaaatcagactttagctttatggattagtttgtttagataatcctttaggcatataccatatagtcaaacaaataaatgcattttcttttagaagctaagttgttgtgtatgtatttgtgttcatttagaataatgattctcagtagagaggaagggacatatcagagtctnggaggggagagttccctggcagaagattttgaaaangatacccaggtatggccaggcgcggtggctcacccctgtaatcccagcactttgggaggccgaggcgggcaaatcacaaggtcaggagtttgagactagcctgcccaatatggtgaaacactgtctctactaaaaatacaaaaaaattagccgggcgnggtggcacatacttataatcccagctactcaggaggctgaggcaggagaattgcttgaacccgggaggcagaggttgcagtgagccgagatcgtgccactgcactccagcctgggtgacagagtgagactccatctcaaaaaataaattaaaaaaaataaaaaataaaaaaattagccaagcatggtggcncacaactgtcatcccagctacacaagagggtgaggcaggagaatccctgtaacttggaaggtggaggttgcagtgagctgggccactgcactgcagcctgagcgacagagctagactctgcctcgaaaaagaaaaagataaccaggtatatagtctacttgtgtgcccatgttattcctttctcttcccatagcgtgcatacacataaactcttaagtaataatttatgtgctttttatttttatgtgtttgaatattttattaactaaagggaaagaccatgaatgaggtctagtagtctctganaaatgatcctatactaagaaaaatgagctatttatattctaaacaatgttgatggtgttttgttttgctttttttgagacagggtttcgctctgtcacccatgctggagtgcagtggcacaatactgctcactgcagcctttacctcccnggctgaagcagttttcctncctcaccctcccaagtagttgggaccacagacgcataccaccatgcccagctaattttataatttattttttgtagaaacagtgttgccatattctccaaactggtctcaaactcctgggctcaagcaatcctccggccttggcgtcccaaaatgctgggattacagatggatgtgagccaccattcctggccacagaatgctaatactagtatattttttaccaaaagagtatcaaggccagagtggtgggtggcacatgcttataacagcactttgggaggctgaggtgggaggatcgcttgagcccaggagttcaagaccagcctgggcaacatgttgagaccctgtgtctagcaaaaaaaaaaaaaaaatcattagccaggcatggtgggacacacctgtggtcctagctactcagtagtcttaggtgggaagatcacttgaacctgggaggtccatgctgcagggagctgaattcgtgccagtgcattccagcctgggtcacagagtgaaattcgatct

SEQ ID NO: 251675 - DNA, 569 bp, Homo sapiens
tatttttacctgagttgttttttatgttgccaggagctaaatgaaaaccagagtacccccaaaaaagaaaaacaggagtggctttcaaagcagaaggagaatatacagcatttccaagcagaagaagaagctaaccttcttcgacgtcaaagacaatacctagagctggaatgccgtcgcttcaagagaagaatgttacttgggcgtcataacttagagcaggaccttgtcagggaggtaagtttgagtgatgagaaattttaaatcctttatcaaaagaatctttcctgaaaatattccaattccattctagtctcagggactttgcacttatacttgcctctgtctgaatcattcttccccagatattcacatggattgtttgctccctgtatatctttactcagatgtcatttcctcaaaatctctttcttaaccaccaaaattttttttttcaagacagtctctccatgtcgccaagtatggagtgcagtggctccatcttggctcagtgcaacctccacctcctgggtgcaagtgattttcgtgcctcagcctcccaaatagct

SEQ ID NO: 251676 - DNA, 471 bp, Homo sapiens
cacctcctggctcaagtgatcctcccacctcagcctcctgagtaactgcgactacagacagggtcttgctctgtcacccaggctggagtgtagtggcacaatcacagctcactgcagccctgacctcttacaccgaagcagtcctcatacgtcagcctcccaaagtgctgggattacaggtgtgagccaccatgcctggcctagattctttactttgacatgtcgttattagtgataatgattttttaattctctagaaaagtacaaataatttgaaaatggagtaattaaaagatcatttcatcttcagcttaggtagtgaaaaagtatttttgtgttttatgtgtgaatgtctagttctataaaataatgccattaatctttaatcaagaataaaaaagttggctgggcatgtaaaaaataaaacagtgttgagatatgaaatatttctgtgtgtgtgtggggggggat

SEQ ID NO: 251677 - DNA, 353 bp, Homo sapiens
cccctcctcctcctcactcctcaccctccagggtagcggctaccggagcgctgcagggggctgcgcctgcctgctccgccccagacctgtcggcgaaaggtagtttatgccaacgtgacttcattcatacagatgaaccaaggatcgggatagcagtataaaattagaatcaagacagctgactgctcagcaggatgccatcaactaacagagcaggcagcctgaaggaccctgaaattgcagagctcttcttcaaagaagatccagagaagctcttcacagatctcagagaaattggccatggaagctttggagcagtgtattttgtaagtgttagtggcttgatgtcagtg

SEQ ID NO: 251678 - DNA, 4709 bp, Homo sapiens
  misc_feature (4232)..(4232): n is a, c, g, or t
cacctcctggctcaagtgatcctcccacctcagcctcctgagtaactgcgactacagacagggtcttgctctgtcacccaggctggagtgtagtggcacaatcacagctcactgcagccctgacctcttacaccgaagcagtcctcatacgtcagcctcccaaagtgctgggattacagatgaaccaaggatcgggatagcagtataaaattagaatcaagacagctgactgctcagcaggatgccatcaactaacagagcaggcagcctgaaggaccctgaaattgcagagctcttcttcaaagaagatccagagaagctcttcacagatctcagagaaattggccatggaagctttggagcagtgtattttgcacgagatgtgcgtaccaatgaagtggtggccatcaagaaaatgtcttatagtggaaagcagtctactgagaaatggcaggatattattaaggaagtcaagtttctacaaagaataaaacatcccaacagtatagaatacaaaggctgttatttacgtgaacacacagcatggcttgtaatggaatattgtttaggatctgcttcggatttactagaagttcacaaaaagccattacaagaagtggaaatagcagcaattacacatggtgctcttcagggattagcctacttacattctcatactatgattcatagagatatcaaagcaggaaatatccttctgacagaaccaggccaggtgaaacttgctgactttggctctgcttccatggcatcacctgccaattcctttgtgggaacgccgtattggatggccccagaagtaattttagccatggatgaaggacaatatgatggcaaagtagatgtgtggtctcttggaataacatgtattgaactagcggaaaggaagcctcctttatttaatatgaatgcaatgagtgccttatatcacatagcccaaaatgaatcccctacactacagtctaatgaatggtctgattattttcgcaactttgtagattcttgcctccagaaaatccctcaagatcgacctacatcagaggaacttttaaagcacatatttgttcttcgggagcgccctgaaaccgtgttaatagatctcattcagaggacaaaggatgcagtaagagagctggacaatctgcagtatcgaaagatgaagaaactccttttccaggaggcacataatggaccagcagtagaagcacaggaagaagaagaggaacaagatcatggtgttggccggacaggaacagttaatagtgttggaagtaatcaatccattcccagcatgtccatcagtgccagcagccaaagcagtagtgttaacagtcttccagatgtctcagatgacaagagtgagctagacatgatggagggagaccacacagtgatgtctaacagttctgttatccatttaaaaccagaggaagaaaattacagagaagagggagatcctagaacaagagcatcagatccacaatctccaccccaagtatctcgtcacaaatcacactatcgtaatcgagaacactttgctactatacggacagcatcactggttacgaggcaaatgcaagaacatgagcaggactctgagcttagagaacaaatgtctggctataagcgaatgaggcgacaacatcaaaagcaactgatgactctggaaaacaagctaaaggctgagatggatgaacatcgcctcagattagacaaagatcttgaaactcagcgtaacaattttgctgcagaaatggagaaacttatcaagaaacaccaggctgctatggagaaagaggctaaagtgatgtccaatgaagagaaaaaatttcagcaacatattcaggcccaacagaagaaagaactgaatagttttctcgagtcccagaaaagagagtataaacttcgaaaagagcagcttaaagaggagctaaatgaaaaccagagtacccccaaaaaagaaaaacaggagtggctttcaaagcagaaggagaatatacagcatttccaagcagaagaagaagctaaccttcttcgacgtcaaagacaatacctagagctggaatgccgtcgcttcaagagaagaatgttacttgggcgtcataacttagagcaggaccttgtcagggaggagttaaacaaaagacagactcagaaggacttagagcatgccatgctactccgacagcatgaatctatgcaagaactggagttccgccacctcaacacaattcagaagatgcgctgtgagttgatcagattacagcatcaaactgagctcactaaccagctggaatataataagcgaagagaacgagaactaagacgaaagcatgtcatggaagttcgacaacagcctaagagtttgaagtctaaagaactccaaataaaaaagcagtttcaggatacctgcaaaatccaaaccagacagtacaaagcattaagaaatcacctgctggagactacaccaaagagtgagcacaaagctgttctgaaacggctcaaggaggaacagacccggaaattagctatcttggctgagcagtatgatcacagcattaatgaaatgctctccacacaagccctgcgtttggatgaagcacaggaagcagagtgccaggttttgaagatgcagctgcagcaggaactggagctgttgaatgcgtatcagagcaaaatcaagatgcaagctgaggcacaacatgatcgagagcttcgcgagcttgaacagagggtctccctccggagggcactcttagaacaaaagattgaagaagagatgttggctttgcagaatgagcgcacagaacgaatacgaagcctgttggaacgtcaagccagagagattgaagcttttgactctgaaagcatgagactaggttttagtaatatggtcctttctaatctctcccctgaggcattcagccacagctacccgggagcttctggttggtcacacaaccctactgggggtccaggacctcactggggtcatcccatgggtggcccaccacaagcttggggccatccaatgcaaggtggaccccagccatggggtcacccttcagggccaatgcaaggggtacctcgaggtagcagtatgggagtccgcaatagcccccaggctctgaggcggacagcttctgggggacggacagagcagggcatgagcagaagcacgagtgtcacttcacaaatatccaatgggtcacacatgtcttatacataacttaataattgagagtggcaattccgctggagctgtctgccaaaagaaactgcctacagacatcatcacagcagcctcctcacttgggtactacagtgtggaagctgagtgcatatggtatattttattcatttttgtaaagcgttctgttttgtgtttactaattgggatgtcatagtacttggctgccgggtttgtttgtttttggggaaattttgaaaagtggagttgatattaaaaataaatgtgtatgtgtgtacatatatatacacacacatacacatatattatgcatgtggtgaaaagaattggctagataggggatttttctgaacactgcaaaaatagaacgtagcaaaatggcttcagttatcacttttgggtgtctgtatcctaagaagtttctgaaaagatctaaagcctttttatcccatatcccaaattcttatgagccactcacagcaggcagcatatgttgaaataagttattactggtacacacctgcattgcctcaccagtgtatttatttgttattaaattgatctgacttctcagcctcatttggactaaaaaaagaaagcagaaatccatgaacacattgcttctcggccttttggctaagatcaagtgtagaaatccatgaacactaaaggacttcattgattttttcagagagtagaaaacaacttagtttttcttttttcctgaatgcgtcataggcttgtgagtgatttttgtccattcaattgtgccttctttgtattatgataagatgggggtacttaaggagatcacaagttgtgtgaggattgcattaacaaacctatgagccttcaatggggaagaccagaagggtgagaggggccctgaaagttcatatggtgggtatgtcccgcagcagagtgaggagatgaagcttacgtgtcctgacgttttgttgcttatactgtgatatctcatcctagctaagctctataatgcccnagaccccaaacagtacttttactttgtttgtacaaaaacaaagacatatagccaatacaaatcaaatgccggaggtgtttgatgccatatttgcaaattgccatctattgaaattctcgtcacactacatagacataattgttatctccttttggcttatgtgattttctgtttacaagtagaatagccaattatttaaatgtttagttgccacagtgaaccaggagtcactgagccaatgactttaccagctgctgactaatcttcatcaccactgtagattttgctgcatgtgcaggtcctctatttttaattgctgttttcgttgctgcagtactttacaaacttctagttcgttgagacttagtgaccatttggcatcaagttaacatcacacaataggaaacaccacttccacaagtctcaagcctcagtgctaaagtactactgaaaaggaactaggaagtttggccaatt

SEQ ID NO: 251679 - DNA, 2327 bp, Homo sapiens
atgtttctaccaataaacagtaactaaaatataaactatgctccaatgaactaatttttttttactgctatttgtcttctcttttagaaaattattactatatgtttatttgaattctgtagttttttgttttctaatttgaatattaattctccttatcccaattgtgagattaccccagcacttaattattttgatttctctttctctatcctatgaattcttgttttatttttatcgttttaaacataatctattgagggaaagttaagtaattttctgtattccctaaacctagagatatcaaagcaggaaatatccttctgacagaaccaggccaggtgaaacttgctgactttggctctgcttccatggcatcacctgccaattcctttgtgggaacgccgtattggatggccccagaagtaattttagccatggatgaaggacaatatgatggcaaagtagatgtgtggtctcttggaataacatgtattgaactagcggaaaggaagcctcctttatttaatatgaatgcaatgagtgccttatatcacatagcccaaaatgaatcccctacactacagtctaatgaatggtctgattattttcgcaactttgtagattcttgcctccagaaaatccctcaagatcgacctacatcagaggaacttttaaagcacatatttgttcttcgggagcgccctgaaaccgtgttaatagatctcattcagaggacaaaggatgcagtaagagagctggacaatctgcagtatcgaaagatgaagaaactccttttccaggaggcacataatggaccagcagtagaagcacaggaagaagaagaggaacaagatcatggtgttggccggacaggaacagttaatagtgttggaagtaatcaatccattcccagcatgtccatcagtgccagcagccaaagcagtagtgttaacagtcttccagatgtctcagatgacaagagtgagctagacatgatggagggagaccacacagtgatgtctaacagttctgttatccatttaaaaccagaggaagaaaattacagagaagagggagatcctagaacaagagcatcagatccacaatctccaccccaagtatctcgtcacaaatcacactatcgtaatcgagaacactttgctactatacggacagcatcactggttacgaggcaaatgcaagaacatgagcaggactctgagcttagagaacaaatgtctggctataagcgaatgaggcgacaacatcaaaagcaactgatgactctggaaaacaagctaaaggctgagatggatgaacatcgcctcagattagacaaagatcttgaaactcagcgtaacaattttgctgcagaaatggagaaacttatcaagaaacaccaggctgctatggagaaagaggctaaagtgatgtccaatgaagagaaaaaatttcagcaacatattcaggcccaacagaagaaagaactgaatagttttctcgagtcccagaaaagagagtataaacttcgaaaagagcagcttaaagaggagctaaatgaaaaccagagtacccccaaaaaagaaaaacaggagtggctttcaaagcagaaggagaatatacagcatttccaagcagaagaagaagctaaccttcttcgacgtcaaagacaatacctagagctggaatgccgtcgcttcaagagaagaatgttacttgggcgtcataacttagagcaggaccttgtcagggaggagttaaacaaaagacagactcagaaggacttagagcatgccatgctactccgacagcatgaatctatgcaagaactggagttccgccacctcaacacaattcagaagatgcgctgtgagttgatcagattacagcatcaaactgagctcactaaccagctggaatataataagcgaagagaacgagaactaagacgaaagcatgtcatggaagttcgacaacagcctaagagtttgaagtctaaagaactccaaataaaaaagcagtttcaggatacctgcaaaatccaaaccagacagtacaaagcattaagaaatcacctgctggagactacaccaaagagtgagcacaaagctgttctgaaacggctcaaggaggaacagacccggaaattagctatcttggctgagcagtatgatcacagcattaatgaaatgctctccacacaagccgtgagtttgctttttttggggcaaaacaaatttagtgccccttttcttccaccacctgaatgaaatcacagcaattaaagtactagttggaaatgatagctctcctgaagcttggga

SEQ ID NO: 251680 - DNA, 2596 bp, Homo sapiens
tcttctcagattactcaaaggtttattttcttatttttttactttgctttattttctttttaaagcactagctccaggataattttataagtattgctgtatagtgttatttttaaaattttctttaaaagtggttttgatgtcctttttgacatggtagtttacaaatgcttttatattcgcaaagaaatagttgcctagatttcacctgttaatttttacagtgcttctttctttctttcttctttaggcacgagatgtgcgtaccaatgaagtggtggccatcaagaaaatgtcttatagtggaaagcagtctactgagaaatggcaggatattattaaggaagtcaagtttctacaaagaataaaacatcccaacagtatagaatacaaaggctgttatttacgtgaacacacagcatggcttgtaatggaatattgtttaggatctgcttcggatttactagaagttcacaaaaagccattacaagaagtggaaatagcagcaattacacatggtgctcttcagggattagcctacttacattctcatactatgattcatagagatatcaaagcaggaaatatccttctgacagaaccaggccaggtgaaacttgctgactttggctctgcttccatggcatcacctgccaattcctttgtgggaacgccgtattggatggccccagaagtaattttagccatggatgaaggacaatatgatggcaaagtagatgtgtggtctcttggaataacatgtattgaactagcggaaaggaagcctcctttatttaatatgaatgcaatgagtgccttatatcacatagcccaaaatgaatcccctacactacagtctaatgaatggtctgattattttcgcaactttgtagattcttgcctccagaaaatccctcaagatcgacctacatcagaggaacttttaaagcacatatttgttcttcgggagcgccctgaaaccgtgttaatagatctcattcagaggacaaaggatgcagtaagagagctggacaatctgcagtatcgaaagatgaagaaactccttttccaggaggcacataatggaccagcagtagaagcacaggaagaagaagaggaacaagatcatggtgttggccggacaggaacagttaatagtgttggaagtaatcaatccattcccagcatgtccatcagtgccagcagccaaagcagtagtgttaacagtcttccagatgtctcagatgacaagagtgagctagacatgatggagggagaccacacagtgatgtctaacagttctgttatccatttaaaaccagaggaagaaaattacagagaagagggagatcctagaacaagagcatcagatccacaatctccaccccaagtatctcgtcacaaatcacactatcgtaatcgagaacactttgctactatacggacagcatcactggttacgaggcaaatgcaagaacatgagcaggactctgagcttagagaacaaatgtctggctataagcgaatgaggcgacaacatcaaaagcaactgatgactctggaaaacaagctaaaggctgagatggatgaacatcgcctcagattagacaaagatcttgaaactcagcgtaacaattttgctgcagaaatggagaaacttatcaagaaacaccaggctgctatggagaaagaggctaaagtgatgtccaatgaagagaaaaaatttcagcaacatattcaggcccaacagaagaaagaactgaatagttttctcgagtcccagaaaagagagtataaacttcgaaaagagcagcttaaagaggagctaaatgaaaaccagagtacccccaaaaaagaaaaacaggagtggctttcaaagcagaaggagaatatacagcatttccaagcagaagaagaagctaaccttcttcgacgtcaaagacaatacctagagctggaatgccgtcgcttcaagagaagaatgttacttgggcgtcataacttagagcaggaccttgtcagggaggagttaaacaaaagacagactcagaaggacttagagcatgccatgctactccgacagcatgaatctatgcaagaactggagttccgccacctcaacacaattcagaagatgcgctgtgagttgatcagattacagcatcaaactgagctcactaaccagctggaatataataagcgaagagaacgagaactaagacgaaagcatgtcatggaagttcgacaacagcctaagagtttgaagtctaaagaactccaaataaaaaagcagtttcaggatacctgcaaaatccaaaccagacagtacaaagcattaagaaatcacctgctggagactacaccaaagagtgagcacaaagctgttctgaaacggctcaaggaggaacagacccggaaattagctatcttggctgagcagtatgatcacagcattaatgaaatgctctccacacaagccgtgagtttgctttttttggggcaaaacaaatttagtgccccttttcttccaccacctgaatgaaatcacagcaattaaagtactagttggaaatgatagctctcctgaagcttggga

SEQ ID NO: 251681 - DNA, 2089 bp, Homo sapiens
atgtttctaccaataaacagtaactaaaatataaactatgctccaatgaactaatttttttttactgctatttgtcttctcttttagaaaattattactatatgtttatttgaattctgtagttttttgttttctaatttgaatattaattctccttatcccaattgtgagattaccccagcacttaattattttgatttctctttctctatcctatgaattcttgttttatttttatcgttttaaacataatctattgagggaaagttaagtaattttctgtattccctaaacctagagatatcaaagcaggaaatatccttctgacagaaccaggccaggtgaaacttgctgactttggctctgcttccatggcatcacctgccaattcctttgtgggaacgccgtattggatggccccagaagtaattttagccatggatgaaggacaatatgatggcaaagtagatgtgtggtctcttggaataacatgtattgaactagcggaaaggaagcctcctttatttaatatgaatgcaatgagtgccttatatcacatagcccaaaatgaatcccctacactacagtctaatgaatggtctgattattttcgcaactttgtagattcttgcctccagaaaatccctcaagatcgacctacatcagaggaacttttaaagcacatatttgttcttcgggagcgccctgaaaccgtgttaatagatctcattcagaggacaaaggatgcagtaagagagctggacaatctgcagtatcgaaagatgaagaaactccttttccaggaggcacataatggaccagcagtagaagcacaggaagaagaagaggaacaagatcatggtgttggccggacaggaacagttaatagtgttggaagtaatcaatccattcccagcatgtccatcagtgccagcagccaaagcagtagtgttaacagtcttccagatgtctcagatgacaagagtgagctagacatgatggagggagaccacacagtgatgtctaacagttctgttatccatttaaaaccagaggaagaaaattacagagaagagggagatcctagaacaagagcatcagatccacaatctccaccccaagtatctcgtcacaaatcacactatcgtaatcgagaacactttgctactatacggacagcatcactggttacgaggcaaatgcaagaacatgagcaggactctgagcttagagaacaaatgtctggctataagcgaatgaggcgacaacatcaaaagcaactgatgactctggaaaacaagctaaaggctgagatggatgaacatcgcctcagattagacaaagatcttgaaactcagcgtaacaattttgctgcagaaatggagaaacttatcaagaaacaccaggctgctatggagaaagaggctaaagtgatgtccaatgaagagaaaaaatttcagcaacatattcaggcccaacagaagaaagaactgaatagttttctcgagtcccagaaaagagagtataaacttcgaaaagagcagcttaaagaggagctaaatgaaaaccagagtacccccaaaaaagaaaaacaggagtggctttcaaagcagaaggagaatatacagcatttccaagcagaagaagaagctaaccttcttcgacgtcaaagacaatacctagagctggaatgccgtcgcttcaagagaagaatgttacttgggcgtcataacttagagcaggaccttgtcagggaggtaagtttgagtgatgagaaattttaaatcctttatcaaaagaatctttcctgaaaatattccaattccattctagtctcagggactttgcacttatacttgcctctgtctgaatcattcttccccagatattcacatggattgtttgctccctgtatatctttactcagatgtcatttcctcaaaatctctttcttaaccaccaaaattttttttttcaagacagtctctccatgtcgccaagtatggagtgcagtggctccatcttggctcagtgcaacctccacctcctgggtgcaagtgattttcgtgcctcagcctcccaaatagct

SEQ ID NO: 251682 - DNA, 658 bp, Homo sapiens
caaactgagctcactaaccagctggaatataataagcgaagagaacgagaactaagacgaaagcatgtcatggaagttcgacaacagcctaagagtttgaaggtatggttagcctaagctttttgataacagggaggagaatgaaaaggtatccatgtaagcaggaaaagtcttaagatgatgtctagtcataaagaaattgactaagcttcttttcatttttagcatctttggttgactttaatgttaaatgcctgttgctacagtcttttgcttatgtatttctcatcagagtacaaaaaagtggccaaaacttttaaccatgggaagtgccagtagataagaatcaagattcttgttttaaacttatccaagggcagggtgcagtggctcacgcctgtaatcccagcagtttaggaggccaaggcgggtggatcacctgaggtcaggagttcaagaccagcttggacaacatggtgaaaccctgtctctactaaaaatacaaaaattagttgggtgtggcggcacatgcctatagtcccagctactcggggggctgaagcaggagaatcccttgaacccaggaggcagaggttgcagtgagtcaagaacacaccacagcactccagcccgggtgacagagcaagaccctgtctca

SEQ ID NO: 251683 - DNA, 796 bp, Homo sapiens
aatatgctgtttctgtttcagtgttaataatttataactgagacctatttccactttgaactagggttcagtaggatgaaaactaactttgtcttttatttatcacacttgattgtctaataatttccataagcagcagttgctctccacatacagatagaaccctacacctaacgaatctctcccttggtccctcctaaaaaggcactccatttctcattttcattaactttgctacagcatggccaaactcagtaaaatttttttttctgttttctttgtctttaatattgtctttaatatttcacctgtctgtttcaatttatcttggtaaaatatttagatatataatatctgttcacttttgaaactaaattttcagttttagtcaaatgtataatgatactgcaagttgagcaaactgtgatcaaagaccatgatagtacctgtattaatgttacatgcgtgttctttacatacctaagcagtatagtgacaactgagtgtgtttacctgggagaactttaggtattttccctaagcccatgtactttgaggttttaatgtgcaggatgagaacagcatccagccaggaacagcgtaatgccccgatgtcatgggaattgacaagcttgctctgcacctaataaccataggtttctatatcacatcatctttgcctaagacataatagatactctactgattctaaatatccaacactatttttgtgtcctaaacttaaacttcgcaacacatagattgtaccaatgcataaacagttatttgagaatga

SEQ ID NO: 251684 - DNA, 325 bp, Homo sapiens
gggacacttggctatccatttggaagttaataaaagtggatacatccttgtgtcaagccatatacaaaaaaaagtgaattccatatgaatttaaaacattaatctgaaaagcaaactttttaaacatttagaaaagattctaaattaggggaaatatctttgtgacattgggagaggaagacataaaaaaccaaaacccataaagaaaaactttttgaatagaatatgcctaaaaatattaaacaaaaggtttgatatatttgactacatgacaaaaagaaaatgttagaatgacaaaataaaacataaagttaacacttcacaa

SEQ ID NO: 251685 - DNA, 494 bp, Homo sapiens
atgctaacatgaatcaaatgaaagcaggaatggaaatattgatgccagatgcagtcaacttcagagcaaggaaagttatcaggtttctaaacgggtattacctattatcaggtttctaaacgggtattacctaatcataatggggtcatttctcaaggaaaatatagtgatctttaacatgtatatgtttaacaacaaagcataaaaatatgtgaggcaaaaattaatacaacttaatgagaaatacaggtgtccacctttatagctggagactttaacgctgccctataaggaactcattcagcaagcagaaaaaaaaaaaaaatggaatacatgaacccaggaggcagaggttgctgtgagctgagatcgggcaattgcactccagcctatacaacaagagcgaaactctgtaacaaaaaaaaagggggtgtggggggagaatacaaagataaaaagaaaaaaagtaagaaaaaatgggaaaatttgggaaa

SEQ ID NO: 251686 - DNA, 332 bp, Homo sapiens
ctgtgagccagtattgtgccattgcactccagcctgggcaacagagcgagactctgtctcaaataaacaaacacatctgaatttaccatttgaaaaaatatatttgtgtgaccatgaggtcaagagattgagactattcctggccaacatggtgaaatcccatctctactaaaaatagaaaaaatagatgggcgtggtggcacgcatctatagtcccagctactggggaggctgaggcaggagaatcactggaacccaggaggcagaggttgcggtgagctgaggtcgcgccactgcactccagcctggcgacagagtgagagtccattaaa

SEQ ID NO: 251687 - DNA, 192 bp, Homo sapiens
tacacaaacagttaagggagaaaaggtttttgatcagctttgctactttattgccataggttattcaagtgattgttttcccctgtagccattaaagcagctttgctattgctatacccaaaacctgacccttcaagaagatagaagtaatatcttcagtctgaatagtattagtgaatttagccgtaccat

SEQ ID NO: 251688 - DNA, 623 bp, Homo sapiens
aacgaattccactctgggtctggcacccctgaagatagcagagttgggatcggctacttcattgaggggcgtcacaacattcgaggtttaagctggagtcgtggtctttgtgctcttccctcctctgtcggttctttgaaatccatgttggatcgtggaagggaggaccatctctgaagtggctgcccagttgggggcctgtttcccagtcacctgggtgactacctcccctgcctcctaagaagtcatccctgaagcttcgtcatctggtacaccttttctgaatccaaagccacctttatcttgttttctgccttctgcaatgtccacatgaagtgactgattgcccaacagtgcaccatcgtatgtcaagcttccttaagggaatccacttcatcgaattctatatagcagaatcctttaaatttatctgtgtctttgtctctgactacccgtacactccttatgctgagatccttaaagatagcatctatgtcgccctgaaccatattaaaaggtagattccctacatatgctgtgtgtggggctctgtgagcgactccttctggctacgggaaccatggccaccagtactgccgtgggaccctctgtttttttttttt

SEQ ID NO: 251689 - DNA, 852 bp, Homo sapiens
taggatctcaaaagcttttttaggaataatgtcatatataataaataatagcaagaatgttacagcatctatagctctttaaactacctcccaagggaaagacaatgagggcttagttcctgtgtcttttaaactttaactttacgtgtatttttttggacatgtgctgtccagtatggtagctacaagccacatgtgaggtgaacacacagctagtcctaattaagatgtgctgtaaatgtaatagacacaaaatattttgaaaatttagtatgagaaaaatattaacaatttttatattgattccttgatagtattttggatttagttgctttctgaaaactctcctgtgttacccagtttgagtgtaccataccatccatctcttgcagggaccttgactgatacaacattaaaatgaagtgtaattttaaaaaattttatttacatatttcttattaagaattggatgaattgaaacttctttattttctttctctttcttgtcacacagaaagcctgattaagtagcattattcttttgtctacagaagtaaccacttctggccaggcatggtggctcactcctgtaatcccagcactttgggagcccgaggcaataggatcacctgagattgggagttggagaccagcctggccaacatggtgaaaccctgtctttactaaaaatacaaaaattagccgggtgtggtggtgggcacctgcaatcccagctactcgggaggctgaggcaggagaattgcttgaacccaggaggcggaggttgcagtgagccgagatagcaccactgcactccagcctgggcaatggagtgagactctctctcaaaaa

SEQ ID NO: 251690 - DNA, 412 bp, Homo sapiens
ctgttataaaaagtaaaggacctaatacaaatggaaagaaacatggttagtaagcaaagctagttatgagcagctgtcatgttctaacagttggaatttgaatcagagcaactattggtatttgaatcagagaggggccagaccagtttgggtgaaactcagttcatcttttaaactgacaataaagggaatatattttcatagtaattttatcattatgtggcaaactttgttctgtgagctattaaaatattcatcttggccaggtgcagtggcttacgcctgtaatctcaacactttgggaggctgaggcaggagaattgcttgaacccaggaggcggaggttgcagtgagccgagatagcaccactgcactccagcctgggcaatggagtgagactctctctcaaaaa

SEQ ID NO: 251691 - DNA, 265 bp, Homo sapiens
gatggaaggcttgcagagggcaaaaagagagaaggtataattatagggttggactcctaggcccatctgcttagaattacagagcagttttaatctttggctgaaacatgaaacaaatcagagccaatgaacagatcaaacagcagctgccacacacacaagaaacaaaagagagagatgaaacaggaaacattgtcccccttaaaaaaattgttgtaatatctgtgaagaaaaaagatagtatggtcaaatgattttaaaattt

SEQ ID NO: 251692 - DNA, 794 bp, Homo sapiens
ttggttttctaactaatttgttcatttcttctttttctttaaaaatatgatacttatattctgtgccagatttttccagtgtctaaaatccttcaggttctgattctgctttctattatttttgctattagtatcttgtttcatttcatgtctatgtcatatgactatttacaccgagctcttgctctttttaagcattgatgctttttatttttaaattgacaaataaggattgtatatatttatagtatacaacatgctgttttgatatatgtattcattgtggagtggctaaatcaagctaattaacatatccattcctcacaaaattatcatttttttgtgatgagaacatttaaaatctactcttttaacaattttcaagtgtagtcatgtgctgtgtatcaaggttttggtcaataacagaccacatatatgattgcatcctatgattataatggagctgaaaaattcctgtcacctagtgatgtcgtggctgtaccgtcctagtgtgttactagttatgctgtacctagtgtgtacgctagttatctagtgtgtcccagttacactggtataaacaaacctgctgcattgccaatcatatagaagtctagcacatttcattatgtatagcacataatacttgataatgatagtaaacaactgttactggtttgtgtacttactactatattcaaaaaagtttaaaagtaaaaactcaaaaatagaaaaaaaaagaggagaggcaaagaaaaaataaaaataggaaaaagcctataggataacgatat

SEQ ID NO: 251693 - DNA, 387 bp, Homo sapiens
ccatgacaaagagtgaggtgctgataaacggtaccacgtgcagggaccttgaaaacagattaagtgagagaagtcagtcaccaaagaccacatattacctgattccattcatctgcacggtccagaacaagggagtctacagagatagttggttagtggttgcctagggcttggggaagaggtctggggagtggagaagtgatgggtatagtatacacggttcctttttggggtgatgaaaatgttctaaaatggactgtggtactggttgcttattttaatatatctgtgaatatattaaaaaaccattgaattgtacactttacatggatcagctatacagtatgtgaactatttctccataaagctgggggtttttttgttttt

SEQ ID NO: 251694 - DNA, 491 bp, Homo sapiens
gtgatttgaatgtaacctattgcacttggcattggaagtctgtaggtaatcacgtagacaaagttttcaaaagtatgaacccagaagctagcctgtggaaaattctgccaatcttcagttatgtaaaagtctgagcagaggatttaattctcaaagacgcctgatcaaaatggaagttctgtcctgttgagaatatacatgataagcagtgtatgcaattataaacccaatattttttattttttgaggtaaatcacacaaaatagaatttatcagaaatcctgtgattgtaggacacagaccagtgccaggttcacaatgactgtgcctgtttgtttagtcatgtattttatgcatcccaacatgttggatcacatcgcatcctaaagacaaagagcagctttagacaaaagagaatgaaaaagtattcatcaatgaatcacaacaacctaaagaaacattccaatgataaaatcaccacacatatttat

SEQ ID NO: 251695 - DNA, 462 bp, Homo sapiens
aaggaaggttgacactgtatcctggatcagccttctgatcctctcaaacatcatccaaagcaatttgcttttatttatttatttttaaatgggctgcgaataatcctcaggtataaaacacagaaaaaggagaatgggcatggctgagaatgtcaactcttagtctattctttggttggattcactgaataggagacactctgaaagatatctttatattccatcttttataattcttgaacagtgctttcttagctaaccaccaaagtttctaggtgaacagcttctagaaaaagttagagtgcctcagacatttaactggaagggcactactttttcaacattgttgcataacatgcatcccttggttctgtggaaaatatctttcttaggagttcttggcaatgtctaagtcagtgtctgctgatagaattagaccaaataaattttttggaggcttta

SEQ ID NO: 251696 - DNA, 216 bp, Homo sapiens
caacatctgcagacattgcccagtgttcccctgggggcaaaatcacccctggttgagcatcattgctttatagttgcctaggatctcatcgtcatctgcatgatcaaagcagattttgatccataatgaagagaaaaatcaatcattcgaaatcactctagattttataattggcagacaaaaacattaatactgtaactttattccatatgttca

SEQ ID NO: 251697 - DNA, 431 bp, Homo sapiens
tgagaaggcagtgaaggtaccaaagtgagtttgcatttctgactgatgaggtcctaggtccagtagctgcagcatgttcaatcagctggtggcgtcccagccggactctctgtgtggacgtgctgccccctgctggccactgggaccttacgcgctcactgtcaggaaaacaaaaacaactcgtgctgaatgtaaaaagccctgcattttggaatccttataaagctaataaaccacgatgattttctttgactgttacttcctttttccccctgtagagtcactcaaattctcttaaccctcattgagaccagaaaacaaatgtaaagagaaagaattgtgactgttttcagatgcaaattgaataataggatgcttacctctaagcatcctgtggtgtttgaaataaaagaaagaagcaactcttaatc

SEQ ID NO: 251698 - DNA, 464 bp, Homo sapiens
gttgaatatacaattactatatgactcactcctaggtatataccaaagataattgaaaacatgtcacacaaaaacttgtgcagtgtggaagaaaatgaagtaactaaggtgaaggctttctaaagtggagtcaggagattgctaggggattgcattcacacctgctaaaaagtcaaaccaccgaatagacctgtagaaacaactgaagtcagtaagtatctgccagccttcatcatctctcagcgtgagtaccctaattaaccaaccaatcagaatgggtttgagatttaagagttctacccagccaatgaactgcctctgaaaacttcttgtgggaatcccctatttaaaaaaccctctcctgtgcttgccttatgagacactattcagggctgctctgattcactgtacgtgaattgcaattctttgtttctcaaataaattaaatgctatttcctttgacc

SEQ ID NO: 251699 - DNA, 714 bp, Homo sapiens
ccctgtctcaaaaaaaaaaaaatgttttaagtgcaggccagatgtggtggctcacacctgcaaccctagtgccttgggaggccaaggtgggaggatcacttcagcccaggagtttgagaccagcctgaacaacatggtgatacccccatctctcaaaaaaaaaaaaaaaaaagaagggtgaggtgcggctgcacgcctgtaatcccaacactttgggaggccaaggcaggcagatcatgaggtcagaggatcaagaccatcctggctaacacagtgaaaccccgtctctactaaaaatacaaaaaattagccgggtgtggtggcgggcacctgtagtcccagctactcgggaggctgaggcaggagaatggcatgaacccgggaggtggagattgcagtgagctgcagattacaccactgcactccagcctgggcgacagaacaagactctgtctcaaaaaaaaaaaaaaaaaagaaagaaagaaaatagctggatgtggtcgtgagcacctgtagtcctagctacatgggaggctaggtgggaggatcccttgagcccaggagtttaaggctgcagtgagctgtgattgtgccactaaactccagccttgtgtgattctcccaaattactgagtttattagatgtgttttcaaagaaggggactctactagtagtaaagtgtgaagacagggtgacagtgagaccctgtctgt

SEQ ID NO: 251700 - DNA, 453 bp, Homo sapiens
cgttgcaataattcaaatgaaaaatgatagtagcagtggtggtagagtgaagtggctggactcctgcttatatatttaaggtatagctgaaaaaatttgctgatggatgaggtatagtgtgtgagagaaagaaaagtcaagagtgactccaaagcttgaggctttagcagctggaaggatggatttgccgctgaatggaactagaaaaacttcaggaagagcaagcaggaagtggaaggcttttgccatgttaagtttgaaatgccaatgagatatccaagtagtgctgtccaataggcagttggacatacaactctggtgtcaaaagagaggtttgggagtcatcagcccatggaacaggtaaagtcatctttgcatgagtggagacagaaagaagaggaataagaactgtgttttgggatacacctgtgtttggaatctggggacatgagg

SEQ ID NO: 251701 - DNA, 449 bp, Homo sapiens
tttcttctgtatacttttctatgctttctagattatctacatgagaatatactaattttatatgcaagaaaaaaagcacagtattttttaaatgcaatgaagacgtgcttattttcactcagcagtgttatgaaaggcacgtagtatatagagcccaaagccctgggattgcaccctgacactggcatttagcagcagtggaaccgcgagcaagtcccttccttttagagcgtgtttcctgttaagtaaaatcataaacaccgatcctttgtcctttttaatttaagacaagctgactttaaagttgtcaacaaaatatataataacactgttaggttaaaagaacacagcaaaaattcactgaaccctccttaccacagttttggaaggatctgagatgatggaaaactacctaggcttcatcttttcacatatgtctacacaacccg

SEQ ID NO: 251702 - DNA, 667 bp, Homo sapiens
tcaccattgtgaaagtattaagagatggggccttttgggaagtgattaagccatgaggactcaaccttcatgaatgtttcatcagtgccctaataaaagagactgaagaaagcatgtttacccatgaagctagacgggaggaatggaagggccacaatgaagatctggccgtatctttcactacacccttacatttactaccacattatagccaaatagggcttttaaaccattttttaaacaatttttcttttttatctttcagctcagttattttgcttctatttttcctcagcttataaaaccccacatctctacttttgaaattataactattcattaaaactcgttcatttgttgctttgtctttgatcacagccagaagtgatatctatcttcggaacacctatcattccttgtttataccacttttatattacttcttatttacttcaaaaatttttgtttccactaaaagttaaattccttaaggaaagggaacatattttggtcattttatgttatttcacagtgccaacacaatgccttttctgtagtcagcatgtaaatatttgctgaacagatattatattacatatttatacttaagcagcaagatagaacctttaaaaggaaataatgttttcctatttctatgggctaattt

SEQ ID NO: 251703 - DNA, 395 bp, Homo sapiens
ccctgaaaaaaataaaagaagtatcagtaggcactttgccactaattactttttaagaatacagctgtagtgccaaagagaatgcaggtaaacattagaaagatgggagaaggctggtgtggtggcttacacctgtaaccccaatactttgggaggccaaggtgggaacattacttgagcccaggagtttgagaccagcctgggcaatatagggagaccttgttcctacagaaaaactttaaaaaattagccagatgtggtggcacacactggtagtcccagctacttggtaggctgaggtgggaggattgcttgagtctgggaggtcgaggctgcaatgaggtgtgatcacgccactgcactccagcctgggaggcagagaaagactctgtctc

SEQ ID NO: 251704 - DNA, 109 bp, Homo sapiens
ttgttgctttattcgggggatatttactttccttttgaaaagaaaattcttgaagagaaacctgatggtgggatttcaggcactgtggcaggaagtaagaaagatgtgt

SEQ ID NO: 251705 - DNA, 478 bp, Homo sapiens
atgctcatccacgttagaagcagcagtgaaaggcgtgttgcttttcattattaacttcaaatcccagtccctaaaccagctcttgacgcccctctgtcaggtgctaatcctggaaactggaggccacctggtctccactttaggtgaggaaaacctgggagaagccatcagactgcacctgtggcatgagatgctttgagacaggtcaagaggaggagcaaagggcagtttggaggagaaaagtattagccctaaggaacaagtgcttttggaagctcagcccggtcagcctggtggaaagccgtcttcagcagggaattcagggcttggtccaagctcttaagtagaagcagggacaacacagtgcccctgtgggctgccagcattccttttcatttgggtgatatttgtgcaaagtaaaaattggtttactaatctttttttctcaagataacaaaaagagacattttgtttaaaa

SEQ ID NO: 251706 - DNA, 438 bp, Homo sapiens
ggaaccaataatagtttccaaaccttgaattgtcctgagggatagaaccaggatcctcttaaagaaaacgtagtacatatacaacatggaatactgtgcagccataaaaagtgaaatcatgtcctttgcagcagcatggatgcagctggaggccattatcctaagtgaattaatgcagaaacagaaaaccaaatactccatcttttcacttataagtgagacataaacattgggtacacgggaacataataatggaaacaatagacactgaggacttcaaaacagaggagagaggaaaagggcacgttgaagaactacctatttgagtagtactgtgttaactgtttgggtgatggttccatcaaagcccaaacctcagcatcatgcaatatatccatgtaactaacctgtacaggttacccccgaatctaaaaagaa

SEQ ID NO: 251707 - DNA, 548 bp, Homo sapiens
ctactgtcaaactataacaacctagaagggtatattcttgctgaacgagaacatcaagaagacaggaaggaagctgaagatatctctgtcaagtcatcctctgtgtctgtcatgtgtcccacatgtgtagtcctaaatgccactgtctcacagttggcctcttatcaggacctaagccctgtggagacagcaacttgcagagccccattccaggggcagcaaggggtgggcaagatggaatcactcagcttaaggaaggtcttccccatctatgcttttgaagaaggaagaagtgggactatcattcactagtctaatcttactgctaaaattagactgagtgctccatctccaaacctggagggccatggtgtggtgtgtgtcacacaagccaaaagttgttcttcccaaggtctgggcagtggaagcagtataaacactgatgaataaactcatctgaattttaaaaagatgaagaaaattgttcctgtcccctggtggaacttttcaagtgacattgacaaataaacctctcaaaacctgtagaa

SEQ ID NO: 251708 - DNA, 461 bp, Homo sapiens
gcgaccgcactggagtacactcttaagtatagtttattgaatacaactataaatatccacatttggcagtctatacacagcagctccagcctggcttccctggacttttgcgctcttgcaaacaccaccctgacctcagcttggagacagcagtctccttccttcccctcgttcccccagccagctagttaccaagttctgtcaccacttctccctctccatgcaccctacttcaaaattagctttccctgctcacctgtgttcatcgttctgtctgaatgataaagagacagccatcttttttttttttttttttgagacagactcaccctgtcgcccaggctggagtgcagtggtgcgatcttggctcactgcaacctccacctcccgggttcaagcgattctcctgcctcagcctcctgagtagctgggaatacaggtgcacgccactacgcccagct

SEQ ID NO: 251709 - DNA, 553 bp, Homo sapiens
gtctcagtcgccctttttgtaaaatggacacggcttccctccgctcctagagcccctcaccaggagggcagtggcccgtgcctcagtctccccatccccattctcctgccctcacgcccaggcacggccaactccctcccagaagggtagggacaccgggcagttcccctggttctgtcccagggtccagcgcagggaaaggagagactctcaagggtgtgctccagcctcctcacaacggtcatcgtctctgcatgtgcttcattcacatggaaagttttactcattttatagatgtggacattgacgattagggaggccaaggcctgcaagacctgcagcccaaccatctctctcctcatggcaggacccgggagccggaggtgactcgccacctgacacaggctgtgaaacgccgggccggcctagtcggcaaaattggtcataaatgtgaccaaatttatttagaagccaggcgcccgcctcccctcctgggctgtgggccgagtgctgcaagaaggaagcccgggacccctcttggctcccgcggccg

SEQ ID NO: 251710 - DNA, 294 bp, Homo sapiens
ttggggtgaaggctgcagccctccaggctgctgggggtgcagatggctgtgccgtgctgagattggctctgtctggaggggtccagtgtggggtgcctgagggcactagggagaggtgctcctgctgcaggaggacctgagggtcagggcttggagaggacagggaacctgcggccgtctcttctgctttggggcaggggctctggcccgggagagggaacggggacaggagcagaggacggtcatccaggcgcagcggggagctgctccccaggccacagcagacagcactgc

SEQ ID NO: 251711 - DNA, 346 bp, Homo sapiens
aggggcgcgtcacgtgacctgtgcagccaactgttccgagacgtggcctttgcctgagctgctgttaggagaggtgctcaggtctggggagtagctcctaccatcgcctggactcgacttctggactggcctccaaaagtcgacacagcccctgcgtctttcctattccccaaaccggcgctgacctcatatttgcatacactgaaacttgtggctctccttgacttgggttggtaggctctataggacctcaccatgttctcttacccatggtttctgcagcagccaaaatgatccattccatgtgctttagagccttagggaataaaccattaatcaagtcatt

SEQ ID NO: 251712 - DNA, 468 bp, Homo sapiens
aaggagggtccttcatagccaagagaagcctggggagacgtgacaactaaatgcagtgtggggtcctggtgggatcctggcacagagggatgtctggaaaacactatggaaatctgactaaggtaggcactttggctaataatggcaataccgggtcattaattaaaacaaaagtacctaccttagtaagatttccattgtgaattacttggacagttacctcgtgcgagatgagctagtgggttgtaatggaatactatggctggaggctccttgacagatgtggtagacagaaacttgcatcgctgcaggccaaattgcagctgtgtgccgtgagtgtctgcaggctctggcagtacttgcctccgaaccaggtcattcacagagacatcaacagtgacaatatactgccgggcatggctggctctgccaaagccaactgacttcggatactgtgcacacataacc

SEQ ID NO: 251713 - DNA, 276 bp, Homo sapiens
aaggagggtccttcatagccaagagaagcctggggagacgtgacaactaaatgcagtgtggggtcctggtgggatcctggcacagagggatgtctggaaaacactatggaaatctgactaaggtaggcactttggctaataatggcaataccgggtcattaattaaaacaaaagtaccatattgctgtaagatgttagtttttggttttttttgggtttgtttttttttgtttgttttgagacggagtctcgctctgtcgcccaggctggagtgca

SEQ ID NO: 251714 - DNA, 330 bp, Homo sapiens
ttgtcccagagagaaaacatgggcccccaaggccctgtttcccctttgcaaggtgttagctgcaaacatgccaccagcagactgtgggttagactaagcataaagcattcctcaggcttttcaaggaacacaatagcacatgatccctttgagatttgaagtccatcttcaagcatccatccattcttcttctacctacatacatcatcagatcaaaatgtgccccatactgagagctgaaaaatgttttgtaaggaaactgcagcggtattgagtcagaatgtcgaggcagcacatgcagctttaatttggattaggatgacccagata

SEQ ID NO: 251715 - DNA, 313 bp, Homo sapiens
gtccgggaggtgaggggcgcctctgcccggccgcccctactgggaggggacatttggacacagacacagacatgctcagagggaagactgcatgaagagactaggaaaatgccatttggaggtagaggattgagtgatacatctacaagccaagtgttgccaagattgccagcaaaccaccagaagccaggcaaggggcatggaacagatatcctccttcacagccctcacaaagaaccaaccccgctgacacctggattttggacatctagcctcccaaactgtgagacaataaatgtctgctattttaagc

SEQ ID NO: 251716 - DNA, 690 bp, Homo sapiens
gtgatttgccttaacaattttttattctttggttttcacatccacaaaacctaaatgaatggctaggctgaaatgaagctgttgttacagaattgtgctcacagatcgtgaaatgatctggctggaagcattagcgttgatgacatttgtgtttgttctactttttcctgactgcctgagaagggcagccacaaagagcagcatagcatgcagtgactgccagcaagtctttgtggccaacagtctgcctctttgtagataatacctagatataatatgtagataaaataatatttttaaagagacaaagcaggtcttataagacttgtatggatgtatttgcaaaatgtgaagctgccttctagtatatttttaactagctttatagaggcaatgaggaagccaatttaaatgttgaaatttagattaaataaatatttcattaaacttacaaaccagttcttgtcagcctcttatctatatgtaaaactggtgtactgctgattcctcattacctttggcctggtagagagtttgtacaaggcagcacggttaatagttgaggtttattcaaagaataccagaagtaacagactaatcccagaggtctgaccattctgttctctcctcttacagcaaaggatttgattcaaagctactgagagcaagagaataactcatttctgctta

SEQ ID NO: 251717 - DNA, 378 bp, Homo sapiens
aggaaagaaatttaattgactcacagttccacatggctggggaggcctcacaatcatgatggaagagcaagggacatcttacatggcagcaggcaagagagagcttgtgcaggggaactctcctttatgaaaccatgagatattgtgagacttattcactatcatgagaacagcacgggaaaggtctgctcctataattcaattacctcccactgggtcccttccatgacacatgggaattgtgggagctacaattcaagatgagatttgggtgaagacacagccaaatcatatcactttacttggagaagctactgcattgaagcataatgtataagagacatatgataaagtatatttattttaagtgtacatttg

SEQ ID NO: 251718 - DNA, 433 bp, Homo sapiens
ccaaaccccaaagcctttgcatatccagtttcattaaatggagatggcttggggtttccagtgtacaaattgaaagtatataaggaaagcatgtgttgtatgagggcctgaatttcataatttatggatgttcatttttccccctaaatgtgtcattctttttgtgatagacatgatgagaaagaaactgggaaacatatagcagatgtgaggaaaataagataatgattcccccactaacttgtatgccgcgggaagattgggactgtctcttactactccctccgcccactatctatctatctgctgtttatagtgtagtgtctacactcagtaacttatttgttgaataaatgaatgggttcccctgtttatagtatagtgtctacactcagtaaccatttgttaaataaatgaatgaattcctcatagc

SEQ ID NO: 251719 - DNA, 527 bp, Homo sapiens
ccacggtttgatggtaatcccccaccctggagtgcccaatccaaaccttatgcaaattcgtatgtcaattggggtcacccggattcttagttaccgtgtagatggtactcaagtcccatcctgggaaggtacagggcccctcccacattatgcatagtcctgtggcctaacagtttcctagtcattcctgcgatgatttcccactttggctgagttctttcccaccccattgtggaccaaatcaagggctccttctccttggtttcctcctaaagcatcactcacggcatttagcagcatgttgtagaactttaactgctggtgggagctacagatcagtactggacaatggatgatgtagagttaatatcagacagccctgttcttaaaagtcccctatatcatttctgccagctcccagactccagattcccactgtgtgaactctctctttcctaatctcctctctcctccatctccttcctctttcccactcctactctaagtccctttacattttctaagca

SEQ ID NO: 251720 - DNA, 412 bp, Homo sapiens
tttctgggatgctgatgttcagctgggatgggcctcttcagagggccctgccacccaccttctgctggagcacacagtgtgcaagggacagctgccctccttctggctatccgccacttagggcccccatggaatagcttgtgaacagcaggaggggtggcgtctctcccactctacttaccccgcactgccaggctccggaggtggggaggagggggacagatggccacggaatgaaggcaggaaggaagtgctaggagccaaggaagagaggagcaagaggctgccccagggaggaagcaggaggaatccagagggagaaaagacagcaggccccacagaggctgggctggacctggagagggacaaggagctggtcctggggtgggatgaggccagagctgtggagaag

SEQ ID NO: 251721 - DNA, 115 bp, Homo sapiens
gagacaacttgacattgtggacatcggatacccaaggagacgaagctgaagcaggagaaggaggggaaaattaaccggccttccaacttttgtctgcctcattctaaaatttaca

SEQ ID NO: 251722 - DNA, 405 bp, Homo sapiens
gcatagcgacctttacaatccttggtgcatattactgagcagtatgttactcactgcaaggtcatctaggctctttctttcaagaatgtgagccaaaggtttgtgtagtaaactcagtgatacagaaaagacactgtaagagcatgtaaacagtaatagtctttcataagaattactctcttaccagtctggttggatcggaaaccaaaaatggcaatatagatagcatagtacgatggttaaggacattgactcaggtaagacagtcctgtgttttaaccgtgcccagcctagacctagttttttaaaaagtacatttaattatgtaaatataaagaaaacttgacaaattttcaatattgatagaaatatatagatctttttttctgatacaaatatcaaaca

SEQ ID NO: 251723 - DNA, 449 bp, Homo sapiens
ctcccctcttatctcccctggcttcccctcctctcgggcgctgcgaaaagcagccgcacttagtcaacaaatggcacgtgggagaagttggtgagtgtttggtgaggactcttcagggcttttcacaagaaccctctgtacacaaagtaagtggcgtgtttactcgggcctctccagccagagctgtgcctctgctccgctgcgcaccgcggcttccgaaaggagaaaggagagaagaaagggcggggagagcggggtggaggatttggacaggccctggaggcttgggctggggaggcctctggcctcgtttagttctcggcccggcaacctcctctcggcctaggcttcgccgcggcctccgcagctggaatggagctgccaggacccagtgacgctcccgcccctttcctcttcttccaaggggccaggtgggctggggtgcggcc

SEQ ID NO: 251724 - DNA, 469 bp, Homo sapiens
aaatcaggaagtgtgagtccttaaatgttgttctttttccagattgttttggctctttgggctccttaaagatcgatataaatcttatgatagatttctctgtttctgcaaacaatgtcattgggattttttttttcttttcttttttttttttgacaggtcttgttctgtcatctaggctggaatgcaatggtgtgatcctagcttactgcggccttgaacccctgggttcaagcagttctttagcctcagcctctgactagctaggattacagatacatgctactatgcctggctgtcattgggattttaataggaattgcactgaatctgtagatccctttcagtagtatcgtcattgtgacagtggtaaatcttcccagccatgaacatgggatatctttccactgatttaggtctttttaaatttttcttggtaatgttttatagttttcagtgtacagatctt

SEQ ID NO: 251725 - DNA, 359 bp, Homo sapiens
ccgcctcctgggttcacgccattctcctgcctcagcctcccgagtagctgggactacaggcacccaccaccacgcctggctaatttttttgtattttcagtagagatggggtttcaccgtgttagccaggatggtctcgatctcctgacctcatgatcttggcctcccaaagtgctggcattacaggcgtgagccaccgcgccctgccaatagttcttatttttaatggaaactttaaaatttatctgtctgtgtgtctattagagtcttgctgtgtcacccaggctggagtgcagttgcgtaatcgtagctcaccgtaacattgaactgggctcgagcttcccagagtgctgggatta

SEQ ID NO: 251726 - DNA, 631 bp, Homo sapiens
ggagaattgcttgaacctgggaggcagaggttgcagtgagccgagatggcgcccctgcactccagcctgggtgacagagcgagactcctgtctcaaaaaaaaaaaaaaaaaaaaaagaaccaagtttgaacatcattcatgtctgggcttgaagaatagacagaaaggacaatagctagagatgccacagagataatgtcaccaagcaatgattacctaggctaagtcagctaagcctagagagtatgattgaaaggggtatgaggaaagttaagtgtgaaagtatgtatgtaaatgaatcacttcccttcaaagtagaatttcagatccatttagtattcatgacattattggtcttatgtgtgttgttttcttgacaataggagtttccctcctaagtgtaagtagtaatacttaaatattaataaaagaacatagtatttccttgtcccccactacccatccttacgccgtgttgtataatttattgtaaataaattgttaatgatacattcttgcactagaagtgcacaatttttgggttcagtatgtttcttaaataagaggtcacagtaaaccaaatacttactatgaaacaaataactggtactccacagttacaatcttaatg

SEQ ID NO: 251727 - DNA, 367 bp, Homo sapiens
gacttctctagtgacatgaccctaatttagctttaaccttgactcaaatcagctctcaatccattgtgttctgatttagaatcaatttggattcttagattccttaataagtaaatgaccaaacaaaatcaaaataccttaataatatccagattaagacacaacatgatataaagttgtttctgaagaaatatttaattttaggaaagtgagattttatagctttactatagaacattccacagccttaaagttactgatttaactttcatttttcactttttgtcttaaacatctcttatcccataaagtagtaccaggcaggaactacagacttccaaattgcttttctattttttttcctgtc

SEQ ID NO: 251728 - DNA, 360 bp, Homo sapiens
agcacctgctgtgtgcatgcagtcactctgtggaggtcacaaggccaagcagacctaaaagagggcagattggtccaagccttatgagcacagtgccttatgggggatcattatcctggggcaggggaagccttgaactgggtcaaaggatgggcccccccaggcaacgggacagtgctggtgaaggcacagcagtctggaagaactctgtggccaagacagcctggtttcatctttctccatcattaatgctgtgtgaccttgggcaagttactcaacctctctgtgcctgaggttcctcactcgtaaagcaggattttaataaaaatatctatgccttagggctattgtgagcattaa

SEQ ID NO: 251729 - DNA, 345 bp, Homo sapiens
tgtatgatttttcaaaaatttgattttttcttttgatatggtagggtggaatagggatttattcttgatctgaagtctaacgctctacctctgagctatcccgcctcctgggatttattcttgaatgttgtagaagcttagtctgattttgtttaactttaaatatgctttggaataaggattggcaagtaaaaattctggtaattttaggaggaattgacctttcttactagttgttttttctttggctgctgacgatggggaactaagggaaaacgtctgttgtatccctgaagttttttgttttgtttttaaacgggtctgaataaaaatgccaaagtttta

SEQ ID NO: 251730 - DNA, 462 bp, Homo sapiens
ttggtatctttcaatattggtttcccaaacaaaaaacattgtatgtctttctctttttccagtcttcttttatgtctcagtaaaattttgtagcttgcctactacttattttcaggttaaatcctagatattttcaattcttactgccattatgaatgaatgtttttccccatgaaatgtttaactacagctgatttagggactcactgagttttgatttgttgatttgaaaaactaccaccctgttgagctcatgtatttattctaagacattttttgagattttccaggtaaaaaaattatacctagatgaatttatagaacaacctaatagcataaaagcaatagattattgttcaccacattaatgggaatgcctttcctcttaaaattatgatatcttgggctttgtgtttgtgacagcatttctttatgatggaaagagactatccttccagttct

SEQ ID NO: 251731 - DNA, 462 bp, Homo sapiens
catctcaaaaaaaaaaaaaaaaaaagaaagtcagagagcttttgcataactggcccagagggtgtggtagatggagctacactcagactttggagcctgactaataacacaattagagcatgagcaagaggaaggccaggggcagctttgacatgggaagagagctacttacatactgaccggtaattgataatgggaacaaacgacctgcccaaattactttccaaaaagtctctgttgggagacatttcaagtttagaaatgaacaattttgagatgatctgggcagatttgaaatcttgtgaaatcccttcaaaatccgaaaatgagtgtgtgagagcccagcgtgtgttttgtgaagacttctcttgtgtgtcttgtattgcttagagggcatgatttgatgacatggtcagaacattctgggcagaatcgttacatcatcagttcttgtcatattgg

SEQ ID NO: 251732 - DNA, 510 bp, Homo sapiens
atgaatacgacctaatcaccctggtgcttgtaaaaacatgttatctaggaggaacaaaaagtgtttttagggactggacacgatggctcacgcctgtaatgccaacattttagaaggctgagacaagaggactgcttgagttagagaacagtgtgggcaacataggaagacctcatctctacaaaaacaaaacaaaaaaaatattagccgggcatggtgacgtgcacctgcagccccagccactggagaggctgaggcggaaggactgcttaagcccatgaagtccaggctgcagttcactatgacagcacaattgaactccagcctgggcaacagagcaaaaccccatctcaaaaaataaataaaataaaagtttttaggaactaaaaatttcaatgaaaaccaaaattagtattctgatcttactgtactatttttctgatttatttcaactgaaggctaaataactatataaaaggtgtcaaaagctttgctaaaaatttcacaatt

SEQ ID NO: 251733 - DNA, 377 bp, Homo sapiens
gcctcaaactcctgggctcaagtgatcctcccatctctgcctcccaaagtgctggatttagaggtgtgagccactttgtccagcccaaggtccttacaagtgaaagacagagacaggagagtcagagtcagagaacaagatgtgatgacaggagcaatgatgagagtgatgcagagtttgtctttgaagatggaggaaggggccacaagcaaaggaatccatgcaggctttagagcccagaaaaggcaagaaaatgggccttccccggagcctccagaaggaacatccctgccaacacttctacttcagccaagtgagactcttgttagactgctgatttccagaaccatgaggtaataaatctgtgttgttttaag

SEQ ID NO: 251734 - DNA, 397 bp, Homo sapiens
ctcctttgtgttctcagttgttagcaaagggatcagactagtcattccccagaggtccttctaactttgaaattttgtctctgacatcacaaataatttcatgctttcattaaacatttgtgtttctacctctggcctgtagtccttggactcttgttccataggcgtagggttgtgaatggcaaaagaggatcttggtgttcttttatgaagtgataccaacatatttcacttctaggataatgacaatattggcaatatgaatcttaacatgagagttaactgattaactttttgtgtttttatggaattgctcaattggttatcataaatagattttgttaaattccagcctttatgtaatttctaagcacatttcatttgtatgtcttattta

SEQ ID NO: 251735 - DNA, 458 bp, Homo sapiens
agggtaaggcacggtggctcacacctgtaatcccagcactttgggagggcaaggtgggcagatcacttgagttcaagagttcaagtccagcctgggcaacatggtgagatcctgtcccttaaaagcgtatctgctgctctgaatttggtattttaacaccacttactgatacctttcctgtaaacctgtagatggtttaattcttagtcaagagaccagtctcatctaaaactatcctgttgtggtctgacggcaagtaactcatcttgagtaatttttgtttctccttaagtggcattttgactgtccattgcagcattctgatcttaaaagacatccactttgctaatgcacacgagattctcttagttgaagtaggagaatcaaatggagcagttgtcctccccccaccccatgttcttagaagcacctctgatggagttattctgaccttgagt

SEQ ID NO: 251736 - DNA, 383 bp, Homo sapiens
ctgggaatgaacctggaaaaattcaaaatatggtctagtcttaggcaagtttccttgtccggctcagctgctgagaccacatatctggaccctcagtgccctggcaacagctctgtgcaggcaggatgaagcacaggcttaggtcaagcaatcagccgtcaaaatccacactctcacctactagtggaatatctgcaattactttgaccaaaagccagaagccggccagtttgagtgtagctgttacagctttgtgttctaaacctaagaaatggggacccctcacatgagagtggggaggcttctggatgtgctacaaattccatttcattttcatgaactccagtgttaattaataaaatctcaaggttctcccccctctt

SEQ ID NO: 251737 - DNA, 446 bp, Homo sapiens
ctgtgataggcatctacactgaagaacctgatgattccagtaatgggtcatttttgtctgaaatcatctaatttctgacgtaaaattcagccatagtggtcaaatatgatgatagagaccatttgttagtcaaaagttggaacttcaatatggaaaacgcggccgggtgcggtggctcacgcctgtaatcccagcactttgcaaagccgaggcgggcagatcacctgaggtcaggcgtttgagaccagcctggctaacaaggagaaaccccatctctactgaaaataacaaaaattagccaggctcagtagcacacgcctgtaatcccaattacttgggagcctgaggctagagaatcatttgaacctggggagtggaggttgcggtgagcggagatcgcaccactgcaatccagcctgggccacagggtaagactccatctcaaa

SEQ ID NO: 251738 - DNA, 416 bp, Homo sapiens
aaaaacgatcaccacagtcattttgagaacattttcatcggctcaaacagaaaccccaggccatatgtggtatttcatgcccataatcccggcactttgggaggctgaggtaggtgggagcagcacttgagtccaggagttcgagaccagtctgggcagcatagcaagacttttttatttttatttttttgagacatagtctcactctgtttcccaggctggtgtgcagtggtgcgatctcagctcactgcaacctccgcctcaccctcccaagtagctgggactacaggtgtgtaccaccacgcccagcttatttttaaattcttgtatagataaggttttactacgttgcccaggctggagggtggtggtttttatattccttgtgtgaggggtgtctgtgactcgtggaaatg

SEQ ID NO: 251739 - DNA, 292 bp, Homo sapiens
gtttccaaaacccagatccccaaggtttatctcaagtccaggagcacctcaaagacctcatggcaaagccaggtagaattgctcagcaccctccaccacaacctcacccagtcctctgggtgaataatatgggcacgcctggttgctcccagagcctaaataggcacggaaggcaaggagggcggcagccatgtgtcctgggaccaggcccacttggcttccaacaactgcttagctctgtccacaagttaagtcagcctcagtttcctcttcagtaaaattttgagactga

SEQ ID NO: 251740 - DNA, 765 bp, Homo sapiens
tagtaggagcaggtttatgctgaaggaagtcagccacattatgcatgcataaaaattgccattattgatatagtaatcttgccaagaatatagaccagcctgatacaggatatgaaaataactgaatgatcttggaacttattttatccatgaactaatatgttaacacgtaaccctttgaatgtcaggttccaaataactaaggccatatcaaatgtgaaattaacacagcatgtggaagtaaacttaaaaactaagaagttctttacaaacataatcatttcttaacttttacagttaatgatgtagaacttctaaggtagtgtgaaattaaaactactcattaattttatagtattttagaattgaaaaggtgacagatctttaaaaaaaaaaaacctcgtcaaacgaaaactgttcattttggtcagtcatattcaaaaaacttagtctgggccaggcacggtggctcacgcctgtaatcccagcactttgggaggccaaggcgggtggatcacggggttaggagttcgagaccagcctgaccaacatggggaaaccccgactctactaaaaatacaaaaattagccgggtatggtggcgcgcgcctgtaattccaactactcgggaggctgaggcaggagaatatcttgaacccagcaggtggaggttgcagtgagcggagatcgcaccatcgcactgcagcgtggtgacagagcgagactccgtctcaaaaacaaacaaaaacaacaacaacaaaaaaa

SEQ ID NO: 251741 - DNA, 1094 bp, Homo sapiens
caagggaaccgttgtacaacagaccaggaaaaacaggttcatagttctcttaccaactggacttgagatgaagtttaggtcatattgaagaaatagaactaatcttttttatataggtgtgtgttgaagaccaaatattttctccaaaatactgtttagctaagtgctgtgccacacatggacatatggtgcataataaattcacttcccttctttccaaagatacaccaacattgccagagtagttgactcactagtttaaaatcaacatttacttactgttgtccaaccaaaggatcaacccatagattcttttttaattgaaattttaaaatctttatatgtggaagtggaattagatggagactgatgcttgcaatgaaagccttactacgctttgtgttttggggctggagagggtggggggagcctgtattttctagatttctgtaaaattgagttacagatgaaatgccacttgagacaatctcgttaagtggggggccagaccctggcttttaaacatgaagaatttgataaacagggtcctagggaagagtcactctgactgtttagggcaagtgcatcctctgctggccaaaataagtatagcacctgctattcctgacttctgcatcctttttccatcaagctcaacgtcagagagaacttcatgtggaagtgcagcatggttttcaggaaagcagtattttaaaaatattatttaaaaggaaggactgtaaggaacaggtaaatgttaggaaatgagaagcagagcagggaagagaagagaaaaaataagatactgtgatttcagacaacctggcatcacggcccagagctcacttctggggtgggtagggctgacgctctcagtcattgctttgctatccagaggccccccaatctgagctgtaactcaccttctagccccactggtttttacattttttcctttttctccttgatgatctaaggtagctgtcaaaatgaagtctggtgaacttttctgaagtgataggtgaaacatctgctttctgcacagcactggaatcatagcactcaatggatttagctctaaagagaaatttagc

SEQ ID NO: 251742 - DNA, 467 bp, Homo sapiens
atgtgacttagagattttggaggagtttggagatgatgatgggatccaaggtagaaggtagactctggtaatattgaaagcgtacccttggctggggaagaaggcaggagaaggtgtcttggtataatgtactcagtgacatttttagaaaatgtggtgtaagatctgttgtcccaatttagctagtgttgtaaaaggaccatatgtggctaaatcattttcgtttccctttaggaacctagaagaatgtggcatctgaagtttcttagggccagtgcccatgttttctgtatccctaaagcattgggcagagcagtgagcagctgctggacactccacacgtgtttgcatgagtgttttctcatgtgactttgctctcatttgatttggcttctctgtcagtctgcatgcatatgagaaggcttcacagtaaagttttaagaaaataaatacaaaaaattgaaatg

SEQ ID NO: 251743 - DNA, 503 bp, Homo sapiens
atgtgacttagagattttggaggagtttggagatgatgatgggatccaaggtagaaggtagactctggtaatattgaaagcgtacccttggctggggaagaaggcaggagaaggtgtcttggtataatgtactcagtgacatttttagaaaatgtggtgtaagatctgttgtcccaatttagctagtgttgtaaaaggaccatatgtggctaaatcattttcgtttccctttaggaacctagaagaatgtggcatctgaagtttcttagggccagtgcccatgttttctgtatccctaaagcattgggcagttctagctggcaatgctgatcacatcttaattatcagtaaaggtcacagtcatattactaagatagaatttaattctcaaataatgtccttgttcctcgtattcgctaaaggcctttgctcccaagaagtcaaagtagaatatattttgtagctgatagaacagatgtctgacagacagcacaagcttcggg

SEQ ID NO: 251744 - DNA, 663 bp, Homo sapiens
agcgaaagtagctacaactctgagaagctgagacagaggtactcaatagagccattcctatgagaaacgtaagtatctgctgttttacaccgctaaggttttagctaatgtattatgccataatagataagttatatacaacctttatcaaataataaaagtaaccatcatcagtaatgagacaaatcaaaaaccatggcccacccaacagaacataatgaggagagtacagaattgcttctgggatatttctgacaaagatgtatatgcttcattcatacatgaggaaacatcacacatactcaagatgggagagccattctaaaaaataactaggcagaaaccttcaaaaatattaaagtcacggaaaccaagaaaaaatatgaacctgtttcagattaaaggaaactaaacagacctaacattttaatacaatgtttgattttgaacttgaactttttgttatataagacactattgagacaagtgctaatgcttgaatagggctgaaggattagattataataatacattaatgcaaatttcctgattttaaacattgtagtttgattgcacaaggagaatgtctttatgtgtggaaaataaatagtcaacattctgtcttcaagcttctgagaaaactctgcttttagggcatagata

SEQ ID NO: 251745 - DNA, 491 bp, Homo sapiens
  misc_feature (356)..(356): n is a, c, g, or t
gggggcagtttccctcatactgtcctcgtggtagtgaataagtctcacaagatctaatggttttatcagggatttccgcttttgtcagggtcttttcccctcaaattgttaaggcagcacttgttacaaagccaatcttcaaacttaggtctgggattgctataatgcattgcaatgtgctttccttgaatcaccaactttttctgtaagaaaagaagtaattagttattcccattgtgaggaacatgtgtccattttcccagggcagagcacacttcggaaaaatcagtgttctggaattcaattgaccacatacggggaggaccaaccaccggcacctatactctgcccatccnatccttcagataggccgtaagagaatgggatgcggagtaaaggttaacggagtccgggagtgctgagaaagctgtctaaacactttacgctgacttgcaccaagccgtgtctcccgcggagacagaagtccttac

SEQ ID NO: 251746 - DNA, 741 bp, Homo sapiens
acgcctgtagtcccagctactcaggaggctgaggcaggagaatcacttgaaccgggaggtggaggttgtagtgagccgagttcacaccaccgcactccagcctaagcaacagagtgagactccatctcaaaacaaaaaacaaaaaaaaaaaacatgtccagaataggcaaatctgtagtaggcagcaaattagcagtcgtctagggatatgggcacacatggggaaatggcaagtggctgttaatgggcatggggtttctttttgggtgatgaaagtgttctaaaatcgattatggtgatcctcagttctgtgagcttgctaaaaaccattgaattacatattttaaattgtgagttatgtggtacatggactatcaagctgttacttaaatgcctggagttactgtaaaagatgtgaaccagcaggagttcatcagagctctggcagccttcctcagaaagtctgggaagctgaaagtccccgaatgggtggacaccgtcaagctgctggccaagcacaaagagcttgctccctacgatgagaactggttgtacacgcgagctgcttccacagcgtggcacctgtacctctggggtggcgctggggttggctccatgaccaagatctatgggggatgtcagagaagtggcggcatgcctggccactttagccgaggctccaagaatgtggcccaccgggtcttgcagcgcctttagggcttacaactgcggatatggcct

SEQ ID NO: 251747 - DNA, 428 bp, Homo sapiens
cagcaaaggacctatggccaagaaatgggaaaaaacctagaatggaggcagcgtgaaagaacagaagggcatctgtggcatattagcaaatgcacaacaattttttaaaagaaattaacagcccaccaaagggcaaagctgagcacgggaaggaagactgatctctagctaggcagctttcaggcatcctgcctcactgcccccaggccattctgtgagctcaatgcccaactccatcagctacattcctggttctcctgttcaagtttccagttgccacttaagctctgcacacacagcattttcaaagcttgtgagtgaagctgcagaataattccatttgtgaagcaattacaattcagtatcatgtcccacagatgcctctaaacccagatatgccctaatctcatcatttaaggttttgtgtt

SEQ ID NO: 251748 - DNA, 585 bp, Homo sapiens
accttcaggctgattgcaggccgcctactcatgcattattggaagcgccgccctagcaatatcaaccattaaccttccctctacacttatcatcttcacaattctaattctactgactatcctagaaatcgctgtcgccttaatccaagcctacgttttcacacttctagtaagcctctgcctgcaatcaagcctggaaactggcatagtatgagaaactggcccaggtggaagccgatggtgagggaagcgggaaggcagaccctgccatctggggctctaggaccccacacacttccagagtccaccttgagcaccgctgctcaggggacactgtaggggatggtttcaagtgggcctggcataaactctgccaggcagcagggggacttccactgccaatgtgaggaaccagggtttgactccaagggcgatggggcctcagcaggggggcatgtgatcatggagagcagaaggagctggggaggagacggccagggagaaccaacacttccaggccgcacacctggctctatagtcaggcctgggcttaatacctggctctgttgactgtgcgacttgggg

SEQ ID NO: 251749 - DNA, 203 bp, Homo sapiens
gggtgagaatctggctgttggtggcatggcgtaaataaaatgcttgtttttgaagctgtccaggatcatcatctgtacagttggccagaaagcagctgttgagcctgggctgacttatatcagaggttgcagtgagccgagatcatgccactgcactccaccctaggtgacagagtgagactccgtctcaacaaaaagaaaaa

SEQ ID NO: 251750 - DNA, 483 bp, Homo sapiens
acttttttggaggactcctgctcatgccaattatgagatacccaacagaaggtgcagctggaaataccatcttatgtcaatgaataacaaacactaacctctttgtgattattactaaaaggttaacctccttatgcaaatagtactcaaatgtatgattacagatttttatgtcaataaatattgtgaagggtaaaaataaggctattacaaaagcctctttggttattggatatcttactaacaacgtgacttctgtagcacttccactagcaggtaactgtgaaacctgtaagaaatcaggatatggacatatgctccttggtttttgaggcattactaagctaggaaaggtgacctgaaagatagctgcattgaacagtcttctccaggttaaaaaagaaaaaaaattccaaaggactaagattgcattcttttcatcaagaaaacaaatatattgcatttaagggcaagattgaaaaa

SEQ ID NO: 251751 - DNA, 391 bp, Homo sapiens
agcatgcgagacccctttgcagaggggcactgctgcgctgccaaggcaaagcctgaacaggaggaggagacgagggtcacagtgataataccccttggagggcaagctggggtgggccgaggaaggggccggggcagagcttgaggaatctgctgaaggaacagcctgttcaggctgactcaggtcggcccacaactcccttcaccaccccaggtcctttgaggtacagaggaggcaaaggagagagcagctttgcagcctgcaaaaggtctcctggcccaggcttgtctaatttgcagctctaggctcccgttcacagccccgcatgtctccatgctggttaggatgatgctagccctgtgataaacacatcccatcatttcactagctt

SEQ ID NO: 251752 - DNA, 454 bp, Homo sapiens
tttagttatagcctgataatgtttcttgagtcatcacacggagtgaatctataaccaggaaaacacataggaaccaacgctaatcttattcctgaagttgtccgtatgaattcatgagaagtcctgaaagtaagcatcttgcagggcaaatggcactgcctgatcctctaagctgaggttggtagttttcatcatgatggttttatttggatcagtgttggcatggatttaaaatttatgagtctagatcttcaataataataatatcaatgatatgattaacaagcaatttcttttcttgctgcgatccctgtttttctgttgtgaatttctcctatcttgaggatgatgtgatcacaaaatgggaaccttagactggttgatatttgtcttattctcatgtcgactacattttctgcttttttgtgccattggtcaaccatctaatcatagc

SEQ ID NO: 251753 - DNA, 391 bp, Homo sapiens
tatttttgctttctgcatattaatttatgatttttaaagtgtttaaatatcaggcaaccatttattttctgaacttttgagcaaacttggttgctaaaatagatttcagctaagtgaatacttttcagaaagtacagaaaaagacctttgtagaacagcgctttattattttagagttgtttgaaggttgtctaagtgaatgtgttttcaaggttgatgtatgaaatttccaggaaggttgatttagatttttttcttaaggtttttcatcaattaggaggcaatgttttgaaaacttggatgtcaaaaataatatttattagtctaacttttatattcacagtttaagttctaaagaagttaccaaataaatcttaagtgcgtgtgtttc

SEQ ID NO: 251754 - DNA, 397 bp, Homo sapiens
aatttatcttccagaagtttatctcatatgaataatcaggtaagtgtgcacagtagtagttgaaaggatatttagcatagcatttgtggaagattgccaaatgtcaaaaattccttcatgcttttatgttatatttcttgtaatgtgacgttgcagattctcaccaagcaatggagtctattcttcagcctttgactctgggttggacagatgacttgggttgggcaaaaagacattactaagtatattagaagctaaggcttaacaagcacttgcacattggagcttgctgtccaagcctctgagaccactggtgaagaagtccaggctggaccactatggatgagaaaccacatggagagaggacccctagttgcttcacagaataatgaactaa

SEQ ID NO: 251755 - DNA, 656 bp, Homo sapiens
tcaaaatttaatattacgaattgtgcaaagaagtatgttactttgatcagctttattttagagcttctttatcaagttatcatcagtcctcttgaattatttctgaaataaggggaaggaaggaagggaaaaaatatgaatgcatagatagatctaagcagatgccttcagagccctggaataatcctagctgggatatgggacatgaaaacaactctggcctactgctgctgggggctgttgcatggtgtgacataggaagtaaaatgttgctgtatgaataggaaggagggtcttcctgtcaatgagaattaatgttttcctaatgatttaacttttttactgaaaaaataatatgtgtacatggtaaaaatccaaattgtatcacagaaaatacagtgaataaaaccatcctcttaagagggtgtgtacatttataaatttgcctatgattgcctataaagtcaaagaagttgcaccagtatgcatgactgccaaaagtacataaactgagcatatccatttccctacattcttgcaaacattgtgccttcgaactttttggcctctgatagaggaaaaatggtaactccttgttttattttttatattcattattccttttgtaagattaaatatcatctcatgaataaaag

SEQ ID NO: 251756 - DNA, 271 bp, Homo sapiens
agtcataaaagacattgcaacttcctctttcctctgtcttgattgctcatggggaatccatgttgtgaagacactcaagcagtcctatggagaggctcgcatggggagtaactgagctgcctgccaacaaccagctccaacttgccagccatgtgtatgagccaagtggctccagcagtcctagtcaagctttcaaatgactgtggcctggccaaaatcttcagtgtaaactcaagagcaaccttgagccagaaataccttgcaatgccac

SEQ ID NO: 251757 - DNA, 488 bp, Homo sapiens
tcatttctcatatatggagtagcccacaaaggctgtatgcaaggtagtcttcagaaagcttacatcttcaccaaggcacatgaaactgcagaaagaagcaatgttaggcgttcctgataataattatctgcctggatgacagcagtcctgctttatggtcacagaccccagctttctgccagaacatggctcaggactcctgaaaatcatcccattcgggagcaagtgggtttaatttccttttcatgaaaggaaagattagctttcatgcaaacacttggtccatttggccatttaataagaagactgaagtctcatgttccataactttatcagcctaaaagtccctttgttgtatcataaacacataggctgaaacccctgtccttccaactcagagcaaattctgttgtattaaataaccatgccatgtactgaatatttttacacttatttattggacttgactcctacctccttcccgcaaa

SEQ ID NO: 251758 - DNA, 491 bp, Homo sapiens
tgctggaattacgggtgtgatccactgtgcccagcctgcttgccgttttattttgctccctttttccttccaccaggtcacgattgttataaaccataaaggtggtatcaagaagctgattttgattagtttgtggccccatctgtagtttttggagcttatgtctaacggctggggcagattggctaatgaaatgctgtgccattcctattttgcctttgggagaagaagggtccagattagtgtatttgttaaaagcttcctccagcctgccatgaaacatggctgaattttcctcctttccctgtgtaacctcccttactttatcataatttactgctttagttattccctttctcattcctccaaggagagcctaaagaaatttagcccagttgttcattcccatgggtgtgttatagtcccagttaggatcagtagtagggactgtgtctggtcctgggtgattgccctgagggtttcgggcaaat

SEQ ID NO: 251759 - DNA, 443 bp, Homo sapiens
attccagatttaacctttcagctaaatgataagcatctgaaaacacttagtaagactgtcttttccgaaacctggttgaaaggcagcacagtggttgcaaatgatggattttatgtaatactgaaaggcctagctcgacctcaaacaaacgtgtataaaaatctgattgaaggaagtgattcaccagactcgttcatatctcagagtttccacagcttcatttggagtgaagaattcaaaaactctacacttgctgagatgtacctaccttcatatgactcaatggtaagagatgagtatttgctttttccacaagcaacaaggtaacgggcttttgtaaaactttatctcttccagacattaagatccaatatctttagagtcctgaaatatttacgataatatagcctttaaaatataaatgatattattaatacttacat

SEQ ID NO: 251760 - DNA, 441 bp, Homo sapiens
aaaacacgaaaccctcacaggacccttttctgcttgtggtccctgtgcctggctgcccagatgtctcggggagcactgttcccccaatatcttcagtgcctactcccttaccttcttcaggtctttcctcaaatattacctcttccattaagcctctctgattatgctatttaaaattgcaatccggctgggcgtggtggtcacgcctgtgatccgaaaacttagggaggccgaggcgggcagatcgcttgaggccaggagttcaagaccagtctgaccaacatggtgaaatactgtccctactaaaaatgcaaaaatcagccaggcttggtggtgtgcacctgtagtcccagctcctcgggagactgaggcaggagaatggcttgagcccgggaggcggaggttgcagtgagccaagattgcgccactgcactccaccct

SEQ ID NO: 251761 - DNA, 481 bp, Homo sapiens
tatgacctctacactctcccctacctgatgaagtgcctccattcgacccgcaatctgctcagagggcccccactcttgctgggagccttgggtaatagcagaggaagcctcttctcttcttgaagatgacacacctcttttcatccagtctaactgagagcaggctgaagagttacatggattacacggaataacatacccttctaccacagcacttcccggtccttgggcttgtcttccctgggtggagaaatcagccagacaagctactatccaagagggtaacagaaatcttaccagtacttggatgtgtttgtacctctcagcggtcaatctgggcattagatttgtggtcagaagacttgaattatatcctgactctaccggtttgagttgtatgctctttggcatatatccccctttgtaaataacaataataataataattaaagaaagataacaaaaaaggttatacctcact

SEQ ID NO: 251762 - DNA, 443 bp, Homo sapiens
gagaattctggctataaagcaaaattgctctatatagactgatcctagaatagccacacagctatttttttctctagactacactgtccaatttggtagccattagcccacatgtggctaagtttaaatatattagtgacaattaaaatttgctcagtggccaggtgtggtggctcacgcctataatcccagcactttgggaggccaaggcagatggatcacaaggtcaggagttcaagaccagcctggccaagatggtgaaaccccatctctactaaaaatacaaaaattagccaggcgtggtgatgggtgcctgtaatcccagccactcagaaggctgaggcaggagaatcacttgaaccagagcggcagaggttgcagtgagccaagatcgcgctactgcgctactgcactccagcctgggcaacagagactccatctca

SEQ ID NO: 251763 - DNA, 419 bp, Homo sapiens
ggcttgagctcctatgagaacctaaggccaccgccgccgctaatctgacaggaggcggagctcaggtggtaatgctcgctcacgcgccactcacctcctgatgtgcacccagcaggtgcgcaaagcagacgggatgaacgtctgggtaggtggaagggttgggagcagtcaggactcagggaaatgtggcaggagtcccagggagagggcaagaggaacccgagagccccctttgtcctccccccataaagtgtcaacagagccaccttcgtcactgagcacaaagctggcagatagaaagaaagtgctcgataaaatagccactaaataaaatgaatgcacagctttgaaaatcagttgattcttctagttcatagtcttcttacagcaaataaatgatgaagacacatcatttgtgt

SEQ ID NO: 251764 - DNA, 493 bp, Homo sapiens
tcactagattaagggatgccgagatggctggtattttttctgggtgtctgtaagggtgttgccagaggagagtgacatgactcggtggactgagaaaggaagacccaccctcaatgtgggtgggtaccatccaatcagctgccagcacggccagaacaacaggtggaagaagggggatgagcaccttgctgagtcttctccagccctctccctcttccgtgccagatgcttgcttcctcttctctgctgttggacatcagactccaggttcttcggcatttggactctgggacttgcaccagcagcttcctggagccttctgccacagactgaaggctgcactgtgggctttctggttttgaggcttttggacttggactcagctatgctaccggcttctttccacagcttgtagatggcctattctgggacttcaccttgtaatcctgtgagccacttctccctaattaactcgctttctatatattacata

SEQ ID NO: 251765 - DNA, 199 bp, Homo sapiens
aaaaaaaaaaaaagccctacaagaacttataacaagtttagcaagattgcaatatacaatcttgcaatcttcctaaagattatatacaaacctaacagaattgtatttatatatactgtcaataagcaattcaaaatgaaattaagaccacgattccatttaaaattgcatctaaaaataaacaaaataggaatagact

SEQ ID NO: 251766 - DNA, 438 bp, Homo sapiens
ggaaagaggagggagatgaggcctaggcgagtggaggacctttcctgaggctgcaggtgccaagcggtggacccttaacttggacccagactgcctgatgtggagcctgtgtgctttgccataaggctaggctactttctcccaaaagaggtgtttttgccttcctgccgcttagtctgctctcgcccactgctgtgacacactaggaagtgctctgtcctgggcaacagagcaagactccatctcaaaaacaaacaaacaaacaaacaaacaaacaaacaaacatatgtggaaccaagcaacccaggggttgcttggttgatctataaagtccttttcattgtaagattatatgattttcggtaaactgtatattttttaaaaacagtccagaatatccgcaagtgttttaccacgtgcttcttattggtggagaag

SEQ ID NO: 251767 - DNA, 601 bp, Homo sapiens
ctgtgcaaagcagtttggggacttctcaaagaactagaaatagaattgccatttgaccaatcaagccgattactggatatctgcccccaaaaagaataaataattttgccaaagagacaccagcactcacatgttcattgcagcactattcacaatagcaaaaacagaatttaaccagttacccatgaatcttttattggataagaaaaatgatgtacttatacaacctccaatactatgcagcaacagaagagaatgaagtaacgtcttttgcagcaacatgaatgcagctctgcttcaggccattctaagcaaattattgcatcagaaaaacaaatgccacatgttctcactcatacatggatgctaaaaattgggcgcacatggaaacaaagatgaaaacaataaacactgagaattctaaaaagaaggaggaaggatgggagacaagcattgaaaatctgcttaggtatgatgtacactacttgggcaatggaattattaagtatccaaacctcaacatcatgtagtctacctgttttacaaatctgcacatgtaccttaaatataaaataaaaataataaaatgttttttggtata

SEQ ID NO: 251768 - DNA, 843 bp, Homo sapiens
ctgtgcaaagcagtttggggacttctcaaagaactagaaatagaattgccatttgaccaatcaagccgattactggatatctgcccccaaaaagaataaataattttgccaaagagacaccagcactcacatgttcattgcagcactattcacaatagcaaaaacagaatttaaccagttacccatgaatcttttattggataagaaaaatgatgtacttatacaacctccaatactatgcagcaacagaagagaatgaagtaacgtcttttgcagcaacatgaatgcagctctgcttcaggccattctaagcaaattattgcatcagaaaaacaaatgccacatgttctcactcatacatggatgctaaaaattgggcgcacatggaaacaaagatgaaaacaataaacactgagaattctaaaaagaaggaggaaggatgggagacaagcattgaaaatctgcttaggtatgatgtacactacttgggcaatggaattattaagtatccaaacctcaacatcatgtagtctacctgttttacaaatctgcacatgtaccttaaatataaaataaaaataataaaatgttttttggtataatgacatgttctatttttccagtgctgggttaatagttgaaattaggggtgaaagacaaatttttcaccccttaaggcatggtggtgaatgtttctataccaggtctcctcacattttataagctaacctgaaatttcttagtctatagcccaaaaagtgttttattttcaagtgtgcaagtaaaacaaattacacctttattatttatgtattaactgtacactacactatagacttaatt

SEQ ID NO: 251769 - DNA, 147 bp, Homo sapiens
tgggggtgaattttttaaaaaaggaaaaaaaaggaaaaggtagatatcaaaagaaataaatgacatccaaattggaaagtaaaaggtaaaactatattcacaggttacatggtcctatgcataaaaagcatcctaaagaatccacca

SEQ ID NO: 251770 - DNA, 633 bp, Homo sapiens
attgcatatctgtttatctccctgtgcatccatggatccaattcatctttaggatgcatttcaaagcaagttgctgacgtcagtacacttccctctcaatactttagtatgtggatcaataaccctagcttaagatttgttgattgtttttctttccttttgaagtaaaatttacacacaaggaaatgcacacatcttaagtggaccatttgatgagttttgagtaatgcccacattgtgtaactcaaacgtctatcaagaaagaacattaccatacctgagagtatcctcatgctcctcccctggggtactccctgcctctccacaccaatccccccaggtaacaactgttctgatatccccctcaccatatatacctgctctagaacatcatataaatggaatgatacaatatgtcttttgtataagctttattccactcagcataatgtttttgccattcacccatattattgatcatattagtaccttgctccttcttattactgagtagtattagatagtataaacatagcgtagtctattttcctattttgatggatatgtgggcttgttctgatttttgcttattatgaataaaacttctgagtattcttgtacaagtattttttg

SEQ ID NO: 251771 - DNA, 515 bp, Homo sapiens
ccttccccttttcagcaatcatgtatcccattagcctgtttgattgccgctgctcacaaaggggcgccttcgctgaaccgtcttcaatggcctctggatctctcccctgagagaagccggctaatttggaatgtggtcgtgtgtatgaatccgacacagcctcagtcacaatcgggtgtccttttctgtagctgctgtttatgatcactttgccttgcctctctgggagccataattcaccacatactggagataggctgggtgttcttttctccgtgaatcctggacaggatgtacacaaatgtgctagccccttcttggtgaccaggctaattcctcagtggcttggtgctgctgcctctcattagagggattccctaagcactatttgcttgacaaattttcaaggtttttaaaagcagaagcctttgctaattttcccaagttggcctaagagtccactgtgaactgcagcagaaattggggaaatttaataaatgttgatcaatgactct

SEQ ID NO: 251772 - DNA, 346 bp, Homo sapiens
ttgtgagaagagagagcaacaccagcaatgcacatgcaaagaggaaaggccctgcaaggatgctaagaacgaggacggccatccgcccaccaaggagagaagtatcaggaggaacaaaccggccaacaccttgatcttggacttccagcctccagaactgtccgcagcttgggctaccttccagcataaagtcactaaagatgtgccgggcatgatgaaggaagaaagcgactacatgctgaaggagatggtgcggggactcgctagtacctattggcaggacctggggaactttggtgggtgcttgataatggggactggaataaaaactggctaagcaaaaatt

SEQ ID NO: 251773 - DNA, 489 bp, Homo sapiens
tgccttcttctctctcctctccttgccctttgttctctatttctaagccttcctgattggtgtggtttaattaccagtctgcccttgcctccttgaagtcatctggaatgtctctgagacatcactgctgactcaaacccataagggaaattcaggagtatatgctccgaggatccaattcccttaagtaacagcctctttctgtttcatgtctagttaatttgtttaaatccgagacagaaggaagtgtagagggatcaccgtggttctctgtccccaggtggtgttttttgtaagcttggggaaaaattgccaccgatatacacttttcctcatgactttttatttttacgaggttccttctcctcagtttcttttggctttgactggatgctgctaacctttttatttaggaatcttttcagtattgctttcaaggctcaggaagtttagtatagctgagactttattcccccaggtcctgggtat

SEQ ID NO: 251774 - DNA, 480 bp, Homo sapiens
acctcatctccctttaatttcattttttctccttaggcctggaacaagatggctgttttttggagagtgaaactgagtgcaagtcatgtaatgtttctgtatgatgtttttggcagtgatgatgaaaattctagactgaaatgatattgcgtgaagtctggaccaattgctgtgttaaagtagaatgaatttcctccctttctgctgtctggatcaattttgggggcagttagagaatttagcctttcagttgaagcaacatattgtactgataacatgcaaaagtacagtcagtctgattggactcactgggcttttccaacttgctgctaatgtgatcattaggagagcttctgcaaaataaatataactcacagaggtttgttaagaagggttccagattccattgaccaacagaggaatgtttaatactctactataaataacaacaacaaaaagatgctatcccctcccctgaaa

SEQ ID NO: 251775 - DNA, 280 bp, Homo sapiens
aaaaagcagtcaccaaatgtgcctcctctcctgtctgggagttgtgtctgttcagtatccactgtgtcgatagcaaataaaaggactctaatcatttgttgactgccttgctgaaaccttgtccggaagagtgcaagtgtttaaaaataccatttttgtgagaaaagtagcgacatatccggaaatgcattctatttactgtgatgctcttacattcatcgtagcctagaaggtgggggaatttcttagtggggaccctcagacttttattgtttttttt

SEQ ID NO: 251776 - DNA, 569 bp, Homo sapiens
cccttaaagaagaaatctccccagaaggcatcatcatgttgcttaattgtcttctgcagcttcctttccctagagctttccctgtgttgctaagagctgaagatggcatcttcgtgatcaccacagtgagctcggctcgcctcggacggcccgggatgcactcttacaacatgtgtgactcttgaacctggagttcatcacattgcaacacggtctctcagagagaccgtgttgtaatggaaaatgtaaaacataaaaatacagaataatagaagtgcctaagtcaatctgcttggctcagtaaggaaaagcttcagagaacaggttgttggctctcacctgagaccagaaagatgagtaaaattttgccatgaacaagcagacagatggcattccaagaaatgaaaagaacatatgcataatcatgttattatgtggcagatattgttttaagagctttacgtgtaccacttccttaaaacataaatctaagacaggataaaatatttggagatttgatctgacccacagctcacttttcaaatagccttaaacacaagacatttgtc

SEQ ID NO: 251777 - DNA, 395 bp, Homo sapiens
tgccagatgttgaaatcaaaggacccaaaatggacattgatgccccagatgtggaggttcaaggcccagactggcacctgaagatgcccaagatgaaaatgcccaagtttagcatgcctggcttcaaaggagagggccgagaagtggatgtgaacctgcccaaggctgacattgatgtctcaggacccaaggtggatgttgaagtcccagatgtgagccttgagggcccggaaggaaagctgaagggccccaagtttaagatgcctgagatgcacttcaaggcccccaagatctccatgcctgatgtggacctgaatcttaaggggccaaaattgaagggagatgtggatgtgtccttgcctgaggtagaaggtgaaatgaaagtgccagatgtt

SEQ ID NO: 251778 - DNA, 310 bp, Homo sapiens
aaaagagggcattctctggctgttctgagagcctacctattgtctgagtgcattctggtatatatcataaacagaatccaactcaatgcaaagcaagaatgagaatctctatgtgttgggaaatgtggcctggccaaggtggccattgtatagaaatggctcaaaaagtaacaaacaagaatcacaatatctggaaatgggaattatgtaactgaaaatgcatttgctccagcgcattgcctttcatgagacattgctcaagtatgttgtttgcacatacagcagagtgtgctctgtgggggggaaaaag

SEQ ID NO: 251779 - DNA, 556 bp, Homo sapiens
ggtttttagtaagtttcatgcaatataactgacatgcatcactcattaatgtcaaaaatgcctggtctaggtgggtacagatattttcataacaggtattcagaaaaattagctatttttaacagtgttttattagtttttgtctcgttttctcagtgctattactgttttgcaattcagaattatcatttatgtatcttacttattccgtaagtttgttgtggcttagttaccattatgatatattgtgtagtacttttttcatttatatgggcacagtaaatatgctgtggctaggtaaaatgtaatatttatttcaataatgagacagccatgtattttctgccaattggtgtgtactttgctgtcaaggtgaaaaaatactcctttcagggctaacgtaggtttgtacaatgtgttttggtcataggatgtttgaatctgtccttccctagaatttatttgaatgccatgtaatcaccctttttttactaaagaatgtgattcctttgtgttcgtaaaaattaaagatcatgattgggaagttttataactc

SEQ ID NO: 251780 - DNA, 981 bp, Homo sapiens
  misc_feature (629)..(629): n is a, c, g, or t
  misc_feature (632)..(632): n is a, c, g, or t
  misc_feature (637)..(637): n is a, c, g, or t
  misc_feature (644)..(644): n is a, c, g, or t
cttccaggcaggctgcagtagcctggagcgccttatggatattaactccctcaaccctgacggcagcccagtggggagggtgcacttcccttcaagtcttacaggtggagtctcgctctgtctcccaggctggagtgcagtggcgcgatctcggctcactgcaagctctgcctcccgggttcacaccattctcctgcctcagcctccggagtagctgggactacaggcgcccgccaccacgcccggctattttgtatttttagtagagacaggggtttcaccgtgtttgccaggacggtcttgatctcctgacctcgtgatccgcccacctcggcctcccaaagtgctgggattacaggcgtgagccaccctgccaggcctcatgtttgcttatcttaaccaaaatgagccctcgtttcactttcctgttctaccctaaggaagataaaatatcattccaacttggggtagaggcaggtgccagtacccaagaccctgggctgtgcagcaggggctactgtaaacccaagaccctaaacttcctccctctgccagagccagggagcagctctgacgccctctagccccttctccgttagcctcgatttcaaataaaacactgtggaaanaanaaaanatatggnctcgttggcctcacggggggagtctggggccgttccctttaaggaggggtattcgggatcctgggtcatggcttcgtgcgcttcgcgttccggctggggagcgggattagctcgtcagggcgggattccgttttcccagactagggggtacccccggaagaaatggaggcgagggccggatagggccggaacgtagaagggcgcgggggggggtgttcatgggtcccgccgctgtgagcgtaccgaaggggccttaatccgggggggggcccggatcgagtttaaataccgcgggtgcccctggagcacttagggctgttgtagcagcgtgtgtgac

SEQ ID NO: 251781 - DNA, 676 bp, Homo sapiens
cttccaggcaggctgcagtagcctggagcgccttatggatattaactccctcaaccctgacggcagcccagtggggagggtgcacttcccttcaagtcttacaggtggagtctcgctctgtctcccaggctggagtgcagtggcgcgatctcggctcactgcaagctctgcctcccgggttcacaccattctcctgcctcagcctccggagtagctgggactacaggcgcccgccaccacgcccggctattttgtatttttagtagagacaggggtttcaccgtgtttgccaggacggtcttgatctcctgacctcgtgatccgcccacctcggcctcccaaagtgctgggattacaggcgtgagccaccctgccaggcctcatgtttgcttatcttaaccaaaatgagccctcgtttcactttcctgttctaccctaaggaagataaaatatcattccaacttggggtagaggcaggtgccagtacccaagaccctgggctgtgcagcaggggctactgtaaacccaagaccctaaacttcctccctctgccagagccagggagcagctctgacgccctctagccccttctccgttagcctcgatttcaaataaaacactgtggatgcggccgaatgccgcattctcgctccctcctcttctcatacattcgtaa

SEQ ID NO: 251782 - DNA, 355 bp, Homo sapiens
ttccagaagcaaaaacaaaaaaagttcgggattacaggcgtgagccaccctgccaggcctcatgtttgcttatcttaaccaaaatgagccctcgtttcactttcctgttctaccctaaggaagataaaatatcattccaacttggggtagaggcaggtgccagtacccaagaccctgggctgtgcagcaggggctactgtaaacccaagaccctaaacttcctccctctgccagagccagggagcagctctgacgccctctagccccttctccgttagcctcgatttcaaataaaacactgtggatgcggccgaatgccgcattctcgctccctcctcttctcatacattcgtaa

SEQ ID NO: 251783 - DNA, 453 bp, Homo sapiens
cactgtgttttgagtgtaacctgtcacatgagctctggtgtggaattttctacttgtggcatcctgttggccctcaaaaagttttaaattttggagcaatttggatttttggattagggctgctcaacctgtattagcatagcattagtcagctacctgtatgattaccaagagaactgtcaactgcagaatacgggaaagtaaaaaaatgagaggcagggtgggtgaagctggaggtgggggatgtagatagagcagtttacctagtaaagcaatacttatttcaataggaagcaccaggttcagacataagatgtaataaaaagtactttttttcaataaaaggaaaagcctgtacaaaatagaggcagggcagtatcaccttgatatgtcagaataagcactgaaatactacataaaaaataaaccatatcaaaattatcccctaacccc

SEQ ID NO: 251784 - DNA, 474 bp, Homo sapiens
tcaaatgctcactgctggtcttgtcctgctctaaaatgttcagatatgtaatgggttatttttgtcggtatttgggtggtatttttgctctatgacctcccatttctctgacgtctctagattcctttgttatttgtgatttctgcttctggtggtgacaacaaaatctgccattgctgtgcagccgcctcacccatggagcaggcttatcctctacaactattctacagaaaagacaagcaaggtctgcgtggagtgaaagcgccttctttccatatcggatgctggaagctgtgatgttggcaaacggctctttgcatgaagtactgtgtactgaaccaggaaagtgaggtgcagacgcggaagtcaggtgcagatgtgttgggcagatgagctatggtgatggcgggtggccattccctataagagagtggctcctctattattaacaaaataaaaattaaagaaggtttc

SEQ ID NO: 251785 - DNA, 404 bp, Homo sapiens
gtgtagaggggaaggcatacctgtgaaaaattcaaccatgagtttcaacactctgccaggtactggggatggagctttgagaaagatgggcacaacccatgccctctagtggtttacaagcagttttgaatctaggtgtacagtacagtattacagttaccactggagccaggctgctctgtttgtcttagcagtgtctttttgggcagacttgggcaactcacttaacctccctatgcctcagttttgtcatttgtaagtaggcataagaaatattacctacttcatagagttgttcaaggctgtacatgagttagtgcctctgaagcacttggaacaattcctggtaaacagcgatgattatgattatgtttgctgttatgagaaaagagcaagggaagctt

SEQ ID NO: 251786 - DNA, 311 bp, Homo sapiens
actcacagatagcaagggcctactgaatttgtttaacaaaaaaaccttgggtcctacttagtctctctgtcaggtacttttctgaatgttctacaaatattcactgatttattcctcttagcaaccctgagaggtaggttttgttatccttcctattttgcagatgacactaaagcactcatttaattaatagttggtccaagattgctcagctaattggtgttggagctgggattcaaacccaggcagtctggctctacagtttatatgctttaacactattctctgctgagtaattctttcacaagaaa

SEQ ID NO: 251787 - DNA, 311 bp, Homo sapiens
atatatgttcctcattcagcatttatgtaaaacatatattattgagcacttatgtgatagaaaccgaggcaaaacagaaaataaaacagagttttattttgagagttttttttacagcttatcggctctgagaggacagacatgagaacaaataagtgcccaattctgcatttattttggaaggcagttttatgtgagtttaaatcagtaaagacatagatgtatatttttagttttgattaaaactaaaacaattggtagcccttattcatatttttctatcattaaaacttatctttaaaaaatgtctt

SEQ ID NO: 251788 - DNA, 669 bp, Homo sapiens
  misc_feature (667)..(667): n is a, c, g, or t
gccaatatttaggacaccacgtgtacatctgtagaccaccagctgcacccatctccacaaagccaagtgaaggtgtattggggattctctgccagcctgtgtcacccacccacctccttcattatcagcaatagctaccatcatttgtcaagcacctactagatgccagacaccctacacacattgcctcctattctcatccattcctgcaaagaagatgcaatgagcatccttggaacagactgggagcctgatcccaagaggctgctgaactggccccagtcacccacctatgtgccagagtcaggcctggccgacacaaggatctatgctttttctgtggtgtgtcactgcctttttaacaaaagggctgtcaaagtcaccattctttttgatgagggcagcgtaattacattgccttttgtcaggactgtgggtatgtgatttgtcttccacagtctctctggggctgtgtcctacatagcttctgactctcaatttttggtgccatgagctgagctcagtgagtggagctggcttttctgtcgctgagtggtactgcctagtccagatgtcgtggctcagggtgtaaatattcctaagaatggcagcatctatttcctcttttgtttgaattaaagactctgaatttctgctgtaaaaaaanaa

SEQ ID NO: 251789 - DNA, 655 bp, Homo sapiens
aacatggcaagaccctgcctctacaaaaaataaaaatcggctggatgtggtggtgcatgcctgtggtcccagctactcaagaggctgaggcaggaggattgcttgagccctgaaggtcaaggctgcaatgagctgtgtcgtgccactccactccagcctgggcaacagagtgagaccctgtcccagaaaaaagaaaaatccatactggtgtaaacccgtatccagattgactcttctcttaacaaggacacacttggcgttagtatggatctagcctcaaagaccctcgtcacagatgaagcagcccatcgtgaccagtcgaggccttaggaccgcaggaggaatgtctcaggatgagggtcaagcacactgagggtgtgggctggaaaaaagggatctagttgtttcttcctagtctcaggaagccagtgccccaagggttcacacctggtaagtgtaggcgtccttggatatgggctgtagaggaacagtttgaatccaggtgccgccatctaatagctatgtgacagcaaatttcttaatctgagccctggtagcctcatttaaattggacataatgccacctacctgaggatttgtaaaaggaaaagagaataaatgtctgttacatcataaacattatgatgcctgtaat

SEQ ID NO: 251790 - DNA, 498 bp, Homo sapiens
cccctttgagcatctgttttcagatattgtgcctcaaaagaggctattctgattgtgatttttgttgttgctgtagttgactgtcccagtacactgtagattggataagatccctgacaatcaaaacaccctcagacatttacagctattgccagttgataagcactgcaaaagtccattatttctgactaggaaacatattagctattgagtgttatttaatgcataaattcatttatcatacatttttgaactaggattttaaaacctagttaattcaaatgaagagggtatgtggagaagtgtactttgaagattttgtgaaacaagtttcctcttagcagattctcagcataccagtatgagatgaaataatgtaactgtttttgtatcggtatgtttggacatgcttctggctgctggatgaaggtgctagaaaactgtcctgtctttacttaccctcatggtgaatatgaatagaatgatagtttggtggat

SEQ ID NO: 251791 - DNA, 525 bp, Homo sapiens
ccgtgattctgatcccctggccaaatctttcttcctctggacagagggtccagtcgggaaaccttcccgaaagacggcggtcgggtcgggaaaccttcctgaaagacggcgcgccagcccgtcttgcttgctcgccgcctgctgacttccttactttgcacacggaaggggcaggaaccgcaagcgtgcaactagcctggagctacccgtctggactcgcaggccctgtggctgtttcccacagctgctacggcctctcttgctccttgacaccgaggaggaccccactaggatccgagcgtcgtgaactcacctgaactttggaaggttggcactggggggccgcatccccctgggaaatgactgaacgcggggtttcagtgggtcccgcctgggtctaaggacccagtttcttctgtgagcacgggcagtgggaggccggtggaaaggcgcaggggcccacctacgcgtctcacatcttcaggggcgcatttctacaataaaaactcacccaattagacctag

SEQ ID NO: 251792 - DNA, 345 bp, Homo sapiens
gagtctatgggtccctttgggtcccctatgggtccactggggaaagaagagagaagattcaatatgcaacactagagcaagctacatcgatttcatgtgtaaagaaaattaacctcttatgagaataaaaagtgactcaatttaagaaagccatttcaagccttcagacaagttcgctcggaacaaaattcttctgcattgccacagaatctgcagcagaggctgatgaactcctgggggtgagactggaggaaggaagaagcattggctgggagagaatgaggaggagaggggccagagacatccggatagcttccaaatgtttgagtcttggagtctgttaga

SEQ ID NO: 251793 - DNA, 510 bp, Homo sapiens
ctctccactccccaaaagggaccagcacccataccaaggagaaagccttctcaagtgaaatagaagatatgaaaatatgaaagacaggttggcagccatggaagagagagtgaaaaggtctaacatatatgtaactggggttccagaaagagcagctactctacggaaagagagaatgaggataggaagtatacaaaaatataatatctaagaatttttcagaaccgataaaagatagtaatcctcagattcaggtagacatcgggagtactctgaagatgcgcttgtatcggcagcaccaagatttctatctcataatccactgggtaccaaaatagtagggacagagaaaaatgggcctctcgatttgcccttagaatacagatctgagacttgacccgcatatgcttctcatatggaagcagtaataataacagcaataacaacaataacagcaaacacatgatgtgcactgtttcttcaattgcaaaattaggaaggagaaggacg

SEQ ID NO: 251794 - DNA, 500 bp, Homo sapiens
cactccaacctggggaacagagtaagactctgtctaaaaaaaacaaaacaaaacgaaacaaaaaactctaacagtttttttcttccagtggaagttaatgaagacttaatgaaccagaaagaaaaatacagaggaaaggtatttccagctttttacttcaagtttcctgatttggggtacttagggaaaagatgtgcatttcaagactaagaatacatgaaaactattcagttaataaataaaatgaaaccatttattttgttatgctgtcattttggaatagcacaccaagtgtttcatttgctgaacaaattccttttactcgcaggatatcactactatcattgcatacattcaaaacacacgaggcccagtaaggtggctcatgccagtaatcccagcactgtgggaggctgaggcagacggatcacctgaggtcacctgatgtcaggagtttgagaccagcctggccaacatggtgacaccctgtctctactaaa

SEQ ID NO: 251795 - DNA, 499 bp, Homo sapiens
gtttttatttcacatttgactttttgttacctttgtgtcttcagagtacagtgtacgttaagacatatatcgattttcttctcagtagttgaccaattgcctcaatactcttttctttccaacaacagttctttattaagatggaaactaccctggttagtcctatggtgaaatattctgcatacaaaggatactaatggaatgatgagtaacatatttaccaagttgtcaggccccaagagcaagggaagggtgaagtcagtgtggtgtacatgaggcagatccctacctgggaaggtgaagaggggattgggcagggaggtgagtacagcaggcgctcacaaagcggtcagctgtgggatgggaatggtcaactctgaagctacgggacttggagagagcctcagctgttggatgaaagagcgaaaacagatgcagtagttttcaaaccaagttccatggaggcattttaggggctttcctgggaaagcatgaagag

SEQ ID NO: 251796 - DNA, 425 bp, Homo sapiens
agggcgggaaatggagccggagaagcttgagcctctctcttggacaggacaagctgaactctgaaatgggagccggtccaggtggccttcagccccacctttccgatagtctgttagaattttattagcgcagattcctgggccatgccgggtaccgtgaccttgtgtaaatttatttatatttattgtggcccatccaccccacttctgcaaacccatcccgaggcctctggaatgggactccttctccctccctacctcccagccatcctaactcctacaggccagagaatgacatctctaactggctcataatcccttggcagcctggggctactttttagaaccagcaagcactgttgatactgtgaaacatcccattttttccgtattagagaccagatatttttctacctgttcatgat

SEQ ID NO: 251797 - DNA, 467 bp, Homo sapiens
tcccggatacatacatactgctagaaacaaatgactggagaatgtgttcctctgtttacagccttaaacactgaataccttcttcccaaagcagagtatgatttatcttgttctcatctaggaagggaaccaaagacagcaccaccatctctgaattatttgcatgtagatttctatgttgttactaattttaaaagccatcctggctttcttctgtcaaatggtttgattgtggatcacattctttcaccgacagctggtgtattctaaatcaattaatcaacatgcatttatcaagcacctgctgtgtgatcagtgtcattcttggagaattcgtgctgattaaattctctgtaaaacaattagaaagctgtatcttgtttttgctctgcccccatccccaaccccaattcacacaaatgcgtttcaagaccaaataaatgctctttttgtatcagtttactctt

SEQ ID NO: 251798 - DNA, 414 bp, Homo sapiens
aacctctgcctcttgagttcgagcaattcttgtgcctcagcctcccgagcagctgggactacaggtgttagccaccatgctcagctaatttttgtatttttagtacagacagggattcaccatgttggtcatgttggtcaggctggtctcgaactcctgaactcaggtgatccacccgactccgcctctcaaagttctgggattataggcatgggccactacacctggcctccacttgttctttaaagtatttttaaaacaatttttccttgctttgcttttgctttggcaatagataaccaggtcatttctctgccattcctcccccaaatcctactcattttttttttttttaagacaaagtctcactctgtcgcccgggctggagtgcagtggcacaatctcggctcacta

SEQ ID NO: 251799 - DNA, 1054 bp, Homo sapiens
ccaagttcacaaaatggataaatctcagaacacaggctcccaacgactgcaccatgttgcctccacagtccttggacagttctcccgaatgaacaaatattgaaaattcattgttacttctgtgactaatggactttcacagcaaatatgcttggccaggaccttgtaccctgacatttttcttttatttccaggaatggaaacccacactgctgttgtgaagacacctgatgaaactccagcaacttctacatctggcctgctgcttagtcctgggacctgaggtcaaaatcttagaaaagagccatgtgagatgcattccctggcctcatctctgttcttggatgctgtcagcaacactccttgagtttttacccacataataacactttcctcagcatggatgtggaggtgggggtgaggaatgttctatttttccttcgatggttacgccctcaccctaccaactcagtaaaaggggagtggtcagggagcgtactgagaatgtgtcctagcatcttttcttccctagcacagccttcatatgacccagctgccatgagaagcttgcctcccttctaagggaattacccctgccttccactccatcctcaccttgccctgcccagattagaggcacggaggcatgtaccacaggcctgaaaaactgtccagccaaaaagcctgactgccttgagtactatcagggtgtagttatggacgtgcctgtttctgctcttccctctgcattagtgctctgcaaagggtggctcttaccctcagatggtccagaggtagtttggggtgtgcatggatcaccttcactcttcagaggcgaacagacaatgctgctcttctccaacagcctctgaaggacaccacctactgactggttctgagatgtttgctgccccagagtctcccacctgcttcttcctccccctcagtccttttttgtagcctctcagcctcccttctcttaatgctcttagcaccctttcctgggtctctatttaccctgccctccctttcagcaactccttcccaaaccact

SEQ ID NO: 251800 - DNA, 519 bp, Homo sapiens
aagaacactgagaaatgaaaagggtcagtggacccagatggctccatttatccttatttactgagagttaattagaagagaaagcagggttttgccttttttttttgctaaagacacttagctcttgtttttcaaaagatacttactttgagagaactgggcagttcatgcctgcttgttttcattataaatagttacttaggaatagggtggtggtggtagcttttcagagctcacagatgagaattgagtttgtctgtgagaaggctaagggcaggctctggagacagacagactcaaatcctggctcctccacttgggagccattgcgtcctgagcaagttgcactctacctttaagcctcagcttatttatccaaatgtgggaatactggtaacttctacctcagtgcgttatatgtattaaatggaataatctatataaaatgctcaacatgtgcatgatacttgttaaacaataaatgtgagcaattaaaaaaaagtaaagcctggttgaaat

SEQ ID NO: 251801 - DNA, 417 bp, Homo sapiens
gcctctgcgcccacagcatgtgaaagcattgaaagaaaataagaatcttaaactcataaacatacctgcttactatctggcaggcgtcccagcagtctggtgatctccttagttatccagcagatagtagaaaaacaagagtcctgtgaagatttcacatgttgccatatccctgccagatggtgatttgtaaaacatggacaaattgcactggctccacttccctccgacaatcacaacagaaacactgcagcaatggtgtttaatttgaaagcaacttcagctgagtaacttttaaggtataaacatctaaagattattgggataaatgtgacattatctccagagaactggtccttcataaatctgctattctgtgctctggtatttctgggattctccccctacctccaaaaa

SEQ ID NO: 251802 - DNA, 462 bp, Homo sapiens
agcagtatagcctgagcaggtctggctagtagccagctagacgccatagtgggggtcgcaagatgagtctttgtgagactcctttgaactaagcagataatgaccatctgggcagcatagtaaggagtatactaaacttgagttataagcctgtcttagtttgtttaacggcctttgtcttgcctctgtacattcgcgtttgcaccacttaggagtaggtatataagcaaaaccttgtctttgttcggggcccagttttttggacgttgagtccactgagacagagtgcactcaataaaggatcctcctgctataccctgaggtctcccttgccctcctaaatttctgcaacaatgtcacacctcaagaaaacttgccttatcatgaagaacaaagttgtagtgatgacttctattaaaatttcatacataggaggcatcaaaggcagggtatgagatggga

SEQ ID NO: 251803 - DNA, 702 bp, Homo sapiens
atcatttctgaagcagtgaaaagggttgtcatcacagtaaacggtggaaaaacactgaatggtgcgttagaatcaccagatctaatttttgtgtaccttattaatacatcaaaatttttgcatatcttattaatgtatcgaataattaggctaaatttttgcataacttattgatacatcagaaggtcaacaacatgaattcaaggatgcctatgttctgttgagtgaaacagaaatgtctagtgcccagtctattgtacctactcttgaaattgccagtgctcagtatacacctttggttgtcattgctgaagatgttgatggagaagctctatgaaccttccttttgaataggctaaaagctggtcctcaggttatagcagtaaaagctccaggtttgttgacaatagaaagaaccagcttaaagatatggctcttgctgttggtggtgcagtgtttggagaagggggtaggcctcataacacaggaaaagttggagaggtcattgggaccaaaggtgatgctatgctctttaaaggaaatggtgacaagtcttgaattgaaaattgtattcaagaaatcattgagcagttagatatcacagctagtgaatatgaaaagggaaaagtgaatgaatggcaaaactttaaaatggagtagctgtgctgaaggttggtgtaacaagtgatgtcaaaactaatg

SEQ ID NO: 251804 - DNA, 493 bp, Homo sapiens
aacatcaaatataaaaacttgaggactggctctgccgttctatttcaagggactacattagtagcagaagacttgcagagattggccgagctgtttgaaaaatgcattttcttatgaaatacccgaaggtgcggcagattgatggtaggtttgggagatggccccacgatgtgaggtgcagtggatatgtcttatggattatgactacattttcagttgttttaacagctccaaaggctgactaacgacactgctgactaacgacaccactctgagaaggtggctcttctgaagttcaaagaggggcctgaagtcggagctttctttaaactgtcttccagtttacatgcttgtttgctgtgtgaaaacatctcatcccattatgcgtgatgagctggaagtatggcagagagggctggaatcgagggaaaaaggtgagcttcggcttgcctggcattgctaaattataaaacactggtgtttttctctctct

SEQ ID NO: 251805 - DNA, 421 bp, Homo sapiens
gttcacatccaccaactatcttcccagggttggactgagaaggggagcagagggtcccagggactctcctgagatcctggctctcctgccaaggaatttacatttccttgtcacagcaccatgtaagatatccaactactctgaaactaccacactgtgaagagtctaaccaagccacctggagagaccaaacggaagaaaactaaggcccctggccaacagccctagctgtgctcctactggccagtcagcaccagcctgccaggcatgtgactgagacagtcttggaagtggattttccagccctactcaagctgccgcagctgacaccacatggaacagagatgagcttttctccccagtgcccaaatagcagaattgtggaaaaataaataaaacagttgtattaagccactaaaat

SEQ ID NO: 251806 - DNA, 322 bp, Homo sapiens
aaccatagcagaggccaaggtgaattcaaggtcacaaaactcctaagaaagccagtaagtaccgaacccaagcttctgtctctaagattattctacccctcatttttcacaatgcctctgtcccatcacgcagagggcaagcaggatggagcttatttcctgtccccagccagtagtagttgttagatggtgccacgctggcaccatctgcaaaaaatagaaacgggttagcagaatgtctcctagtctctgttttctccagagacttttcttggttcagcatactgagactttcaggaagaataatgggttttcaattaaa

SEQ ID NO: 251807 - DNA, 403 bp, Homo sapiens
tcccagctgtgtctacagttactttgctttccatggtccccatttcaattctaatttttgacatatatacatgctacatattattgaacaatttcaatttccccccagtttgttatagatttaaaaaatattccctttgaaatgaaaaattgatatatggcctttaaaatgttttaatgtgagatgctaaaaattattcaagataaatcaaacactttggcatataggagggctggaaataattttttattttccttatacagcgtcacccccaggctttatgtgcttagaacacataaggtccttggaaagttgaaagagggatgatggttctggccttcagaagtgttcgtctgtagttacaattcaccccgaaactagaggtcaagaaaggaagaggaaa

SEQ ID NO: 251808 - DNA, 380 bp, Homo sapiens
cccttatttttgctgtgtcttgggcaggaggagaaagatctgcatttacttttgttggggtcactagttcatcatctctggttcctgcacttattttttctatttctggtgaggaactgagaaacacagttaagggttggagatgtctttgataatagatatcccgaaagaaattcacttgtttatttgcgtgatagggtcacctcttacacaaaaactcacctgccgtcctctctttcccctcctgccctccctccagtcccccagggaggaaaatgaacagtggcataatgattttggtaaatagaattctttttaaagccatctgatcacggggagacattctgagaagaccctagggtttagtcagtgctgatgtg

SEQ ID NO: 251809 - DNA, 96 bp, Homo sapiens
gtgctgatgacctgcaactcttagggggaggaggagggaaatagggaattctggaaacctgtgtgggacttttgcataaattagaaaaaggtggcc

SEQ ID NO: 251810 - DNA, 1030 bp, Homo sapiens
acacatccaagtttgtggccagatataattagcaaatgtgcgaaggtaaccttcacttatacagagttctgccctactcctgacaattggttttccattgagccatggcttaaagtgtccaatgaaaatctagattatgccattttaaaactaaaagaaaatggaaatgcgtttcctccaggactatggcgacagatttctcctcaaccatctactggtttgatttatttaattggtcatcctgaaggccagatcaagaaaatagatggttgtactgtgattcctctaaacgaacgattgaaaaaatatccaaacgattgtcaagatgggttggtagatctctatgataccaccagtaatgtatactgtatgtttacccaaagaagtttcctatcagaggtttggaacacacacacgcttagttatgatacttgtttctctgatgggtcctcaggctccccagtgtttaatgcatctggcaaattggttgctttgcatacctttgggcttttttatcaacgaggatttaatgtgcatgcccttattgaatttggttattctatggattctattctttgtgatattaaaaagacaaatgagagcttgtataaatcattaaatgatgagaaacttgagacctacgatgaagagaaaggtaaacaagagtcatcacttcaagatcatcagattgaacccatggaatgttagaaaagagatgctgtcttcaagaaaatatgccaataattcctggcaaagatttcatgacaaagacacttaaagcaattgcaacaaaagtgaaaattggcaaatgagacctaattaaatcttctgcacagcaaaagaaactatcaacagggtaaacacacaacctacggaatgggagaaaatatttgcaaactatgcatacagcaaagatctaatattcagaatccattaggaacttaaacagattaacaagcaaaaaaaacaagcaaccccattaaaaagtgggcaaaggacatgaacaaacacttttcaaaagaagatatac

SEQ ID NO: 251811 - DNA, 534 bp, Homo sapiens
tttttgtatttttagtagagacagggtttcaccatgttggccaggctggttttgaactcctgacctcaggtgattgggcaagggcttttcaatacaaggggacaagcactgagaggctcctcatgtcgcatgtctgtctcactatttctctggaatgtgcactgtggacctgggatggaattctgaccagcctctggggaggccgcgcagctggggcctagcgagtcttcagagttgcactgggggcaggggacattccttttgtccccgaggcaggtggagggaagcttcatgtagctcacgaggaagagacctcctccccacgctgccgggctggcctctcgagcatccaggctgcgcagcctcctattgtgatgtagcgccagttgcttcgagctggcggctttatcatatgtgggttttgattgacatactgttgttcatgctgaagtttgagtgtcgttataaaaacacaaagtcattgtagaaaacttgaaaaatttagaaaataaaatgaaaaacagcagttaaaca

SEQ ID NO: 251812 - DNA, 362 bp, Homo sapiens
tttttgtatttttagtagagacagggtttcaccatgttggccaggctggttttgaactcctgacctcaggtgattgggcaagggcttttcaatacaaggggacaagcactgagaggctcctcatgtcgcatgtctgtctcactatttctctggaatgtgcactgtggacctgggatggaattctgaccagcctcctattgtgatgtagcgccagttgcttcgagctggcggctttatcatatgtgggttttgattgacatactgttgttcatgctgaagtttgagtgtcgttataaaaacacaaagtcattgtagaaaacttgaaaaatttagaaaataaaatgaaaaacagcagttaaaca

SEQ ID NO: 251813 - DNA, 471 bp, Homo sapiens
cactaacactggatgttgtccaaagtttttatttttgcacaactaatcaaggaaaaggctttctccatatttacgtgcttgtaactctggcatgacctttgctccagtctctaccagagggcggcgcctggattgaagtggaaaagccctgttttccagccatgacccagggagcaagcactgactcctcaggggaacaggagacctgccaactaggaccctgggagcccccatgctggcagtgccctgggtcatctcaggctcatcagcaaatcctggggggagagcggggctggagggcgaagaagcccaggagagttcctggctcagaacccctctctgaggctcccaatacagagcccaggccccacacccagagcctctgagtatttttgtttattgtatgtaaaatactagtgtatttttgtttaagtctcacaagtaaacaggttctctcatactttgccaagg

SEQ ID NO: 251814 - DNA, 662 bp, Homo sapiens
ctcctcccctcaaaggatgtgcagtctctcagtttacctataatgcttgcagaaattctcacaacaaaagtcctgaagccggtagtggagttactgagtaatccagattacattaaccaaatgctgcttgcccagctggagtacagagagcagatgaatgaacatcacaagagagcctacacctatagcccctcttatgaggacttcatcaagctcattaacagcaactctgatgtggagttcttgaagcaactaaggtctgttgaaggaacggtagagaagagtggtagaagatgtgtgctggtcgttttcaacaactgacttttgggcaaggtatcaaattgtagtggaaataatccaagcgactacaattagcagctttccccaactgaagaggcacaaaggtaaagaaactgcggcaatgagggctaggaacatgaagaggtacatcaaccaactgactgtggcaaagaagcagtgtgagaagagaatccgaatcctgggaggccctgcctatgaccagcaagaggttggggccgtggatgagggggaagggcctcaaagccagaaggtagaactttatagtttcttgttctgaccctaccaagtttattataaatgctgatagaactacatataaagactttcaacttaaaaaaaaa

SEQ ID NO: 251815 - DNA, 604 bp, Homo sapiens
aggtttgtcaccccctttgtgtctagcaaagggccagacacattaggtaattaaaaaaaagaaagaaattaaaatagtgaatgaataaattgtggctatgtaaagatcttaagctagttagaatgatatagtttatgttttaaatttaaaaacttaattatataaaaccatgggcttttaagaaaaataataaaattaataggaaagtttgaaaatcagatcttgcatacaccactattaattattaacattgcattaagaatttagtaagcttagttttctttatatgttatctcttttaatctgcacaataagctatgctatagacattagtatttgttttcattttacagaagggaaaaattaacattaaaaaagttaaataccttatccaatatcataaaactagcatgggaataatgtcagattttaaaacagctctatctgactccaaaatccaaactcttaaacagtgaatataaccaacctcatatttcatcattctgtacatgcttgacaagaaacattcatttattcaatagcagagattaaaccgactgagtttctgcctttatagagtttacctttgggtgatggagacaga

SEQ ID NO: 251816 - DNA, 255 bp, Homo sapiens
agtgttagctgttacttggaatgttggttgaattgagtattgcatttggcagtagtctactagtggccttttaggaactgtagagtaacttaatataagagacattatttggtgggcagaattaagatcttgggagccattgctggtgcaatcctcacttgggaaaatttaacaaaatatagttagaccttttccaggtctcacccattccattccccagctgagcggacaggggaagtgctacagcacagcgag

SEQ ID NO: 251817 - DNA, 397 bp, Homo sapiens
tgttattaacaacaaatactgccatatcttttaattgacagtcttgcttcattttttaagaaaatctgctgtggccttgtacagtggctcactcatgtaatcacagcattttgggaagctgaggcaggaagatcgttcgagcccaggagtttgagataagcatggaaaacatagtgaaacctagtctctacaaaaagacaaacccacctcaaaaccaaaaaacaaaaaccaaaaaacttagctgggcgtggtggtgtgtgctagtgttcccacctacttgggagcttgggcaactgagttgggaggatcacttgagcctgggagatagaagctgtgttgagcagtgatggcaccaccactgcactgcagcctgggtgacagagcaagacctgtctca

SEQ ID NO: 251818 - DNA, 212 bp, Homo sapiens
agtgtgtttggggggtggctggggaggagttggattcaagcattctgtattgagtgtattaagtatgaaatacatattcaacatccaagtcaagagatgacatataagcaggtagacatacaggtttggatctcagaagagagaggcaaatttgaaggtatagttttgggagtcccgacgccataaaactagatggcacaggggaaggaatg

SEQ ID NO: 251819 - DNA, 714 bp, Homo sapiens
tgctataataaactataagtactggactttcttgagttttgtgagtcatcctaactgaattatcaaacttgagtgtgatggaaacctccacatttgtacttggtcagaaataaaagtaacatgggagcccccgaagtttgcagctggtatccaaagtgagggcagtcttgtgaaaacctattaactttgatctaagtcgaactgtatcgaaatcatacatccacaatgctcactaaagttccccatcaacaattatttgttgatgaatatataaaaggaggtaagccaaagaccaccccacaattgatttttattaaacatcaaaaccttaattttggcccggcacagtggctcacacctgtagagtgtgagaccttgggaggccaacatgttaggaggccaaggcaggctgattgcttgaggtcaggagtctgagaccagcctggccaaaatggtgaaaccctgtctctactaaaaaaaattagccaggtgtggtggtgcgcacctgtagtcccagctactcaggaggctgaggcagaagaatcacttgaacctgggaggctgaggttgcagtaagccaaaatcgcaccactgcactccagcctgggcgatacagggagactgccttaaaaataaaaaaaacagaacaaaaacaccttggccagggaagtggctcacacctgtaatcccaacactttaggaggccaacacttt

SEQ ID NO: 251820 - DNA, 564 bp, Homo sapiens
tgctataataaactataagtactggactttcttgagttttgtgagtcatcctaactgaattatcaaacttgagtgtgatggaaacctccacatttgtacttggtcagaaataaaagtaacatgggagcccccgaagtttgcagctggtatccaaagtgagggcagtcttgtgaaaacctattaactttgatctaagtcgaactgtatcgaaatcatacatccacaatgctcactaaagttccccatcaacaattatttgttgatgaatatataaaaggagtctgagaccagcctggccaaaatggtgaaaccctgtctctactaaaaaaaattagccaggtgtggtggtgcgcacctgtagtcccagctactcaggaggctgaggcagaagaatcacttgaacctgggaggctgaggttgcagtaagccaaaatcgcaccactgcactccagcctgggcgatacagggagactgccttaaaaataaaaaaaacagaacaaaaacaccttggccagggaagtggctcacacctgtaatcccaacactttaggaggccaacacttt

SEQ ID NO: 251821 - DNA, 2872 bp, Homo sapiens
taacttcattttatgattcacccttcacaatatttatttttgaggataaaagaaaataatgttagtcttatgtgttaatcataaaaaatacatgcttaatgacaggaaaacagcaagtcattttttctagttctttaaaaatattttaatcgtgcaaaatcaccataatgtactctagcacaatgctaaaatgttatctaagatggagtggcttttattagttttacaggatgtatatttggcaatagttcttaaaaataattactcaaaaggaactctaactctattattttagaaacaatattttaaaatacagcagtaagcaacaaaaactattgctctttatacatttttggcataacactgccatacggttacagaattataaaataagtattttatagtaccatacagatccagaaactggttacaacttctaccacatacacatggtattggtactaacgaacatgcacagcattctgtaattcatactgcagttgaatacagagcacagagaaggcccagtggccactggagaatcagagcttatgttataagtaaaacacacatctttgtaacaatcgtaggcattttcctgaaatatttaaaatacaagggacacaatagtttccaaaatgacataatctaccatccttcttagataatactaaaaaagaaagattaccttacataggaaacaacttaaagccctttttaaaaacaggaggaaaatgcttgtcaaaggacctaacattttgctctcatttgtttctcacaattataatgccacacaattaatatgctgtcaactcttgacagtgtggaagttacttcactcacaaaccacctatcactgagtctttctcttatctgcagccagaccatcaacttaacttgtaaaactaccaactgttgctacacacaggcaaaggaattaaacttggtagctgatcatttgattacatctatcagtctactggagggcttcaacgcagagtaggtggaattcatggttcaaatcagagtattaatgggatctgtttgcacaccaatacctgatctccttggcacaaatacagagctgattcttaaagcatgtccccacaataaagcttttcttaatcattcgtcacctgcttccaataattctggcacttacacaaacttatcaagggttatgtctttatttctgtggtgagtttcctgttgctgtttctagacttttatttcatttgtattttatttttcttcacatgaaacaaaatctgttagcactgggaaagaaaagttcatttgactaatgagtgtagaatgtaaatgtttcttagtaccaaaacttattatatatctaatttttcctagttaacgtaaattgttacacaaagtataatttaaaaagtaaaactatgacaaaccctaaagcttaaatatttttagagaaaaaggtattttagcacagtaagtgaccactactgccttttctctgaatcattttataaagagattttatattaatatacagctgtgaatgaacaacttccctaattttttaattaaataaataggagtgagggaaaaaaactcatatttcaatgattcccaagatcgttaagatataactacaatttactaatgcccaactgctcacagttttctaaacaactacaaaataaataaattgtagcaggtattttatgagaactgatacccatcaaaattgtgtatggagtccatgatggcctatcctccccagaagtcagagctcacagtgcccaacaccctcattatccagaggagaatctgaggacccatcatgccagtggagaaggctggagcccagcactggcgccactttcctgagatgcccacactgattcttgtcccttctccctctctgaactctacttccagccagtttgggtcataacacaaaacatttaattgtattctctacatgaaaactttagttcaggaaaataaacatattaagaggttatttccctcaaataactgaaacaataaacttcacaacagaataggaaaaaaaatgacaaagaacactctctgtagtctaggaaaaatgcaagaacagtgcttttaaaatgattctaatgagactacagcataaaagtttttcaaattagtttcagatttctccaactgcctactggaattaaacttttaataatttctctaacataattctatttctgcatccgcctacatctaagaagaagcaaaacataaatattatttgtagtaactaaggaacgtttaaaatgaaaattatagtatgtagctaaactacaaaaagcataaataaatataacagacagtatagttagtctttcttactctaaacacgttttgtcaaatgtaacacattgttgaatatcatggtgagtacacttcttgataaactgatgctattgtcccaaacagcaacttctccaaaatgataaagcaccacctaaatttcattaaaagaactgatattcatggtttagaaagttcccaatgatgagattttataatgtaataaaaatgtaaacttctgaatgaaaaccatttacatttgttaaggcacatctggatacctccagacattcatatttatagctatattattattcatttcaataataagggatttctaaaaacacattctgtccctgaacacaatctgctgggtgtgttggataactagaatgcagaaggagcagggtagtactcactgtcaccctagagattagccacacaaatatgttcctgtaataaacagtacaaaactcaaaaagaagccagcaaatgtacactcctaattttctagatcctacattgacccaggccatttttctctacaacttca

SEQ ID NO: 251822 - DNA, 2271 bp, Homo sapiens
cagcaaacctttccctgctgtgaggtgggcaagttagttgctccaaaaacaagataaaatgattgagttcttttctcaagcgggagtcggagtttatctgctctgagagccccagcagctactattaatgagtgtctggaatatgttcctggcatttcacctaccctctctccaatccttccaagaaactcacaaagcagggctttttcttgaacttctcttcctcacaacagttaaatcatccatttaaagatgtcaaacaacctccgtgttctaagccagaccatcaacttaacttgtaaaactaccaactgttgctacacacaggcaaaggaattaaacttggtagctgatcatttgattacatctatcagtctactggagggcttcaacgcagagtaggtggaattcatggttcaaatcagagtattaatgggatctgtttgcacaccaatacctgatctccttggcacaaatacagagctgattcttaaagcatgtccccacaataaagcttttcttaatcattcgtcacctgcttccaataattctggcacttacacaaacttatcaagggttatgtctttatttctgtggtgagtttcctgttgctgtttctagacttttatttcatttgtattttatttttcttcacatgaaacaaaatctgttagcactgggaaagaaaagttcatttgactaatgagtgtagaatgtaaatgtttcttagtaccaaaacttattatatatctaatttttcctagttaacgtaaattgttacacaaagtataatttaaaaagtaaaactatgacaaaccctaaagcttaaatatttttagagaaaaaggtattttagcacagtaagtgaccactactgccttttctctgaatcattttataaagagattttatattaatatacagctgtgaatgaacaacttccctaattttttaattaaataaataggagtgagggaaaaaaactcatatttcaatgattcccaagatcgttaagatataactacaatttactaatgcccaactgctcacagttttctaaacaactacaaaataaataaattgtagcaggtattttatgagaactgatacccatcaaaattgtgtatggagtccatgatggcctatcctccccagaagtcagagctcacagtgcccaacaccctcattatccagaggagaatctgaggacccatcatgccagtggagaaggctggagcccagcactggcgccactttcctgagatgcccacactgattcttgtcccttctccctctctgaactctacttccagccagtttgggtcataacacaaaacatttaattgtattctctacatgaaaactttagttcaggaaaataaacatattaagaggttatttccctcaaataactgaaacaataaacttcacaacagaataggaaaaaaaatgacaaagaacactctctgtagtctaggaaaaatgcaagaacagtgcttttaaaatgattctaatgagactacagcataaaagtttttcaaattagtttcagatttctccaactgcctactggaattaaacttttaataatttctctaacataattctatttctgcatccgcctacatctaagaagaagcaaaacataaatattatttgtagtaactaaggaacgtttaaaatgaaaattatagtatgtagctaaactacaaaaagcataaataaatataacagacagtatagttagtctttcttactctaaacacgttttgtcaaatgtaacacattgttgaatatcatggtgagtacacttcttgataaactgatgctattgtcccaaacagcaacttctccaaaatgataaagcaccacctaaatttcattaaaagaactgatattcatggtttagaaagttcccaatgatgagattttataatgtaataaaaatgtaaacttctgaatgaaaaccatttacatttgttaaggcacatctggatacctccagacattcatatttatagctatattattattcatttcaataataagggatttctaaaaacacattctgtccctgaacacaatctgctgggtgtgttggataactagaatgcagaaggagcagggtagtactcactgtcaccctagagattagccacacaaatatgttcctgtaataaacagtacaaaactcaaaaagaagccagcaaatgtacactcctaattttctagatcctacattgacccaggccatttttctctacaacttca

SEQ ID NO: 251823 - DNA, 1141 bp, Homo sapiens
cagcaaacctttccctgctgtgaggtgggcaagttagttgctccaaaaacaagataaaatgattgagttcttttctcaagcgggagtcggagtttatctgctctgagagccccagcagctactattaatgagtgtctggaatatgttcctggcatttcacctaccctctctccaatccttccaagaaactcacaaagcagggctttttcttgaacttctcttcctcacaacagttaaatcatccatttaaagatgtcaaacaacctccgtgttctaagaactatttactgagctctacggagacacagctacaagcaccacatgctggacccctgaatatggagggccaactacactagaaacacacacgctagctgagaaagatggtggcttaagggtaagcatggaaagaggcaaggaggtgaggacagcaggactgatagataagctggggaggccagagctccacaaggacatccatttcacttatcagaatctaaaaataaacacgttgagatactagaatcaaagaatccaaattagtttctgaacacatttgaaaagatcaaactcttacagttaaaaaaaaaattaatcagccagacatggtggctcatgcctgtaatcccagcactttgggaggccgaggcgggtggatcatgaggtcaggagtttgagaccagcctgaccaacatggtgaaaccccgtctctactaaaaatacaaaaattagccaggcgtggtggcacacgcctgtaatcccagctactcaggaggctgaggcaggagaatcgtttgagtccaggaggcagaggttgcagtgagccgagatcatgccactgcactccagcctgggcaacagagactccgtctcaaaaaataataataaaataaaataaagtaaaataaagccataaatcaggtaaaagtgtagcaatccaatgaaattatcctcttgatttccttcatgtagactataatgtctcaaaagaatgtattttgtataccaaatactacatggtaatttctagatactctgaaaatattctcaaagtaattattatatacaaaatttgaaaattcacatcctaaaagcattacagaatacattcatttattgggtcttatcttaaatctcctta

SEQ ID NO: 251824 - DNA, 481 bp, Homo sapiens
  misc_feature (481)..(481): n is a, c, g, or t
taacttcattttatgattcacccttcacaatatttatttttgaggataaaagaaaataatgttagtcttatgtgttaatcataaaaaatacatgcttaatgacaggaaaacagcaagtcattttttctagttctttaaaaatattttaatcgtgcaaaatcaccataatgtactctagcacaatgctaaaatgttatctaagatggagtggcttttattagttttacaggatgtatatttggcaatagttcttaaaaataattactcaaaaggaactctaactctattattttagaaacaatattttaaaatacagcagtaagcaacaaaaactattgctctttatacatttttggcataacactgccatacgattgttaccaagatgtgtgttttacttataacataagctctgattctccagtggccactgggccttctctgtgctctgtattcaactgcagtatgaattacagatacn

SEQ ID NO: 251825 - DNA, 3487 bp, Homo sapiens
agtataaaactagaagcagggtaggtgattttatatgacaaaatatgaaacaatgactatgacaggcattatggcattttcatatgtttatatttttactacttagcaaaaaaatacttagaacttctctagtaactcctgagttgtagattttattttctcattgaagctggaaaaaagtagtcccaaaacctaaattcaaaataaaactatgcaacataatttttgagttgacaactaggcttgatttagagaaagtaaacatattttcacctctatcattattcttttgaatttcttatgagatcgagaatgaaaatgtataatggtacaatattcttcatgttataaactctttctctactgtacagaaatatatcttataactatatgtcactttacagtatttaaaaatagtttcacataatctcctttgatatatgaaagcacaaaatattagaaatgttctagactaatcaagcgatataacatctatttgccatgaaatgcaagttagtattttatcaatagccaatatttagtatccttgcactccacagtacaacaataaagattatatatttgtaaagattcagtaatatttttagctatttggtcatgcttcactgcattttttataacagcttctcaatgaatttctgcaagcatatcgtagtttttaaaattacaaaacataggagtcaaacccagagcactgtttcatatataagacacacataaatacatatctatagatcttatttaaaaaactaatatacaaagcattaatagaaaaaaattctagacactcaatgtttatctccaaaaggaatgatatccttttacttgttctccactgaatgattatctaagttatttagggattaaatgtaagaaacatactattatatatgaatatgcatttaaaaacaccatagtgggaaaaggccactatttaagatggatgccaggaagtgtttctcttgagactaaatattctcgaatttaatgttacaatctaatcaaaatccctaagtaggaagaatattctaaaagttaagttgctaaatgaaatgtttttactcataagggctctaatatacaatttctaagtaattcaaattacattcattgattttagtatctggtaactttattaatatcataatatctggtcacaatcttttactattatgcatttagaaagttgtctgaatactttatcatgtatataaaattggtaagttattttgaattaaattatttgtgttctacaattcagcctaatttgacaatcgcttctcatcctctaaaccctgtagaactatttactgagctctacggagacacagctacaagcaccacgtaagagtgtccatgtttttcttgcatgtaaaacagaaattgaaatgcaaaagcagattgccaaatcctaatactcacagaacactaggaaagcaaaaactggcatattatgggaactaaaaatgagaaagtgttccatactatacttattggaacacaatgtacaacaaaagtgctactgagattcatataaaaaattagagttaagcaactggcatgtttcatgtaaacttcaaagcagtaaaatcatatttctagaggcatactataagtgtgattcttttcaagaaatccactgcagaaaatgtggatcaatagaggcaacagaagatgatatgaagtaggacatattacaaattccctaggggattaaaatgaatagaacttttcttaaaagcctaacaaaaaagttaattcctttctaaatgaaataaagtagacatgtttcatctattcattgctttaactatatttgtatatatgctttgaagttcttatcacagtgttttttgatttgtaataataattagtaataatatagaaacaaaattaattgttcttaaccagtgctatgtaacctattaagtgcttactagagttgcatatatggacttttaaatttgttctcaattttgaagtttgataacttagagatgtacaaaactatactttttaaaaaacacgtttgggctaagcaacattactaatttcgtaatccatagaacactgacatattcatggtttaagggactactgtcttgttcacagtgcaagaggcatgccttttaaaaaggaatttcttattttttaattcttcagtcatttacattcagaatcaaccatcaaatttatatggaacagccatagagagcaaaattcttgtcttgaacttttcaatcaaatttgtttttaagcacttaattctgaaaacagttattaatttaaacaaagcaaaatcttgaagtcatacaattagaagtcccactctgttccatgtagatttcaatatagatcatcctaatgtgtatagtggtcccttgatatctgtagggggttggttccaggaccctctgcagttaccaaaatctaggaatgctcaagtcccttatgtaaaatactttaaatcatctctaaattacttacaatacctaatacatacaatataaatgctatgtcaatagttgttatactgtattgtttagagaataatgacaaataaaaggactgcacatatttagtagagatgtaaccatccattttttccaacaaatattttcaatctgcggttggttgaatccacagatgctggacccctgaatatggagggccaactacactagaaacacacacgctagctgagaaagatggtggcttaagggtaagcatggaaagaggcaaggaggtgaggacagcaggactgatagataagctggggaggccagagctccacaaggacatccatttcacttatcagaatctaaaaataaacacgttgagatactagaatcaaagaatccaaattagtttctgaacacatttgaaaagatcaaactcttacagttaaaaaaaaaattaatcagccagacatggtggctcatgcctgtaatcccagcactttgggaggccgaggcgggtggatcatgaggtcaggagtttgagaccagcctgaccaacatggtgaaaccccgtctctactaaaaatacaaaaattagccaggcgtggtggcacacgcctgtaatcccagctactcaggaggctgaggcaggagaatcgtttgagtccaggaggcagaggttgcagtgagccgagatcatgccactgcactccagcctgggcaacagagactccgtctcaaaaaataataataaaataaaataaagtaaaataaagccataaatcaggtaaaagtgtagcaatccaatgaaattatcctcttgatttccttcatgtagactataatgtctcaaaagaatgtattttgtataccaaatactacatggtaatttctagatactctgaaaatattctcaaagtaattattatatacaaaatttgaaaattcacatcctaaaagcattacagaatacattcatttattgggtcttatcttaaatctcctta

SEQ ID NO: 251826 - DNA, 2764 bp, Homo sapiens
gctcgacaataaaagccactccatcttagataacattttagcattgtgctagagtacattatggtgattttgcacgattaaaatgttatctaagatggagtggcttttattagttttacaggatgtatatttggcaatagttcttaaaaataattactcaaaaggaactctaactctattattttagaaacaatattttaaaatacagcagtaagcaacaaaaactattgctctttatacatttttggcataacactgccatacggttacagaattataaaataagtattttatagtaccatacagatccagaaactggttacaacttctaccacatacacatggtattggtactaacgaacatgcacagcattctgtaattcatactgcagttgaatacagagcacagagaaggcccagtggccactggagaatcagagcttatgttataagtaaaacacacatctttgtaacaatcgtaggcattttcctgaaatatttaaaatacaagggacacaatagtttccaaaatgacataatctaccatccttcttagataatactaaaaaagaaagattaccttacataggaaacaacttaaagccctttttaaaaacaggaggaaaatgcttgtcaaaggacctaacattttgctctcatttgtttctcacaattataatgccacacaattaatatgctgtcaactcttgacagtgtggaagttacttcactcacaaaccacctatcactgagtctttctcttatctgcagccagaccatcaacttaacttgtaaaactaccaactgttgctacacacaggcaaaggaattaaacttggtagctgatcatttgattacatctatcagtctactggagggcttcaacgcagagtaggtggaattcatggttcaaatcagagtattaatgggatctgtttgcacaccaatacctgatctccttggcacaaatacagagctgattcttaaagcatgtccccacaataaagcttttcttaatcattcgtcacctgcttccaataattctggcacttacacaaacttatcaagggttatgtctttatttctgtggtgagtttcctgttgctgtttctagacttttatttcatttgtattttatttttcttcacatgaaacaaaatctgttagcactgggaaagaaaagttcatttgactaatgagtgtagaatgtaaatgtttcttagtaccaaaacttattatatatctaatttttcctagttaacgtaaattgttacacaaagtataatttaaaaagtaaaactatgacaaaccctaaagcttaaatatttttagagaaaaaggtattttagcacagtaagtgaccactactgccttttctctgaatcattttataaagagattttatattaatatacagctgtgaatgaacaacttccctaattttttaattaaataaataggagtgagggaaaaaaactcatatttcaatgattcccaagatcgttaagatataactacaatttactaatgcccaactgctcacagttttctaaacaactacaaaataaataaattgtagcaggtattttatgagaactgatacccatcaaaattgtgtatggagtccatgatggcctatcctccccagaagtcagagctcacagtgcccaacaccctcattatccagaggagaatctgaggacccatcatgccagtggagaaggctggagcccagcactggcgccactttcctgagatgcccacactgattcttgtcccttctccctctctgaactctacttccagccagtttgggtcataacacaaaacatttaattgtattctctacatgaaaactttagttcaggaaaataaacatattaagaggttatttccctcaaataactgaaacaataaacttcacaacagaataggaaaaaaaatgacaaagaacactctctgtagtctaggaaaaatgcaagaacagtgcttttaaaatgattctaatgagactacagcataaaagtttttcaaattagtttcagatttctccaactgcctactggaattaaacttttaataatttctctaacataattctatttctgcatccgcctacatctaagaagaagcaaaacataaatattatttgtagtaactaaggaacgtttaaaatgaaaattatagtatgtagctaaactacaaaaagcataaataaatataacagacagtatagttagtctttcttactctaaacacgttttgtcaaatgtaacacattgttgaatatcatggtgagtacacttcttgataaactgatgctattgtcccaaacagcaacttctccaaaatgataaagcaccacctaaatttcattaaaagaactgatattcatggtttagaaagttcccaatgatgagattttataatgtaataaaaatgtaaacttctgaatgaaaaccatttacatttgttaaggcacatctggatacctccagacattcatatttatagctatattattattcatttcaataataagggatttctaaaaacacattctgtccctgaacacaatctgctgggtgtgttggataactagaatgcagaaggagcagggtagtactcactgtcaccctagagattagccacacaaatatgttcctgtaataaacagtacaaaactcaaaaagaagccagcaaatgtacactcctaattttctagatcctacattgacccaggccatttttctctacaacttca

SEQ ID NO: 251827 - DNA, 2924 bp, Homo sapiens
agtataaaactagaagcagggtaggtgattttatatgacaaaatatgaaacaatgactatgacaggcattatggcattttcatatgtttatatttttactacttagcaaaaaaatacttagaacttctctagtaactcctgagttgtagattttattttctcattgaagctggaaaaaagtagtcccaaaacctaaattcaaaataaaactatgcaacataatttttgagttgacaactaggcttgatttagagaaagtaaacatattttcacctctatcattattcttttgaatttcttatgagatcgagaatgaaaatgtataatggtacaatattcttcatgttataaactctttctctactgtacagaaatatatcttataactatatgtcactttacagtatttaaaaatagtttcacataatctcctttgatatatgaaagcacaaaatattagaaatgttctagactaatcaagcgatataacatctatttgccatgaaatgcaagttagtattttatcaatagccaatatttagtatccttgcactccacagtacaacaataaagattatatatttgtaaagattcagtaatatttttagctatttggtcatgcttcactgcattttttataacagcttctcaatgaatttctgcaagcatatcgtagtttttaaaattacaaaacataggagtcaaacccagagcactgtttcatatataagacacacataaatacatatctatagatcttatttaaaaaactaatatacaaagcattaatagaaaaaaattctagacactcaatgtttatctccaaaaggaatgatatccttttacttgttctccactgaatgattatctaagttatttagggattaaatgtaagaaacatactattatatatgaatatgcatttaaaaacaccatagtgggaaaaggccactatttaagatggatgccaggaagtgtttctcttgagactaaatattctcgaatttaatgttacaatctaatcaaaatccctaagtaggaagaatattctaaaagttaagttgctaaatgaaatgtttttactcataagggctctaatatacaatttctaagtaattcaaattacattcattgattttagtatctggtaactttattaatatcataatatctggtcacaatcttttactattatgcatttagaaagttgtctgaatactttatcatgtatataaaattggtaagttattttgaattaaattatttgtgttctacaattcagcctaatttgacaatcgcttctcatcctctaaaccctgtagaactatttactgagctctacggagacacagctacaagcaccacgtaagagtgtccatgtttttcttgcatgtaaaacagaaattgaaatgcaaaagcagattgccaaatcctaatactcacagaacactaggaaagcaaaaactggcatattatgggaactaaaaatgagaaagtgttccatactatacttattggaacacaatgtacaacaaaagtgctactgagattcatataaaaaattagagttaagcaactggcatgtttcatgtaaacttcaaagcagtaaaatcatatttctagaggcatactataagtgtgattcttttcaagaaatccactgcagaaaatgtggatcaatagaggcaacagaagatgatatgaagtaggacatattacaaattccctaggggattaaaatgaatagaacttttcttaaaagcctaacaaaaaagttaattcctttctaaatgaaataaagtagacatgtttcatctattcattgctttaactatatttgtatatatgctttgaagttcttatcacagtgttttttgatttgtaataataattagtaataatatagaaacaaaattaattgttcttaaccagtgctatgtaacctattaagtgcttactagagttgcatatatggacttttaaatttgttctcaattttgaagtttgataacttagagatgtacaaaactatactttttaaaaaacacgtttgggctaagcaacattactaatttcgtaatccatagaacactgacatattcatggtttaagggactactgtcttgttcacagtgcaagaggcatgccttttaaaaaggaatttcttattttttaattcttcagtcatttacattcagaatcaaccatcaaatttatatggaacagccatagagagcaaaattcttgtcttgaacttttcaatcaaatttgtttttaagcacttaattctgaaaacagttattaatttaaacaaagcaaaatcttgaagtcatacaattagaagtcccactctgttccatgtagatttcaatatagatcatcctaatgtgtatagtggtcccttgatatctgtagggggttggttccaggaccctctgcagttaccaaaatctaggaatgctcaagtcccttatgtaaaatactttaaatcatctctaaattacttacaatacctaatacatacaatataaatgctatgtcaatagttgttatactgtattgtttagagaataatgacaaataaaaggactgcacatatttagtagagatgtaaccatccattttttccaacaaatattttcaatctgcggttggttgaatccacagatgctggacccctgaatatggagggccaactacactagaaacacacacgctagctgagaaagatggtggcttaaggagatcaccagtttgtagtagaggcccactctcggaaggtttggtaaaaagttgttttgaatcataatgttggctttattggcatgttgaaaccatttacctctgtaattttccatttgttttcctttccaactaccactcctcctgcctgataaataaataccattgcaagattatgctta

SEQ ID NO: 251828 - DNA, 641 bp, Homo sapiens
cagcaaacctttccctgctgtgaggtgggcaagttagttgctccaaaaacaagataaaatgattgagttcttttctcaagcgggagtcggagtttatctgctctgagagccccagcagctactattaatgagtgtctggaatatgttcctggcatttcacctaccctctctccaatccttccaagaaactcacaaagcagggctttttcttgaacttctcttcctcacaacagttaaatcatccatttaaagatgtcaaacaacctccgtgttctaagatgtctctgtgttaggaaaacttggataagcaggtccatagaaattcctctgctagccctgtctcctggaatttctacataatggcatatcctcagtttgaagctgaaaaggttaaattctacctgaaggatgaaaacaaccaacattctgtgccaagacagtcaggagggcaaccatgtttcctggtggagcctctggaaccactcaagccaagatgaccgggggtttggctgggaggagatggggaaactacagaccctacagatggtttcctgtaccatgaggttaagcctgggggcaggagaggctgtaccttagttccttcatctgtaaaataaagtaacatagtacctacctcataa

SEQ ID NO: 251829 - DNA, 649 bp, Homo sapiens
cagcaaacctttccctgctgtgaggtgggcaagttagttgctccaaaaacaagataaaatgattgagttcttttctcaagcgggagtcggagtttatctgctctgagagccccagcagctactattaatgagtgtctggaatatgttcctggcatttcacctaccctctctccaatccttccaagaaactcacaaagcagggctttttcttgaacttctcttcctcacaacagttaaatcatccatttaaagatgtcaaacaacctccgtgttctaaggacacagcatgtacaacctcacatagagttcctgaccagacaagacttgctggaaatttcccaggatcttccttccttaagtttgaatagctctctggttccagtttgaagctgaaaaggttaaattctacctgaaggatgaaaacaaccaacattctgtgccaagacagtcaggagggcaaccatgtttcctggtggagcctctggaaccactcaagccaagatgaccgggggtttggctgggaggagatggggaaactacagaccctacagatggtttcctgtaccatgaggttaagcctgggggcaggagaggctgtaccttagttccttcatctgtaaaataaagtaacatagtacctacctcataa

SEQ ID NO: 251830 - DNA, 578 bp, Homo sapiens
cagcaaacctttccctgctgtgaggtgggcaagttagttgctccaaaaacaagataaaatgattgagttcttttctcaagcgggagtcggagtttatctgctctgagagccccagcagctactattaatgagtgtctggaatatgttcctggcatttcacctaccctctctccaatccttccaagaaactcacaaagcagggctttttcttgaacttctcttcctcacaacagttaaatcatccatttaaagatgtcaaacaacctccgtgttctaagaactatttactgagctctacggagacacagctacaagcaccacatgctggacccctgaatatggagggccaactacactagaaacacacacgctagctgagaaagatggtggcttaaggagatcaccagtttgtagtagaggcccactctcggaaggtttggtaaaaagttgttttgaatcataatgttggctttattggcatgttgaaaccatttacctctgtaattttccatttgttttcctttccaactaccactcctcctgcctgataaataaataccattgcaagattatgctta

SEQ ID NO: 251831 - DNA, 805 bp, Homo sapiens
aaattgttttaatgaatgtaagctaaagacatctgaaaagtattatccaccccctcctagctgatgaaacctaaataacaaaaggtcaagcatcagagctggcagccaagcctctgaaacagggaacactgtacctgagacatagaacatagtggctaaatactgattgtctcagtcaaacagacctgcattagaattcttgttcagccacttaccattttcataaatgcaaactatggctaacaaaaacatgtatcccataggctgttgtgaatgtgagtagaacactgtgtgggaggtaaacacacttcatatgtgttagtgccaaatttttattccagagacttgacaaagttatccatttttgtttcaggcagaagagcacaagaaccactcccaatgacagctttctagtttctcctttaaactttagaggagtttctgcactgagagactggaatggccatcgtccggaaacatctgggaagaaatccatctcattaagactttcagcaaccattgcctcagggtactgtggaagtgatgctatgtgccttgtaaggctaggtgacaaaaatgccatgcatttccaccttgttctcttatggcacgcactcttggaatccagcctcccataaagctactgtgaggaaacccataggagcccatgcggaaagatcacatggagaggtaaccagcttagccaaggccccagtcatcatagaacagggacaagcctttcccagtgtgccttgtttgaattccttactcacacaattgtgagcataataaaatgatttcttca

SEQ ID NO: 251832 - DNA, 642 bp, Homo sapiens
aaattgttttaatgaatgtaagctaaagacatctgaaaagtattatccaccccctcctagctgatgaaacctaaataacaaaaggtcaagcatcagagctggcagccaagcctctgaaacagggaacactgtacctgagacatagaacatagtggctaaatactgattgtctcagtcaaacagacctgcattagaattcttgttcagccacttaccattttcataaatgcaaactatggctaacaaaaacatgtatcccataggctgttgtgaatgtgagtagaacactgtgtgggaggtaaacacacttcatatgtgttagtgccaaatttttattccagagacttgacaaagttatccatttttgtttcaggcagaagagcacaagaaccactcccaatgacagctttctagtttctcctttaaactttagaggagtttctgcactgagagactggaatggtatgctggttaagggcactggctctgggatttgtattccagctagtccactggactcctttgcctcatttgaggttttttcatctgttaagtgggaataatgataaaaacattgtccatctcatagggttattatgaggcttagtcaatacatgaaaaatgcacacaacagcacctgga

SEQ ID NO: 251833 - DNA, 684 bp, Homo sapiens
ccctgtgatccgcctgccttggcctcccaaagtgctggaattataggcatgagccactgtgcccagctgatagggaactaagttctttggtgcattggttatcttttgctgcattaactgactatggaaaaaattagtggcctaaaataataattctgtcattcgagttgggctcagctgagcagttcttctgctgatactgcctgaagtcactcatgcatctgtatctgggagctatactggggctggagggtctaggaaggtctctcactcaaatgtctggtgccagctcatctgggcctttcttttcacgttttcaccattcatctgtttagtccaggcttccttaggtgttgctgggaacattccaaaagggggaaggtggaagctttaaggcctcctgaggccattgtacaatttcacttctaccacattctgttgtagattagtttaggcatgaactgaaatggaaaatttagcagaaatggatcctggattttctggtacccgtgtttcgtttaattactttgttgctttctctccctccctgagttcaattaagttgagaaaagtgttcattgttattactgatggattagactttatttgctcttcattgaatgtttcagttaatttacagactagtaaattatctgagtcatcaagttatgtacgtgtatgtgg

SEQ ID NO: 251834 - DNA, 442 bp, Homo sapiens
ttgtataaagtagacaatgagtgaccttttattgaaaagaggaggagtcaaagatcctgaaagggttgggactgcctgcagtcagtccctagggaacttcctgttgtcaccacacctctgagtcgtctgagctcactgtgagcaaaatcccacagtggaaactcttaagcctctgcgaagtaaatcattcttgtgaatgtgacacacgatctctccagtttccatatgttgagattctacttattcatcagtttgttgtgcttgtcaagatcaggtaggttatttacaaactggttttcttaactgcttaaaaaatagaattagttgtgttgtcattttgcatgtcatcattccacttccttcggtgaacttaagtccatagagtcgtttttaaggaaaaagatataggaagcctgtatcatttccttaacatttccttaaa

SEQ ID NO: 251835 - DNA, 649 bp, Homo sapiens
ttgtataaagtagacaatgagtgaccttttattgaaaagaggaggagtcaaagatcctgaaagggttgggactgcctgcagtcagtccctagggaacttcctgttgtcaccacacctctgagtcgtctgagctcactgtgagcaaaatcccacagtggaaactcttaagcctctgcgaagtaaatcattcttgtgaatgtgacacacgatctctccagtttccatatgttgagattctacttattcatcagtttgttgtgcttgtcaagatcagacgcagaagaaacatgtccttcattcaccaggctgagctttcacagtgcagtggttggtacgggactaaatgtgaggctgatgctctacacaaggaaaaacctgacctgcgcacaaaccatcaactcctcagcttttgggaacttgaatgtgaccaagaaaaccaccttcattgtccatggattcaggccaacaggctcccctcctgtttggatggatgacttagtaaagggtttgctctctgttgaagacatgaacgtagttgttgttgattggaatcgaggagctacaactttaatatatacccatgcctctagtaagaccagaaaagtagccatggtcttgaaggaatttattgaccagatgttggtaagag

SEQ ID NO: 251836 - DNA, 540 bp, Homo sapiens
tactagtcaatgatgagatttgggtagggatacagccaaaccatattaatatggaaggtcatcattgcctaggaagtgcctgcataaatagatataagttgagcttttaatttgctttcagttcaggttaaatttggaatattggtaatgatttttaaactcaagcaagcgtattgtcactttttggcgatttcctaggcccaactgaaccataaacagaggattcctttgctcttgatcttttgagacctaataagaatgcacaaaccactttcagtgctctctttgcatgacaactatgtagatgtgatggagtctggcaatgtcaaaagaaaggaagcatcctctacccagggttgagattgcatcagatcatgggaactgacaccaaagccagtgtgaagtttaagagtggaggcattgctgagagtcccattttgaagaggtcctttttattcctgtgcacattcttgcccaatatcctccttactgatatatgcttctctattaatttttaatttctaccaaaatctcagaaag

SEQ ID NO: 251837 - DNA, 732 bp, Homo sapiens
cggatgaatacattgtaatgtaatgcactaatgggatgtagtcagatctcagcaggacactggaggctgctcctaagggagtgtcctgaagccaagtcatatcatagagagatgaatttggatattctgggttagaaaaatctgaggttatgagacagatccagaataagggtcactgatctgagaagcagaatgactaaggagcaaaaaccaaaaggcacttgaggagggtctggtggcatgagggggagattaggaacaaatggtagattgaagctagacccagattgaggtgaggcaagggtgtgaaacaatttggtccaagccagtcttatagactattccttttcttccttttccttcttttcagagatgggggtgtcgcaaagttgcccaggctggctttgaactcctagactcaaagcaatcctcctgcctcagcctcctgagtagctgggatagactatgcttttatctatcatgttgattatttatgcggagagctgggagaggagatttcaaaatgctggaaaataaactccttaaaaataatttttaaaatatatttaaaaggcttatggaaaaatacctcattattaaaacactatgaaaatgacctcacgaaaagaatcttcttattgcattgtcagaaggatgatgtaatgtttttattttaaaagaacattttagccacaggaataaaactgccacaggatatttatcatttagagg

SEQ ID NO: 251838 - DNA, 384 bp, Homo sapiens
aaaggaattgatgaacagtatcattctcttaactctgggatagggattctgtgaaggttaatgtatgctcttttttctagggagaagatccctttatatttgattgtcatggggatctgtggcccagagtaaaatcagcagtcccagctgtatagactttcaggttcattatggttgtgatctgaaaaccttggtcacctctgtggtatgtgtcattggattctagctacttgagtgaagtggctcctgtgcattcttagaagcgagtatgagagaggatggggtggagttccagttttactagagaaagctctcaaaagagaattttgatacccaacttgaaacctggaaaattaccaagtacagcttcgtgttaaaaaaaaa

SEQ ID NO: 251839 - DNA, 412 bp, Homo sapiens
ttataggaaggtagctgcatgttaccttcatgtggaatcagagttgttttgatacttcaaatatagagggtgtgtatggaagccaagtagccaaaggggtggactgtgccaattatttattgttgctcagttcccagtttatgtaaatccacatccatttatgccctgcttttgatacaggagatgggcactgtagacatttccctttggtgagctggcttcactttaggctttgccaatggaagcactggagacacaatgtaaggaggaatagaggagaaaagggtcttcccagccaggcacggtggctcacgcctgtaatcccagcattttgggaaaccgaggcaggattgcttgagcccaggagtttgaggccagactgggcaacatagcaagacctcatcaatactta

SEQ ID NO: 251840 - DNA, 527 bp, Homo sapiens
tagtacacttgatagtaccttgaatatgtacagtacatgtaggcccattttatggacctctgaggcacagttttttcccttttaagttattagatatttctgtgatttatttgatgcactcagatacaaattcatgctataataagttaaattgtaacataatatctaccttaatcaaatatttatagtttaggccaggagcctggcaaagtaaagatgacacagatgtaatgcttgataagtaaataaatatgagaagagatatatattaaaacacctgtgaagtgaatcccctgtgaagaaaagaaggtctctaacaatataaacctgtatcaggaaaccctgtgattctgattctgtgcacagaaggatacatggaattctcagaccttttctagttgcaaccttttaattgtttgactttatattctgtcctctcaaattctccttagactgtgacgtgttaatgctctcttttatattttctaattaaattccatacacattaatttgagaactgttggaga

SEQ ID NO: 251841 - DNA, 410 bp, Homo sapiens
gccgttcagaaaccacttaacgcctctgatggcgattggctccgccgctctctgcttacctggaaagcacgcttcttctaaacacaaggctttcgggcccccagcaactcggtttgcagaatgataaaaatgacagcacgccttcctggctcagccctttcagcttaaaggtctgagagagagggaacgtgatgaattctatgttccctatttttttcctcccaacaattgcatgggtgtaggcacaccttcagctcacaggtgctggaactgcctctcagagagatagacttccttgccattccaagaatgtcttattcctaagccttcgccttcgagtcaactgtatcatttttaattacctcattttcgaatattacttttgtaattaaaattctttccattatact

SEQ ID NO: 251842 - DNA, 654 bp, Homo sapiens
  misc_feature (499)..(499): n is a, c, g, or t
  misc_feature (502)..(502): n is a, c, g, or t
agtattaaaagagaagcactaacaatgccagtgaccatgtaacatggatttaagctataagtcatagaaatgtgatgagaaacctcagcgctgtaaaacagagggtggaggaaagcttttcctctctcaaatgagctttgcgaggtatacttcttgaaggataggaagttgaagtgttaggacttttatgtctattctactttggcttagtttacatgattcttagtttattagcctataaatggccaagaaaacttaaggttcaataattagttataaatatgaaatatccccaatttttaagataaaaacaacttataaatgtatttgtctgtaaaaattgtgtatatttttacagaacatctatttatttttttatttttttattttttttattatactttaaattctagctaacctgcacaatgtgcacatgtaccctaaaacttaaagtataataataataaaaataataatcatagaaaataaaataaaattncanaaaaaataaaaaatatagtaaatttaaaagagaaaaagatgaggtaaaggtaaatgtacagaatttaattactttttcttctataaaacccgagtcagtaccaagaagagtcaatttattagttttctaaaataaaaaaaaaatcaaaatca

SEQ ID NO: 251843 - DNA, 533 bp, Homo sapiens
cagggaggatcttttgcccctattgttttcttgggtgttctcactctgggggcctgacattcctcgcgtgtctaaggcaatgagggagcagtgaagcgcggggaagccgcacaaaagacatccaaaggctatcaatggaaaaagatcaattaggtgcacacaagaaacacccaatatgccagggaagagaaaaatacccttttccagagggtgggaaattgattgagcttctgtgagggtccacaaagaactggacggatgcagtggtggatggcgatctctctggaccactccggacgcgcccagcagacgcagcctacgcctttaggtcctaggaggctgagaagggtggggagaggggggcagcacgatcttgtgtctttcctccccgtgccgcctctaccgaatcgcggatgcttcattaatcttgcaggcgccgcagctcgggtcagtatggaggcggatcggtggcagagcccgggcctctgggctgcgcccgcccgttcagcctggcccgggaggggagcggccgc

SEQ ID NO: 251844 - DNA, 425 bp, Homo sapiens
tgctgatttttttttttaatttgcagggtttttacataacaaattatcagaaaccaaagcacccagatatcagactatgaatagaaaacatctttcctgaacaagtacaggctttattacttaattgtatttacactgatgagtgcgcacaaagaaaaatcaatttgtgggagtttatttcattggtattgaaattgtatcttccttgaaaaacttggcacaaagtgcctagtttgtatcccagttcattatattattattttactatattctgtgctgttatgtagttttatatgggctcactagttgagtgttcaaaattgcttttctaaactatagaatattaacttccagtatttaccaaaaaaacttatttattaaaaaaatcccaataaaagggcataaaataaatataaatactcaac

SEQ ID NO: 251845 - DNA, 373 bp, Homo sapiens
tcttggtattcaattgatttttattctgcttgggttagcagttttattaaccagttagtctcttcattaaagttctgggaattcttacccagttcaaataatatcattctaaagttctcaaaaacctgtattcaagagtgcttctgagggccttctccatcctttcatgaacctccttaaagatacaatattccaggattttgcaagcttgtaaagttttcagaaactgcctcagaattaagcaatttactgtggaaatgactttaagttgtcatagtcagacacaattgacaagaaaattttatttatttataggcatgagccacagcgcctggcctctaaagctaatttaataaaactttataaatgcatt

SEQ ID NO: 251846 - DNA, 417 bp, Homo sapiens
tagatatgagttctaaatttctcttcaaagaatcaatatgtcagtatgttccattctttgccttttacttgtaaacttcctcgtaacgcaaacattttcgattacctgctccatcctgactcattccgattacctgctctgccctgaattctgatttcctgctctgccataacaatttttcccgccaaatcactcaccctgtcactctctttaaattaaccaattggcattagtttagcctgtgcggtctaaccctaaccaataggggaacaacacagcagcagaggccacgtgcatcagggataagaaccccttctcccttgtccaagtgtgcgctcgccattgctccatctataagggcgcacccttctatagaagtacattgccttgctgagaattaaaaagaaaattttatat

SEQ ID NO: 251847 - DNA, 409 bp, Homo sapiens
gcattagacaaagttaactgaattggctggatttccttggtcaatggtattgcagattgattacaattagatccactttcaatggaaaatataagttgaccccttatgaaatagtcactgaaaggtttgtgcccctaataataggacctcatgtatcctctgctcctaaactctgaaatgactaaatgctgcaaatctttaatgcattatgccaaagtgcactttttttttttcgagatgaaggaagcttttcatgatgcactaactgaagacaatgaaacccattatgatctagaacctggagactgagccttctaaaaacatcagaaccagcatggcacatgtatacatatgtaactaacctgcacattgtgcacatgtaccctaaaacttaaagtataataataaa

SEQ ID NO: 251848 - DNA, 639 bp, Homo sapiens
cgacatctaagctgagatctgaatgttgatgcagttgtaggcataggaacattattgtgtccagcgatttcagggcacagtctgcagctggtggcacaactctcagggctatataatgatgtatggcttgttcttcgtggccctctgcaaaaaaaaatatgaatttcagaacgtgaacaactagcagacatctgctgcattaagagggaaaagtcagagctaactagtttatcttggaaacatttccatttctattaagtttccaggcaaagtggattctgctggtcagggcaccacacttcgggaaccatgaccctctgataaccttccctttggcatgcagagtagctcctgtgtccaaggcagtaggcaggaaccaggtgaagatgataccaagaagtctctgaagagggtcctgttctcagggagataacagaccagtgagcctaggtggagaatgacattgaaatatgaaccaagcaaagactggaaaggtgaaggtcatcattggccaacgtcttccttctcagttactaaaacaagtcatgggattaagtcatgatcatcaccccatgtgacactgaaaggaatgaagagactatattggatattcagttaattatatgtctcatgcttcat

SEQ ID NO: 251849 - DNA, 305 bp, Homo sapiens
aaaagtagaaaccatcagctaactttagaaactttccctgtagggttagatttccttacaaggtaaggtactttctaacacgttctcagccctccattagcaatacagaaatccccaccaaccccaccctcacttccttccctcacccctaggaatactcaacaattccaaggtccaagaaaggaatttattcctgtcacctaaatccctacagaaacattctcactcttctcataaaagcaataaaatctgcaggtttaaggcttagaactttgatccaataaaagttatattactataccaaa

SEQ ID NO: 251850 - DNA, 277 bp, Homo sapiens
tcctaaggtagtatctgaagtcccaatcctactcctcccaattcctgcacttttttttattaaacattatctctctaggaagtgcctcttaaaatacaattacattatgggcttggtggtgtgcaccttagtcccagctactcaggaggctgaggtgggaggattgcctgagctcaggaagtcaagactgcagtgaactaagaccataccactgcattccagccttgtggagcaagaaaagaaaagaaaaaagaaagaaatcaaaatttaaaaaaaa

SEQ ID NO: 251851 - DNA, 423 bp, Homo sapiens
ctcagccggcttccttagccaggatctggagtccaggccagccttggctgaagctctagactccctgagcctccatcctcccctgcagcttctgtctgaagccacaaagaagtctgagaatctaagctactgaaagaaaagatcagccgggcgtggtggctcactcctgtaatcccagcactttgggaggccaaggcaggtggatcacaaggtcaggagttcaagaccagcctggccaacatggtgaaaccccgcctctactaaaaatacaaaaattagccaggtgtggtgacgggcccctgtagtcccagctactcggtaggctgaggcagagaattgcttgaacccaggaggcggaggttgcagtgagccaagatcgcgccactgcactccagcctgggcaacagagtgaaactccatctc

SEQ ID NO: 251852 - DNA, 595 bp, Homo sapiens
accgtctggcccgtggtacgaaaacacacgaggtcatttttacagcttggacaaagattccaggctccagggaccaacagcaggtgggcgcgaggatagtttctaagctaactgtgcttgagttagccttttgtttcctatttctctacacttagataccctgtttgcactatctatggttgctctgaagtaactgtgagagttatgaagagtaaagacatttaaaagtcgtactaacctcaactcccaggcaaaatgtgccagaattcccctaagaactcccgtaagaagtggagatacacctaatgttaaatgacgagttaatgggtgcagcacaccaacatggcacatgtatacatatgtaactaacctgcacgttgtgcacatgtaccctaaaacttaaagtataataataaaaaaaaaagaagtggacattatttgatgaaagggaaacttgtggcctccagggtcatgattccatagagacagtttctctgcaaaagccagcctccctaccacccgcccccatctctgatggcttgcaagaagaggaccctccggtggtggcactgtccccactgttttaggatggtgc

SEQ ID NO: 251853 - DNA, 460 bp, Homo sapiens
aataataacagcccttcccaaaaactaaactttctttgtaaaactaatgaaaggccaccaagttaggaggatgaaaggggtctgaattctgctagatgtaggcatagttaaatacttactagtcattattctggaggtcccaagatttgcaacttccccaattactcctgcagatagcatcactcttgtagaacctaagattgaccttttgagatgtcttttaaggcttttgcatttctgacaaccagatgattccacttggacctggacattggacctggactcctctagtagcccccactcagaaacagcctcagcacacaaggatcattttccacacccctatgattgcatcctcaactaatcaggatgtccccttctggatacccttgcccaacaaattctccttggaaaaccctagtctacaaatttctggagagattaatttgagtaataactg

SEQ ID NO: 251854 - DNA, 503 bp, Homo sapiens
tgatgtatcatagtatattttatagaaatttatttaatccttccccagtgatgaaagtgttatttggatgtaaaaacttttgctacaaattgagcatcagtttatactggctgttttatttgcttataatgtttttcattgggagtcttattaattaagatcttaagtcacttgttaagtatttaaagtgatttaggccttgaatgactgaaaaggacctggtctcacaaataaataaattttgatatactttatttcataagaaagagtagtaattctcaattcaggggcatcaggaaagatttgtcatttatagacatacattaaaaatactgattttatatgacttaatttgtgctagaaggagtgtttttttttttttctttaaatatggcttgcccttggaaattgattaacagagtcctttcttgtcctaagttatttttatggcagtgtttttaatactttaggatgtatatgtctaattattatatggacatatt

SEQ ID NO: 251855 - DNA, 278 bp, Homo sapiens
ctgctccagagagcattctattcctgggtgtcctccccagccttcccacaggcagccctcctgtttgccctggagatagctccagaggctgaagtctggaggggaacaaaaaacaaactgagaagaggaagtttgcctcctggcagtggggacctggaggaacaggtatgtcttggagggaagggggaagtcaaggagacacacacgctctttcaacagaatcagctcttaatatatttttgaagtgcaaaattgagtattaaacatcttaaaatctt

SEQ ID NO: 251856 - DNA, 333 bp, Homo sapiens
ctccatcacagattggtagcacagtctatgatgagaagatgctacgggctgaactgtgtccccccaagatcatatgttgaagccctacccccaatataactgtatttggagatagggcctaaacagagataataaatttaagtacagtcataagggtggggacctaatccgatgggactggcatccttacaaaagagggagaaacaccctcgaaatggccatgtgagggtgtagcaagaaagcaactgtccacaagtcaggaatagagtcctcaccaaaaaccaaatcagctagaatcttcatcttggacttctagcctctagaactgtgaca

SEQ ID NO: 251857 - DNA, 421 bp, Homo sapiens
aaaaatgaatgtgctgatctacctgctggagctgggatacactcttcctctcccgtccttggacaataactccagacttctcggcctttggattccaggacttacatcagtggctcccctccctgagttctcaggcctctgggctcggcctgagagttacacccttggcctccctggttctgaggccttcagacttggattgagccatgctaccagcatcccagggtctccagcttgcatatggctcattgtgggactttttgcctaccataatcacatgagccaattcctctaataaatcccctctcagccaggtgcactggctcacatttttttgtttcccagtgcatgtaaaagttatgtttacactatactgtaatctattacatgtgcaatagcattcattatgcctaaaaaaaaa

SEQ ID NO: 251858 - DNA, 378 bp, Homo sapiens
aggtttatgtttttcctttaagtccgtgatccactgtgagttaattttcatgtaagatgtgagacttagattgaggttcttttgttgttgtcattgttgttgacaaagccatcctacttccattgaattgcttttccgtctttgtcaaaaatcagttggacgtatttgtgtgggtctgtttctgttgtctctgttttggtccatttttccatgtgtctgtccctctgcaaataccatagaatcttgccaactctagctatattgtaagtcttgaaatctggtagcctgattcctctactttattcttatttttcaaagtgttttagctattctattatctttacctttcaatacaaattttagaataatcttgtttat

SEQ ID NO: 251859 - DNA, 1033 bp, Homo sapiens
tctacccctaggtgctactgtggggcgggagcccaaaagggctcacccgggctcctgcacctgcccgtctgcacgctcccctgcacgctccccttccagcaaatgagccacagcccctgttgcaagtacccagagcgggtcagggaactctcctgtttcaatgataattagcaacaatgttactggtttacatattcactacattctacttcccatcactgtttcagaaatatactgcatctacttattaaaacttacagttaactgtaaagcagcctcaggcaggtccttcaggaagagtccagaagaaggtactgatatcatagggatgacggctccatgtgtgttactgcccctgaagactgcagggagacgggacttggaggtggagggcagtgatgtggatgatcctgactctgtaggcctaggctaacgtgtgcttgtgtcttgtttctaacaagtaagtttaaaaagtaataaataattttaaaaatggaaaaaagctcgctgggcgtggtggcacacgtctgtaaacccagcatttctggaggctaagacaggcagatcgctagagcccaggagtccaagaccagtctgggcaacacggtgaaacctacaaaaaaatacaaaaattagcccggcatggtggccacgcctgcctgtagttccagctatccgggagcctgaggtgggaggatctcctgagcccaggaggtcaaggctgcagtaagccatgattgcgtcactgcactccagcctgggtgacagagtgagactccgtctcaaaaaaccaaaaaaaaaacaacaaaaaaatggcttttaaaaatagtgactttatagctcttccccaagcggcctgagatgatctgtgaaaatggttcattagtcacttgacccagaaatccccacaaaatcgtgcaaatccagaggtacaggtcttcttgatcactttaagaacgctcgtgaaactgcccaggccatcaagggtatgcatacgtgagaagtcaccaagtgtctgaaaaacgggaagcgg

SEQ ID NO: 251860 - DNA, 285 bp, Homo sapiens
tggaaagcgctggcagaggggagacatcactcagtccagccacgcaccaccagtgccagaggtggagcccaagctccagcaggagagacacctgggttctaatgtcaccttcgctgctggtgagcacaggaacctcaggcctgtcaccccacctcactcagcctctctcctcctctatagaaatcatccctgccctcgggctgatggcaaggttcaatgagatgatgcgtgtgatgtggttagcgtggaccttgtccagggtgggcctgaaaacatttagtggta

SEQ ID NO: 251861 - DNA, 817 bp, Homo sapiens
gggatctgagaagcaaatgatgtgtttgaaatgcctggcatggggtctagacacaatactgctcaacctttaagtttccttcctccttttttcccaggcttgtgggtcttatccagtcctgtcacctgtcacagtcttcgtcctcctcctgttaccacttatggcccttgggatcttcctttgagagccctgacttgttgggcttggcccacccacccagctgccctgtatgtcagtcacctcccctgtaagctgagaagggatgacatcagcctttccctcttcccccctcccaagcctctaggctgttttgagccataaatattttagctgggcctttctctggctgttgccaaggtgatgggctctcaggggactggggtgggagtgtggaggtagggctggcagcctggggcctggcagcagagctggccctggaggagtgggtatgaggcctggccaagagccaatgcttgcagcttgacaagcaggctgttgctctacctgcttgccttccctttcctcagcccctcagagccactcctattgcctacaggcccacttctgcccttggctgctgctcttcgacctcaggtaaattgttcaatgtccctaggctttcattttaacattcgtaacaaaaatccaagaaagcaaaggaggttttgtaaaaatgctgtaagatgccaggctagtgaatcatgattggagaagctaggtcccactgccctttctgatagacctaaaggctgaggtcttgatgccatgtggatgtcaccctaaagacagctcttagatatgccactctctccccttc

SEQ ID NO: 251862 - DNA, 901 bp, Homo sapiens
acctcacgtctttctcaagaaatacattaaatttgaagagtaaagacattacataatgaactaggaaataattaaaatttgccttaaatatttctttgggggagagaacaccacacttctactcaatgaagagaaacatttttacagtccagaggtctttcattttttaaacacctgtcacaccatgaattcatagggaataggttccagcagctcaggctgcttcccattggttctcaccaagtgtgcttctctgggtggagcaggctggcgcttcagttgaacccaggtacctttctcttttgcttctgtctttttctaatcatctttcttcacgtgtttcatgaagctttctcggctcttagagtgcttaatgtgctcaatacgcacactaattctcttggcaagaatcttgcccttgtttgtttacaacaatgccagcagcatgctaaactgtagacgcttccagtttagccatggtaacacttgaggggcattcctttttgaacagtacccattcccttgatgtctacgatatcacctttcttatagattcacatatatgtggccaaaggaacaactccatgttttctaaaaggtctagagaacatatattggatgactctcctctttccctttgtgtttgtcattttgatgaattactgcaagatggcagttctggccgaaagtgttctttcttaattcttaactgttatagttggggtaaagaggttttagaatttctggtagacaaaggaaattgcttattaagttgtatagtaactttcatgttgaggtaatccgttctcaaaacaacaacaacaacaacaacacaaaacacccacacatactcaactgtttcatttacttttattaaacatttgatgattagtatttgcac

SEQ ID NO: 251863 - DNA, 497 bp, Homo sapiens
gaagtgtactggttaaagaagcaatgaaaccatcaaaacttaaatatcatttaaatgcagaagttaaagaagtttaaaatcaaaattatttttctgaaaaactgaacaaataaagctaagaaagcatttttcattgaaacttgatgaatgtacatgttagtaattttgattagtattaaatcagtattttcctttgggactagtgacatgtgcattcatcaagtatatgtgtaatttgaacatgatggtgatatgaagaattacagcattttttagcctaattgccatcaaacataatgagctctgaaatgtataaaactatggagaattacatcatcaacgaatgtggtttggagttttaagttttgcatgggagtattttttgactgtgcagctgcaatgacagaaaaatattctgagtagttacttaagtatgaatttatatattatgtatgtatatattttttcaaacatggtgacatcacactatatctaca

SEQ ID NO: 251864 - DNA, 389 bp, Homo sapiens
gagccaagatcgcgccactgcactccagcctgggcgacagagcaagactccatctcaaaaaaaaaaaaaaaaaaaaaaaacagaaaaagaaaaaaacatattttagacacacacaaaaagcatcaaaaaataatataatgcactttgggaggccgaggcgggcagatcacgaggtcaggagatcaagaccatcctggctaacacagtgaaaccccatctctactaaaaatacaaaaaattagccgggtgtggtggtgggtgcctgtagtcccagctacttgggaggctgaggcaggagaatggtgtgaacccaggaggcggagcttgcagtgagctgacattgcgccactgcactccaggctgggcaacagagcaagactctgtctcaa

SEQ ID NO: 251865 - DNA, 457 bp, Homo sapiens
tggatcccccgggctgcaggtttgaattcactgaaatttgccctattacttttatactgttcttcctcttctagtgatagaatcagcctcacttcttaccatgaagataaatatgtctgttggaccagagagatgtacttaggtggtctttaaattctcttctacctctaaaattctgtagttctgtgttccatctgctgatactacctcagacacttaaaatcacaacttttcatcctggtgttagtcctttttattttattatttctatctttgactctgtcactcattttcttttaagaactcttagccctgggtatggtagcgagcacctgtaatcccagctactcaggaggctgaagtggcaggattgcttgaggccaggatttcaaggcagcagtgagctatgatcatgccacagcactccaccctgggcaacagagtaagaccccatctc

SEQ ID NO: 251866 - DNA, 403 bp, Homo sapiens
tggatcccccgggctgcaggtttgaattcactgaaatttgccctattacttttatactgttcttcctcttctagtgatagaatcagcctcacttcttaccatgaagataaatatgtctgttggaccagagagatgtacttaggtggtctttaaattctcttctacctctaaaattctgtagttctgtgttccatctgctgatactacctcagacactttttgactctgtcactcattttcttttaagaactcttagccctgggtatggtagcgagcacctgtaatcccagctactcaggaggctgaagtggcaggattgcttgaggccaggatttcaaggcagcagtgagctatgatcatgccacagcactccaccctgggcaacagagtaagaccccatctc

SEQ ID NO: 251867 - DNA, 373 bp, Homo sapiens
ctccatgattcaatcacctcccactgggttcctcccatgacatgtgggaattgtgggagttacaattcaagatgagattttggtgtggacacagccaaaccatatcaggtacttttactatccaaagtaatacacaaagcagtcaccactaagtgatatcctggttcctctgaataaaagaaacaaaatccaaacaagactgaaagctaggaagtgagcccacccagaccggcaaaaccaggaactgaaaaatcactccaggcccgtcacatttgtaaagtgcttttaaaagttctcctcccaaccccggctcactttgtacttaggaaaaaggaattcaaggtataaattgaataaatagatatgatagtga

SEQ ID NO: 251868 - DNA, 458 bp, Homo sapiens
ctgccagcttaaggaaatgccactcacacaacggggatgtctttctcccgagaggtctctccatctgactccatcctgagaagtggtctccttgagtgtggtataagagagccctttcccccatcacaggggcccaggaagcccaaggatggagggacccatgcctgctgctccttggggctaagtcacccaacctggttctcctttccaatgggtcacccatgtcagcaagccccaggactgactcgctccaagctcctccttctgggaatggaagcatggtgggacaaagctccttgcagaagctgataaaccttagatcacacaggtttagatgctctgatcagtagaggttctctccctctgctgaagtaatgtgaatttgcaaaaatcgcttcaaagtaaacaattaaattgaaatggtgatgggtgccacaggaatgcttaaatggcagcta

SEQ ID NO: 251869 - DNA, 581 bp, Homo sapiens
gacagagcaagactccgtctcaaaaaaaaaaacctcgctttctgctcctcgcttagcacacgttctctctagggaaggtactaggcctgggaagtcacagctgaccatgaacagtgacaagagtcagacgctcgaatcggacacatggatgagcagacgtcactggcaaacagccagttgtcactcatggggctgaagagatgtttgtgcaatatgtacagtctatacatccatatttatggatacgactttttcatctgggtttttaggtagtttttggtgttcataaaatatagagcaatcatttaaaagatattgtaaagcctttaaaaacactggccttagcagttcttgatgacctcgactaaattcagccatgaagctctgtggagttggattttaggaaactgattttacattgtaatgtcttccttttagagggatgtttatgccttagtatcactcaaaacacagtatctacctcaaaggatacatgcgtggttttttctgcaggtagctggagttttttactgctgtaagaaactgattgtataaattcactatcgttcgtttgttcattg

SEQ ID NO: 251870 - DNA, 433 bp, Homo sapiens
aggagtaaaagttattacttcagaatccaaagtccaaaataaaacatttttttttaatctttgaagcctcacacacaaaaaaagataataccacaagatgataaacagagatgaaaaagacagcactgtgtgtttaaaaagaccttcggccgggcgcggtggatcatgcctgtaatcccagcactttaggaggccgaggcgggtggatcacctgaggtcaggagttcgagatcagcctgaccaacatggtgaaaacccgtctctactaaaaatacaaaaattagccagatgtagtggcgcctgtaattccagctacttgggaggctgaggcaagagaatcgctagaacctgggaggtggtggttgcagtgacccgagatcgggccattgcactccagcttggggaacagagcgagactccatctcaccaaaaa

SEQ ID NO: 251871 - DNA, 241 bp, Homo sapiens
gcttttctacttagcattttattggttacagagtagttttctatacataatcttaaggaacagctgtgtacagttacctaagttttacaaacgattatactgagaccaagtttgaatatctgatgagtaactggcaaagctggaactcaaaagcagttccttctagtgactgtacccatatccaaggcttattgcaacttttagtcttgcccctgctacttacacagtccagaatcacttg

SEQ ID NO: 251872 - DNA, 744 bp, Homo sapiens
tgcgctgcacgcggactgggcggaacccgccaacccctatgctgactcgcactggagggcggccgagcgcttcctgcagttcgagatcgcctggttcgccgagccgctcttcaagaccggggactaccccgcggccatgagggaatacattgcctccaagcaccgacgggggctttccagctcggccctgccgcgcctcaccgaggccgaaaggaggctgctcaagggcacggtcgacttctgcgcgctcaaccacttcaccactaggttcgtgatgcacgagcagctggccggcagccgctacgactcggacagggacatccagtttctgcaggacatcacccgcctgagctcccccacgcgcctggctgtgattccctggggggtgcgcaagctgctgcggtgggtccggaggaactacggcgacatggacatttacatcaccgccagtggcatcgacgaccaggctctggaggatgaccggctccggaagtactacctagggaagtaccttcaggaggtgctgaaagcatacctgattgataaagtcagaatcaaaggctattatgcattcaaactggctgaagagaaatctaaacccagatttggattcttcacatctgattttaaagctaaatcctcaatacaattttacaacaaagtgatcagcagcaggggcttcccttttgagaacagtagttctagatgcagtcagacccaagaaaatacagagtgcactgtctg

SEQ ID NO: 251873 - DNA, 697 bp, Homo sapiens
tttaagacccagctatcagagactttctatgtcttagcagcctcctgataaaggaagtcaaatgaccaatcaagtttttagtgaagaaatccaatcaggccaggtgcagtggctcacgcctgtcatccaagtactttgagaggccaaggctgggggatcacttgaggtcaggagtttgagaccagcttgaccaacatggtgaaacaccttctctactaaaaatacaaaaattagctgggcatggtggtgcatgcctctagtcccagctacttgggaggttgaggcagaagaattgcttgaacccaggaggtggagattgcagtgtgctgagattgggccactgccctccaggctgggtgacagactgagactccatctcgaaaaaacaaacaaacaactattttagttttgatggcttaaccattcattccctatgtcttcatggttaattgaaggttactgacagtagacaaaaaatgtattctcatttgactctaatttttcccatattctacttgaacaaatttaaaatgttctgctgcctatacaccccgacatctaggagtattaagactagtcagtcatatctgttttcagaaatgtcagaataaatatatattggttactggacattctagaaggaagtcttcaagttttaatttttttccagtgtgagcatgcctcaacattttgcata

SEQ ID NO: 251874 - DNA, 406 bp, Homo sapiens
gatgtctgtccctgaagatattttctcatagaagcaaggaattacaggaacttctctgttgtgttttgggtaagtgtttccatgctgctactctgaataatagggtagatatttccaggtacaggctgttaaaatttgctatattacctccattctgtatgtagttccttctctacataacagtgttggttaggtagtggaaccttctaaatgacgcactatgtgattcctgtgtcatatagaatgttctatgattcttagccagataatcatattcccagaaaaggcctctcaactttcacctgcctttctaaggactgaaatactctgagtgttgcataaagggtgttccaaatatgggcattcacctgtttcctgattaaaaaaagataatttggtatgaata

SEQ ID NO: 251875 - DNA, 672 bp, Homo sapiens
tattctcttatttaagttttttcatagagaaaagtatattttctctccgtctcccctctcattttcaagcctgataccttaggaaattttaaattctctcttcttagctttcaaattaattgtttgtgtatcttcgctctgctgtacttttcagtttctcagagttcagacaaccaccatgagacctgcagcttttgtggccctgttggatctaatctaggtaggagagtccactatggttatctgtgtccagacagttgccagatggaaccagagtgaccatgactgggaatgctttcccaagtagtgacaaaatggcctttgtccttcttgtccatttgatccccatctttaatcattgtgctcagagctactgctcccattcagaaagtggctgctcaaggacagcatatttttcccaaaagtacacactttacatgccttagcagtgagtgctgaagataagtgttttaagagttcagagaggttttatatgcaagaaactaatgcttgaatgtggatcagtatacattatgagtttactgtctcctaaaatacctgtaaaatctagtctttgtaaaacagtatgtttgtcttttttctgatgataatatgttccagaaattttatatcttttttcataagaattttatagctgctattaattggttt

SEQ ID NO: 251876 - DNA, 788 bp, Homo sapiens
ggcgggagaattgcttgaacccagaaggcagaagttgcagtgagcagagatcacaccactccagccttggcagcagagtgagggagactctgtctcaaaaaaaaaaaaaaaaaaatttttggcctggtagttaccttactatttttgtcaggcgttcagtgcttttaggaatctgttttctatattttatatagaatttccaattgttggtctaaaaaacccagtctgccatagtcttagaaagggaagcgaacatcaccacttttctcagtactttaaatgagaggttcttttaacctaggattcatgcatggagttcaaggcatctatatacccccctgaaatttcatgcaatgttttgtgtttaaccaattttttctgggaacaaaatccatagatgttatcagattgttaaaggtgccagtgatagagacaccctcaaatttgataactattgctttagagttctatcagtacctagtaattttaattaaaaaatgattttagaatgatttcaaactcacagaaaagttccaagtagagtgcaagacaatctccacattgtcgtcacccagattcgccaatgttaactctgccctgaccccacacacaattagtctttttctgaaccatttgggaacaagcttcagacctgagtccacgttacccctaaatgctatagtgggtatttccccaaacaaggatcttccaaatcaagaagttaacatcgctacaagaccgttcacagaatctatataagtttcaatttttcaatttcaactgtccca

SEQ ID NO: 251877 - DNA, 665 bp, Homo sapiens
ctgggattacaggcgtgagccagtgcacctggccggtatgtcatattttttgtaactactataaatgggaatgctttcttgatttttcagattgtttgctgttggcatatgtaaatcctcctgattttcacatgctgattttatatccttcaactttacttaattcgtttatcagttctaacagttttttggtgaagtccttagatttttctaggtataagatacatgttgtctgtgaacaagactaattttgacttcttattttccaatttggatgctctttatttctttctctttcctaatggtttttgcttgattataactttgagacctcacaaacaagaggatatagttttaagtattacaaagtcatgtgcatttaggttatatgactatatcaaagattagagcaatggaaagagctgttgttttagatatatagttaagtgaaatttaatgctacctaaagaatactggagggcacagtactaagaacacaaaagatgttttacttttcctttgaggagaggagaaagtgaaatgagttcaatacaaatgaattttagaaacagatgggagattctaggatgcagttttatttctgagatttctaaagtgtatgagtatagccacagttgtcagtattaactatagagagttgaggt

SEQ ID NO: 251878 - DNA, 392 bp, Homo sapiens
gcgtctctccagtccttgaatgtgggctcatacattttgagtcaacacttgtaggttgaattcttctcacacttgtaatctctctaacttcccgtctgctgcatctctcttctgcctccaactagagaaagttctctgcctgtaaattctcgtgtcatgatatcggactttcctgaataacctagtgtaatatttttattttaagttcagttacataaccttaatgcttctgcaaagtgcctttggtcatataacaaagcatattcatttttcaaggataattgtataaagcatctttttggagcaattaattattcagcctactattgatgtagacaatgtgtctttggcagtgctttgataagaaaagaataaaataattcaccataatt

SEQ ID NO: 251879 - DNA, 285 bp, Homo sapiens
caacagggctcagggcgcccagagcccaaggaaaggggagatgcagctcggcaagggcctttggggagcgaacctgactccacgcattcatctgagagttcccgggctgggggctgcaggggaaaccctccccttccaggttcctgtaagtggcacccaaatggtacatgtctatgaatagactttaaaaggggaacatccacggcctttctccccacctaatttctcccacacatttatgtgattaatttcattttcttaaaatctaacaccttgaaactacag

SEQ ID NO: 251880 - DNA, 379 bp, Homo sapiens
agagagacaggcagttaagcagttgcaccttttccaggcaaaagatgatgatgccctgattagggcagtggcttcagagatggagaggaggagggagtaaagaaacaggagcattggccagacacggtggctcacgcctgtaatcctaggactttgggaggccaaggcaggtggatcgcctgaggtcaggagttcgagaccattctggccaacatggcgaaccccatctctcctaaaaatacaaaaattagccgggcttggtggcatgtgcctgtaatcccagccactctgcaggctgaggcaggagaattggcttgaacagtgagccaggatcacacgacttcactccagcctgggcaacagagcaaaactccatttc

SEQ ID NO: 251881 - DNA, 225 bp, Homo sapiens
gagtacaaagtggctgcctctttggggaggacccagggtgggcaaagcaaggcaagggactgccttttttcattgtaagccttgtagttctatttgtctgttaaaaatatgtacgtgttattaattttattgaaaagaaaagctaaagcaaaaaagaaaaaaggaagaaaatgaaggatcaaagaggtgaagtaattcgcccaaggtaatacaggattcagaact

SEQ ID NO: 251882 - DNA, 510 bp, Homo sapiens
agtaggtaagtgatgttccttcaaggcattcaaggaacccactctggaatagactaaagagactctgagtcagttagtgttgcccacgagggtcacagccggtcaatggcagacctggactgaggttcctgcccagtctggagggtcaacacagggtgtgttgtcctgctacctgtcagagcaggcacaaagcaagactcagtgaggcagaccccgatttgctctgaagcatccttctatctgggcattggcagaactcccaaatgagtgggtaaaggtaccaaaaaagttcagcctcaaatgagtgggtcagtaagacatgagacagtgaaacgttgttcaattgtgggacatgggattggcttggcagagtcactctgctccatgctcagcctgcagcctcctccctggtatcaaggccttcctacttccaggttcatcttttgaaatacatcatttattttcaaaatatactgatgttaataaaaataatgccaaagatatactaaa

SEQ ID NO: 251883 - DNA, 693 bp, Homo sapiens
tcagatggacagagtctctgtaacagaaaaaaaagggtgttttctcttgcatatctgaggtgaagtgtgtattctgtgtgctcttagcaattggcagtcctcttgcttaggtttacaggtgtatgtgaaaatagacctgagtcttttcaaagttagatcatttttctgatttcatcttttaacttttggcaatacatttgttttgatatccaccctacttggtagagtgtaagtacttccttacaatgttctaatgtaaaacagtgcataggagacctttctgtccttggttgcccaaaatctttttcatttctactaaattcagaaatacatatttttactagcttatgaaaatttggaaaatagcttgacatccttttggataatgaagtgattagttcatatattgaagtatataaaatcaactaggaagtaaattcaagactgaaggaatgggagagcttgtgtgagttttggttgtatcagtccagaatatgtaattttccatttccctgaaaaagacttcagaggaaatttattttccccactatacgctccagaatgtctttcggtgaaatgagagggcttgggctcttctgattctagacgtagctatcagagtttgcttaatgaaatatgggtctactcacaaataaagcaatttaatggtttcgaaagagtaggcaacttgtg

SEQ ID NO: 251884 - DNA, 939 bp, Homo sapiens
agtcccagtcatttctctggtgtgactgggggtgtcttatggctggctggtcctgctggtagacaagagcctgcttctccttttggcgcacttctgttgcccagatgtggcttttacaaaagcaagatccattttctactggaatcattgaagacttcatcatgaatctagaataacttcagcctcaatacatagagaatgggactgtcagggaatgcatccacacccagaatttatacatccagccaggtatacagtcaggttgtcctcctaggaggccacaggcctgctcccccacagttcccatggccaaaagatggctggaaatggccctctggggctactggcagagccacagcacactcgagaatcactttgacagcagtgattctgtggccttggaaagtagatacaatgtgtctgaaaacatcatgagtcactcctgtccagtcagggacccagggttgggtagggtgacgacaggttacttggagcccaaaatgataagggaggctttcttatagggctcagaaattcactcgagatagttctcaaagaaaagggcctagagtgttttacatcctgtttgcatattcattttttctttatcttgatatttactgtctggaatatccattttttactcttccccatccttgtgccttttctcatattgattattcctcctgaaatgcctcccatccctccccattctttgtatctctgctgatagaaatcttagccagcccctaaggcccagctgagatggcaggtcccttacaccttcgtgtgccctgcaagattggagcacagcgactcattgtggctgagtgaatggatgctggtgctggaatgctacctgcatagtatgaatacattttcccattttaaaaataagcagtattcactctagaaaaatttagaatgttctagaaagga

SEQ ID NO: 251885 - DNA, 390 bp, Homo sapiens
atagaaaagcggagctcgacggtcaaggcgtcagattgcaagtgtccatcaccctgcctgtcccaagggcttgggacaacgtcttaatggttccaccattgtgcaaagaggatgaccactcccagtgcgtgcacgttctctccgctaatgtcactgctcaaaacgttcagaaaattaacacttacgccagggtcggaggcctcaggaggttctgtatccttctcactgacaatctatacaaaagcagctcccaaatcctctgaaaccccgtttctttctcttccctctgcctttctctctgctctttctgggaatgtggcaaggtttgccccctaccccccactggccccatcccaggttggtccaccctccacacacacccctcacccc

SEQ ID NO: 251886 - DNA, 229 bp, Homo sapiens
agagacagggtttcaccatgttagccaggatgatctcgatctcctgacctcatgatccgcccgccttggcctcccagagtgttgggattacaggtgtgagccactgtacccagccgaccctgtctcaaaaaacaaccaccaaaaccatgcaagagctgcattctttgttctgtggtgtggacgtgctgggagagtacagaagcaaagtcagctgtccttgtttgtttat

SEQ ID NO: 251887 - DNA, 672 bp, Homo sapiens
tctagctgtgaggacaagtgatgactgcctagctctttccatgttgaaatagaaacccaaaagtttgtttaaagaattacttgttataaaagtcccccattgttaatgtacaactcaatgatgtaagttgatttatcgaattgtgcagccatcagcagagttctacttcagcatattttgtcacttcccaaattcccttgaacctgtttgtagtcatttcctaatccctggtccccatgactgggtctgaatagaataaacatttggaaagcagatttcattatatttacattttcctgtgtttgggactttatgtagtggactattgtgttcgttttgtgacaaatagagaagagattgcattctagggatggttttcgggggaacataatagtagtcctgtttatggctctccttgaattggttcttctgtgctggtgactggtatttgttaccaaaccttgtctggtgagcacaagaaaaggaattttttaaaatctcctattaaaattgagatgatacattttcacataataatatttggagttaagtagtgaaccgtctttattttattttatctttttttttggagatggagttatttctcttttccttgagctgagatatcgcaccactgcactctagcctgggtgacagagcgagactccatct

SEQ ID NO: 251888 - DNA, 605 bp, Homo sapiens
aaaagcaccggtgctcctctctaggcagcgggtgggcacagcccctcaccacggacacggacagaggaccacctccccatacagagagaggcttccctcccagcctcagtttacccgtaaatgcactagcgcgaggtcagaaatcacaagcctgggcatggcctgggtcgcaccccctccccacggccccacccacagggacctcaacttctgggcccgggattttttccctattcagcagcattttaatcacatgtcctccagctgactgggactcaggctgcgtgcctccgtctgcctgtgtgctggctgtcctagctccctggtaacagcatcctctgctggctctcctgtggtcatcttgtctctgcagctgggagagctgcttgtctgtccgtcacaggcagtgaggatgagagggggtgatgggcgcaaggccccaggggtcctccctcttaacccatgtaggtgccagagaaaccacccccactccatgagaagaggctcagacagcaggctccggggccacgcagcccagaccacacctgccacggtcttccaggaacggtgctcctgcttctgcaacacaaatcggaacaggagcg

SEQ ID NO: 251889 - DNA, 344 bp, Homo sapiens
agaagaagagaaagagaaaatcaagagaaggcaattattgtcatggtgcaattaaaatagaaaacaggaggggtgcagtggttgttacctgtgatcccagcacttggggaggccaagctggatggattgcttgagcccaggagattttgaacagccaggacaacatggcaaaacctgtctctacaacaaaaattagctgggcatggtggcgtgcacctgtagctccagctactcaggaggctgaggcaggagaatcgcttgagcttggaggtggaggctgcagtaagccatgatcatgccactgcactctagcctgggcaacagagtaagaccctgcctcagaa

SEQ ID NO: 251890 - DNA, 358 bp, Homo sapiens
atttatgccgcggaaccacaatctccccttaacagactttgagtataagtgacacatgccatgtggaatgaagtaggaatcagcattaatccacttaagttaaatatttgcaaagcttaaatttattcttcaattaaaaaatgatataaatagaagttagtcatattttctccaatggatcatcttgcacaattgccgggggtaccagaccccattttcagaagccctgccttagagtaagtccagctattcttacaggtgcaaatgatatttattagtctgttctgcagactgaaatgaactctgttttcctatctaaaatgaaaacttgcaatgtagttttttggcattttttttt

SEQ ID NO: 251891 - DNA, 361 bp, Homo sapiens
gctctttcagtggctctcagtgaactacctaaaggctctgaaagttccttttttcagccacagagtataaagaatgaagatttcccttcctcacatagctggaccttgtgatttccaaagaaatcattaaaaagactcaaaacaacccttggaccagagaggaagggtccccaggtggccactccccttctttcttctgccctgggaccctgaacaggccggcccagcctgctttattgcactagaacagacagatgactggaaatctagaagaaaaccacatttcttctaaaactgattgaaaatacacacacataatttctagttttcggggacctcatctcttgatttatacgtctca

SEQ ID NO: 251892 - DNA, 442 bp, Homo sapiens
taaagaccagcttaactgtatttatttttttataaaaagaacaccatataaaactaacaactgaaaatatggacataaaaataaatacaatagttttaagctttttcagttatataaaacatttaaaaattatcaaatatttataacatatcaattacatataacacacataagtatataaatatataactaagtatcttcatttgtggatagtgcacaaattgttaactagtacagaagccagatttactttagcttgtttctgaataattcagtaagtcatgttatttggagtatgatatatggtttagagcaggggtcagcaaactatggcccatgggccaaatcaggcctgccacctgtttttgtaaagttgtaaataaaactaaaaacttgaaaagaatcactgataggatgatttttacctaggatgatttttgac

SEQ ID NO: 251893 - DNA, 299 bp, Homo sapiens
tatttttgtagagatggggtttcaccatcttggccaggctggtcttgaattcctgacctcaggtaatccgcctgcctcggcctcccatagtgctgggattacaggcatgagccactgcgcctggccatccctctgtctttaggttggaacccagaagcaatgcaccctaggaacagaggtaaattaaaataagccagctgtccttgagtcatcccagtccttcacttaaatcaaattctctgtattaccaatgcccctaacctagtccttggccctaagcacatgtaaatcctttttgg

SEQ ID NO: 251894 - DNA, 664 bp, Homo sapiens
agaaagaatcgtgtgcctctcgctttaaatcaaaagctagaaatgattaagctgactgaggaaggcatgtttgaagctgaaacagactgaaagcaagtcctcttgcaccaaaaggccaagttgttaaagcaaaggaaaaattattgaagtaaattaagtgctactctagtaaacacaattgataagaaagcaaaacagccttattgctggtacagagaaagtttgagtcgtttgggtagaagatcaaaccagccacaacattcccttaagcaaaagcctaatccagagggccctaactctcttcaattctatgaagactaagagaggtgagaaagctgcagaagaaaagttggaagctagtagagtttggttcatgaggtttaaggaaaaaagccatcgctataacgtaacaggtcaagaaggaagtgttgatgtagaagctacagcaagttatctgaaagatctagctgactagaacccagacaggactctgactcagcctccacgcagacaacagcaaggccatagagatggtggagccatacaccgaaggaacctgagtcactctgtgactgcccagagaaaagctgtcccattcacctgaactggacaccttggactattatgtggaagggaaataaacttctttgctctttaggctgca

SEQ ID NO: 251895 - DNA, 1178 bp, Homo sapiens
gtaccttttcatgtgctgagtgttattctggagtttgtaatgggtatggagacatatcatataagtaatgctagggatattggttaaagcttttttatggttgagatttagtgtcagatggtattagtgaaaaataaatgggccacatcattttgaaaaaatgaaggaagttcctggggagtaaggtattatttaagtgttttctgtaggtgttcagagttttgttacaacatctaatgtgttaaaatatatttctgaggtgtcagaggatagcagtgatataaaaagtcagacttcttattttcaagaataaggcagtaaatatccatatacatatcttctaattcaacagttattcatgttttcctgtgttcatagatgtttttaggcatggactttttggggggatggcaaactactttaaagtaagtagcaggcttgatgttacttgtcccttaaatatttcaacacatgcctccaaaaacaacatttttaggttaatttcatactgatgaagattcatttcttgaaatcgaagagtccacctcttatgtagcccagcatggaaacatttcattctaagcaaatcatataattcaatgaattgggagtagtcttatactttacaagatcatttgtttccagcagctttcattactgaagtttaaaaattaaaatcatttttctctgttcactttacatgtttttctggtggtgtaaaatgaagtatgtctgccatttcctaagtgagtatccatcagttaatttatggactgttactctggggaaataatgaaaaaaaaatgcagaaaaaaatttatagtgtctaatgtttaaaatctggagttttttaaataccaaaagctgagatgagcctgggcagttgtagtgagacctcgtctctacaaaaaataaaaaaattttaaaaataaatatcaaaagtagtgtcttctatgtgttgtgagaatattttgaatttgtttttgtttccttgattatggaataaccaatattaatgattgaaatttgaagcttgtaagacagtgtttaaaggcttaccacaaaacttgttttctgattttatttgacctttttttctgtaaaaccgtttagaatataaatacctctaagggttcctctttgttgaaacttactatttgattacacttttttttacc

SEQ ID NO: 251896 - DNA, 301 bp, Homo sapiens
atgattatgggattataatcctacataagtgaattccttacacagtgtttggaacaaaataagactatgtttcccaaaaaaagaaaaaagaagaaaagactatatttcctattaccaacctgaccacagatttttgaacaacgtatatttttaaaaattaagattgtaattttaaaacagacaaatcagcatggcattttataaaaatggaaggaatacctctatctaccatgctgtgcctatacctgtaaaagcaagaagaatgtttaatattaaacaaacagaaaaacctgccattacg

SEQ ID NO: 251897 - DNA, 490 bp, Homo sapiens
acatacatttttgaagaccaaatggactaaggaagatcatgtattataacactttggaattattcctgatacatggatgtttcacttagtaacaggcatctacattctttactaatctgtcttctgtttaatagaggtttgattatggagttccatacaaatatctagtttttcattagcaactgcaatattgattgctaatacgtttagcaaatcattccccaacttgtagcagttaaagtggataaagccggccagggcaaagagatcatttaggggtgtctacaacacttcttccagtcagatcttttgttgccaaagatcataatttggacatggcagaaaccaggtgatcagtggctgactgaagggtgttcagaagtagttacaggtattttgcaaaaacactgcctcatagctgatcttacctcatcaactcaaagcaatgttatgcacaatattaaatacatgttaccagttttagcttatt

SEQ ID NO: 251898 - DNA, 698 bp, Homo sapiens
gctttccaaatcccgcaaaccagaacggctagtcacccaaacagcaaaggtggtggcctgcccctctctctgggagctctgtcccgtgaacacttcaaatttctattggccaaggaatgctggtggtggtagctggaggccccatttgggaggtcctgtacagtgatgtgcaacaaggtcgggggcctgcttacagaagcattctggccatgatttggtaaagcagctagctgtgctgtgggatctcttctgccccttgtcggtttatactctccaaagccctcaggctggaatgactaagttgcctgaacaggaaagatggcggcctgccccatctattctctcagagttcatcttgtttgatggagcttaatttttagcctgttaattttactgtctacattagacttgttcggaaagaatctgctatattttaggttagatatatgagaattcattgttttctgtaaataaacctgttcatgtcttgttctctggaaagaaatctctttcaactatctgactttggtcacagtcatatagagcagtagccagtctataatgacataattgaatttccatttccagtgttttgtttttgtgtcttacattgtacagttcagaaatgagcattttattcccaattgtcaaaaagctaagctgtccactgtactgaaatactgtttttgttaatgctt

SEQ ID NO: 251899 - DNA, 481 bp, Homo sapiens
gatagatcgagccggtaccggtcaatgaccatctgccccttgtcggtttatactctccaaagccctcaggctggaatgactaagttgcctgaacaggaaagatggcggcctgccccatctattctctcagagttcatcttgtttgatggagcttaatttttagcctgttaattttactgtctacattagacttgttcggaaagaatctgctatattttaggttagatatatgagaattcattgttttctgtaaataaacctgttcatgtcttgttctctggaaagaaatctctttcaactatctgactttggtcacagtcatatagagcagtagccagtctataatgacataattgaatttccatttccagtgttttgtttttgtgtcttacattgtacagttcagaaatgagcattttattcccaattgtcaaaaagctaagctgtccactgtactgaaatactgtttttgttaatgctt

SEQ ID NO: 251900 - DNA, 373 bp, Homo sapiens
attctaagcccccctcctgcctcacgccacaccccaccccaaccttagggcctacggggatgccaaattccaggggccagaaagagcttgggataaaaagaaacttcaaggggacggctttgacctgggctgagtctgcctgtgccatccaactggagtctcaagtcctgaggcaggacgtccagatgccccagtgcagggtcctcctgatcaacacctgctcccctgtactcattagcaacctcacccaccctactctcaaagcacacttggctctcgtatccaggagctctgcatctgtagattcagcaacagcagatggaaaatattcagaaaataaattggacggttatgtttctattgaacatgtgca

SEQ ID NO: 251901 - DNA, 382 bp, Homo sapiens
ataattatattgttactatcataacacccacatcagcaaaagaaaatacaaccctagggcctacggggatgccaaattccaggggccagaaagagcttgggataaaaagaaacttcaaggggacggctttgacctgggctgagtctgcctgtgccatccaactggagtctcaagtcctgaggcaggacgtccagatgccccagtgcagggtcctcctgatcaacacctgctcccctgtactcattagcaacctcacccaccctactctcaaagcacacttggctctcgtatccaggagctctgcatctgtagattcagcaacagcagatggaaaatattcagaaaataaattggacggttatgtttctattgaacatgtgca

SEQ ID NO: 251902 - DNA, 367 bp, Homo sapiens
  misc_feature (34)..(34): n is a, c, g, or t
atcaaaccccccatcccccccaccacaaaccacnacttcaagggcctacggggatgccaaattccaggggccagaaagagcttgggataaaaagaaacttcaaggggacggctttgacctgggctgagtctgcctgtgccatccaactggagtctcaagtcctgaggcaggacgtccagatgccccagtgcagggtcctcctgatcaacacctgctcccctgtactcattagcaacctcacccaccctactctcaaagcacacttggctctcgtatccaggagctctgcatctgtagattcagcaacagcagatggaaaatattcagaaaataaattggacggttatgtttctattgaacatgtgca

SEQ ID NO: 251903 - DNA, 373 bp, Homo sapiens
ccaccccccccccactcccctcccaccccaatcccaacacccactcagggcctacggggatgccaaattccaggggccagaaagagcttgggataaaaagaaacttcaaggggacggctttgacctgggctgagtctgcctgtgccatccaactggagtctcaagtcctgaggcaggacgtccagatgccccagtgcagggtcctcctgatcaacacctgctcccctgtactcattagcaacctcacccaccctactctcaaagcacacttggctctcgtatccaggagctctgcatctgtagattcagcaacagcagatggaaaatattcagaaaataaattggacggttatgtttctattgaacatgtgca

SEQ ID NO: 251904 - DNA, 262 bp, Homo sapiens
ttatctaaaacctggttcatctgtccttccacacagggcctacggggatgccaaattccaggggccagaaagagcttgggataaaaagaaacttcaaggggacggctttgacctgggctgagtctgcctgtgccatccaactggagtctcaagtcctgaggcaggacgtccagatgccccagtgcagggtcctcctgatcaacacctgctcccctgtactcattagcaacctcacccaccctactctcaaagcacacttggc

SEQ ID NO: 251905 - DNA, 333 bp, Homo sapiens
ccccaaacactaaggatttagctaaagaaagcacacgcctagctgagcatggtagctcaaacctgtaatcttagtgctttgggaaactgaggcagtagtatcactcgagggcaggagtttgagaccaacctgggcaatatagtgagaccctgtttctacaaaaagaaaaaaaaggctaacatttgccaggcatggtgccatatgcctgtagtactagctactcaggaggttgaagtgggaaaatcctttgagcccaggaattccaggctgcagtgagccaggtttgtatcactgcactccagactgggtgatagagcaagaccctgtcttaaa

SEQ ID NO: 251906 - DNA, 609 bp, Homo sapiens
tctaatcaaatggcaaatgacagcaggctttaatgagactggagtgatttcatgaagacctggagcacattatattataatctactttacaaataaggctggttgattaatttggtgtggtcatagtacttaagataggagcccttagttttggaagcaattggtttcagaaaagccatcgcggtgggtctgcaacagtagaaggtcgaagtgacacccagagatgaaatgttactattgtcaaggtgtattgctgatttgctgtgtgttatacattaagaaatataagctcactgaaccctagctcctcatggacaaacccatcagggacagtcctcaaaagtgtatttctgagttggtacagtattcatattcatttatgatttcatttttgtttcatagaccaccaataaatttgggaaataacgcatctacatatcccttcttggacagtcacaatgtatatggcacattgatgactttgagaagtcctgcactaaaggttattcacctcgtttgaccactaatacttcttattcataaaaaaacttatttgtcaataaagatagtctcagcaaagctgatgtattaaaaaacttctaagcttca

SEQ ID NO: 251907 - DNA, 460 bp, Homo sapiens
tactttttctctccacatttagatttgatctatctactttaattgctaatagtgtcttagtcatagaatagattagttagaaaaaagtgtttttgacattataaatgattctttcaatttgtgtctaaaagtggaaaatactagaaagcttaacatttattattgtattcagaccagtatttcctccagatgacctttattacaacaaagataatttaatgaagatctctctaatggtaaagctgatggctttgtgctattacaatatccttcaaataaagtgacgatctggtggaaagaacaactaaagcaaggattaggaagaaaacagttaataccttcattttggtctcactctgcattaagagttttcattgtgttaaggatttattatacattaagtaatttaatgttcatttaataataaatggatcctattaaatatgatttttaaaattat

SEQ ID NO: 251908 - DNA, 565 bp, Homo sapiens
cacatacacaccacagatatatgtatatagaactgggatcaaactacctatacagttttgtatcctgctttttttacttgaaatccagtgagaatattactttgtcattaaaatttctttgaaaatgtggtttttaaatggctatatagtatccattgcatggacttaccatacattaaatattttttaaaaatccacttgttgcctacatcattttcaacattaagaggggaggaatttcccaacaacacatagtacactttcctcactgtgtcttaaaagctactgagattaatttgacacgtaatacagtaaaggccacatctctgtctgaccagccagctttgggtggttgaagaagtgctggaatgcaccctaacagccaacaaactgcatgggaaactgagggcattgtacacctctctattttgaagtccctatgtgccctgtaatgtctcgttttaagaagacaaaacagttataagtgggttccttaaaagtcatatttttgaagtaccaaattataaatctgaagtagttttatagcatgtaacattttagcaaa

SEQ ID NO: 251909 - DNA, 374 bp, Homo sapiens
gacttaacttgaaataattgaagaaagatttggtttgtgaaagaattggagtaatacagacttctcaatttttaaaaatattatagtacatgctagctgatttctccaggatctttcgggactttgagtcttaattgtacccattttttgcttcaagaaataaatgttttggctgggcacaatggctcatgcctgtaatcccaacacttccggaggccaggatgggaggattacttggagtcagaagttcaggaccagccagagcaacaaagtgagaccctgtctctacacttccggaggccaggatgggaggattacttggagtcagaagttcaggaccagccagagcaacaaagtgagaccctgtctctaca

SEQ ID NO: 251910 - DNA, 327 bp, Homo sapiens
aaaagactttttaattgctaatggagcatatggtgcataatggttaatgatatgcagtttccggagctttctgcctgggttctagtgccagtcccaccactgaacctgctgttgaccttgtgcaagttacttcacccctgggtgagtcagtgtcttcattataggagagaaaaacggaaaaggtcccacctcatagggttatgaggcttaaatgagcttagcatttgcctggcgtgtacaaaacgacgtatgtttttgttaaataaaataagttcttcggttttattctgcaattcacacttaatagtatatcattattaaattaaa

SEQ ID NO: 251911 - DNA, 633 bp, Homo sapiens
  misc_feature (613)..(613): n is a, c, g, or t
attcctaaggagatgtccataagcagcagggcccaaacgtggctgaatatcagggtaacctgcagatcctgtcccaaaccaacacaaacatctggattcaggaggcccacggtggggcccccaaatctgtatttgaaacaaggaaccactctcctggagcacggagtgtcccctgaatgtgttatgaccgagaacttacggtgactatctagactgttagtgttccagaccataagactgctgtgatttatgaagcaattagcatatattctgtctggagcctcccctgggtggctcacacgtcacttgtgtcttcctagtgtttgcaacaactgtgacaatgtcactgagttgagccactgcaggcttaacactctggaagtttaatttgcccaagcttctattttctggctaagaaccagcattttcttagatggttcactttcccttcacctgtatttccctgtctgactagaggctttcagggactctttttcctgaataaatcaagtttctaccatgctttgagtgggtactgtgcatgtgacgtggcgaggacatgggcggctagctgttcccactcacttactcagcaactcaccccacaaccaanctaacaggaccccttttttt

SEQ ID NO: 251912 - DNA, 645 bp, Homo sapiens
tcttaggcgtttcagaccacactgttcgtgatatttcgtgtgttttagctacaaacacttatctaagatgctgtcttcgcagtgccatgcctacaatggcaagcgtgaagctgtctacacttcatcccattgtgaatcatccacattacgaagatgcagacttgaggcctggttgcagtatgcttgaaatctgggatgtggaagacccttccaatgcagctaaccctcccttacgtagcatcctgctcgaagatgccaggctcgaagatgccagtatttcagaatagtgtgtacagagtattgaaggttaactgagaaggaaactacccattacactatggcacaatgccgtgtgtcaaaaacaatcaccctttggcttatttacattaataaaaatcacaagctttaataacagacacttaaaaataagataaaaatggattgaaagtttttctgattactaaaaggtaaattacttttctgttcattgaatgtcagccttattaagcttgtcatataaattattcaatcatgtcatactgcataaacaaatgttcatttcagagttttaaagagaaatgtatataaaagaacaatgaattttaataaatcaagggtacgtaagtcccttttcatccacctagg

SEQ ID NO: 251913 - DNA, 254 bp, Homo sapiens
attggatcagaacatttcccatcagcaagcaattgcattattacaacaaaccactggatctttgagactgattgtggccagggaaccagtccacacaaaaagcagtacttctagcagcctaaatgatacaactctgcctgaaacagtttgttggggccatgttgaagaggttgagctcattaatgatggctctggactaggttttggaatagttggaggaaaaacaagtggcgtggttgtgaggactatagttc

SEQ ID NO: 251914 - DNA, 477 bp, Homo sapiens
ttaattattgaattttttattatggcagcacgattctatatgatagtttacgaatctgtagttttcgtaggctcccctcccctttatcatgtgagctaagatcttcctgttttcctcctttttaaattctggggagagtaggttggtgggagagggtaagaccgtttgcttatggcgccacctgcaggcctctctgaaaatgaatttcaatacctattcaatcttccgcagggttctagattcctcaggcttattttagcaatttagtgaaattaatttttgttttaacagagaaagatgttaacaatttcaacgcaaatcccggagtttgaaaaggattttgatgttctcaaactacacttaaatcctagaaatgagatgcagtattgaccataattgaaatacaggggtttctgcatatcccatctggacataacaaatttgactaagcagtaatttatccttaaaataatggaa

SEQ ID NO: 251915 - DNA, 487 bp, Homo sapiens
gaatctacattcacatttggtttccaaaaaattggctaaatagggggtaactattaggaattctgattatgcttaaaacagttttcggtgcttttctgttggtacaagacaagacaatatttttggaagaagtctcctcatctggttttcatttgaaatatgtcttacagaggcagctcaagaaagcatttgcccatttttggtaaatatgacgtgtttcaaactgtgacagccattatttggtagcaaagaagttagaattaagtgtcatgtcagctgaaatccaacttagtaattaaatggataaaaagacaccaaaacatccacactctcaaacactgctgcatacttctcatgtaaccaaaagcccctattcattgtcttctctcctctttttttatttgtttaaaaagcctcagtaagggcaatttaaaaaaaaattagcactttggagaataaattgtttatcaaatgaaagctggtttta

SEQ ID NO: 251916 - DNA, 426 bp, Homo sapiens
gaaggaagaagaaaacagcttccccgtacagagacagaaggcagggggattcgaacaaagagaaaaactccaagtgtgatagaaaagtggctgcttatatgaggaggctggaggacgtttgtgtctgatttggatagggctcaggggattggtttgaccaagcatgtcattcacgtagcctgagaaaaaactggccctcccaccctagccttttaatatgcaaatgcagggcaccatgatattttacacatgtgtggatatgtgggggtggccgtgttgccaggcacatgtggaggccagggcaagaataagactgcaggaattgccatgtttgggtgggcccagtttctaatggccggtatttgcatatcaaagcttgctggcctagctttcctgctagacaagaaatgtttctggagttgctct

SEQ ID NO: 251917 - DNA, 569 bp, Homo sapiens
cttatatattttcattttctatagtacttttcatccctgtatgtatgtacaggagtcacttcacccaccaccgaattgcagccacttctgaggtggaacgcagcaactgtttaacagcgcactttcccctaggtgctgacagctgcagaagaaattgtacatggtgctgtacagaaggtatttctccactgtgccatctgcagagtgaaactgactaggagtactacatagactgtaagtttcttgtgtacctgccctagactggaaagcccaataagagaaaataacaaataactgggaaacatcatctaaaagtgtattgaggtcagttaaacttagtgctgctctccctggctctaaattttattttaaggtcttctgattggtacaaaattaaataacaaatagatggatgcactcctttttattctaaaagcaaatgaaactaaaatgcttttatcaatattcttcactttgaatggaacttaatcatattgtttttaaatatttttaagtaaccaaatcaatattataagatttcagagccatgttcttaaaatagcaaaaaa

SEQ ID NO: 251918 - DNA, 458 bp, Homo sapiens
actaaaatgttcaacaaaaattttgttacattttcaagagaaatcaatgtctactttagcaaataagatccagggagaagggggcaagggcgtaagtattgagtattgtactcaatttaaatagtgcatgtgcaaaaagcctatcgagattaaggcattttaggccgggcacgatggctcatgcctgtaatcccagcaatttgggagaccgaggtgggcggatcatttgaggtcaggcgttcgagaccagcttggccaacatggtgaaaccccgtctctacaaaaaatataaaaatcagccgggcatggtggcgggcacctgtaatcccagctactcaggaggctgaggcaggagaatcgcttgaatctaggaggcagaggttgcaatgagtcaagatcgcgccactgcacttagcgtgggcgacagagcgagactccgtctcaaaacaaaaaaaaaa

SEQ ID NO: 251919 - DNA, 433 bp, Homo sapiens
ctatatatatgaggatggttttctcttgatgttgcaatctttattttaacatgtttttgtgtttagcttctggagttgcctaacagtataatttcaaatgaggtttagtttcagctgtttaattttaaactgtagggaacatgattaaaaaaaaattaaggcattatcatttgccttagaattttaatggtttgtatagaaagagttttcctgtgacaacctaaaacaaaaatgagcctaacctaattcttgatattatttgttttaccataaaattcttacattagaacatgtaactctgtcagagaatttcaacatagttgcataaattgtgtttcatattacaacttgttctctgcttgacttcattgaaagtaataaaatgactctttcagaaggatctggtgagttaacatcattatttaaaaaaaaa

SEQ ID NO: 251920 - DNA, 458 bp, Homo sapiens
catgaatgtgaccgctgcaggtacagccagactcaagtatgttgcattggtgctgcaatcagtctctaagaaaatggaatgaaaagagcaagaagtcggatcaaaaatacaagccaataacgactttacaagataaaacaagtaattttcaaaattgttggactgaaatgataataatatatacataaacaactctagatatggtctctcttccttttgtccctaaatgctacttttaaattttcttttctgagacccaacctgggcaagacagcaagactccatctctacaaaatgtaaaaatattagctgggcgcagtggcacatacacctgtagtcccagctactagggaggacgaggcgtaaggataccttgacaccaaaagttggaggccaccatgagctatgactggccactgcactccagcctagatgacaaaacaagaccttatctctcc

SEQ ID NO: 251921 - DNA, 281 bp, Homo sapiens
tagtacagatggggttttgtcacgttgttcaggctggtcttgaactcttgacctcaggtgatccacccaccttagcctcccaaagtcccaggaccacagacatgagccactgtgcctggactaaaatttttatgagacaaaatatcaatttcaaaacagcatcaaaaagtgagtaggccaggcacggtgctcatgcctgcaatcccagcactttgggaggccgaggtgtatttttctgtactaaaaatacaaaagtatttgtctctattataaatacaaaa

SEQ ID NO: 251922 - DNA, 562 bp, Homo sapiens
accaagaattggagaggatgtgaatcagccatatcagacagttagttggtgggaatgtacattggtgccgccattttatgagacagtttggcatgatcttaatagttaaccatttgtatgttcatctgccaagcacgtccacctctaggttcaggagaaacttgaaaatatatgctaggagaaatgtacaaaaagttcatagcagcattatttgataaagcagaaacctggaaatgattcagatgcccatggacaagggaatggataaagcacattctcaagtgaatattatatggctacaaaatgattgaacaacatctatattcaaaaattctgctacataaaattgagtgaaataattaagttccaaaaggtcaaatatgcttaatattcaaagagcaacttaaactaagctacatactcttcagaaaaatatctatatctgtgtgcatatctattatttgcatgtgggaggtggaggatgggatggagggaagatcacatagctgtataaaaatgtcagttttctagttcctatattgggttcacagtgtttattatt

SEQ ID NO: 251923 - DNA, 692 bp, Homo sapiens
ctcccacagtttctgtgatctatctaatggtaaatgtgaggtagctctgatgaatacttaacacatatgatttataccctctgattaatcttaatatcttctaattagcaaccctctaattgataccatttctgcctaatctagctagagtatattctgtttactgcagtaacacaatcctataagcaatgtgtagctacagggagttcctatgtatggaaaacacaaatgaaaatattattataagtgcagggattctttataaaaattcaaataaatctacatatcagttttactgaaatgaaaaaatgcacttaaatctgttgctataaattggattacataagaaacatacaggagcattctggtacctccccagccacgtatagtgaccacaaatacccgacaggatcattagaagaaattacttaattcaacaagtaataaataattactgaattgtgtgcatgtatatgtgtggtggtgacgataatggcagaaatggagatacatgcatggcactgtttgtaacgggaaatttggaaataatctaaatatatgttaggcttttgtccaggttctatgatggaataatgatggtgctaacgataatgaaaatagtgctacagctgttaatgtgtttattcagtgattagttatgtgccaggaatcaatgctaagcattttatgtt

SEQ ID NO: 251924 - DNA, 437 bp, Homo sapiens
ttttttaaatgattgcccaacttattttgttatttacttatttatttaggatgtaagcaacaaacatttattttgcgcagttttggaggctgggcaccagcagactggtgtctggtgagagtatcctcctggtttgcagatggccatcttctcaccacatcctcacacagcctccgtgaagcctatttgctccttctggaagcttcccaggggtctgatgagaaaatcactagcatgtgtgctatcgtcatcttctcttcctctacctttttgagcaattcaacaaattccttgaaggattcagtgatgttaatatcatcatcaagtcagagtatctccaatgaaatcaaactgaaatgaccgcagcatctgggaacatttctgacctgcagaagagtaatgctcaccagctcattataaaggatattacaaaggat

SEQ ID NO: 251925 - DNA, 620 bp, Homo sapiens
ccgcctccgcgcctgccaagcctgcaggccagagccgggctcggggtggcatcggtggtccttctccctgttccccttccaggtttgcataggggctggaggacaggtcagccagccttctctgcccgcctccatcctgccctgccgtcttctgactttgaggcctcgtatcccagtccaagaccatttcaaacggtagaactggtgccagacacttggaggaggcagggcaaagactcgccagtccgtataaacccttttggagaagccaagatgggatgagctccgcagcacgttcccgccagactgctgcaggcagagttccgcggaaaactgaaccccgggagtcctcaggggcccatctaccccggtgcaccgccccctcctttcactgcggggactcggagctgtgggactggagcgcgcaccggcagacttgcgcgcaggttggagttggcgcacacccgcgccagccggggagcggcgtttacgcactggtaccgcgagcgctcaaagcatctctcgggaagtgctttaaggctgggaaatttactatacacttatgccggcggagcctgggattttagcgtatataggaaccgcacattgctttgccaggt

SEQ ID NO: 251926 - DNA, 420 bp, Homo sapiens
gtttccaggaccaacagtgtcagcttcccctgggagaagcttgtgaaaaatgcacattctcaggccccaccccatacccagtgaatcaggaactctggaggtgggccccaggatctgagtttcccaagccctccaggtgagcctggttctagatacacagctgtagaggaaccacgatagctcctgcagaaaacagattgggtggggattccactgtggggcgtttctttaatctctttcacattctacactctttagcagagtttctatatgggaatgcattaggaacatgtgaggcagtgatctggctgataaggggcactaggggatttttttttgaagttgctatacagaaaagcacatggttattacttaaatgatatgttgtagatcaataaaaaatgataaaatgttgtaaat

SEQ ID NO: 251927 - DNA, 353 bp, Homo sapiens
gtgtgagctgaggttcactgttttgcattaggacactcaattgttccagcactacatgttcagaaaatattaccccttacctacctgattactttccacgtctgtcaaatgtcaattgacgatacacgtttagatttgtttctgaaaccttttttctgttccattgatttatgtgtctgttcttttgtcaatatcatactgtctttgtttctattactttgtaaattacgaaagcagcttccctgatttccaaatttggccatttttttttccttcaaaattgtttggctattctagttctttgctttttcatataattttaaaattaccttgcttatttctacaaaaaaaaa

SEQ ID NO: 251928 - DNA, 405 bp, Homo sapiens
gacaggttgggaaccagtcccaagtagccgattggggtataaacaggcatgagggattttattggtagaatgaagctgttctaaaattgatttatggtcatggttataccactcagtagagttacaaacaaaccttcatttgtacacttaaactggatgaattgatatgtcaaataggctcaccttaataaagcttttatttttaaaaaaagaaaggataaaatcaaatatattttcaacttaaactagaaaatgagaaaataaacctaaagttaattgaagaatggcaaaaataaagatgagagtacaatcagtgaaataggaaacaaactaatagtgaagcataacaaagccaaaagctttaataaaattgaaaaatgcctagaaagactgataaaagaaaaa

SEQ ID NO: 251929 - DNA, 432 bp, Homo sapiens
tccccctccccctccccagaagtgggggccgagttgcccactccccttcctagcagcgggttatttccagcacggagcagctgcccaagttacctgggagatgggaaaatcgtgtgaaagctggttaaccctttgaggattagagtaatggtggaagcagaaaggagaaggagtttcactccaggatgtacgtaggaccagccctccctgcagtcctgtccttcaagactcaagtcttgtccactccaaatcaccactgggattcctaagtccaggacagagcttcaggcaaggaaaagaagagttgggaaagccagtttccaacatttatcagccacgtgtacctgcaaactatataccttgggtaaatcatcaatctcttgaaatgggaataaaaccatctgccttgtctttcttacagggttttcagaa

SEQ ID NO: 251930 - DNA, 486 bp, Homo sapiens
ctgccccaccccagcccccacctagccattcccgccctgcctgtcacggccctgcgccctcccgcgggaactcagtttaataattaattaagctctcattccacaaggcgccagttatttccagcacggagcagctgcccaagttacctgggagatgggaaaatcgtgtgaaagctggttaaccctttgaggattagagtaatggtggaagcagaaaggagaaggagtttcactccaggatgtacgtaggaccagccctccctgcagtcctgtccttcaagactcaagtcttgtccactccaaatcaccactgggattcctaagtccaggacagagcttcaggcaaggaaaagaagagttgggaaagccagtttccaacatttatcagccacgtgtacctgcaaactatataccttgggtaaatcatcaatctcttgaaatgggaataaaaccatctgccttgtctttcttacagggttttcagaa

SEQ ID NO: 251931 - DNA, 495 bp, Homo sapiens
cagcaggaaagaaagtccaaagctaaacagcaccatacatgtttttgaaacaggtagacagctaatggcccacatagttcatgttaataatcaaatgctggctaccctgtggattgctactgtgtgctaatgaggagaaccttgctttctctcaggcaagcggctatcagggaagcttctaatacttctaaaaactggtggatacacagagagtgaacgcaatggttactacctgtcattagctacagatgcacatgtaagtcatagaaaatctaattggttgactaagaataggatttatttattttatcccaataaatctctttttgcagcaaagttaaaggttaaaagtatttgaagtgttgaaatgcttctcctattcaccaccagtagatatttccagactcattgcttttctcccccaggattattttgttgttgctgttttctccttcctaaaggaagagagcaaatcattttctttggatatcaaac

SEQ ID NO: 251932 - DNA, 337 bp, Homo sapiens
atctgaagaactttttaaggtccaaaaggaattgagaaagacttggaaaacaggacctttgaagaaagcttacaggagacagaattcgagcttagaaaacaatgcatgtgatcgaaaagaaatgtgaatagcaaagatagaataagaggaaattaatataaatggtagaggaggctagttttgaggctaagggtaaactttctgactgaaacttgttaaacccaaaaatgaacagccaggccaggcacggtggctcacgcctataatcccagcactttgggaggctgaggcgggcagatcacttgaggtcaggggttcaagaccagcctggccaaca

SEQ ID NO: 251933 - DNA, 232 bp, Homo sapiens
cattagctgccattactataagttactgtctcatgggatccatacagcaacctaaggaggtaggtcgaggcatacctcaaagacattgcaggttcagttccagaccaacacaagaaagcaagtcacatgaatgtttttggtttcccaatgcatataaaagttatgtttacactatactgtagaccagcaagagtgcaatagcattgtctaataaaacaatatacatacctaa

SEQ ID NO: 251934 - DNA, 479 bp, Homo sapiens
aggaatgctggcagccaccagaagctggaagaggcaagggaatgatagattctccccctatagcccccagaatgggtacagccctgctgacaccctggctttggcctagtgaaactgatttctaacttctggcctccggaactgtgagggaatccactgaagttgtgctgatttgttacagcggccaccggaaatgaatccatgccgagtccaaggacacgtgcccaggagctggatttagtatgtctatgttcttgataggcagagtggctgtgataccagcgatctatggaccacgctgccccaactgctcaggcaggggactcgaagcaaaggactcaaacccttgaacgggggtttgtagtctgggctccatggaatccatagttgaatttcagtgggtaggggctggttcataattttttttaaattgtatgaggaactatgtgtggtgtgcacatatattcatatttttcaag

SEQ ID NO: 251935 - DNA, 276 bp, Homo sapiens
cagagtgaaaaccagaacgcttggcacctatcagttagcacaggatccttccctggaacatcagcatcccttataagtgtgtctaacggccaactcgtagacagagctattgttaatacactgttctgagtatccctttgtgaacaccttcatctggttgatacaggaaaattaaggaagacaaagttttgggaaagtgattgaaatcgtggaataatcaaagcaaatcaatggcagcttgtgtttaaaattaaaaaccaactgtcaagcatggca

SEQ ID NO: 251936 - DNA, 371 bp, Homo sapiens
agagcctctttactaagcagagatgaacacaggggttagagagacatgggtagattttaaggaggaaggaacttggactttttcgtcagtgatctgagattcttccctccacagctgagtgctaatgctgtattgagagttataccattgggcctggactgtagaagcagcagagccaaggttctcaagaaagacagcaaaggtctggcagatgttgtaactatgccttcttcccatgtgcatggcagacattgccaattggtcatggcttggctccccactgagcaggaacttggtctcagaatcctttccaggacagcaccctaggcagctactgttgattatttaaaattgatgcaagacttgaaaaa

SEQ ID NO: 251937 - DNA, 303 bp, Homo sapiens
agtgatctcatcccattgtacataattttttaatagaactaaatgtaggtctttcaaaaatatatatacaaagaaaaaaatctttatttaatatgtgatacattttaggagcgggaaatagattatattcaagttatttgaaatttgaaaacaaagctgttattttatgaattaagtacaagttaatcactaacttgtccatttccatgatacatgcagattcatcagttttctggtcaagacctgagtctcagcctggaggacattatgttaagcaaaataaatcaggtctggaaagataaa

SEQ ID NO: 251938 - DNA, 417 bp, Homo sapiens
cagctttatttttatttctctcactagaacttgaaagctgctatttggcactttatctcagagcaagaagagaaagagcaggctgtctctttgagaagacccttgtccttcgtgctaaagttagcatgtgctgcctcttcctgtctggatataagactaagctttatttcaaaactgaaccctctagcagctgcataccagtttaccttaatatccttagtacttggtgtcttaacatcctcatactaccttgctcctttggcctcaaagtaagcatattggctggcttatatttcttaacaaaattagcagtacacaaattgaagaattttcatctttgattacaaaagtctgcgcatgtgcttgtactctgagatggtaatagattcttctgataaagttattgctgcctttcca

SEQ ID NO: 251939 - DNA, 798 bp, Homo sapiens
tgtattttgggattccgtatatttcattaaaaaatattttgttgctcttttaaccatttgatttaaaaagtgatttacataggcaaattgaatttattgtacaaccatgtggattggtgttactatagatttgtgtgactcagtctttattgggctctcacagcccctccatcagtttgatcttggtcattaccctttttattttcctcgtcagctattccaaattcttggcagtctcaagacctttacctcacatttctgtgttatctagggataggctaactgcatttaaaacagtaacattatttcagtggctcaacgtaataagagtttatttctcattcacattacagttcattgagaagggagtctctgctccacacagtcattcagggaaccagactccttccttcttgtggtttcacctccttcaggctctggaatcctctaggtgaagttgagggcagggtggtgagtgtgagcaaagtgagggtgtgcctgcgcaacacttgtgcctgcatcctgtcagcaagcatgagtcacgtggcctcatagatcataggacaattgacattaagagcatagtgcatgtttaaaaaacagctgtataggacgtgactttagaagtattttgctgacatttaaaaggctgggtgtggtggctcatgcctgtaatcccagcactttgggaggccaaggcaggtggatcacctgggctcaggagtttgggcaacatggcaaaaccctgtctctactaaaaatacaaaaaattaaataggcatggtggcgcatacctgt

SEQ ID NO: 251940 - DNA, 505 bp, Homo sapiens
ttttcaagtgtatacagtacagtcatcaagataaactatgtttggctatttaaaaaacctcagtcaattgaaaaggatccaaatcaaagtacattgtaaagagttacagaacattactgagggattttaaaagagatttaaataaatggagagacatgccatgttcatggaattgaagactcggtattgttaagctgcaaccctccctacattggcatctaaatgtatatcaaagattgcacctatcaaaattctagcaggattacgtagaatttgacaagctgatcctaaaattactatagaacatagaaggacccagcatagccaagacaatttggaaaaagaaaaagttggaggactcacacttcccaatttcaaaatttactacaaagctacagctatcaagactgtgctgctagcataaacagagatgaatagatgagagaataaaatttagactccagaaataaactcttatgtttatggttatttaaatttcaataaa

SEQ ID NO: 251941 - DNA, 422 bp, Homo sapiens
tatgtctgcagcttaatttttcaggctgctcttttttaggaaataaatgatttggaggctgctttttattaaaagggaaaccttaccaatgaatctcttaccatcactaactacctaaataatttctttttagctcccatatcataaccatgtattctttttgttcagcttttttcattcagcataatggttatgaaaggcatccaggttgttccccatatcagtaatttgttcttttttattccagagtagcatcttgtatgagaatacttcaaatttttatccatccttttgctgatggacttttggattgtttctagttttagactactacaaaaaaaggtgctacacacattcttgtccacatctttttgttgccatttattttcatttctattggataaaaatctaaaagtggagtt

SEQ ID NO: 251942 - DNA, 761 bp, Homo sapiens
ggaatttgaaattatagtgttacatgtatacctatcaaattaaaattaaggaaatacaatagcaatatatagaatgaatgtagtaacagaaattaactctttactgcatcattgaacttattgttagttacaggtttaaaagaagttcatttaacatccagtgtgtctaattcttctggaagtggtgtagtaccattgttcttctggcatttttaaatattaaacctttttggatagatggaagccttatacaaaatctactttattttagcaaggattctctgtccttttgtatagttggtaccttactaatttaaactctaatatcaatctaaagagaaatttattatgcaatttgtatttaggtttttttttttttttaagttttagttcaaaataacattaattttgagagattgaggtaaagaaccttaactaatgctaaggagtttattttgattaacataggttattctgaccaccacctcttccttccttaatctccttagaatctgacagtctcaaagctgtcacacaaattagactaattttgacactttgaaatgaaaacttcaaggaagaagtagccacggacagttatgtttataatcagtaggtggcactctttcctcaggtagccccccattttcacatgatgtgtttgaaggttaaatgccaccaaaagtgctgagtcagctataaaactaagtccctgaattccatggcccttttaaatatgtaatcattcaagattgaaaaaa

SEQ ID NO: 251943 - DNA, 400 bp, Homo sapiens
tgaggagcagtatatagtattcctacagtgtgaatgtatcaccccatagattatgagttacaaattgataattatagattattactttattgtagagggaaaaacatgcatttataatgcagagagaatttggcatcaatagtagtgggatggcatgaaaattatatgtctcttacggaaggtagtgggtggtatacaatgccaacaaagttgtattcttgccaaaaatgtttaacctgaacctactcttgagaaaatgaatgaatcctgaaatgtgggatgttctgcaggacatctggcttggatcatcaaagtcatgaagaatagggagaggtaaagggactctcctacattgagagataatgaaaatcaaacataagaactttggttcttggagtga

SEQ ID NO: 251944 - DNA, 1130 bp, Homo sapiens
aggctgctctcacactcctggaatccagagatcctcctgcctcggccttccaaagtgctggaactacaggcatgagccaccacacctggccctttcctactttccatgtttaaatattcaagaatcaattgctttttttcatggcagcctgtatgtgttcagtaggcataataccttaacaaatttgaagatactaatacttactttaaagctttcttttgtcttacattagctccactgcttcagtgcctagttctgtatttgtttggtctgaagcttctcttagatgctaccgatttcccacaagtgtttagtgatttttgttgtgtgttcacattataaatgtgctagtagtatctcagtccatatgaaaatcactgtactccttctgtgaattcacatttgtaactagccctataattcaattttacacttatacccagtgcttgtgtagcatgacaataacaatgtaagttctttgacttgcagtcccgtgattcttcaatccactttcagtcatatccttttggtatttcatttcctctaaaaaaccactaacttgagtaatacagttcttaagtaaatgttatgctaaacttcagagtcagatcctcaccagctctaacagacttgtctaacagttaaacaaacaatgacagtccgacagaagacagtcataaatgtgcaattcaaagggtaaataataacatggtaatgaatgaatcacttacgtcttgaactcataatagttatgcttttttaaaaccaaccttgaatgttatattagttaaaataacaaattctattacattaaaaaaaagatgactccatgttggttaaattttctgcctttggttggtaatggtatggttggtaatgactccatgttggtaattttctgcttatgccatgactcagtcattctatagctgacagaaatgcatacagatgctcaccaagacatttaatttacaagaatgtccacagtactcttttttttttcttttctttttgagaccgagtcaggctctgtcgtccaggctggagtgcagtggcacgatctcggctcactgcaacctccacctcccgcctcagcctcccaagtagctgggcttacaggcgcccgccac

SEQ ID NO: 251945 - DNA, 606 bp, Homo sapiens
gagcccagacccggcctctccacaggtacagcagcccagcgagcacggaggaagatttccaagccgacagatgcgcgaactgaaaaaggaggtcacgacgctgagagaatagatttaaccctctgctcgctgggaacccagaagactaagggggaacatgtttttcaatgatgcaggcgtcggtggcgggaaggcctgcgaagtcttgccagggctccctgcagtcctcagattccgcctgacttctgcagacagcccagctccctcgccaggaagaaatcgctccgcggctgcacgcaacaccttcaccgtctgaaacctgcgattctccgcatttggtttcctcccgaggctcctgcacaccgcaccgtgattgacgcacccgaggggaccgtcaaaaatacatctcaagcctaactttccaacactcccgcgacgcaaccccttcccctttcctcagcggctctggcccgcccctcgctcctcgggccgcgtcccggctggcgactcggcgtgcacacgaggctcctccgcgggagagcccgcgccccggcccggggcctgtcgggggttgcagacaaagaggctgcagcgccgccgcggccg

SEQ ID NO: 251946 - DNA, 418 bp, Homo sapiens
aatcagatacggaagacctcttatgctcagcaccaacaggtccgccaaatccggaagaataggatggaagagtggggtgcctgctacaatgctgaaaatataccagagggctacaataaaggaacagaagaaacaaagtctccagaaaatccatcaaagatgcccttcccctataaggtgctcaaagccctggatccagaaatctatcgtaatgtagaatttgatgtttggttggacagcagaaaagaacttcaaaaatctgattacatggagtatgctgggagacagtactatttgggagacaagtgtcaggtttgcttggaatcagaaggaagatattataatgctcatatccaggaagttggaaatgagaacaattcagtaacagctaccttccggtaccgagctcgattcgatt

SEQ ID NO: 251947 - DNA, 653 bp, Homo sapiens
ccattttttcttcagctgtattgtacgaaattctctataaagatgtgtttgttgtggatgaagaagagttgaagactgcgattaaattgtttcgaagtggttctaagaagaacagaaataatgctgtaactggaagcgaggatgcccatactgattacaagagttcaaatcagaataggatggaagagtggggtgcctgctacaatgctgaaaatataccagagggctacaataaaggaacagaagaaacaaagtctccagaaaatccatcaaagatgcccttcccctataaggtgctcaaagccctggatccagaaatctatcgtaatgtagaatttgatgtttggttggacagcagaaaagaacttcaaaaatctgattacatggagtatgctgggagacagtactatttgggagacaagtgtcaggtttgcttggaatcagaaggaagatattataatgctcatatccaggaagttggaaatgagaacaattcagtaacagtcttcattgaagaattggcggaaaagcatgttgttccactggctattcacagattctactctgctactcagtagtggtcactatgattctgtgtactcaaacaatttcagtcagtgcagctgtttgtcagctgtatgtacgaatctcat

SEQ ID NO: 251948 - DNA, 645 bp, Homo sapiens
ccattttttcttcagctgtattgtacgaaattctctataaagatgtgtttgttgtggatgaagaagagttgaagactgcgattaaattgtttcgaagtggttctaagaagaacagaaataatgctgtaactggaagcgaggatgcccatactgattacaagagttcaaatcagaataggatggaagagtggggtgcctgctacaatgctgaaaatataccagagggctacaataaaggaacagaagaaacaaagtctccagaaaatccatcaaagatgcccttcccctataaggtgctcaaagccctggatccagaaatctatcgtaatgtagaatttgatgtttggttggacagcagaaaagaacttcaaaaatctgattacatggagtatgctgggagacagtactatttgggagacaagtgtcaggtttgcttggaatcagaaggaagatattataatgctcatatccaggaagttggaaatgagaacaattcagtaacagtcttcattgaagaattggcggaaaagtaggaatatgataatttgttgaattactgaaatctttggttcctggttccatttcgtaatattaaattgagaattaccaggatgctagtaagagaaccagaattgtatctactgt

SEQ ID NO: 251949 - DNA, 588 bp, Homo sapiens
ccattttttcttcagctgtattgtacgaaattctctataaagatgtgtttgttgtggatgaagaagagttgaagactgcgattaaattgtttcgaagtggttctaagaagaacagaaataatgctgtaactggaagcgaggatgcccatactgattacaagagttcaaatcagaataggatggaagagtggggtgcctgctacaatgctgaaaatataccagagggctacaataaaggaacagaagaaacaaagtctccagaaaatccatcaaagatgcccttcccctataaggtgctcaaagccctggatccagaaatctatcgtaatgtagaatttgatgtttggttggacagcagaaaaggtttgcttggaatcagaaggaagatattataatgctcatatccaggaagttggaaatgagaacaattcagtaacagtcttcattgaagaattggcggaaaagcatgttgttccactggctattcacagattctactctgctactcagtagtggtcactatgattctgtgtactcaaacaatttcagtcagtgcagctgtttgtcagctgtatgtacgaatctcat

SEQ ID NO: 251950 - DNA, 501 bp, Homo sapiens
ccaccttggcctcccaatgttgggattacaggcatgagccaccacacccagccgaaaaaaaaaatgtttctttaatgtctgtgttaaattttaattacaaatttagtgattagatgtaaggttctttcagtatgtgctgtctccattgatccagactggcagtgttgatacgaattactttaaaaagtagacactgaactccatttggggaaaagtggtattttgtttggcattagctgtatctgtcactagtcttgagactagaagtattctcttttcaggtttgcttggaatcagaaggaagatattataatgctcatatccaggaagttggaaatgagaacaattcagtaacagtcttcattgaagaattggcggaaaagtaggaatatgataatttgttgaattactgaaatctttggttcctggttccatttcgtaatattaaattgagaattaccaggatgctagtaagagaaccagaattgtatctactgttgg

SEQ ID NO: 251951 - DNA, 534 bp, Homo sapiens
caagaaaatctacaagcaaactgaaatatgtaataaaagagttcactactgaaatggtagataaaaaactaacaatgatggttactagtcagggcagtcattggggaacagggtgtatagggagacgggtggaagcaaaactcattgtatgctttattatatccttttgacttttgaataatataaatttagtcaatgaagattaacgcaaagaagtggatggacaaagttgctggataaaaatcaatataaaaatcaatgtcatcaaaatcaggaacaatcaatttgaaagtctgatttttaaaatcccattcaagacctgtgtggggaaaatcataaaactttattgtaaaagaaaatctaatagaaagatataccatgtccatgggcaggaagttctgatgacataaagatgaaagttttccctaagttaatatctaagtttaaggcaattccaataaaaataataacataatattttcaaggaacttgatgagataaatcctaaaattcacttggttgaataaagaccaa

SEQ ID NO: 251952 - DNA, 461 bp, Homo sapiens
ttcaatgtcgcagaggggaacgaggtgcttctacttgtccacaatctgccccagcatctttttggctacagctggtataaaggtgaaagagtggatggcaaccgtcaaattataggatatgtaataggaactcaacatgctccaccaccacgcccagctaatttttttggtttattagtagagtcagggtttcaccatgttggccaggctagtctctaactccttacttatggtgatctgcccaccctggcctcccaaagtgctgagattatagacgtgagccactgtgcctggccagcctgctaaattttttaaacatttttttatctcagtgttacgaacctagtttcttttttaatagatagattatagcaacatgctgtggagaatcctcaaagattgcctgtcttggataaaaagggtcacctaaactcaggggcaaagtttgacagagcaatcta

SEQ ID NO: 251953 - DNA, 429 bp, Homo sapiens
gcctaccatcaaaatgctcatgtgttaggctttatatctggattaaagtcaagtcagcaagaactggtctcagaggaattcattcctccagagcagaggcaatgtgtgagatttaagaactcaggccttagcatctggcagatctttaaatttgaatcttagctcgctacttgacatagagcaagaaacatgagtctcaaatataaatcagggaacagcaggaccagagctgatgcacaggaagcacctcgcattgtagaaggcactcaatagctgcttggtatagagtaaatacatgcttggttttcagtaaataaatacttgatattgaaacgattatttcagtcattgatccatgcacaagaaaattgtgcatcataaacattttactcttgagcaaacatcaattattaaaaacatatgttcaaa

SEQ ID NO: 251954 - DNA, 1273 bp, Homo sapiens
aatgcctctctgcctgctcactgcagccgccagaaattcatgggcttcaaaattgccttggatgatgaaggaactgctgggggctggctcttctgggatgatgggcaaagcattgatacctatgggaaaggactctattacttggccagcttttctgccagccagaatacgatgcaaagccatataattttcaacaattacatcactggtacaaatcctttgaaactgggctacattgaaatctggggagtgggcagtgtccccgttaccagtgtcagcatctctgtgagtggcatggtcataacaccctccttcaacaatgaccccacgacacaggtattaagcatcgatgtgactgacagaaacatcagcctacataattttacttcattgacgtggataagcactctgtgaatttttacagcaagattctaactaactatgaatgactttgaaactacttatacttcatactcataaaaattattgtgtgttgctaatttgttcatacccactattggtgaaatatttctgttaattttgttatatgttttttgtgtgaaccctaaaggttaaaccttagccctgtgggataggcagttagggaggtgtggaaaatctatgcattaccttaatgtctctgtgtggttagtatggtagtgactgttcatcatatgacatttactgaagatgaactgggtccatgatgaagtgtgtgtatgtccacgtttgtaatcatagaatggaccccattcttttgttaaatacacaagagaaagctttctgtgacagttccaggtcttgaagctaatcagcatctcaagaaagtatccagaaagaacatctgctagttggttataggcggtgggaggaataatatacctaattggttataggtggggggagcatgataagcaaagaaaaggcaaacacaaggaaagatcagatgaaacagaagatgatagtaaaagtgatcctaagtaagaacataatgtaaaattgtcagcagcctcatggggaggaaaaaggaagagtcaactcacttgaagaagagggtcttgagaaatccttagcataaagggctactggtgagattgagatctgagcaggcaaagctcaaaagagagtttggaggttaaaaataatttatttttgcagtagtgtgctttgaaatgtgtaaatcttatttctaatgtatacaaccacatttcacataaaaatatgcaatttatatgccagataaaaataaaacaagtgaatttgcaagtgattt

SEQ ID NO: 251955 - DNA, 1152 bp, Homo sapiens
cactacagaagtaagacacaccccccgcaaaaaaagaatacctcaatacgatgcaaagccatataattttcaacaattacatcactggtacaaatcctttgaaactgggctacattgaaatctggggagtgggcagtgtccccgttaccagtgtcagcatctctgtgagtggcatggtcataacaccctccttcaacaatgaccccacgacacaggtattaagcatcgatgtgactgacagaaacatcagcctacataattttacttcattgacgtggataagcactctgtgaatttttacagcaagattctaactaactatgaatgactttgaaactacttatacttcatactcataaaaattattgtgtgttgctaatttgttcatacccactattggtgaaatatttctgttaattttgttatatgttttttgtgtgaaccctaaaggttaaaccttagccctgtgggataggcagttagggaggtgtggaaaatctatgcattaccttaatgtctctgtgtggttagtatggtagtgactgttcatcatatgacatttactgaagatgaactgggtccatgatgaagtgtgtgtatgtccacgtttgtaatcatagaatggaccccattcttttgttaaatacacaagagaaagctttctgtgacagttccaggtcttgaagctaatcagcatctcaagaaagtatccagaaagaacatctgctagttggttataggcggtgggaggaataatatacctaattggttataggtggggggagcatgataagcaaagaaaaggcaaacacaaggaaagatcagatgaaacagaagatgatagtaaaagtgatcctaagtaagaacataatgtaaaattgtcagcagcctcatggggaggaaaaaggaagagtcaactcacttgaagaagagggtcttgagaaatccttagcataaagggctactggtgagattgagatctgagcaggcaaagctcaaaagagagtttggaggttaaaaataatttatttttgcagtagtgtgctttgaaatgtgtaaatcttatttctaatgtatacaaccacatttcacataaaaatatgcaatttatatgccagataaaaataaaacaagtgaatttgcaagtgattt

SEQ ID NO: 251956 - DNA, 531 bp, Homo sapiens
gactagaacttagaatattgaactgacagtgcttttaacatttttcttctggtattctctggtctggactcaaattagtgcaaaacccagaagtggacttgggtgtggacagagagaattcaagatctttctatttctggcttgagtaggaggagtctcacatgtttctcactctgttatcttgccccctctcccccaggtaatcccatggtgagaacagcaggggcatatgggcacctaaaactctgaggagtggggtggaaactcactcacagaagtctggtttttccttctctgtttttctgcttggccccagttgtggctagctatagtcatggaaattaagtggctgaacaagttaagtaatgctccagctctctggctgaaggactaagaagggggagcctcagctgggtgtggtggctcaagcctgtaatcccagcactttgggaggctgaggcaggtggataacttgaggtcagcagtttgagaccagcctggccaaccggacaaaatcccatctctactaaa

SEQ ID NO: 251957 - DNA, 325 bp, Homo sapiens
cagatttatatatatgagctaagagcaggaatgctaaaataatttctttctcaggccttaaagataaatgataggtcaagatgctttacttcatagccaaacatactaaggcacagagcaacatggcaggaatttgagttgtgagcgccagaagtgcttgttcagcactaacaagaaataggagaataggatcagtataatctcatattcttattaaattaaaaaaagacagagagtaatgccaaggttatgacatgaactgacaagaccaaaaaaaaaatcagtttttctgatgcttcagcctttgcaagcataggaaagaatt

SEQ ID NO: 251958 - DNA, 611 bp, Homo sapiens
attttttaatgcaataatttaaaaaagcaaaatcaatgccaaaaacattaggaatgcaataccgaaatttaaaagtaaagtgctagtaagatgaatttaattaaaaattatttaagatcatcagttggtcaagagatatgaaatatgacagtccactcagttgaaaatgagataagccaagaagtcgattttgaaaatgctattgatgaattggcttctgtggaaactagaaaaggaaaattacattaaatcctgattttggtgtaaatagaatctttaaacttaaaataacattgtgagttttaatatacttattttttaaatttttcaatattttttcaactactttaatgttctggaaaaatactgaccatttaaatgatacatataaagatgtatataggggagcgtgtttttctttcttgcctcagtctcccatggttctgtacagcactgaggctaagacctgaatgacaagaaggcagccacatggtcattgtttggaagagcctcctagacgcggggagcatgctgtgatggcattgggaaaaatatgtgtgaaagaagattagagacatacaggggccagatcctggagatgcttatagacc

SEQ ID NO: 251959 - DNA, 557 bp, Homo sapiens
attttttaatgcaataatttaaaaaagcaaaatcaatgccaaaaacattaggaatgcaataccgaaatttaaaagtaaagtgctagtaagatgaatttaattaaaaattatttaagatcatcagttggtcaagagatatgaaatatgacagtccactcagttgaaaatgagataagccaagaagtcgattttgaaaatgctattgatgaattggcttctgtggaaactagaaaaggaaaattacattaaatcctgattttggtgtaaatagaatctttaaacttaaaataacattgtgagttttaatatacttattttttaaatttttcaatattttttcaactactttaatgttgtgtttttctttcttgcctcagtctcccatggttctgtacagcactgaggctaagacctgaatgacaagaaggcagccacatggtcattgtttggaagagcctcctagacgcggggagcatgctgtgatggcattgggaaaaatatgtgtgaaagaagattagagacatacaggggccagatcctggagatgcttatagacc

SEQ ID NO: 251960 - DNA, 804 bp, Homo sapiens
  misc_feature (190)..(190): n is a, c, g, or t
  misc_feature (274)..(274): n is a, c, g, or t
  misc_feature (305)..(305): n is a, c, g, or t
ggtgcggtggttcacgcctgtaatcccagcactttgggaggccgagacagatcatgaggtcaggagttcaagaccagcctggccaacatggtgaaaccctgtctctactaaaaaataaaaaaattagccgggcgcggtggcgggcacctgtaatcccagctactcaggaggctgaggcagaagaattgcnttgaacccgggaggtggaggttgcagtgagcccggatagcaccactgcactccagcctgggtgacagagcaagactccatctcnaaaagaaaaaaaaaggatgaacaagcacagncccttgtccttccagagctccctgtccagtgggggaggcagattctcacacacacatgtgcagcacacacaagtcacgagacagaggaaagggcgccatacaagaggccataacagttctgaagacatgtggcagagtcagacgccctcctcacagggatgcccactcccgcagacccagcaagacacctaatactcacatcccccacctcctcccttccccaggctcagggactccaagcagaggtccgaggcccctagggtgggcacaaatcgcattgcaccccaacaaagtttctctgctcctaagtgctgctaactctaagctaacagagaaatgggccgctctaggtcagcgggctcctccctcatcacggcctctggatggggatgcaggagtgtcctatggctgcccagcgaaagccccagtggcagagcaggaaggctgccagagaaggcactctgccttgaataacctgggggcctgggtgtccaccagg

SEQ ID NO: 251961 - DNA, 397 bp, Homo sapiens
aggtaagcaaaggactaagccatttgggtatctcagggaagtgagtttcaaaacagagcaaatatatcacttgaataagtgcttaaggattaattagttaattttgttgtaagtgtaaagacaataaaaagaccttgcagaaacgtttgtttttaacttattaccctattaacctaaagcaatacagaaaacttttcctaccaatgtttttctacatttattcatgtatgtgtgcacacataagttattgtgtgcctaaaattctttttttatacttaagcatttctccatgttgtttcatcataatttcataatagttttataataattttaacattatcaattattccattagggatttatgtaaataaacaaaaaataaaatgctatatgccta

SEQ ID NO: 251962 - DNA, 475 bp, Homo sapiens
agtagaagtcggaaaagaaaacctctttcaaggtcaggaaccttgaaagcctcctatattaaaatattaattttgtaaggaaaagcacgttttccatttatataattggtaacttaagggtggaaataaaaaatggctaacacatatacatacacaaaagaagaggaattgagaataatgcatgcaagggaatatactgaatggtttcttggaattgaatatggaattgaatatgtgatgaatgcgcacatgttgttttggaaaagttaattcctagaattgatatccttaatttgagataattctaaaggacctagaaccattgtaagatccaggatagtacttttccacaaagtaaatgctcaatgaaaccttttaaaaagttgaactattaaatttttaaatattttagtagatgatatgtattctaataatacatatgggattgattgagcagagttaatattttaaaaat

SEQ ID NO: 251963 - DNA, 467 bp, Homo sapiens
ggctaaggctgagctgactccttctgggggccagagaaggtctccccacaggagccagctgtccttggggtcaaacccagcctcttgactcctggacttctgtctatccaaggctacagtcctgctgtgggtggccagggcacccacatgcctgtactggggaggagacaggcttcagacccaagggtggccatggaacagaaagtgaaccccagtgaagtcttcagagacaatcagcatccatcctgggggaaaggggactccatgaaccaccactgcccacccccacacagaggaaatgccgaggaatccatgtcacttccacatgctggcagaaaggggcatctccacgcccagagcacacacccagcccgttcttcccagggcccaagctattcgcagctgcaggggaggggtcctgtgggcttcatttccatctcgccctgtctcacttggggacttagaat

SEQ ID NO: 251964 - DNA, 775 bp, Homo sapiens
acctcattgaaatgctacttccctgataccttctcgtacttccattcttaaacctttgttgctgttaagtgttgagatgaaacatgtttgctttgtattctagaagtttatgtgattgaccatacctgagcgcagagattaactggggtttgttccagaaacagcattaatcacagtgcccggcacatagaagggtccagaacttggagcaagtaattgaactcaggcagttcccacgcaggccacagagttggacaaaaacagcttgaccctggggcttgcactcaaaatgagccttacccctttaagagagggcaggtcttttccctctccggctcaccccacccctcctacacagtaactgaaacctgatctaatccctttgcacgcgggtaatttattggtctgttgagcttttcttggtggcaaattgcattgtctttattcctgggttcaggctctgcagcagctcactgcattcctaggactcctttctcagggtcgatccttcacaccccctcgtgcactgcaaaataagtcttattgggcttctttgttatgcaaacagggcggtaataatcaggctattattctgaaagattgggcttgattaacagttcaaaggaggtctctgaaagcagctagtgcttcattggtgcataaatattttcatcctgccagcgttggtgcagctggtgctccaagcgccctcccctatctttctgattctcagaggtgctaggttgctattaaaaggaaaagaactaagtcagac

SEQ ID NO: 251965 - DNA, 601 bp, Homo sapiens
tatatacgttggtgggaatgtaaattagttcagccactgtggaaagtagtttggagatttctcaaagaacttaaaacagaactactattcaacccagcaatcctattactgagtatatatccccccaaacccaaatctgtcaaaaaggaacatgcacttacatgttcactgcagtgctattcagaaaagcaaagacgtggaatcagccttggtacccattgacggtggattggataaagaaaatacacgtataccacagaatattatgcagctataaaaaataatgaaatcatgtcctttgcagcaacatggatgcagctggaggcccttatctgaagcaaattaatgcaggagcagaaaaccaaataccacatgttctcacttccagtaggagttaaacactagatacttgtggacataaagatggcaacagtagaaactggggactactagataggggagagatagaaaggggtaaaggttgaaaaactgacttttgggtgacaggatcattcataccccaaacctcagcaacaagcaatataccccaggcaacaaacacacacatgtacccccacaagctaaaatgaaagttgggaaa

SEQ ID NO: 251966 - DNA, 395 bp, Homo sapiens
cccgtatcctcccacgtgctttcatgaacagcagggctgaggtcccaacccggggaatctttacccgcaagtccacagccctaaccatcgggcacactgccgtctcatcctctggagaacaggccacttctccccaccaggccctctggaacatcgtttcccagcacgtgtcccacagagcagcaatcccaggaggcgtgtggagcaaacaagaattcttagacaaataaatgtgggaacagcaccacataccacagctccatagagaatccaggaacactagcatagcaggagccctcttgaccctgcttccccaggcccatctgaccacacaaaccctttgtttccacgtaagatctcactcattgtgcaaaacacaacttgcaaacacacca

SEQ ID NO: 251967 - DNA, 183 bp, Homo sapiens
cattccatagtgattctatggaaattcattgtactttacctacttttttattgatagatatttgaggttgttgacaatttcttttttcttttttttttgctataacaacaaatgcttcaatgaacttttttgtatactcttgtaagttttttgtgagataaatttctagaagtgtaattcctg

SEQ ID NO: 251968 - DNA, 419 bp, Homo sapiens
ccagttgtactttgataagtttgaaagaagcgcttgttataaattaaaggacattcttaggggtcaagtaaaagctgttttttcttatcctgggaaattaaaaatatttctctatatatttgaataccattaagtgagtcttggcttactcttcaacaaaacagtttgaacatttaacattggaatgtcatgacttaagccaatatgagaattgttatttatttcttgcgagatttgtttttaacagacccttgggattacctgaacgtttattgcattaattcccttacgtgcagatttaagtaaaaattattttgccttcattatgctgtattattctcaaagtctttctgtcgtcgtttttgtcagctctacacacagcaaaagtctttaattgttaataaatacaataaattatt

SEQ ID NO: 251969 - DNA, 747 bp, Homo sapiens
agtgtgagtgtgagagcgagaacagccccgcaggtcccgaggcgctggctggggacaatgccgcggaaagttcccagtccccagccgcagatctgcagaattgaaatgaaatgttttgagctcttcaagctgactcgtcagaatcctggagccttttaaaaaatgacgaaatggaaggaaaaattactttatcaataaccaggctccaccaggattgacctagatggttgttcctggcacttgtcattctcagcaagcacagctcagagaacaaatacaaaagacccaaagtgcattgcatcttttatggaagtgcccaatgtggaaatcatagatttcaaggaaggaacaagaaaattgatgaaacaagttcaaaagaaagaagcttggccaatttgatgtcaatggaaatgcgtgagatttttattcagcattcacacctgagcaatgcttttggtcatgatgtcatactaagaagaaaccacctgagatgagactgttagatgttcagagcaaacaaaaacaaaaacagaccaacaaaaaaaacccaaaacaaaacagaagtttctgaaggacagcagaaatggctttgcaggaccacaacaaccactcccagtcatgatggagagaagtgttcaatacccacagatcctgaacgttgagctgattatactaactagatgggacttagttttgtctaccgtggggtgagcgtatactacctgagggaacaggtacacatgaata

SEQ ID NO: 251970 - DNA, 1088 bp, Homo sapiens
agtgtgagtgtgagagcgagaacagccccgcaggtcccgaggcgctggctggggacaatgccgcggaaagttcccagtccccagccgcagatctgcagaattgaaatgaaatgttttgagctcttcaagctgactcgtcagaatcctggagccttttaaaaaatgacgaaatggaaggaaaaattactttatcaataaccaggctccaccaggattgacctagatggttgttcctggcacttgtcattctcagcaagcacagctcagagaacaaatacaaaagacccaaagtgcattgcatcttttatgggtaagcatgaaataggtttatttgtggtagtgtaatctaacttaagaggtggaaagacaaggctttggaaccaatgccacaaacattgtgttagtttttgttcatctatagtaaaaagtgaatgctgactggaatttctgggaaagatttatagcatatgcaattttaagtattcaggtaactctttagttactgtgttttaatccttcaagcccatcagagaacaaaccaatccttgttcttgggattgaaaatactagatatcccatcaagcaccattatcttgatattgaaagtagaaatgtgcttctccattttgtttaacctagttaatattggggtggcttcacatttcagtgccttttcagttatcaagcagggacaacattttgttaaactctaaacagtgaattaaaagcactgaatgagctgaagcagccctctaatgcaaaatgacaaattgcacttaagcaatacatgaattatacatcctaatgctcacaatatcattttctaataatactgtttcagttcagatactatactctgctcctttctgtaagagaaattgatcaataagaggtccaggaatgtttttaaattgggcactggtttgtgatactgattccaaagtgtgtctcgcgtccgctatcactatctatagttaattcatcctccataatctcgtttctttaataaactatctgtctcctatccacaatcatctattccactcttcctcttcgactctatcacacatatcctcttatacctctcg

SEQ ID NO: 251971 - DNA, 747 bp, Homo sapiens
actccaggcgggccggggcgcgtcaatatggcggcgcagggctccccctcgagctctccgtcagacgactctaccacctcggggtctctgccagaactgccgccgacctccaccgcgacttcgaggtcgcccccagagtcgaaggggagctcccggagctcgctgcttcagtggacctgccccgaggactcattgcccctagccgtgttttatgggccgctggacgcgaaaaacccgctcctggcctcttgtgagaaggagatccaggagttgttaggctttatgaggaaaaagaaggctttagccaccacggaggaagagaagcacgaattccgccggcgttgtgccacttctttgtttaatatctggactaaatacgcccccaggctgccagcagactattacaacgaaaagcttctgaaggttggagatagcctttgtcaaatgaaagaatacaaactggcccttttacaatgctatggaagatatcttcagcagttcaataccaattttgatgagaataaagtggatgtaactcaattcaaagctacctttttcccaaaaggctttaaagataaaactgctggacttacatttcatgctttgagtggcaaaaatatgtgcaactaccagctggtctgcgacagtgatgaaaacctgaagaataaagaatctgtggtccagtgtctgcatatcttgtcctccttaaggctcatcatgcaagtggctctgccacaagagcatctt

SEQ ID NO: 251972 - DNA, 380 bp, Homo sapiens
tccagtcagaatcccaattcttttctctttatgcctggcatgtagtaggcactccataaatatctgctaagtgattagatgagtgatttgccaaaaattttttaaaagatttgtcatgaaggatgattatttctttaacattataatttattgcaaagctacaataattaacacagtatgatgctggtgcaagaatagacaagccactcaatacaacagaataaagtccagaaataaactcaagtatatataaaatgtatacgatgaaagtagcatttcaaatctgtagagacatgatgaatttttttaaagataacgttaggacaattggacaaacttttggaaaaagtaaatgtatgcctctgtttttagttctaaat

SEQ ID NO: 251973 - DNA, 493 bp, Homo sapiens
ctgtcaagaaaaaacaaaaattaaaacaaacaataactacaacaacaacaacaaaaaaaaacggcaaagttagaacacacacaagatagtatagttccttacccatccaccacttggttttgaggagaaaagggaagtaagaagagttgaagagaagaaaaacagaacagaagagtgggaaaggaagatgaaagggtgctatggagtactatgcacctgtttagaagtggggaagtagcacaaacactagcaaaagaagaaccaccatggagttcctccttgcacatctctctcccctcctgaaggcctagggtgagcccacagcattgttccagcagtgagggagtcttcactgcctcctgagactctctcacggctcttaagatacctccctgaagtccctccaaagaattcaatgtgcccctagtctaaatcagtttcctccatcataaatactcatagatgacgcaacaataaagcgttaataacgata

SEQ ID NO: 251974 - DNA, 437 bp, Homo sapiens
caaaagcacagctaacagagaccagcgtctctccaccccagcaggcctggtcttttgcgtccctgttttctctatggcccatcttacccacaatcactcttggaaccctgacagtttttaaaagctcaaactggattgcttctccccttttctgaagcttttcaaaggctccccattccaggccgggtgaggtggctcacacctgttatctcagcactatgggaggctgacgcgggcggatcacctgaggtcaggagtttgagaccagcctggccaacatggtgaaaccccgcctctactaaaaatacaaaaaattggccgggtgtggtggcgcaggcctgtaatcccagctactcagggggctgaaacaggagaatcacttgaacctgggaggtggaggttgcagtgagccgagattgcgccactacactccagcc

SEQ ID NO: 251975 - DNA, 393 bp, Homo sapiens
gtgtcaagtgatgtattatgctctggggatacaacggtgaacaagacaaagttcttgctctcttggaatttatgtattattgatgagaagcctgttttgttaataataaagtcaggcacagtggctcatgcctgtaatcccagcactttgggagcctgaggcaggtggatcacctgaggtcaggagttcgagaccagcctagccaacatcatgaaactccgtctctactagaagctacaaaaattagccgggtgtggtggcgggcacctgtaaccccagctgctagggaggctgaggcagggggagttgcttgaacccaggaggcggaggttgcagtgagctgagatggcgccactgcactccagcctgggcgacagagcgagactttgtcta

SEQ ID NO: 251976 - DNA, 510 bp, Homo sapiens
cccatggaagcagcctccgaatcctcgagcaatatcattcccagcctctcctgacatgacctgttcttgatgtgattgtcagcagttccaaaatgaaagtctctcctgaggccagaggcaggaagaggctgggctgccatccatgcaggttaatcccaggggggatgcagagaggcctggtggaagttctgggagagggcagccatactgtcattctggttccattttcatgatttctagggtgtctggaaaagaaggcagaaccagtggcctgaatcctcaactactttttttttttttttttttttttaaaatttttagtttaaagggggaaataggtaggattaccgtgataggggcaataagtgtgggaagaaagtggggtggcgttggtatgtccaaactgtcatttaattttaacgttgtcagatttggggagtagggtagatgagggtggagtaaataaggcgttaggttaaattagaggttaaggagggtgatggtggcata

SEQ ID NO: 251977 - DNA, 127 bp, Homo sapiens
gggagatggttgtgccccttctggacacctgggtgtgtaccctttctcaaaagtctcaaggctgtgtcaattttacttttatagaaattgtgtaagttttcttaaaaggcagagtgggccaggagcg

SEQ ID NO: 251978 - DNA, 439 bp, Homo sapiens
agtgatatgaggtatgataatagcttgggatatgagttacgaatattttttcacaagttgtcattagattttggctttttggaaagcctttggccatggtaatttttgttgcctattttcctttaaatttgcaggaggccgggcacagtggctcacatcagtaatcccacactttgggaggctgaggcaggcagaccacttgagctcaggagttcaagaccagcctgggcaacatggcgaaaccctgtctctatgaaaaatatgaaaaattagcctggtgtagtggcacaagcctctaatcccatctactctgggggctgaggtagaaggatcgtttgagcccagcaagctccagcatgggtgacaaagtgagatcctgtctcaaaaaataaaaaataaataaacctgcagtattttgaatcctaaggtagtcttgggt

SEQ ID NO: 251979 - DNA, 289 bp, Homo sapiens
atgttatccccagttgtctccacctcccctccaccccctagagttacagagacctcatattaccaggtgtttgaactacaggagttattgctacattttgctccccattccagtccaattgtacctgacaatattccaatttcaaatccattaagtataaactgttttaagaatggcaaagtataggctcaaaataaagagatggagaaatatttaccaagcaaatggaaagaaaaataaagcaggggtttcaatcctagtctctgataaaacagactttaacaatgat

SEQ ID NO: 251980 - DNA, 474 bp, Homo sapiens
gctggtggtactgtaggtgttatgagaggacccatagggtgtccttcaggtgagctgttgtccacagcacctttcatatctgctgtaaagggagccctactttctgtctatcccccccaccgccggcccccggaatctaagcagactccctgttggaagcttactctggcacagaagctaggatgtcaccttaaagggtgtgattcaattgaatatagtttagtgcggtaccaggcacatcataagcatgcaataaatgttagccagcttagttataacttttggtaataattaatattatttaactaatttgcattataccacttatttcttccattatggagattctgtctcccttaaactgttaaacttgaagaagaaaccaaacatgataatctggtcaagttaacacattttcgcccatgaattctaccttcaacacagccaagctctgatacctcagatataagcaaa

SEQ ID NO: 251981 - DNA, 588 bp, Homo sapiens
ggtgatgaggcatgtttccattcatctttccctttcagaaagaaaaaggtcctccagggtagtgctcggcaaactgcaaatgggcctgtttatctttggctccctctttagagttctgaatgaaagtcccattgtgtcctttcctctacggagctcctgcaaggcccgctctccctgcatgaaagcgtgagcgagtgcagctgggggctcataacccttcgactccttgtctgcgtgtcaggaagggtgttacaacatgcctcatcagcgatggctagcaatcgctgatgaggcataagtggtatcagttttcatttttctaattgtttaaactgtgttttataccagtgtttgcaagtaatggggtgttagcttgagatgggtaaaggtggttgggggagggacttcgttgtaatggtttggctgtaaaaaatgtttccaactccgctgaaatgttgctgaaaagcatggtgctggtaccagttcaacaatccgtggctgctcattcttgcctactttactctcccactgaagcaggttagcggtgaaggtggtatggaaagcctgatgcctcatcagggatggtgg

SEQ ID NO: 251982 - DNA, 427 bp, Homo sapiens
ggttgtgattagatggattgcagcatgcttgatttttttcattgaactggtcattcctgcagaggggtgttagaactgacctggcttcttggcaagtgttcagctgagactacttattggccctgagcacagcccaaacacctgcttagtcctgaaaccctgacctgagttgtggagatggaggagacctggaggaaatactcattccattggagaggccttgtctcttctgccttggaagctgccccagttagatgaggagacagaattacgtactcaagagagtaatttgcaagaagcacagctgtgatttcattttccaggcatccttagcctatgtctctagacagtggtcccctcaagggcagtactgagttaatactcttttaccttgcctaacatggcactggtttaaattaaaaaaaaa

SEQ ID NO: 251983 - DNA, 558 bp, Homo sapiens
aaggtttgacttcctacagaaagacttcccacattcagtacattcaaagggtcctcctctgagtgtgttctctgatgtactctaagagattattttcagggaaaattgtcccacattcattacattcataggttttctcaactttgtgacttatttgatgtataaggaatgatctcctagagaagaatttttgacactgaagatacaaataggacttctcctttatgtgagttctctgatgtatattgaaggtcgactgagaactgagtttccctgcatgtgttattatgacaggatgtcttcaatgtgtaagttttctgatgatgtactgtaagggcttaaatgtggctgacgtttttcccaaactcaaaacgtttcacccctgtgagagctctctgatattctctgaagagtacttttcaactgaaagttgaaaagaaaaaaaagaaaggaagaattctttgtattgatctatcatgtaaaaattctggtgtatacctgactgtcaccctgctgctagccatacttcattaacaaattaaacaaaaattaaagaaa

SEQ ID NO: 251984 - DNA, 452 bp, Homo sapiens
gactgagatccctttaagaaaataaattctgaaagcaggattctacgtaacttaaaattctagtgtcatattaatactatattctctcatctgttgttaccatctctagtgctataaaattgtaaaattccaaagcaataacctcatttcacattcgtaaaaaaaacttgaagccccaggaagtaaaatgatctcagtgcttttcactgaaaatagaaaataaatgggttgctcttggtaaggtaggaggcacaggcctaaatgattcatgataaatgtaaaagttctttgaagatgcatgccttaccttaaaacttcaaatgtatatttcagattctagtcagatataacacttactatagtaaattggactctctaggaagatgcttcatttatcctgtgaactctggtacccaggtttgaattaaagttatcacatcaggggccaacaa

SEQ ID NO: 251985 - DNA, 199 bp, Homo sapiens
aggttggttggtggatggatcagtggacaagttagtggatggatggatgatgaatggatgggtgagttggttggtggatggattggtggacaagttagtggatggatggatgaataagttatttgggagacaaatggacgggcaggaagattgatgctccgctgttcctgctttttgcataaatgtactcgactccctc

SEQ ID NO: 251986 - DNA, 381 bp, Homo sapiens
ctgggcagggcacattgggtggttttgtccaagcaaccagggaagaatcactgagtctccaaagcaatgtaaccagagaggaaagtgtctctaggtggaaactcggggtttgagacatctcacacagcagcagaggtagcactcagtttgtgcaggagagtgctggactgcaggactgcccaccctgggaagctgtggggcagaggaggaagcacctcttggggagatggtggagtgagtcccagggaatcccagaggtggtgttggttagaggggtgctggcgatgggaggggcttggccttcaagaaagaagcaggcttacttacatatgtgaggtgtgatctgagaaatgctaggaaagtctaacttggccccactga

SEQ ID NO: 251987 - DNA, 435 bp, Homo sapiens
ctgggcagggcacattgggtggttttgtccaagcaaccagggaagaatcactgagtctccaaagcaatgtaaccagagaggaaagtgtctctaggtggaaactcggggtttgagacatctcacacagcagcagaggtagcactcagtttgtgcaggaaaatatcagtaggggtcatgggtccagtggacttggaagaggctgggtaggggagagtgctggactgcaggactgcccaccctgggaagctgtggggcagaggaggaagcacctcttggggagatggtggagtgagtcccagggaatcccagaggtggtgttggttagaggggtgctggcgatgggaggggcttggccttcaagaaagaagcaggcttacttacatatgtgaggtgtgatctgagaaatgctaggaaagtctaacttggccccactga

SEQ ID NO: 251988 - DNA, 593 bp, Homo sapiens
acagccaccctctgagctctccgcagcaggaggaaaacgtcagagagcccttgaggccctgtttcctcaccagaaggaaggtggctgacacagccatgatcacccccaatctggaggctcagactagagtggccccaaatccttggggacaaggccagaaagtggatgtggccacacagacaggtaagggtcacctgggaggtgaggtgcggtctcgaaggtgctgcgccacacacccaaattccaaggacagagacatccacatggatgtcccacagataatcaggaggcctcatgccctctccccgggcaggggtgacagctcctccgacttgcctctcagctcacagaagttgaaatctaccaaggacatgcatggcacacgggcgtgtacacacactcgtctgactcacacctcatcctccctttcgcttcagctggggaaggaggtggaaaggtgatgttcaagactggagggtaatttgcccaagaatgcagtgagcaaacatcttaaaacaccacggagagcctctgaaaactgattagaaccatttgtgtggccaacaagaatgagggccgccgagaactggaag

SEQ ID NO: 251989 - DNA, 433 bp, Homo sapiens
acagccaccctctgagctctccgcagcaggaggaaaacgtcagagagcccttgaggccctgtttcctcaccagaaggaaggtggctgacacagccatgatcacccccaatctggaggctcagactagagtggccccaaatccttggggacaaggccagaaagtggatgtggccacacagacagctcacagaagttgaaatctaccaaggacatgcatggcacacgggcgtgtacacacactcgtctgactcacacctcatcctccctttcgcttcagctggggaaggaggtggaaaggtgatgttcaagactggagggtaatttgcccaagaatgcagtgagcaaacatcttaaaacaccacggagagcctctgaaaactgattagaaccatttgtgtggccaacaagaatgagggccgccgagaactggaag

SEQ ID NO: 251990 - DNA, 267 bp, Homo sapiens
tttgattgatagttaagaccactaaataacaggaaaacagcaagtcaatatcattttggagtgtcatatttttctgcttcaagaaatgttactcataatgagatcactcttctcatgaaaatcactcaagaagatgtagcaaagaagatacacaggaacttggtcggagactgtttgatttgatgcttattttcattttaaatgcctaatttaaaaagcagaacaattcctctagcatgttattataataaaacataagatacattg

SEQ ID NO: 251991 - DNA, 473 bp, Homo sapiens
ttgctgcatttttctaaactaaaaaaatgatagagcatgttgattctgctctcagcaatatctttccttgttaaatagggaacttatggggattatggactatattaggagaaatgttttcagtctcatctgcaatatttataaaaataggattccttgaccttcaaagggcaaaacttaaaaaaaaaaaaatcctcagaatagctggcaataaagacctagatcacagtattaaagtgtatggcgtacaatacatgaggtcagtgctacagccatctagcatgaactaacccagcttccacctccataaagttacctagagtggtagagtgggaatatgttctggcatatacctgacctgccaatcattagggagaggcaacaaggtaatacagcctttcctcctatcagcacacagaaactcaaagctgtcttcacccttttctgttccacagcagtcttatcctgacagg

SEQ ID NO: 251992 - DNA, 234 bp, Homo sapiens
gcaacccagagaaagggcttttctggacctcgggccccacccctgggtttacagagggcagtggacgggattatggttttcaaactgggttctcaagagaggtcttgggactatcaaattgaaaaggctgaagtgccattccttccaccctctttttaaaccagacagtgatgtctcttagattgaggatctaagtaaaatttaattgaatcagagttccatagctaatcaaaa

SEQ ID NO: 251993 - DNA, 379 bp, Homo sapiens
aatataagctcctcaaggcaggcagcataactttttttgctacattgtatttagggcccagcatactggtaaattgtcaaagaaatgcttcagtcaatggatagaatgaatttttgtgcctgggggtgccagagccagggtggggaagtaaaaaaataaaaactgtgatggtagtcacacaaacctaaatgtgttgaattgaaattcacagaactgctgggctcagtggctcatacctgtacgataatcccagctactcaggaggttgaggtggaaggatcacttaagcctgggaggtgaaggctgcagtgagctatgactgtgccactgcactccagcctgggcaacagagcgagaccttgactctttaaaaaaaaaa

SEQ ID NO: 251994 - DNA, 455 bp, Homo sapiens
tgtgctctgttatagtcctccttgtcgctgcactctgggcccctagaactggtgtcccagaaagccaccctgctttaggccccgccgcagcagtggggccctcaagcgggtctgaagacgagcaggtgcacagacccccagccgagcctcatctccacgcaagcacacgtgggctcttcatccggttgcttctgtggagcagtgtggattgttaacactaggaattaactgttgaatatgtggttttttcctgtaaccaaattgctgtaactgtacactaaccttgtgtgagaaaagtttgtagtcctgctaaaagctcctctgtctctgcctatataaatgaaaccctaatgtccctacttcagaacactgactccattcctttggagttggtgtttccaggtgggctatactcaagcattacacatgaataaactctctttaagttaaataaa

SEQ ID NO: 251995 - DNA, 258 bp, Homo sapiens
acctgtgttcccagctactggggaggctgaggtgagagaattgcttgagcccaggcagtcaaggccgcagttagccgaaatcacacccctgcactccagcctgtgcaacatagcaagactctgtctcaaaaaaaaaaaagatattcataggtaatacagggtaatgggaatatatctagactagaatttctacttctagctttgccacttagcaatcatatgactttgaacttaatctttgatagtgtttctttacct

SEQ ID NO: 251996 - DNA, 407 bp, Homo sapiens
cacctaaaattgtgcttggcacatggtcaaccctcaaatcttagatgatgttattccccacttactagctgtgttaagtttggcaagttaccttctctcagctatggttgcttacctttaaaaatgggcctaataataccttacttacctagagccaaggggatgaaatcagataatctcctgggaccaaagacttgacccacttcccatgaaattgtgttggcatctatgagtattgaggggatactgaaaccttataattctgctccatgccatggtgcagaagggccagtagccccttccagcatctgttccattttgcccaaatctatagaggggcctggaagcttattccagaaatcaataattagttatgtctgagaaattgagtcttttcagttcataaa

SEQ ID NO: 251997 - DNA, 644 bp, Homo sapiens
aaggaaaggaaaatgatgtattttcttaaaacacagatatttccagtattctttagtactaaaaagttagtgaatttaaaaattgttgtattctttttcattgtcttgtagagatgatcatcaagggaaatgtaagtgaacatggaattgtgactgttttttagttagcttgcaagaatgctatgaacaatattaatgtaaaacaaaaatgaattaaaaattttaatatttataataactgatattccactagtaggtgatataaaacttgagatgccacaatgaagaacaattaaaaatagagattagaatttcttgttgagaaacattttagaaacatttttttcttcagcataccactgttaccaaatagcttgggaacagagttagccattgcaatggaaaatgaatttgaaattcaccctgtaagtgtcattaaataaattttctctaattaataatcagatattttagtttataattggtttatgcaaagttttttaaattacacaaacccctgctaattgtatttataacttaaccactttgattttgtaaaaactgacattgctactattacttataattacatatcaaaatagttcagagaaatacacttcatttattcaatttgatttattgat

SEQ ID NO: 251998 - DNA, 507 bp, Homo sapiens
cctaattgaaaagtgcttcagataaggcatagatggtagaaaaatctcataaaaatatattagtggtgagaaaaatgtcaggtacaactcaagatgagcggggttaaagcagtgcatgctggaagaaagtagtttgaattagtttgctgtaataatgaagatggtaaggaagatggtgatgactgttataattaaaggaaggcatattattcacaagaaagttatgtcatctcttttggagatggcaatgaagatatgcttgtaaagaattcttgcatttcttaaaaatattactttttcccttggccagttttacagggttttagtttactgcctcttactgatttgttgacccattttacctggatttctgaaaatatgttctgtatctagtcctcttagttcgtatgtattagtttttatttaccaccgccctctaaccccaggccccttcaaaaatgcctgcattttgctatagtgcctttattaaaaattattctggacatt

SEQ ID NO: 251999 - DNA, 2055 bp, Homo sapiens
gatgccactccagctggacgggctcgtggagtctgcattcgagggattccctagtccgtccagtcatcacgggctgctgcccgcctgcccgtgccgtccaaggcacctggccttgggccggtatcaggtagccgcgcctgggtcacacctgccctccacgttcatctctccacctacagatcatagggaccgtttcctcattttattgtcatgcaaatgttgtacataaatacatggctataaacaggcagctcagagtaaccaggaggctcttttctcagtgacagatcacaccctcttagagtagtaatttttgaataattgttgcaaaatatgaaaacctttagcaaaactccagcaccactgaagtcatcaggaagtgtttgggagaatacgtgtctgtgctggatgctgttgaagcaggtcaggccgttggggtcccttcgttcttagggcttctccaccagcttctaaatggggaatgccaactttgtgccaggcacacactacctgctgagacactgtggatgaacaaggcgttgacccagggctcactctgtagaggaagaagaccagagaatggataccaccaagacagtgataagtgctgcaacagggttcagagctgcacaggaagtccccaaaggtagtgaacccatcatcggggcttaggaaagagcttttaaaggaagataaagccagcaggtgacgccaaaaactgggtatttctgtagggtagcttttttccctttcgttctacttgttgtactatacagtagagtagccaacccacctccaaggaaaataaaattcaaaatatataatgtaatcagtatgatgatagctcttattgttttgcttctgtacttcaagctgtgaagtcattcttgtaacacaggctgaattttccccctcaaccatggtgtttaatgagtgtgaatcttcattcaaccattaaaatctccaagagtatttttatactaacagttcacaaacttgaggcaattatagtctaagtagattccaactcctgcccccacccgtcttcctgccaccaccgccgcccggtctctggaggatcttggaaagaatttaccagcctttaggaacattcagcactttaaaagtgtcacagagccataaataaagagtaagacacccctaagactgtcatctcatcaccacacccgtctctgctgaggaggacagagacaggaaggaaatgcgacaagttcactgtgcagtagccaagcaggcccagccaacatgtgggagggtgggtgtctgtcccagcggtggggcaggaggcgtgcaggggaaggggctgcctggaggtaaggctctgcggtcagccagccctgggtttggtgctccaggaaaggccagcacgtaggggagtgaggtggggtgctgctgttggtagggtaggaagtgacctcgcagggtggggccagggcttcgtggccagtgggcggccatttctgtgacattgcaatgttctgcgtggatcgttttctggattcctgccaaggtgtttacttggcctggggaaagagaggaacgcatgaggggcccagaccttgccccctgacccatgatagggtctttgagggcatacataacacatctggagcttaaaaagaattaaactgtagaaataagacttcagtgaaggataatatattagtggaggaaagaccaaatggaagatggtgttaaccatcccacaaatagaaatgagtgttatattaggagcctaaggtgggacaaccacacttccccagagctctttaaaaatagcgcagacactcatgcctctagtatgattcagttcagctcctcattgaaccagggaagagaccgacagacttcacaccacttcttctgttcctgtaattctccactgtgcagcttgggatttcctggagatgtttccataaaaatagagagatgccatcatcactgtcgtcactgtcactgctgtacaataataaaagaaggtgctaggatgccttcctgtaagttttagactagatgtattaaaaagtatccggt

SEQ ID NO: 252000 - DNA, 478 bp, Homo sapiens
cctcactccttcccttatttgtcttgtttcccattctttgtctaaatctcctcttttctctccctcttcaccctattcattcccagctccctaaaattatatcattcttccttcatcatgctccctcattcctcactgcagcatcacccagtccaactctgtcccatctgtgattcctcacttctgctttcgcaccatctctctccctaaggtagaagtggtgcccagctttaaacacaaggcaaagtgagggtatgttccactaggacagcgtgtgtcactctgctgccatacacagggagtaccatcagtgattataaagaggaatttcattcctgccagagagctcacaaattaggttattgttgatgttcatatagtttttagtgactggagacagaaaccaaccagataactgtgagatcccagccaagcacaatttctacatgttagtcaattgcaagaaacactgagatgt

SEQ ID NO: 252001 - DNA, 612 bp, Homo sapiens
aagtatatacactttaatatatttgttaatataactactctccactgtttctgttgaatcagacctttatgttatgttgcttaataaagtacagtaagttttggcatatatattttttccatgtaagtagcataaatgctcagccaaacacttagtatatgatgccaaagtagaaagctgagtcttctacattgattagggcaggcctcccaccctccgctaaggcattaaattattttacccaagtcacacttttaacctatctgattaatttgccgaatttgtctgattcagcattatggaattgtactgtctcttttggtgccacaaaatgctaggtaatggcactttaggggctttggatcaatcattttaatcttttttggctttagcccagttatcaatagagagtgagctaaagtagattcttatactgtatatcctccagctataaacttttatggctattgaatgtgaaatttgggaagcatctcatttccagaattccaccctagctcagcagtttcactctgctttttgtgttgtggcagacttgtatttcagtaagcaccttcacctttttgatatcccaggattcaaatgaaaaaaaaa

SEQ ID NO: 252002 - DNA, 1122 bp, Homo sapiens
atagatcttgtgaggcctcatagcccattgcaaggactctgaatttactccgcaagagacagaaaaccatgaccaggcattgagcacaggagtgacatgacagtcattctcactgctgtgaagaagacagaaggggttagggaaaacaactaggaggctgtctcaataatctagactttgcaaatgggcatcaaacacttctctgggctctttgtgctgctgtgcattggatttggtctgtccattttgaccaccattggtgagcacatagtatacaggctgctgctaccacgaatcaaaaacaaatccaagctgcaatactggctccacaccagccagagattacacagagcaataaatacatcatttatagaggaaaagcagcagcatttcaagaccaaacgtgtggaaaagaggtctaatgtgggaccccgtcagcttaccgtatggaatacttccaatctgagtcatgacaaccgacggaaatacatctttagtgatgaggaaggacaaaaccagctgggcatccggatccaccaggacatccccctccctccaaggagaagagagctccctgccttgcggaccaccaatgggaaagcagactccctaaatgtatctcggaactcagtgatgcaggaactctcagagctcgagaagcagattcaggtgatccgtcaggagctgcagctggctgtgagcaggaaaacggagctggaggagtatcaaaggacaagtcggacttgtgagtcctaggtgaccacactgcttccctttctcagttcctgaccttcctctgagcccttgagacactttgtaatgctcttttgtaactatcgacaaaggtgtggggaagctgaggtctaggtcttcttaaaggtcaagtctgctctccctcgcctaaagtgcagcagcagctcctctcaagctcactctctaggtctccagggtaggagtgtttttctagcaagaatcttagtcaggagtaagctctgtgcgagagatctgtgaataaccagataaccccagctgccgttaaccttttcaccaggtgccacagtaatatttctggtttttagccctttctctgcactaccaacaagagataaaattgttactcac

SEQ ID NO: 252003 - DNA, 450 bp, Homo sapiens
aaattgtatttttgtagaaatgcggtctcactacgttgcccaggctggtcttgaattcctggtctcaagcagtcctcccacctaagcctcccaaagtgctgggattacagaaaatggtaaacaagggaaagaaagaggagttccagaccctgcataccaaaatattacagacacacaggaaatgactcttcaaatccaggctgtaaacctgtcatttcgtgggcttgtctgtgggcctagaaaagcgagacaaagatcacaccgaagacattactgtttggggctggctgtactggaggacctctggaggcctttccatgccaggtgctatgattctaaactcaagtcataaaatgaaatgttagaggaaagccaatgaaatttgaggcagaacttgtggcttaaagctcattttgctttaaaaaatgtagactttgaaaaactgttctt

SEQ ID NO: 252004 - DNA, 1293 bp, Homo sapiens
ttagagatagtttttctcatcctcaagtattgggagtccaactttgagtggaatctggactaaacttcagagtgttgccagggacggcagtatctctttgtgtgaccctggcggcttatgggacgttggcttcagacctttgtgatacaccatgctgcgtgggacgatgacggcgtggagaggaatgaggcctgaggtcacactggcttgcctcctcctagccacagcaggctgctttgctgacttgaacgaggtccctcaggtcaccgtccagcctgcgtccaccgtccagaagcccggaggcactgtgatcttgggctgcgtggtggaacctccaaggatgaatgtaacctggcgcctgaatggaaaggagctgaatggctcggatgatgctctgggtgtcctcatcacccacgggaccctcgtcatcactgcccttaacaaccacactgtgggacggtaccagtgtgtggcccggatgcctgcgggggctgtggccagcgtgccagccactgtgacactagccagtgagtctgctcctttgcctccctgccatggtgcggtccctcctcatctctcccaccctgaagcccccaccattcatgctgcctcttgttactcttagcataaaatgggccttaactgcagaaatgtcaaatcagaacagtagctgcctagtaatgcccagtgatgggggacccttgtgcccttggaaaacctcactccaagtagaggctgtatctggagtgagtgtctacagagaggggaattggtcagtgcatggcagaacttgacatggcagaactgttccgtgggccccagagcagggccgtgccgtgccttcctacttggtcatcctgtggctgtaggtgcactgtcccaactgctcacacaccttccagtcccctccctccattctcaccacagttacagtcggagcagggagagacaggacaccaagagacatgggcagggccacgtgtagtctggacagagcccacccggcccagacttggcctcctgtctctctgtgaggggcaagcatagtccgaaggcctggattataaatattagaacataatgaaaaggaaactgtgtggcaaagggataaagggatacagagaaaagaaacaaggaagagatgaggtgacagtttggaccaaggaaaatgccaagagaagacttcacactaccttttttttttctggttttgccattcttttattcatgttgttacactcagtataggatagtttattaaaatcattatgtctgtagacattcaaaaaaaaa

SEQ ID NO: 252005 - DNA, 454 bp, Homo sapiens
gacttcacattctcccacatggagtaaaatggaaatggactagaatgatcagtgggaatgatggtgtggtacctcttgatgttcaaaggggagagcaatccttgccccatctgagctctcaccagctctgatgccctcagacagggagacagccagcaggggtcccaggcacatggttcatcacgagcatgagggaacagcaaggggcacggtatcacagcctggagacacccacacagatggctggatccggtgctacgggaaacattttcctaagatgcccatgagaacagaccaagatgtgtacagcactatgagcattaaaaaaccttccagaatcaataatccgtggcaacatatctctgtaaaaacaaacactgtaacttctaaataaatgtttagtcttccctgtaaccttcaaactgagtcatgtgtgagtcagcattttctttac

SEQ ID NO: 252006 - DNA, 237 bp, Homo sapiens
  misc_feature (180)..(181): n is a, c, g, or t
ctctgtgctgcggtcgctctacacggactcccctgcgatgctctccccggggccactggtgcgtgtgtcttttgaaacaccacctctcacaatttaggcagaagctgatatcccagaaagactatatattgtttttttttttttttttttttttttttttttttttttttttttttttgnnggggggggggggggggggggggggggggggggggggggggggacatgtgtctccac

SEQ ID NO: 252007 - DNA, 4255 bp, Homo sapiens
cgcggccgctcgcccgtgttgtgtgtccccggtgtcaccgagcgtgttgtgtgtccgtgcggcgcggcgctgtgtggctccctcgcgcccaccacgctggcccccgggccccggctcgcccttcccaggcgccggctgcagcagagtttcagaacaagcttcctggaacccatgacccatgaagtcttgtcgacatttataccgtctgagggtagcagctcgaaagtagaagaaagtgttgccagggacggcagtatctctttgtgtgaccctggcggcttatgggacgttggcttcagacctttgtgatacaccatgctgcgtgggacgatgacggcgtggagaggaatgaggcctgaggtcacactggcttgcctcctcctagccacagcaggctgctttgctgacttgaacgaggtccctcaggtcaccgtccagcctgcgtccaccgtccagaagcccggaggcactgtgatcttgggctgcgtggtggaacctccaaggatgaatgtaacctggcgcctgaatggaaaggagctgaatggctcggatgatgctctgggtgtcctcatcacccacgggaccctcgtcatcactgcccttaacaaccacactgtgggacggtaccagtgtgtggcccggatgcctgcgggggctgtggccagcgtgccagccactgtgacactagccaatctccaggacttcaagttagatgtgcagcacgtgattgaagtggatgagggaaacacagcagtcattgcctgccacctgcctgagagccaccccaaagcccaggtccggtacagcgtcaaacaagagtggctggaggcctccagaggtaactacctgatcatgccctcagggaacctccagattgtgaatgccagccaggaggacgagggcatgtacaagtgtgcagcctacaacccagtgacccaggaagtgaaaacctccggctccagcgacaggctacgtgtgcgccgctccaccgctgaggctgcccgcatcatctaccccccagaggcccaaaccatcatcgtcaccaaaggccagagtctcattctggagtgtgtggccagtggaatcccacccccacgggtcacctgggccaaggatgggtccagtgtcaccggctacaacaagacgcgcttcctgctgagcaacctcctcatcgacaccaccagcgaggaggactcaggcacctaccgctgcatggccgacaatggggttgggcagcccggggcagcggtcatcctctacaatgtccaggtgtttgaaccccctgaggtcaccatggagctatcccagctggtcatcccctggggccagagtgccaagcttacctgtgaggtgcgtgggaaccccccgccctccgtgctgtggctgaggaatgctgtgcccctcatctccagccagcgcctccggctctcccgcagggccctgcgcgtgctcagcatggggcctgaggacgaaggcgtctaccagtgcatggccgagaacgaggttgggagcgcccatgccgtagtccagctgcggacctccaggccaagcataaccccaaggctatggcaggatgctgagctggctactggcacacctcctgtatcaccctccaaactcggcaaccctgagcagatgctgagggggcaaccggcgctccccagacccccaacgtcagtggggcctgcttccccgcagtgtccaggagagaaggggcagggggctcccgccgaggctcccatcatcctcagctcgccccgcacctccaagacagactcatatgaactggtgtggcggcctcggcatgagggcagtggccgggcgccaatcctctactatgtggtgaaacaccgcaaggtcacaaattcctctgacgattggaccatctctggcattccagccaaccagcaccgcctgaccctcaccagacttgaccccgggagcttgtatgaagtggagatggcagcttacaactgtgcgggagagggccagacagccatggtcaccttccgaactggacggcggcccaaacccgagatcatggccagcaaagagcagcagatccagagagacgaccctggagccagtccccagagcagcagccagccagaccacggccgcctctcccccccagaagctcccgacaggcccaccatctccacggcctccgagacctcagtgtacgtgacctggattccccgtgggaatggtgggttcccaatccagtccttccgtgtggagtacaagaagctaaagaaagtgggagactggattctggccaccagcgccatccccccatcgcggctgtccgtggagatcacgggcctagagaaaggcacctcctacaagtttcgagtccgggctctgaacatgctgggggagagcgagcccagcgccccctctcggccctacgtggtgtcgggctacagcggtcgcgtgtacgagaggcccgtggcaggtccttatatcaccttcacggatgcggtcaatgagaccaccatcatgctcaagtggatgtacatcccagcaagtaacaacaacaccccaatccatggcttttatatctattatcgacccacagacagtgacaatgatagtgactacaagaaggatatggtggaaggggacaagtactggcactccatcagccacctgcagccagagacctcctacgacattaagatgcagtgcttcaatgaaggaggggagagcgagttcagcaacgtgatgatctgtgagaccaaagctcggaagtcttctggccagcctggtcgactgccacccccaactctggccccaccacagccgccccttcctgaaaccatagagcggccggtgggcactggggccatggtggctcgctccagcgacctgccctatctgattgtcggggtcgtcctgggctccatcgttctcatcatcgtcaccttcatccccttctgcttgtggagggcctggtctaagcaaaaacatacaacagacctgggttttcctcgaagtgcccttccaccctcctgcccgtatactatggtgccattgggaggactcccaggccaccaggccagtggacagccctacctcagtggcatcagtggacgggcctgtgctaatgggatccacatgaataggggctgcccctcggctgcagtgggctacccgggcatgaagccccagcagcactgcccaggcgagcttcagcagcagagtgacaccagcagcctgctgaggcagacccatcttggcaatggatatgacccccaaagtcaccagatcacgaggggtcccaagtctagcccggacgagggctctttcttatacacactgcccgacgactccactcaccagctgctgcagccccatcacgactgctgccaacgccaggagcagcctgctgctgtgggccagtcaggggtgaggagagcccccgacagtcctgtcctggaagcagtgtgggaccctccatttcactcagggcccccatgctgcttgggccttgtgccagttgaagaggtggacagtcctgactcctgccaagtgagtggaggagactggtgtccccagcaccccgtaggggcctacgtaggacaggaacctggaatgcagctctccccggggccactggtgcgtgtgtcttttgaaacaccacctctcacaatttaggcagaagctgatatcccagaaagactatatattgtttttttttttaaaaaaaaaagaagaaaaaagagacagagaaaattggtatttatttttctattatagccatatttatatatttatgcacttgtaaataaatgtatatgttttataattctggagagacataaggagtcctacccgttgaggttggagagggaaaataaagaagctgccacctaacaggagtcacccaggaaagcaccgcacaggctggcgcgggacagactcctaacctggggcctctgcagtggcaggcgaggctgcaggaggcccacagataagctggcaagaggaaggatcccaggcacatggttcatcacgagcatgagggaacagcaaggggcacggtatcacagcctggagacacccacacagatggctggatccggtgctacgggaaacattttcctaagatgcccatgagaacagaccaagatgtgtacagcactatgagcattaaaaaaccttccagaatcaataatccgtggcaacatatctctgtaaaaacaaacactgtaacttctaaataaatgtttagtcttccctgtaaccttca

SEQ ID NO: 252008 - DNA, 4289 bp, Homo sapiens
cgcggccgctcgcccgtgttgtgtgtccccggtgtcaccgagcgtgttgtgtgtccgtgcggcgcggcgctgtgtggctccctcgcgcccaccacgctggcccccgggccccggctcgcccttcccaggcgccggctgcagcagagtttcagaacaagcttcctggaacccatgacccatgaagtcttgtcgacatttataccgtctgagggtagcagctcgaaagtagaagaaagtgttgccagggacggcagtatctctttgtgtgaccctggcggcttatgggacgttggcttcagacctttgtgatacaccatgctgcgtgggacgatgacggcgtggagaggaatgaggcctgaggtcacactggcttgcctcctcctagccacagcaggctgctttgctgacttgaacgaggtccctcaggtcaccgtccagcctgcgtccaccgtccagaagcccggaggcactgtgatcttgggctgcgtggtggaacctccaaggatgaatgtaacctggcgcctgaatggaaaggagctgaatggctcggatgatgctctgggtgtcctcatcacccacgggaccctcgtcatcactgcccttaacaaccacactgtgggacggtaccagtgtgtggcccggatgcctgcgggggctgtggccagcgtgccagccactgtgacactagccaatctccaggacttcaagttagatgtgcagcacgtgattgaagtggatgagggaaacacagcagtcattgcctgccacctgcctgagagccaccccaaagcccaggtccggtacagcgtcaaacaagagtggctggaggcctccagaggtaactacctgatcatgccctcagggaacctccagattgtgaatgccagccaggaggacgagggcatgtacaagtgtgcagcctacaacccagtgacccaggaagtgaaaacctccggctccagcgacaggctacgtgtgcgccgctccaccgctgaggctgcccgcatcatctaccccccagaggcccaaaccatcatcgtcaccaaaggccagagtctcattctggagtgtgtggccagtggaatcccacccccacgggtcacctgggccaaggatgggtccagtgtcaccggctacaacaagacgcgcttcctgctgagcaacctcctcatcgacaccaccagcgaggaggactcaggcacctaccgctgcatggccgacaatggggttgggcagcccggggcagcggtcatcctctacaatgtccaggtgtttgaaccccctgaggtcaccatggagctatcccagctggtcatcccctggggccagagtgccaagcttacctgtgaggtgcgtgggaaccccccgccctccgtgctgtggctgaggaatgctgtgcccctcatctccagccagcgcctccggctctcccgcagggccctgcgcgtgctcagcatggggcctgaggacgaaggcgtctaccagtgcatggccgagaacgaggttgggagcgcccatgccgtagtccagctgcggacctccaggccaagcataaccccaaggctatggcaggatgctgagctggctactggcacacctcctgtatcaccctccaaactcggcaaccctgagcagatgctgagggggcaaccggcgctccccagacccccaacgtcagtggggcctgcttccccgcagtgtccaggagagaaggggcagggggctcccgccgaggctcccatcatcctcagctcgccccgcacctccaagacagactcatatgaactggtgtggcggcctcggcatgagggcagtggccgggcgccaatcctctactatgtggtgaaacaccgcaaggtcacaaattcctctgacgattggaccatctctggcattccagccaaccagcaccgcctgaccctcaccagacttgaccccgggagcttgtatgaagtggagatggcagcttacaactgtgcgggagagggccagacagccatggtcaccttccgaactggacggcggcccaaacccgagatcatggccagcaaagagcagcagatccagagagacgaccctggagccagtccccagagcagcagccagccagaccacggccgcctctcccccccagaagctcccgacaggcccaccatctccacggcctccgagacctcagtgtacgtgacctggattccccgtgggaatggtgggttcccaatccagtccttccgtgtggagtacaagaagctaaagaaagtgggagactggattctggccaccagcgccatccccccatcgcggctgtccgtggagatcacgggcctagagaaaggcacctcctacaagtttcgagtccgggctctgaacatgctgggggagagcgagcccagcgccccctctcggccctacgtggtgtcgggctacagcggtcgcgtgtacgagaggcccgtggcaggtccttatatcaccttcacggatgcggtcaatgagaccaccatcatgctcaagtggatgtacatcccagcaagtaacaacaacaccccaatccatggcttttatatctattatcgacccacagacagtgacaatgatagtgactacaagaaggatatggtggaaggggacaagtactggcactccatcagccacctgcagccagagacctcctacgacattaagatgcagtgcttcaatgaaggaggggagagcgagttcagcaacgtgatgatctgtgagaccaaagctcggaagtcttctggccagcctggtcgactgccacccccaactctggccccaccacagccgccccttcctgaaaccatagagcggccggtgggcactggggccatggtggctcgctccagcgacctgccctatctgattgtcggggtcgtcctgggctccatcgttctcatcatcgtcaccttcatccccttctgcttgtggagggcctggtctaagcaaaaacatacaacagacctgggttttcctcgaagtgcccttccaccctcctgcccgtatactatggtgccattgggaggactcccaggccaccaggccagtggacagccctacctcagtggcatcagtggacgggcctgtgctaatgggatccacatgaataggggctgcccctcggctgcagtgggctacccgggcatgaagccccagcagcactgcccaggcgagcttcagcagcagagtgacaccagcagcctgctgaggcagacccatcttggcaatggatatgacccccaaagtcaccagatcacgaggggtcccaagtctagcccggacgagggctctttcttatacacactgcccgacgactccactcaccagctgctgcagccccatcacgactgctgccaacgccaggagcagcctgctgctgtgggccagtcaggggtgaggagagcccccgacagtcctgtcctggaagcagtgtgggaccctccatttcactcagggcccccatgctgcttgggccttgtgccagttgaagaggtggacagtcctgactcctgccaagtgagtggaggagactggtgtccccagcaccccgtaggggcctacgtaggacaggaacctggaatgcagctctccccggggccactggtgcgtgtgtcttttgaaacaccacctctcacaatttaggcagaagctgatatcccagaaagactatatattgtttttttttttaaaaaaaaaagaagaaaaaagagacagagaaaattggtatttatttttctattatagccatatttatatatttatgcacttgtaaataaatgtatatgttttataattctggagagacataaggagtcctacccgttgaggttggagagggaaaataaagaagctgccacctaacaggagtcacccaggaaagcaccgcacaggctggcgcgggacagactcctaacctggggcctctgcagtggcaggcgaggctgcaggaggcccacagataagctggcaagaggaaggatcccaggcacatggttcatcacgagcatgagggaacagcaaggggcacggtatcacagcctggagacacccacacagatggctggatccggtgctacgggaaacattttcctaagatgcccatgagaacagaccaagatgtgtacagcactatgagcattaaaaaaccttccagaatcaataatccgtggcaacatatctctgtaaaaacaaacactgtaacttctaaataaatgtttagtcttccctgtaaccttcaaactgagtcatgtgtgagtcagcattttctttac

SEQ ID NO: 252009 - DNA, 4246 bp, Homo sapiens
  misc_feature (4209)..(4210): n is a, c, g, or t
cgcggccgctcgcccgtgttgtgtgtccccggtgtcaccgagcgtgttgtgtgtccgtgcggcgcggcgctgtgtggctccctcgcgcccaccacgctggcccccgggccccggctcgcccttcccaggcgccggctgcagcagagtttcagaacaagcttcctggaacccatgacccatgaagtcttgtcgacatttataccgtctgagggtagcagctcgaaagtagaagaaagtgttgccagggacggcagtatctctttgtgtgaccctggcggcttatgggacgttggcttcagacctttgtgatacaccatgctgcgtgggacgatgacggcgtggagaggaatgaggcctgaggtcacactggcttgcctcctcctagccacagcaggctgctttgctgacttgaacgaggtccctcaggtcaccgtccagcctgcgtccaccgtccagaagcccggaggcactgtgatcttgggctgcgtggtggaacctccaaggatgaatgtaacctggcgcctgaatggaaaggagctgaatggctcggatgatgctctgggtgtcctcatcacccacgggaccctcgtcatcactgcccttaacaaccacactgtgggacggtaccagtgtgtggcccggatgcctgcgggggctgtggccagcgtgccagccactgtgacactagccaatctccaggacttcaagttagatgtgcagcacgtgattgaagtggatgagggaaacacagcagtcattgcctgccacctgcctgagagccaccccaaagcccaggtccggtacagcgtcaaacaagagtggctggaggcctccagaggtaactacctgatcatgccctcagggaacctccagattgtgaatgccagccaggaggacgagggcatgtacaagtgtgcagcctacaacccagtgacccaggaagtgaaaacctccggctccagcgacaggctacgtgtgcgccgctccaccgctgaggctgcccgcatcatctaccccccagaggcccaaaccatcatcgtcaccaaaggccagagtctcattctggagtgtgtggccagtggaatcccacccccacgggtcacctgggccaaggatgggtccagtgtcaccggctacaacaagacgcgcttcctgctgagcaacctcctcatcgacaccaccagcgaggaggactcaggcacctaccgctgcatggccgacaatggggttgggcagcccggggcagcggtcatcctctacaatgtccaggtgtttgaaccccctgaggtcaccatggagctatcccagctggtcatcccctggggccagagtgccaagcttacctgtgaggtgcgtgggaaccccccgccctccgtgctgtggctgaggaatgctgtgcccctcatctccagccagcgcctccggctctcccgcagggccctgcgcgtgctcagcatggggcctgaggacgaaggcgtctaccagtgcatggccgagaacgaggttgggagcgcccatgccgtagtccagctgcggacctccaggccaagcataaccccaaggctatggcaggatgctgagctggctactggcacacctcctgtatcaccctccaaactcggcaaccctgagcagatgctgagggggcaaccggcgctccccagacccccaacgtcagtggggcctgcttccccgcagtgtccaggagagaaggggcagggggctcccgccgaggctcccatcatcctcagctcgccccgcacctccaagacagactcatatgaactggtgtggcggcctcggcatgagggcagtggccgggcgccaatcctctactatgtggtgaaacaccgcaaggtcacaaattcctctgacgattggaccatctctggcattccagccaaccagcaccgcctgaccctcaccagacttgaccccgggagcttgtatgaagtggagatggcagcttacaactgtgcgggagagggccagacagccatggtcaccttccgaactggacggcggcccaaacccgagatcatggccagcaaagagcagcagatccagagagacgaccctggagccagtccccagagcagcagccagccagaccacggccgcctctcccccccagaagctcccgacaggcccaccatctccacggcctccgagacctcagtgtacgtgacctggattccccgtgggaatggtgggttcccaatccagtccttccgtgtggagtacaagaagctaaagaaagtgggagactggattctggccaccagcgccatccccccatcgcggctgtccgtggagatcacgggcctagagaaaggcacctcctacaagtttcgagtccgggctctgaacatgctgggggagagcgagcccagcgccccctctcggccctacgtggtgtcgggctacagcggtcgcgtgtacgagaggcccgtggcaggtccttatatcaccttcacggatgcggtcaatgagaccaccatcatgctcaagtggatgtacatcccagcaagtaacaacaacaccccaatccatggcttttatatctattatcgacccacagacagtgacaatgatagtgactacaagaaggatatggtggaaggggacaagtactggcactccatcagccacctgcagccagagacctcctacgacattaagatgcagtgcttcaatgaaggaggggagagcgagttcagcaacgtgatgatctgtgagaccaaagctcggaagtcttctggccagcctggtcgactgccacccccaactctggccccaccacagccgccccttcctgaaaccatagagcggccggtgggcactggggccatggtggctcgctccagcgacctgccctatctgattgtcggggtcgtcctgggctccatcgttctcatcatcgtcaccttcatccccttctgcttgtggagggcctggtctaagcaaaaacatacaacagacctgggttttcctcgaagtgcccttccaccctcctgcccgtatactatggtgccattgggaggactcccaggccaccaggccagtggacagccctacctcagtggcatcagtggacgggcctgtgctaatgggatccacatgaataggggctgcccctcggctgcagtgggctacccgggcatgaagccccagcagcactgcccaggcgagcttcagcagcagagtgacaccagcagcctgctgaggcagacccatcttggcaatggatatgacccccaaagtcaccagatcacgaggggtcccaagtctagcccggacgagggctctttcttatacacactgcccgacgactccactcaccagctgctgcagccccatcacgactgctgccaacgccaggagcagcctgctgctgtgggccagtcaggggtgaggagagcccccgacagtcctgtcctggaagcagtgtgggaccctccatttcactcagggcccccatgctgcttgggccttgtgccagttgaagaggtggacagtcctgactcctgccaagtgagtggaggagactggtgtccccagcaccccgtaggggcctacgtaggacaggaacctggaatgcagctctccccggggccactggtgcgtgtgtcttttgaaacaccacctctcacaatttaggcagaagctgatatcccagaaagactatatattgtttttttttttaaaaaaaaaagaagaaaaaagagacagagaaaattggtatttatttttctattatagccatatttatatatttatgcacttgtaaataaatgtatatgttttataattctggagagacataaggagtcctacccgttgaggttggagagggaaaataaagaagctgccacctaacaggagtcacccaggaaagcaccgcacaggctggcgcgggacagactcctaacctggggcctctgcagtggcaggcgaggctgcaggaggcccacagataagctggcaagaggaaggatcccaggcacatggttcatcacgagcatgagggaacagcaaggggcacggtatcacagcctggagacacccacacagatggctggatccggtgctacgggaaacattttcctaagatgcccatgagaacagaccaagatgtgtacagcactatgagcattaaaaaaccttccagaatcaataatccgtggcaacatatctctgtctcttttnnctcttttttttttaaaaaaaaacaatatgtcgacgc

SEQ ID NO: 252010 - DNA, 4188 bp, Homo sapiens
cgcggccgctcgcccgtgttgtgtgtccccggtgtcaccgagcgtgttgtgtgtccgtgcggcgcggcgctgtgtggctccctcgcgcccaccacgctggcccccgggccccggctcgcccttcccaggcgccggctgcagcagagtttcagaacaagcttcctggaacccatgacccatgaagtcttgtcgacatttataccgtctgagggtagcagctcgaaagtagaagaaagtgttgccagggacggcagtatctctttgtgtgaccctggcggcttatgggacgttggcttcagacctttgtgatacaccatgctgcgtgggacgatgacggcgtggagaggaatgaggcctgaggtcacactggcttgcctcctcctagccacagcaggctgctttgctgacttgaacgaggtccctcaggtcaccgtccagcctgcgtccaccgtccagaagcccggaggcactgtgatcttgggctgcgtggtggaacctccaaggatgaatgtaacctggcgcctgaatggaaaggagctgaatggctcggatgatgctctgggtgtcctcatcacccacgggaccctcgtcatcactgcccttaacaaccacactgtgggacggtaccagtgtgtggcccggatgcctgcgggggctgtggccagcgtgccagccactgtgacactagccaatctccaggacttcaagttagatgtgcagcacgtgattgaagtggatgagggaaacacagcagtcattgcctgccacctgcctgagagccaccccaaagcccaggtccggtacagcgtcaaacaagagtggctggaggcctccagaggtaactacctgatcatgccctcagggaacctccagattgtgaatgccagccaggaggacgagggcatgtacaagtgtgcagcctacaacccagtgacccaggaagtgaaaacctccggctccagcgacaggctacgtgtgcgccgctccaccgctgaggctgcccgcatcatctaccccccagaggcccaaaccatcatcgtcaccaaaggccagagtctcattctggagtgtgtggccagtggaatcccacccccacgggtcacctgggccaaggatgggtccagtgtcaccggctacaacaagacgcgcttcctgctgagcaacctcctcatcgacaccaccagcgaggaggactcaggcacctaccgctgcatggccgacaatggggttgggcagcccggggcagcggtcatcctctacaatgtccaggtgtttgaaccccctgaggtcaccatggagctatcccagctggtcatcccctggggccagagtgccaagcttacctgtgaggtgcgtgggaaccccccgccctccgtgctgtggctgaggaatgctgtgcccctcatctccagccagcgcctccggctctcccgcagggccctgcgcgtgctcagcatggggcctgaggacgaaggcgtctaccagtgcatggccgagaacgaggttgggagcgcccatgccgtagtccagctgcggacctccaggccaagcataaccccaaggctatggcaggatgctgagctggctactggcacacctcctgtatcaccctccaaactcggcaaccctgagcagatgctgagggggcaaccggcgctccccagacccccaacgtcagtggggcctgcttccccgcagtgtccaggagagaaggggcagggggctcccgccgaggctcccatcatcctcagctcgccccgcacctccaagacagactcatatgaactggtgtggcggcctcggcatgagggcagtggccgggcgccaatcctctactatgtggtgaaacaccgcaaggtcacaaattcctctgacgattggaccatctctggcattccagccaaccagcaccgcctgaccctcaccagacttgaccccgggagcttgtatgaagtggagatggcagcttacaactgtgcgggagagggccagacagccatggtcaccttccgaactggacggcggcccaaacccgagatcatggccagcaaagagcagcagatccagagagacgaccctggagccagtccccagagcagcagccagccagaccacggccgcctctcccccccagaagctcccgacaggcccaccatctccacggcctccgagacctcagtgtacgtgacctggattccccgtgggaatggtgggttcccaatccagtccttccgtgtggagtacaagaagctaaagaaagtgggagactggattctggccaccagcgccatccccccatcgcggctgtccgtggagatcacgggcctagagaaaggcacctcctacaagtttcgagtccgggctctgaacatgctgggggagagcgagcccagcgccccctctcggccctacgtggtgtcgggctacagcggtcgcgtgtacgagaggcccgtggcaggtccttatatcaccttcacggatgcggtcaatgagaccaccatcatgctcaagtggatgtacatcccagcaagtaacaacaacaccccaatccatggcttttatatctattatcgacccacagacagtgacaatgatagtgactacaagaaggatatggtggaaggggacaagtactggcactccatcagccacctgcagccagagacctcctacgacattaagatgcagtgcttcaatgaaggaggggagagcgagttcagcaacgtgatgatctgtgagaccaaagctcggaagtcttctggccagcctggtcgactgccacccccaactctggccccaccacagccgccccttcctgaaaccatagagcggccggtgggcactggggccatggtggctcgctccagcgacctgccctatctgattgtcggggtcgtcctgggctccatcgttctcatcatcgtcaccttcatccccttctgcttgtggagggcctggtctaagcaaaaacatacaacagacctgggttttcctcgaagtgcccttccaccctcctgcccgtatactatggtgccattgggaggactcccaggccaccaggccagtggacagccctacctcagtggcatcagtggacgggcctgtgctaatgggatccacatgaataggggctgcccctcggctgcagtgggctacccgggcatgaagccccagcagcactgcccaggcgagcttcagcagcagagtgacaccagcagcctgctgaggcagacccatcttggcaatggatatgacccccaaagtcaccagatcacgagctgctgcagccccatcacgactgctgccaacgccaggagcagcctgctgctgtgggccagtcaggggtgaggagagcccccgacagtcctgtcctggaagcagtgtgggaccctccatttcactcagggcccccatgctgcttgggccttgtgccagttgaagaggtggacagtcctgactcctgccaagtgagtggaggagactggtgtccccagcaccccgtaggggcctacgtaggacaggaacctggaatgcagctctccccggggccactggtgcgtgtgtcttttgaaacaccacctctcacaatttaggcagaagctgatatcccagaaagactatatattgtttttttttttaaaaaaaaaagaagaaaaaagagacagagaaaattggtatttatttttctattatagccatatttatatatttatgcacttgtaaataaatgtatatgttttataattctggagagacataaggagtcctacccgttgaggttggagagggaaaataaagaagctgccacctaacaggagtcacccaggaaagcaccgcacaggctggcgcgggacagactcctaacctggggcctctgcagtggcaggcgaggctgcaggaggcccacagataagctggcaagaggaaggatcccaggcacatggttcatcacgagcatgagggaacagcaaggggcacggtatcacagcctggagacacccacacagatggctggatccggtgctacgggaaacattttcctaagatgcccatgagaacagaccaagatgtgtacagcactatgagcattaaaaaaccttccagaatcaataatccgtggcaacatatctctgtaaaaacaaacactgtaacttctaaataaatgtttagtcttccctgtaaccttca

SEQ ID NO: 252011 - DNA, 4061 bp, Homo sapiens
cgcggccgctcgcccgtgttgtgtgtccccggtgtcaccgagcgtgttgtgtgtccgtgcggcgcggcgctgtgtggctccctcgcgcccaccacgctggcccccgggccccggctcgcccttcccaggcgccggctgcagcagagtttcagaacaagcttcctggaacccatgacccatgaagtcttgtcgacatttataccgtctgagggtagcagctcgaaagtagaagaaagtgttgccagggacggcagtatctctttgtgtgaccctggcggcttatgggacgttggcttcagacctttgtgatacaccatgctgcgtgggacgatgacggcgtggagaggaatgaggcctgaggtcacactggcttgcctcctcctagccacagcaggctgctttgctgacttgaacgaggtccctcaggtcaccgtccagcctgcgtccaccgtccagaagcccggaggcactgtgatcttgggctgcgtggtggaacctccaaggatgaatgtaacctggcgcctgaatggaaaggagctgaatggctcggatgatgctctgggtgtcctcatcacccacgggaccctcgtcatcactgcccttaacaaccacactgtgggacggtaccagtgtgtggcccggatgcctgcgggggctgtggccagcgtgccagccactgtgacactagccaatctccaggacttcaagttagatgtgcagcacgtgattgaagtggatgagggaaacacagcagtcattgcctgccacctgcctgagagccaccccaaagcccaggtccggtacagcgtcaaacaagagtggctggaggcctccagaggtaactacctgatcatgccctcagggaacctccagattgtgaatgccagccaggaggacgagggcatgtacaagtgtgcagcctacaacccagtgacccaggaagtgaaaacctccggctccagcgacaggctacgtgtgcgccgctccaccgctgaggctgcccgcatcatctaccccccagaggcccaaaccatcatcgtcaccaaaggccagagtctcattctggagtgtgtggccagtggaatcccacccccacgggtcacctgggccaaggatgggtccagtgtcaccggctacaacaagacgcgcttcctgctgagcaacctcctcatcgacaccaccagcgaggaggactcaggcacctaccgctgcatggccgacaatggggttgggcagcccggggcagcggtcatcctctacaatgtccaggtgtttgaaccccctgaggtcaccatggagctatcccagctggtcatcccctggggccagagtgccaagcttacctgtgaggtgcgtgggaaccccccgccctccgtgctgtggctgaggaatgctgtgcccctcatctccagccagcgcctccggctctcccgcagggccctgcgcgtgctcagcatggggcctgaggacgaaggcgtctaccagtgcatggccgagaacgaggttgggagcgcccatgccgtagtccagctgcggacctccaggccaagcataaccccaaggctatggcaggatgctgagctggctactggcacacctcctgtatcaccctccaaactcggcaaccctgagcagatgctgagggggcaaccggcgctccccagacccccaacgtcagtggggcctgcttccccgcagtgtccaggagagaaggggcagggggctcccgccgaggctcccatcatcctcagctcgccccgcacctccaagacagactcatatgaactggtgtggcggcctcggcatgagggcagtggccgggcgccaatcctctactatgtggtgaaacaccgcaaggtcacaaattcctctgacgattggaccatctctggcattccagccaaccagcaccgcctgaccctcaccagacttgaccccgggagcttgtatgaagtggagatggcagcttacaactgtgcgggagagggccagacagccatggtcaccttccgaactggacggcggcccaaacccgagatcatggccagcaaagagcagcagatccagagagacgaccctggagccagtccccagagcagcagccagccagaccacggccgcctctcccccccagaagctcccgacaggcccaccatctccacggcctccgagacctcagtgtacgtgacctggattccccgtgggaatggtgggttcccaatccagtccttccgtgtggagtacaagaagctaaagaaagtgggagactggattctggccaccagcgccatccccccatcgcggctgtccgtggagatcacgggcctagagaaaggcacctcctacaagtttcgagtccgggctctgaacatgctgggggagagcgagcccagcgccccctctcggccctacgtggtgtcgggctacagcggtcgcgtgtacgagaggcccgtggcaggtccttatatcaccttcacggatgcggtcaatgagaccaccatcatgctcaagtggatgtacatcccagcaagtaacaacaacaccccaatccatggcttttatatctattatcgacccacagacagtgacaatgatagtgactacaagaaggatatggtggaaggggacaagtactggcactccatcagccacctgcagccagagacctcctacgacattaagatgcagtgcttcaatgaaggaggggagagcgagttcagcaacgtgatgatctgtgagaccaaagctcggaagtcttctggccagcctggtcgactgccacccccaactctggccccaccacagccgccccttcctgaaaccatagagcggccggtgggcactggggccatggtggctcgctccagcgacctgccctatctgattgtcggggtcgtcctgggctccatcgttctcatcatcgtcaccttcatccccttctgcttgtggagggcctggtctaagcaaaaacatacaacagacctgggttttcctcgaagtgcccttccaccctcctgcccgtatactatggtgccattgggaggactcccaggccaccaggccagtggacagccctacctcagtggcatcagtggacgggcctgtgctaatgggatccacatgaataggggctgcccctcggctgcagtgggctacccgggcatgaagccccagcagcactgcccaggcgagcttcagcagcagagtgacaccagcagcctgctgaggcagacccatcttggcaatggatatgacccccaaagtcaccagatcacgagggcccccatgctgcttgggccttgtgccagttgaagaggtggacagtcctgactcctgccaagtgagtggaggagactggtgtccccagcaccccgtaggggcctacgtaggacaggaacctggaatgcagctctccccggggccactggtgcgtgtgtcttttgaaacaccacctctcacaatttaggcagaagctgatatcccagaaagactatatattgtttttttttttaaaaaaaaaagaagaaaaaagagacagagaaaattggtatttatttttctattatagccatatttatatatttatgcacttgtaaataaatgtatatgttttataattctggagagacataaggagtcctacccgttgaggttggagagggaaaataaagaagctgccacctaacaggagtcacccaggaaagcaccgcacaggctggcgcgggacagactcctaacctggggcctctgcagtggcaggcgaggctgcaggaggcccacagataagctggcaagaggaaggatcccaggcacatggttcatcacgagcatgagggaacagcaaggggcacggtatcacagcctggagacacccacacagatggctggatccggtgctacgggaaacattttcctaagatgcccatgagaacagaccaagatgtgtacagcactatgagcattaaaaaaccttccagaatcaataatccgtggcaacatatctctgtaaaaacaaacactgtaacttctaaataaatgtttagtcttccctgtaaccttca

SEQ ID NO: 252012 - DNA, 3771 bp, Homo sapiens
cgcggccgctcgcccgtgttgtgtgtccccggtgtcaccgagcgtgttgtgtgtccgtgcggcgcggcgctgtgtggctccctcgcgcccaccacgctggcccccgggccccggctcgcccttcccaggcgccggctgcagcagagtttcagaacaagcttcctggaacccatgacccatgaagtcttgtcgacatttataccgtctgagggtagcagctcgaaagtagaagaaagtgttgccagggacggcagtatctctttgtgtgaccctggcggcttatgggacgttggcttcagacctttgtgatacaccatgctgcgtgggacgatgacggcgtggagaggaatgaggcctgaggtcacactggcttgcctcctcctagccacagcaggctgctttgctgacttgaacgaggtccctcaggtcaccgtccagcctgcgtccaccgtccagaagcccggaggcactgtgatcttgggctgcgtggtggaacctccaaggatgaatgtaacctggcgcctgaatggaaaggagctgaatggctcggatgatgctctgggtgtcctcatcacccacgggaccctcgtcatcactgcccttaacaaccacactgtgggacggtaccagtgtgtggcccggatgcctgcgggggctgtggccagcgtgccagccactgtgacactagccaatctccaggacttcaagttagatgtgcagcacgtgattgaagtggatgagggaaacacagcagtcattgcctgccacctgcctgagagccaccccaaagcccaggtccggtacagcgtcaaacaagagtggctggaggcctccagaggtaactacctgatcatgccctcagggaacctccagattgtgaatgccagccaggaggacgagggcatgtacaagtgtgcagcctacaacccagtgacccaggaagtgaaaacctccggctccagcgacaggctacgtgtgcgccgctccaccgctgaggctgcccgcatcatctaccccccagaggcccaaaccatcatcgtcaccaaaggccagagtctcattctggagtgtgtggccagtggaatcccacccccacgggtcacctgggccaaggatgggtccagtgtcaccggctacaacaagacgcgcttcctgctgagcaacctcctcatcgacaccaccagcgaggaggactcaggcacctaccgctgcatggccgacaatggggttgggcagcccggggcagcggtcatcctctacaatgtccaggtgtttgaaccccctgaggtcaccatggagctatcccagctggtcatcccctggggccagagtgccaagcttacctgtgaggtgcgtgggaaccccccgccctccgtgctgtggctgaggaatgctgtgcccctcatctccagccagcgcctccggctctcccgcagggccctgcgcgtgctcagcatggggcctgaggacgaaggcgtctaccagtgcatggccgagaacgaggttgggagcgcccatgccgtagtccagctgcggacctccaggccaagcataaccccaaggctatggcaggatgctgagctggctactggcacacctcctgtatcaccctccaaactcggcaaccctgagcagatgctgagggggcaaccggcgctccccagacccccaacgtcagtggggcctgcttccccgcagtgtccaggagagaaggggcagggggctcccgccgaggctcccatcatcctcagctcgccccgcacctccaagacagactcatatgaactggtgtggcggcctcggcatgagggcagtggccgggcgccaatcctctactatgtggtgaaacaccgcaaggtcacaaattcctctgacgattggaccatctctggcattccagccaaccagcaccgcctgaccctcaccagacttgaccccgggagcttgtatgaagtggagatggcagcttacaactgtgcgggagagggccagacagccatggtcaccttccgaactggacggcggcccaaacccgagatcatggccagcaaagagcagcagatccagagagacgaccctggagccagtccccagagcagcagccagccagaccacggccgcctctcccccccagaagctcccgacaggcccaccatctccacggcctccgagacctcagtgtacgtgacctggattccccgtgggaatggtgggttcccaatccagtccttccgtgtggagtacaagaagctaaagaaagtgggagactggattctggccaccagcgccatccccccatcgcggctgtccgtggagatcacgggcctagagaaaggcacctcctacaagtttcgagtccgggctctgaacatgctgggggagagcgagcccagcgccccctctcggccctacgtggtgtcgggctacagcggtcgcgtgtacgagaggcccgtggcaggtccttatatcaccttcacggatgcggtcaatgagaccaccatcatgctcaagtggatgtacatcccagcaagtaacaacaacaccccaatccatggcttttatatctattatcgacccacagacagtgacaatgatagtgactacaagaaggatatggtggaaggggacaagtactggcactccatcagccacctgcagccagagacctcctacgacattaagatgcagtgcttcaatgaaggaggggagagcgagttcagcaacgtgatgatctgtgagaccaaagctcggaagtcttctggccagcctggtcgactgccacccccaactctggccccaccacagccgccccttcctgaaaccatagagcggccggtgggcactggggccatggtggctcgctccagcgacctgccctatctgattgtcggggtcgtcctgggctccatcgttctcatcatcgtcaccttcatccccttctgcttgtggagggcctggtctaagcaaaaacatacaacagacctgggttttcctcgaagtgcccttccaccctcctgcccgtatactatggtgccattgggaggactcccaggccaccaggccagtggacagccctacctcagtggcatcagtggacgggcctgtgctaatgggatccacatgaataggggctgcccctcggctgcagtgggctacccgggcatgaagccccagcagcactgcccaggcgagcttcagcagcagagtgacaccagcagcctgctgaggcagacccatcttggcaatggatatgacccccaaagtcaccagatcacgaggggtcccaagtctagcccggacgagggctctttcttatacacactgcccgacgactccactcaccagctgctgcagccccatcacgactgctgccaacgccaggagcagcctgctgctgtgggccagtcaggggtgaggagagcccccgacagtcctgtcctggaagcagtgtgggaccctccatttcactcagggcccccatgctgcttgggccttgtgccagttgaagaggtggacagtcctgactcctgccaagtgagtggaggagactggtgtccccagcaccccgtaggggcctacgtaggacaggaacctggaatgcagctctccccggggccactggtgcgtgtgtcttttgaaacaccacctctcacaatttaggcagaagctgatatcccagaaagactatatattgtttttttttttttttttttttttttttttttttttttttttttttttttttttttttttttttttatatttacaaaa

SEQ ID NO: 252013 - DNA, 4004 bp, Homo sapiens
cgcggccgctcgcccgtgttgtgtgtccccggtgtcaccgagcgtgttgtgtgtccgtgcggcgcggcgctgtgtggctccctcgcgcccaccacgctggcccccgggccccggctcgcccttcccaggcgccggctgcagcagagtttcagaacaagcttcctggaacccatgacccatgaagtcttgtcgacatttataccgtctgagggtagcagctcgaaagtagaagaaagtgttgccagggacggcagtatctctttgtgtgaccctggcggcttatgggacgttggcttcagacctttgtgatacaccatgctgcgtgggacgatgacggcgtggagaggaatgaggcctgaggtcacactggcttgcctcctcctagccacagcaggctgctttgctgacttgaacgaggtccctcaggtcaccgtccagcctgcgtccaccgtccagaagcccggaggcactgtgatcttgggctgcgtggtggaacctccaaggatgaatgtaacctggcgcctgaatggaaaggagctgaatggctcggatgatgctctgggtgtcctcatcacccacgggaccctcgtcatcactgcccttaacaaccacactgtgggacggtaccagtgtgtggcccggatgcctgcgggggctgtggccagcgtgccagccactgtgacactagccaatctccaggacttcaagttagatgtgcagcacgtgattgaagtggatgagggaaacacagcagtcattgcctgccacctgcctgagagccaccccaaagcccaggtccggtacagcgtcaaacaagagtggctggaggcctccagaggtaactacctgatcatgccctcagggaacctccagattgtgaatgccagccaggaggacgagggcatgtacaagtgtgcagcctacaacccagtgacccaggaagtgaaaacctccggctccagcgacaggctacgtgtgcgccgctccaccgctgaggctgcccgcatcatctaccccccagaggcccaaaccatcatcgtcaccaaaggccagagtctcattctggagtgtgtggccagtggaatcccacccccacgggtcacctgggccaaggatgggtccagtgtcaccggctacaacaagacgcgcttcctgctgagcaacctcctcatcgacaccaccagcgaggaggactcaggcacctaccgctgcatggccgacaatggggttgggcagcccggggcagcggtcatcctctacaatgtccaggtgtttgaaccccctgaggtcaccatggagctatcccagctggtcatcccctggggccagagtgccaagcttacctgtgaggtgcgtgggaaccccccgccctccgtgctgtggctgaggaatgctgtgcccctcatctccagccagcgcctccggctctcccgcagggccctgcgcgtgctcagcatggggcctgaggacgaaggcgtctaccagtgcatggccgagaacgaggttgggagcgcccatgccgtagtccagctgcggacctccaggccaagcataaccccaaggctatggcaggatgctgagctggctactggcacacctcctgtatcaccctccaaactcggcaaccctgagcagatgctgagggggcaaccggcgctccccagacccccaacgtcagtggggcctgcttccccgcagtgtccaggagagaaggggcagggggctcccgccgaggctcccatcatcctcagctcgccccgcacctccaagacagactcatatgaactggtgtggcggcctcggcatgagggcagtggccgggcgccaatcctctactatgtggtgaaacaccgcaaggtcacaaattcctctgacgattggaccatctctggcattccagccaaccagcaccgcctgaccctcaccagacttgaccccgggagcttgtatgaagtggagatggcagcttacaactgtgcgggagagggccagacagccatggtcaccttccgaactggacggcggcccaaacccgagatcatggccagcaaagagcagcagatccagagagacgaccctggagccagtccccagagcagcagccagccagaccacggccgcctctcccccccagaagctcccgacaggcccaccatctccacggcctccgagacctcagtgtacgtgacctggattccccgtgggaatggtgggttcccaatccagtccttccgtgtggagtacaagaagctaaagaaagtgggagactggattctggccaccagcgccatccccccatcgcggctgtccgtggagatcacgggcctagagaaaggcacctcctacaagtttcgagtccgggctctgaacatgctgggggagagcgagcccagcgccccctctcggccctacgtggtgtcgggctacagcggtcgcgtgtacgagaggcccgtggcaggtccttatatcaccttcacggatgcggtcaatgagaccaccatcatgctcaagtggatgtacatcccagcaagtaacaacaacaccccaatccatggcttttatatctattatcgacccacagacagtgacaatgatagtgactacaagaaggatatggtggaaggggacaagtactggcactccatcagccacctgcagccagagacctcctacgacattaagatgcagtgcttcaatgaaggaggggagagcgagttcagcaacgtgatgatctgtgagaccaaagctcggaagtcttctggccagcctggtcgactgccacccccaactctggccccaccacagccgccccttcctgaaaccatagagcggccggtgggcactggggccatggtggctcgctccagcgacctgccctatctgattgtcggggtcgtcctgggctccatcgttctcatcatcgtcaccttcatccccttctgcttgtggagggcctggtctaagcaaaaacatacaacagacctgggttttcctcgaagtgcccttccaccctcctgcccgtatactatggtgccattgggaggactcccaggccaccaggccagtggacagccctacctcagtggcatcagtggacgggcctgtgctaatgggatccacatgaataggggctgcccctcggctgcagtgggctacccgggcatgaagccccagcagcactgcccaggcgagcttcagcagcagagtgacaccagcagcctgctgaggcagacccatcttggcaatggatatgacccccaaagtcaccagatcacgaggggtcccaagtctagcccggacgagggctctttcttatacacactgcccgacgactccactcaccagctgctgcagccccatcacgactgctgccaacgccaggagcagcctgctgctgtgggccagtcaggggtgaggagagcccccgacagtcctgtcctggaagcagtgtgggaccctccatttcactcagggcccccatgctgcttgggccttgtgccagttgaagaggtggacagtcctgactcctgccaaagacataaggagtcctacccgttgaggttggagagggaaaataaagaagctgccacctaacaggagtcacccaggaaagcaccgcacaggctggcgcgggacagactcctaacctggggcctctgcagtggcaggcgaggctgcaggaggcccacagataagctggcaagaggaaggatcccaggcacatggttcatcacgagcatgagggaacagcaaggggcacggtatcacagcctggagacacccacacagatggctggatccggtgctacgggaaacattttcctaagatgcccatgagaacagaccaagatgtgtacagcactatgagcattaaaaaaccttccagaatcaataatccgtggcaacatatctctgtaaaaacaaacactgtaacttctaaataaatgtttagtcttccctgtaaccttcaaactgagtcatgtgtgagtcagcattttctttac

SEQ ID NO: 252014 - DNA, 1457 bp, Homo sapiens
cgcggccgctcgcccgtgttgtgtgtccccggtgtcaccgagcgtgttgtgtgtccgtgcggcgcggcgctgtgtggctccctcgcgcccaccacgctggcccccgggccccggctcgcccttcccaggcgccggctgcagcagagtttcagaacaagcttcctggaacccatgacccatgaagtcttgtcgacatttataccgtctgagggtagcagctcgaaagtagaagaaagtgttgccagggacggcagtatctctttgtgtgaccctggcggcttatgggacgttggcttcagacctttgtgatacaccatgctgcgtgggacgatgacggcgtggagaggaatgaggcctgaggtcacactggcttgcctcctcctagccacagcaggctgctttgctgacttgaacgaggtccctcaggtcaccgtccagcctgcgtccaccgtccagaagcccggaggcactgtgatcttgggctgcgtggtggaacctccaaggatgaatgtaacctggcgcctgaatggaaaggagctgaatggctcggatgatgctctgggtgtcctcatcacccacgggaccctcgtcatcactgcccttaacaaccacactgtgggacggtaccagtgtgtggcccggatgcctgcgggggctgtggccagcgtgccagccactgtgacactagccagtgagtctgctcctttgcctccctgccatggtgcggtccctcctcatctctcccaccctgaagcccccaccattcatgctgcctcttgttactcttagcataaaatgggccttaactgcagaaatgtcaaatcagaacagtagctgcctagtaatgcccagtgatgggggacccttgtgcccttggaaaacctcactccaagtagaggctgtatctggagtgagtgtctacagagaggggaattggtcagtgcatggcagaacttgacatggcagaactgttccgtgggccccagagcagggccgtgccgtgccttcctacttggtcatcctgtggctgtaggtgcactgtcccaactgctcacacaccttccagtcccctccctccattctcaccacagttacagtcggagcagggagagacaggacaccaagagacatgggcagggccacgtgtagtctggacagagcccacccggcccagacttggcctcctgtctctctgtgaggggcaagcatagtccgaaggcctggattataaatattagaacataatgaaaaggaaactgtgtggcaaagggataaagggatacagagaaaagaaacaaggaagagatgaggtgacagtttggaccaaggaaaatgccaagagaagacttcacactaccttttttttttctggttttgccattcttttattcatgttgttacactcagtataggatagtttattaaaatcattatgtctgtagacattcaaaaaaaaa

SEQ ID NO: 252015 - DNA, 2956 bp, Homo sapiens
cgcggccgctcgcccgtgttgtgtgtccccggtgtcaccgagcgtgttgtgtgtccgtgcggcgcggcgctgtgtggctccctcgcgcccaccacgctggcccccgggccccggctcgcccttcccaggcgccggctgcagcagagtttcagaacaagcttcctggaacccatgacccatgaagtcttgtcgacatttataccgtctgagggtagcagctcgaaagtagaagaaagtgttgccagggacggcagtatctctttgtgtgaccctggcggcttatgggacgttggcttcagacctttgtgatacaccatgctgcgtgggacgatgacggcgtggagaggaatgaggcctgaggtcacactggcttgcctcctcctagccacagcaggctgctttgctgacttgaacgaggtccctcaggtcaccgtccagcctgcgtccaccgtccagaagcccggaggcactgtgatcttgggctgcgtggtggaacctccaaggatgaatgtaacctggcgcctgaatggaaaggagctgaatggctcggatgatgctctgggtgtcctcatcacccacgggaccctcgtcatcactgcccttaacaaccacactgtgggacggtaccagtgtgtggcccggatgcctgcgggggctgtggccagcgtgccagccactgtgacactagccaatctccaggacttcaagttagatgtgcagcacgtgattgaagtggatgagggaaacacagcagtcattgcctgccacctgcctgagagccaccccaaagcccaggtccggtacagcgtcaaacaagagtggctggaggcctccagaggtaactacctgatcatgccctcagggaacctccagattgtgaatgccagccaggaggacgagggcatgtacaagtgtgcagcctacaacccagtgacccaggaagtgaaaacctccggctccagcgacaggctacgtgtgcgccgctccaccgctgaggctgcccgcatcatctaccccccagaggcccaaaccatcatcgtcaccaaaggccagagtctcattctggagtgtgtggccagtggaatcccacccccacgggtcacctgggccaaggatgggtccagtgtcaccggctacaacaagacgcgcttcctgctgagcaacctcctcatcgacaccaccagcgaggaggactcaggcacctaccgctgcatggccgacaatggggttgggcagcccggggcagcggtcatcctctacaatgtccaggtgtttgaaccccctgaggtcaccatggagctatcccagctggtcatcccctggggccagagtgccaagcttacctgtgaggtgcgtgggaaccccccgccctccgtgctgtggctgaggaatgctgtgcccctcatctccagccagcgcctccggctctcccgcagggccctgcgcgtgctcagcatggggcctgaggacgaaggcgtctaccagtgcatggccgagaacgaggttgggagcgcccatgccgtagtccagctgcggacctccaggccaagcataaccccaaggctatggcaggatgctgagctggctactggcacacctcctgtatcaccctccaaactcggcaaccctgagcagatgctgagggggcaaccggcgctccccagacccccaacgtcagtggggcctgcttccccgcagtgtccaggagagaaggggcagggggctcccgccgaggctcccatcatcctcagctcgccccgcacctccaagacagactcatatgaactggtgtggcggcctcggcatgagggcagtggccgggcgccaatcctctactatgtggtgaaacaccgcaaggtcacaaattcctctgacgattggaccatctctggcattccagccaaccagcaccgcctgaccctcaccagacttgaccccgggagcttgtatgaagtggagatggcagcttacaactgtgcgggagagggccagacagccatggtcaccttccgaactggacggcggcccaaacccgagatcatggccagcaaagagcagcagatccagagagacgaccctggagccagtccccagagcagcagccagccagaccacggccgcctctcccccccagaagctcccgacaggcccaccatctccacggcctccgagacctcagtgtacgtgacctggattccccgtgggaatggtgggttcccaatccagtccttccgtgtggagtacaagaagctaaagaaagtgggagactggattctggccaccagcgccatccccccatcgcggctgtccgtggagatcacgggcctagagaaaggcacctcctacaagtttcgagtccgggctctgaacatgctgggggagagcgagcccagcgccccctctcggccctacgtggtgtcgggctacagcggtcgcgtgtacgagaggcccgtggcaggtccttatatcaccttcacggatgcggtcaatgagaccaccatcatgctcaagtggatgtacatcccagcaagtaacaacaacaccccaatccatggcttttatatctattatcgacccacagacagtgacaatgatagtgactacaagaaggatatggtggaaggggacaagtactggcactccatcagccacctgcagccagagacctcctacgacattaagatgcagtgcttcaatgaaggaggggagagcgagttcagcaacgtgatgatctgtgagaccaaaggtgaagctctttgggttctctctcctgtcttggtgtttccagcgagggaaggcagagtcaccattccctgtgcctgtgcggtgctgggcctctttcccaggaagactctttgttttccaaataccctcagacttggtcatgtttcactctctactcatttgtctgtgcctaatactaaatagaccatgatgaccccttcaaaaaaaaaaa

SEQ ID NO: 252016 - DNA, 2812 bp, Homo sapiens
cgcggccgctcgcccgtgttgtgtgtccccggtgtcaccgagcgtgttgtgtgtccgtgcggcgcggcgctgtgtggctccctcgcgcccaccacgctggcccccgggccccggctcgcccttcccaggcgccggctgcagcagagtttcagaacaagcttcctggaacccatgacccatgaagtcttgtcgacatttataccgtctgagggtagcagctcgaaagtagaagaaagtgttgccagggacggcagtatctctttgtgtgaccctggcggcttatgggacgttggcttcagacctttgtgatacaccatgctgcgtgggacgatgacggcgtggagaggaatgaggcctgaggtcacactggcttgcctcctcctagccacagcaggctgctttgctgacttgaacgaggtccctcaggtcaccgtccagcctgcgtccaccgtccagaagcccggaggcactgtgatcttgggctgcgtggtggaacctccaaggatgaatgtaacctggcgcctgaatggaaaggagctgaatggctcggatgatgctctgggtgtcctcatcacccacgggaccctcgtcatcactgcccttaacaaccacactgtgggacggtaccagtgtgtggcccggatgcctgcgggggctgtggccagcgtgccagccactgtgacactagccaatctccaggacttcaagttagatgtgcagcacgtgattgaagtggatgagggaaacacagcagtcattgcctgccacctgcctgagagccaccccaaagcccaggtccggtacagcgtcaaacaagagtggctggaggcctccagaggtaactacctgatcatgccctcagggaacctccagattgtgaatgccagccaggaggacgagggcatgtacaagtgtgcagcctacaacccagtgacccaggaagtgaaaacctccggctccagcgacaggctacgtgtgcgccgctccaccgctgaggctgcccgcatcatctaccccccagaggcccaaaccatcatcgtcaccaaaggccagagtctcattctggagtgtgtggccagtggaatcccacccccacgggtcacctgggccaaggatgggtccagtgtcaccggctacaacaagacgcgcttcctgctgagcaacctcctcatcgacaccaccagcgaggaggactcaggcacctaccgctgcatggccgacaatggggttgggcagcccggggcagcggtcatcctctacaatgtccaggtgtttgaaccccctgaggtcaccatggagctatcccagctggtcatcccctggggccagagtgccaagcttacctgtgaggtgcgtgggaaccccccgccctccgtgctgtggctgaggaatgctgtgcccctcatctccagccagcgcctccggctctcccgcagggccctgcgcgtgctcagcatggggcctgaggacgaaggcgtctaccagtgcatggccgagaacgaggttgggagcgcccatgccgtagtccagctgcggacctccaggccaagcataaccccaaggctatggcaggatgctgagctggctactggcacacctcctgtatcaccctccaaactcggcaaccctgagcagatgctgagggggcaaccggcgctccccagacccccaacgtcagtggggcctgcttccccgcagtgtccaggagagaaggggcagggggctcccgccgaggctcccatcatcctcagctcgccccgcacctccaagacagactcatatgaactggtgtggcggcctcggcatgagggcagtggccgggcgccaatcctctactatgtggtgaaacaccgcaaggtcacaaattcctctgacgattggaccatctctggcattccagccaaccagcaccgcctgaccctcaccagacttgaccccgggagcttgtatgaagtggagatggcagcttacaactgtgcgggagagggccagacagccatggtcaccttccgaactggacggcggcccaaacccgagatcatggccagcaaagagcagcagatccagagagacgaccctggagccagtccccagagcagcagccagccagaccacggccgcctctcccccccagaagctcccgacaggcccaccatctccacggcctccgagacctcagtgtacgtgacctggattccccgtgggaatggtgggttcccaatccagtccttccgtgtggagtacaagaagctaaagaaagtgggagactggattctggccaccagcgccatccccccatcgcggctgtccgtggagatcacgggcctagagaaaggcacctcctacaagtttcgagtccgggctctgaacatgctgggggagagcgagcccagcgccccctctcggccctacgtggtgtcgggctacagcggtcgcgtgtacgagaggcccgtggcaggtccttatatcaccttcacggatgcggtcaatgagaccaccatcatgctcaagtggatgtacatcccagcaagtaacaacaacaccccaatccatgtcccaggcacatggttcatcacgagcatgagggaacagcaaggggcacggtatcacagcctggagacacccacacagatggctggatccggtgctacgggaaacattttcctaagatgcccatgagaacagaccaagatgtgtacagcactatgagcattaaaaaaccttccagaatcaataatccgtggcaacatatctctgtaaaaacaaacactgtaacttctaaataaatgtttagtcttccctgtaaccttca

SEQ ID NO: 252017 - DNA, 560 bp, Homo sapiens
gcagtagtgctgtactcaggggtccccgtgactgacaatcatgctcctctgaaccattgccctaataggcagttgttgcatttgcaattgcgatgccctttctgcctgagggcatggcttggcatctcggaatcctccgtcactagacagatcagaagcacccaccacaactgactttgcccatgggcccctggacacctgacttcacattctcccacatggagtaaaatggaaatggactagaatgatcagtgggaatgatggtgtggtacctcttgatgttcaaaggggagagcaatccttgccccatctgagctctcaccagctctgatgccctcagacagggagacagccagcagggggatggggcgacaggcccaccctgcccagccccacctccccatctgggcttgtgcactgcaggggtcccaagtctagcccggacgagggctctttcttatacacactgcccgacgactccactcaccagctgctgcagccccatcacgactgctgccaacgccaggagcagcctgctgctgtgggccagtcaggggtga

SEQ ID NO: 252018 - DNA, 441 bp, Homo sapiens
gcataaatcccacatgacgaagtgagtaagaggagagtgtaacagcaacaaaactttataatctgggaaaagggtagattatgtagtaactgaatcctaagatgccattgcccaaggcaggaagcaccacatttatattttagaacctttaaaaagttcagtcattataacactagctacttctgggaggtggagccttagaaaaggattggctgaaagttccttccctaatgcagcacagctggacagttaccccagccttgctctgggaaaagacctgctcctgggggcacatggagactttcaggtatggtggcaacatttgtgttagggaataaattatcttccttctcccattttacaaaatgaaggtatatctttcatctaacctttatcttgctaatctggagttgtaaaaaggtctggaagtcccactttaaa

SEQ ID NO: 252019 - DNA, 527 bp, Homo sapiens
aaataaacttcaaattttaatacaacaaattctatttgtggtataatctaaataatgctaatataatttagagaaaaacaaacgatttagtaacaaggcataaagagactttccttacacataacatgctaaatattactcgtttttaaatggtgccacttggtaacgaaaataccgtaactttatttgctttctttaaacttgccattctggaaatcagatttgtgttttaacagatttacacaagcagtccactgaagagtggagcaaaatttatcataaatctgatctcactttataaaactcatgatgaaaaattttccttttatatcatttcatgtaattttaaaactataaactactttcccagaaagatgaaatgtgcaacactctgaaatcacctaaattgatactgctattcttaaaacataaaatcaaataaatggtcattcatacagcaccaaaaatgtctttggaaaaaacaatactcatatccacttaccacccaaggttgcataaagaaaaaa

SEQ ID NO: 252020 - DNA, 490 bp, Homo sapiens
gcaattttttcttaacaaaatttgtaaaactgttggactgatttaactgtgtgtctatataactttggttaaaaaaataaatattaaaaaccaaattgattaaagacttaagagcatgaagtttggaaacagatctgggtttgtttgagtctttcttgccacttattaatggtgtgaccttgagcagtttatttaactacacctattttctcatctgaaacatgaggacattacttacacatttgttgtaaggattaaattatgtaattttttttttttttttttgagacggagtctcactctgtcgcccaggctggagtgcagaggcacaatctcgtctcactgcaacctccacctcctgggttcaagcaattctcctgcctcagccccctgagtagctgggactacaggcacgtgccaccacgcctggctaatttttatatttttttagtagagacggggtttcgccatgttggccaggctggtctca

SEQ ID NO: 252021 - DNA, 837 bp, Homo sapiens
gtctccaagaagagtcatctttatatctgaataaagcttatttgtaatgcatatattaagtggtgttatgtaaatcaatgcttttaagataatttaaaaactgcttgaaaataatatgcaaaatttgaccaaacatttccttgcaaatcttgttatagtcttaatttatttttgctggtttacttcacagataaatttagaattgaactttagtctagtagggacatgccattatctcatttccaattattggatctggattaatgagtgagtatgcccatggggctgaactatttagtattaagcagaaacatttttataccatgacactgagaaccaggttacaagtctagtattcctgtgacttttttaaacacagaagaaaaagtttcctagacaaggattatgcgatgtattttagtcaactttctcatcaaatgtgttgttgggagtcacgggagaccaggtaaaataatgtagatgactcagtgaaggatacttgttgctaagaggaaataaataaatataagatgatgagtgggtaagtcagaaataccttttctgtgtgggaaaaatatatgctattgttattactattcatttgtataataaaagtgcctgttaatgtttatctgtgtctttcttaaaagcaaattaaaattagttcagtaaatattatgtaaaatctgttattcctaaagtccttatttctgagaaactacatgaaaataccttataaaaatttttcatgtctcctatggtcatccaaatttatgtaaagataatagttttggtaattactctacaaagattaaaatttagttggtgatttaaatg

SEQ ID NO: 252022 - DNA, 430 bp, Homo sapiens
ctctcctgtgccctgtatacttccattctagcacccatagttctattgcagtttatttattttcaagttcatatcctggtttgaacacttatccattgtgtggccttagaaagttacttcacttacaagaacctcagtttccagctctatagaatgggattatagtaccaacttcaaagagcaccttcaacaaaacatatttaaagttaaatttaaatctttaggtagctcttaattttctaccagataaagtccaagcttcttaaaaaggcccttcaggcaaatagtcaacactcaagtggtaactgttagtctcttttactttctcctgagcaatctcatttttatgtgatggtctagtagactgttttgattgcaagacattacaattaaactagcctaatcaaaattacaattaaactggcttaat

SEQ ID NO: 252023 - DNA, 451 bp, Homo sapiens
aactgttcctcagtgtgccatcactgaattgactttcactgttccactcatactgttaggctgaacactgacattccatagcctacaactataaagatacctacctatgtgagtttaaaaagtgatctgcacaaaagaaataaaaaaactttatatcctcgtaagcttaacgaggaggaaggagtctctctcctccagaccctcattgaagatctcacctgaagatgtcaggcccaccctgaataatctcccttttgattaactcaaagcgaacagattaggggcttagttacatctgcaaaatcccttcaacttttccataggtatagattagaagcaagccacgggtcctgcctacactccaagggagaggagattacacctggcatttatccagggcaagaagctaaggggtcatctcagaattctgccttccaaatagatcctcggt

SEQ ID NO: 252024 - DNA, 412 bp, Homo sapiens
cctttccaaatactaaagtgcttaaaatctcatttattctctgataaaagaatttgcactttgggaggctgaggcaggaggatcccttgagcccaggagttcaaggccacagtgagctgcaattgcatcacagcaatccagcctgggtgatggagcaagagcttgtctctaaaaaaataataaaataaagtgtattaaggttaatgcttctgtactaagatagcagtttcaagtgtcaaaaccatacaccatcaaaagcaaattttcctcttaatcattctgataaacggtccattaagtgggatctcacatgaaacagattcacaaggtaagtgtgacaaagcccaggttgcataatataggctatgtttattaaataaacagcattattagcctagaaaatgctagtgta

SEQ ID NO: 252025 - DNA, 668 bp, Homo sapiens
ttttgctttatagcaccattttctacaaacgttattttttctggtaattaacaatttaccccctttctcacaaacttagaaagtgagggagttgtgtacatataaaaatgtgttatttttaactgtatcccacagagtccccagattttgaagaatctctgatgggtcactagaggtggggaaaaggcagcaggagcctggcagggaactgactccaactccctctattctctccacaccttgaatgaaagaagcttcatttttaacttttacattttgggcatgatgcaagtcttcctatgacctcttccagcttccagcatagttctatgcttagcaaaacacttgcttgtattaaatgcttgctttgcattttagccaagaactttaccctcattttacctgtgtagagatcatcctttgaagaagccaagaagaagaatttactcaaggataaatgattttcatttttttcctcttatggcatttgatgtaatttagaagttttcaagtcatagttaaactgctttttggttactcatgctctagtaccctactactaaagtaggatttgtgggtaaaaaaatcaaatcagttaggaaagtgctgaacattatattctacacaactttcccaaaggattcacagtgtactttagcatgtaaaat

SEQ ID NO: 252026 - DNA, 659 bp, Homo sapiens
ctgggacacgagtcagcagcactggccttctttcccagcaagaaatcagccagtgtggctgctcactgtcatcttagggctggacttggatccccagggtttgcatttggtgaatcatgccactaaatgcctattacttcttaaaaatcagaattctctccccaatgataatacttggtataatatttggtggtcttttctaatagttaccttccaaatgagaaaaaaaagccaaagtaattttttttaagtttgattcatcttgcctgtgtttgttagggtggagttgagtccaaatgtgagaaaatgtatcacatattggcatatgggaagtaattcaggcattcttgatgtagtagagaaattttagtactaataatctcatttattttcttcaatatttcttgaaaagtgcttattgactgtgggccatatgaaaacctaaactttcagactttatacttccaaattataatattatttcaagtggtggaaaaaaagtttatttaaaccagatgagcatcagcatttgatgacttatggacacttagtagctgcaccatcttgggcaagttacttaaccttttccaggtcccactttttaccctctgtaaaatagggctgataatattaccaactcacaaaatagttataaggat

SEQ ID NO: 252027 - DNA, 559 bp, Homo sapiens
attgttgcataatattttatgaagggggacaccaggtcattgaagcaatggatttggatgtaatctcccaggaaaaatcttgagttagaatagcagagggttgagagaaagtcccaggaaagacaaatatataaggagttgccagagttgaggaggtcctccaagagacccagagatacagaaagaaaattagaagccaatggagaagtttctagacagaaagaggagtcaagatagaaaattccacagaaaatccagggtaagaacagaaaatatttcttaagtggggtgatatggacattaagtcagagcagtgttagaacaggtaacttatcccagtttctatagccagaaagccacaaaaccagcaatagaactcagatccttgggaacattcttgaaacgatcttcaaccatggatgaagttggaggtggacactgttctgcagctctacagagaataagaagccaggtcttcaacattgtaatcaggatgattttgattgaataattcaaaagtatcttctgattttcatggttataaaaggttaaaatgaat

SEQ ID NO: 252028 - DNA, 458 bp, Homo sapiens
aagaaagaaagaaaaatgcttccaaaagacagaagacaaagaaagagaatgggggtttaggtgagaaagattgtctttgatggtagaataggcatctgaagggtaagtactagttataaatgttagccctggacagatgttaacaccagtaaagtttagttacagagtaaaacctcagtttgtttaactttatagaacaaatggagaggaagacagagaatcatttaagagtggactagagagatcagattttgaaatagctatatgcatgtgtttgtttttgagacagggttttgctatgcccagggtggttttgaactcctggagttcaaacctctggagtagctgagactacaggcatgtgtcactgcacctggctgaaataattatatgttttaaaagaaaactgttgctccttcctttggagctgtttagctagtaacagcagaaggaacttc

SEQ ID NO: 252029 - DNA, 426 bp, Homo sapiens
acaagaattacaagatagccccctttccatccttacacttttcagtataagaagctggtaatacaaataaaaagcacagtgtagggttgtttgagaaatgtctgtgtgggtggagtggatattagtggagggaggagagaggtgtatgttagaagctgataaagcaagttaaagatggctggtagctaaggattcagaatgttttagatagaaaggcctagataggatattttaatatttaattaaaggaacaaagaaaaagttttatctacttttcactgaagggaatgttggccaggctgggcatggtggctcacacctgtaatcccagaactttggtaggctgaggagggcagattgcttgcttgagcccaggagtttgagacaagcctgggtaacatggcgaaacactgtccctaaaaaaaa

SEQ ID NO: 252030 - DNA, 321 bp, Homo sapiens
atatagtatttatattttattatagttcattgtatagtatttcatttgaagaatttattatctctctttataattaagaacgtacagcttttatgaagaaatcatttctcttttccattgtaatttgtaccacatatatgtgcttaactatcattggtgaacctctaattttttggatggtaaagacattcaattttaaatcaatgataagaatggatctttggggtaggttttatttcattatgaattcttattttatgcttagtagaaagcaaatagaattgttgttagttaatgatgcacacaataaaattggagtga

SEQ ID NO: 252031 - DNA, 426 bp, Homo sapiens
actagataaatattttaaaatgttttgttaagtagaaatgatcaaaggggaaaaaaaagcccatttcaccatgccgaaaaccccactttacaattctatttccttcccttttatacttttacagcataatttcgtgcttgtatattaaacacattcataattagcactagcttctaaaggagaattgaaagactcattcagaacaatgaagggtactagcacaacttaattgtaacatcaggtattctttctaaggggctggccttgaggatctggtatgtctgtgaacagcacaggagctgggggactgggttgggatctacaagccctcaacctttgcagaccatgcaggaaagcttaaagttgaaggaaaaaaatgtttggaaattttggactcacaaattttcaagccactcccgtaccaga

SEQ ID NO: 252032 - DNA, 404 bp, Homo sapiens
agtgtttcatatcaacaatgaagctacagttgttcattgaccaatggtgaaagagctgaaatgattctgaatcaaggagatcgtggtaaatagtgatgataaagtctacattgtcatcagaaaaagtgcctgtagatgacatggtgaaaatgtgtgatggggcttttgaaggactagggcagaatgcattcataacaaaacaagaaatcgtgtcagtgtataaaatctaagaaaagacttctaagataaagccttgttaatgaggcagatgactttggaggaaatagtttaaaaaaaccattcactggaatgccttctcatccctaggtatttatttcctgatccctcaactgtttctgatgtttttttctcacctgaaaaaataaaatacaatgtacaataac

SEQ ID NO: 252033 - DNA, 472 bp, Homo sapiens
ctgatagtgaaatggctatttttggtttgaagcctgtcattacaacttattgttcactaatctgactctggaacttattttaagcccccttgtctcagttttatcatctgtaacattttcctaataataatatattgctcatgggataattttaagaataaaatcagtgaagattttttgtatatgaatttatttgcaattgtgtctcatagaatccctcagaatattaaccacttactgttccaagactaaaggatccaaagtaaaaattgctttaattaagtccatggctaatcaatatgcaggattattcagcagttatttgcccataatggtcaaataactgcacttgtttatatagatttcttagagcttattgtacacattcttgaaagtagtaggaatagaaatacaatcaattcatttgaattttcagttttggtggtaaattgaagtgacatgcaagtaaaaa

SEQ ID NO: 252034 - DNA, 447 bp, Homo sapiens
ccaaagctctttttctcacatgcaagaagaaatcagtgagtccacaagttaccagaaaacagctttgtatctataattgtgagaggctttgacagtttatgtgcaggaagttcccccaaaacagggatgctgaggcacagggtattaaaaacagatacaggaaggaccatgcaacttccttactcccactctccatgttctcaatcctcaagtctctgtgggacaggtctagaaatttcagagaagaaagatatttagatagtggcaatcctgacacatgaaataaaatgccatgaaatttgagggagagaggtagaaaatttaaggatgagaaaaatgaagaagaacctttggttgtgaagtatttttgtgattgtccatttaactgtttatctactgataacctgggaatcggaataagctatccattactgtcttttgaaaagc

SEQ ID NO: 252035 - DNA, 271 bp, Homo sapiens
actggacatcaagaggagcacatcagcggaggaacacacagggagaggaacacataggtggctggacattgagaggaacacactgacaggcaccagcatgctggtaggccactgactgacagaacaatgcagagtttggctggggcagctggaggacagtctgggccactgagcagcctgacttcaggggaaaaccatctcccttctgactctcccatctgctggtagctatttccactcaataaaaccttgcactcattctccaagccca

SEQ ID NO: 252036 - DNA, 466 bp, Homo sapiens
cgtaagcagcagctccgatcaattctcctttgcgaggtgaccaccaaaggactgcagagctggccgggcattcgtgcgtgttcatgaccgagaacttttcacacagagaggacttctgtcctgacgaaggagcgcagagctggccgggcattcgtgcgtgttcatgaccgagaacttttcacagctaggacttctgtcctgacgtctttattgtataatagttgcgtttaaggctgcagacttcaagtttatatttctctttatgtaacactctgttcattgttgattctagtttattgcattgtagctacaaagggcaggctctgctgcgttagttctgtgaagttccccatattgcctggtatgtggcctattttaaaactattccatgtgtatttaataagaattagcaattaagaattgttcattgtaacaattataacaatataattgtttaccttttgag

SEQ ID NO: 252037 - DNA, 161 bp, Homo sapiens
ttagaataaatttcaaattttctattatattagctttattatcagtgatagagggtacttacatggtcaagacccttagagtaagttaactcccaaggaaatgtagttagttccctttgaaatatttacaaataaatgttaatattcagcgtcaaatcata

SEQ ID NO: 252038 - DNA, 479 bp, Homo sapiens
  misc_feature (4)..(4): n is a, c, g, or t
accnggtggcgttcgctctagaactcccggatctcccgggctgctttaattcggcacgtatggcacagggaggggcctcccagagagtgctacaactggtgtctgctccagttggtagacatttgtggcaaaatgatggttaaatattttgaagattatccctgactgtgtctattttaggttagtttgtaagtaagggggctgacacttagaagttagtagtttctatattgagaaatgtgaaatgtgcaaagggctacccgcatatgacggtgattacttatcatgtatgagttgaggtatcctttttgtttggttcacaagacatctccattcatttcttctccagcctaagaatgctgtgtgctttgtacttgttttttaaattaagacgaattaaactatacaaagggaattggtaaatggattatggagtgttattacaatgaaatacagccattaaaatgatggatatgctg

SEQ ID NO: 252039 - DNA, 638 bp, Homo sapiens
tatagctgttctcgaggatccccgagattgaaatgtgttggaggggggtgtagggggtcggaggaaaaggttggggaacagctaaataggtcgttgttgatttggttacaaaatagtagggggatgatgctaataattaggctgtaggagaagtctggtaataagtagtcatgccaggattagtattattacttgtagtagtagcatcagtacttggagaaggagtagtcacaaaaggaacactattaccaaaagaagtagttgttatggaaatactattactagttatattaccagcagacattgtagctaaaagaaaatttgtcatagaagcatcattatttgtgctagcaacatcagtacttgtaggagaagtagttgccataataacagtagtgttcatagcattagtactttcagagaaagaagtggtcataatggaaaaactgttgctagtagtgtcaacaccagtatttgcaagagaaggaatagctgtaactggaacagtattattaggaacagtatcatcagtacttgtatgagaggtagcagttatattagcaacattagtactagtgctagcattagtagtatttgtttgaacaggagtacttatattattaatagtagtactagtg

SEQ ID NO: 252040 - DNA, 367 bp, Homo sapiens
acaaataatgatgcttctatgacaaattttcttttagctacaatgtctgctggttatataagcatcattatttgtgctagcaacatcagtacttgtaggagaagtagttgccataataacagtagtgttcatagcattagtactttcagagaaagaagtggtcataatggaaaaactgttgctagtagtgtcaacaccagtatttgcaagagaaggaatagctgtaactggaacagtattattaggaacagtatcatcagtacttgtatgagaggtagcagttatattagcaacattagtactagtgctagcattagtagtatttgtttgaacaggagtacttatattattaatagtagtactagtg

SEQ ID NO: 252041 - DNA, 537 bp, Homo sapiens
atacatatagtgaaaacataattcgtggggtttttttttccctgagttttgaatagtgctgaagtatataaaatagaaagtgtctctgtacccttacttccaagtctttcctgaggtgatggtcagtgcatcttcttctggacatttgtctatgcccttaaattcttttctaacctgcaacctgagatttttctaacaaagagatacctgtgcacctgaacatgccctttaagataatccttttagttaggcatggtggaatgcacctgtagtcaggaggtaggcaggagaatcacttgggcccaggagtttgaggttgcagtgagctatgatcatgccactgcactccagcctggatgacagctagaccctgcctcttaatttttttttttttaatttttaaaagttagaaaatgaccgggcatggtggctcacacctgtgatcccagcactttgggaggccaaggtggatggatcccttgagcccaggagttcaaaaccaggctgggcaacatggtgaaaccccctttatacaaa

SEQ ID NO: 252042 - DNA, 672 bp, Homo sapiens
gtacttaagggtgctgaaggaaatgattcgaggggatttggccggtcattttccgggggcaaaaattaatgtttacacccctggaatgctgtgggagggacaaaaagactcacgtatatgttctgtcaaatcggagaagtaaataatccattgggatgccaggatactttattctacagcgaagttaattttgtatccgtcgaggctacagtagaggttaaatggaaaccacccttgggaactggatgcctgtgtagctgttctaccatatcagtgtattgcaatgagtgggggaggagagcagctggatatcctgagtgttggaatcctagtgaaagaaagatggaaagtggtggaatcagctcaacaaccaaaacaagttctgaaaatggaagttgctgttttgaaaaagctgcaagacaggttctcattctgttgcttaggctggagtacagtggcacaatcatggctaactgcagtcttgaactcctgggctcaggcaatccttctgtctcagcctcttcagaagctgggacttcaggaggctgaggcaggagaatcacttgaacccgagaggcctgaggttgctgtgagccgagattgcgccattggactccagcctgggtaacagagtgagactctatctcaaaaataaataaagaaataaatttg

SEQ ID NO: 252043 - DNA, 1152 bp, Homo sapiens
agcgggagaataacgtcgggtcgggtcagcgggctctgcagtagtcgccgcagcggcgatgggagcggtggggacgaggcggcggcggcggcaggagggggagcaggtgctggcacaagagcagcggcttgggggagccggcagcagcagtaacagcagcagcagccgccgccgccgccgccagtaaacgcggaccgtaccccaggggactacccagccggccggccctggaagccgcgctcgggtcccgccgcagtcggcggtgggggatgggcaggcagtggcggtcccgcctgccgagggttaacccccgccggtcccggtcctgagctggaccagagccctcctccagaaacccctgcgtccgccacggcccaggttaaatggaaaccacccttgggaactggatgcctgtgtagctgttctaccatatcagtgtattgcaatgagtgggggaggagagcagctggatatcctgagtgttggaatcctagtgaaagaaagatggaaagtgttgagaaagattgggggtgggggctttggagaaatttacgatgccttggacatgctcaccagggaaaatgttgcactgaaggtggaatcagctcaacaaccaaaacaagttctgaaaatggaagttgctgttttgaaaaagctgcaagggaaagaccatgtttgtagatttattggctgtgggaggaatgatcgattcaactatgtggtcatgcagttgcagggtcggaatctggcagatcttcgccgtagccagtcccgaggcacattcaccattagtaccactctccggctgggtagacagattttggagtctattgaaagcattcattctgtgggattcttgcatcgagacatcaaaccgtcgaacttcgctatgggtcgctttcctagtacatgtaggaaatgttacatgcttgattttggcttggctcgacaatttaccaattcctgtggtgacgtcagaccacctcgagctgtggcaggttttcgagggacagttcgttatgcatcaatcaacgcacatcggaacagggaaatgggaagacatgatgacctttggtccttattctacatgttggtggagtttgtggttggtcagctgccctggagaaaaataaaggacaaggtaattttggg

SEQ ID NO: 252044 - DNA, 1047 bp, Homo sapiens
agcgggagaataacgtcgggtcgggtcagcgggctctgcagtagtcgccgcagcggcgatgggagcggtggggacgaggcggcggcggcggcaggagggggagcaggtgctggcacaagagcagcggcttgggggagccggcagcagcagtaacagcagcagcagccgccgccgccgccgccagtaaacgcggaccgtaccccaggggactacccagccggccggccctggaagccgcgctcgggtcccgccgcagtcggcggtgggggatgggcaggcagtggcggtcccgcctgccgagggttaacccccgccggtcccggtcctgagctggaccagagccctcctccagaaacccctgcgtccgccacggcccaggttaaatggaaaccacccttgggaactggatgcctgtgtagctgttctaccatatcagtgtattgcaatgagtgggggaggagagcagctggatatcctgagtgttggaatcctagtgaaagaaagatggaaagtgttgagaaagattgggggtgggggctttggagaaatttacgatgccttggacatgctcaccagggaaaatgttgcactgaaggtggaatcagctcaacaaccaaaacaagttctgaaaatggaagttgctgttttgaaaaagctgcaagggaaagaccatgtttgtagatttattggctgtgggaggaatgatcgattcaactatgtggtcatgcagttgcagggtcggaatctggcagatcttcgccgtagccagtcccgaggcacattcaccattagtaccactctccggctgggtagacagattttggagtctattgaaagcattcattctgtgggattcttgcatcgagacatcaaaccgcctcgagctgtggcaggttttcgagggacagttcgttatgcatcaatcaacgcacatcggaacagggaaatgggaagacatgatgacctttggtccttattctacatgttggtggagtttgtggttggtcagctgccctggagaaaaataaaggacaaggtaattttggg

SEQ ID NO: 252045 - DNA, 1016 bp, Homo sapiens
agcgggagaataacgtcgggtcgggtcagcgggctctgcagtagtcgccgcagcggcgatgggagcggtggggacgaggcggcggcggcggcaggagggggagcaggtgctggcacaagagcagcggcttgggggagccggcagcagcagtaacagcagcagcagccgccgccgccgccgccagtaaacgcggaccgtaccccaggggactacccagccggccggccctggaagccgcgctcgggtcccgccgcagtcggcggtgggggatgggcaggcagtggcggtcccgcctgccgagggttaacccccgccggtcccggtcctgagctggaccagagccctcctccagaaacccctgcgtccgccacggcccaggttaaatggaaaccacccttgggaactggatgcctgtgtagctgttctaccatatcagtgtattgcaatgagtgggggaggagagcagctggatatcctgagtgttggaatcctagtgaaagaaagatggaaagtgggaaaatgttgcactgaaggtggaatcagctcaacaaccaaaacaagttctgaaaatggaagttgctgttttgaaaaagctgcaagggtcggaatctggcagatcttcgccgtagccagtcccgaggcacattcaccattagtaccactctccggctgggtagacagattttggagtctattgaaagcattcattctgtgggattcttgcatcgagacatcaaaccgtcgaacttcgctatgggtcgctttcctagtacatgtaggaaatgttacatgcttgattttggcttggctcgacaatttaccaattcctgtggtgacgtcagaccacctcgagctgtggcaggttttcgagggacagttcgttatgcatcaatcaacgcacatcggaacagggaaatgggaagacatgatgacctttggtccttattctacatgttggtggagtttgtggttggtcagctgccctggagaaaaataaaggacaaggtaattttggg

SEQ ID NO: 252046 - DNA, 924 bp, Homo sapiens
agcgggagaataacgtcgggtcgggtcagcgggctctgcagtagtcgccgcagcggcgatgggagcggtggggacgaggcggcggcggcggcaggagggggactggaccagagccctcctccagaaacccctgcgtccgccacggcccaggttaaatggaaaccacccttgggaactggatgcctgtgtagctgttctaccatatcagtgtattgcaatgagtgggggaggagagcagctggatatcctgagtgttggaatcctagtgaaagaaagatggaaagtgttgagaaagattgggggtgggggctttggagaaatttacgatgccttggacatgctcaccagggaaaatgttgcactgaaggtggaatcagctcaacaaccaaaacaagttctgaaaatggaagttgctgttttgaaaaagctgcaagggaaagaccatgtttgtagatttattggctgtgggaggaatgatcgattcaactatgtggtcatgcagttgcagggtcggaatctggcagatcttcgccgtagccagtcccgaggcacattcaccattagtaccactctccggctgggtagacagattttggagtctattgaaagcattcattctgtgggattcttgcatcgagacatcaaaccgtcgaacttcgctatgggtcgctttcctagtacatgtaggaaatgttacatgcttgattttggcttggctcgacaatttaccaattcctgtggtgacgtcagaccacctcgagctgtggcaggttttcgagggacagttcgttatgcatcaatcaacgcacatcggaacagggaaatgggaagacatgatgacctttggtccttattctacatgttggtggagtttgtggttggtcagctgccctggagaaaaataaaggacaaggtaattttggg

SEQ ID NO: 252047 - DNA, 686 bp, Homo sapiens
gccaaaagctcactaataaagttctgatcacgtagagtgactgcctaagaattgaccaacttcagactaaattttctgaggacataccttcttgggtttctttctggcatgagagactattttattagattcttggattcaattatagtcaccagaaaaagcaaggttataacaaccacgctttgtgttccagagttgtcttagttaactcagtattcatttgaggttttatgttacaaatcccattaaatctttctcaaaatagcccttctctgaacatttgatggaagaatatttgcaggaaccaaaaccatttgatatatacaccggtatatgtcaggaaggatcgtgatacaggggtgccttttaaaagtgggttattatacgacagaattcttccaggtccctgactcttgtcttctgaaaaaaaaaaagtggagatcttcagaggactggataaagacagaatggatggggtgaattatgtaaagttaggatttagactgagggtttacagggctgcagtctcgttttgcctcaacagtcagacttgcccagggtctggcctaataccatacaaatgtcatatccacagtggcattgatacagtggtgggaatggggcatgggggtgatgagcatagcttcttgctgagtgctctggtccgggtgagcctgagatcttga

SEQ ID NO: 252048 - DNA, 3835 bp, Homo sapiens
gggggagaggaggggaaagctagacctgcagagtgaagaaagctggtaatagatgtctgacaaactaaagaaagacttgtgttaccacaattcagacagcccggaatatcaagattcatctttttcactaattgtggcattcacagatgcaaagtattgttcctgggtgtgtctgtgagagtattgccaaaggagagcagtgaactgggaaaagcagacccacctcaatgtgggtgggcaacatccaatcggctgccagctagaataaaccaggcaggagaagatggaagagccgacttgctgaatcttccagccttcatctttctcgtgtgctggatgcttcctgccctcaaacatcagactccaggttcttcgtcttttggactctcggatttacatcagtggtttaccaggtgctctcaggccttcagccacacactgaaggctgaattgtcggcttcccgacttttgagattttgaaacttggactgagctactgctggcttccttgcttctcaacttacagatgggacttcacctatagatcatcaaaggtggacttctgagtcatggacaaaccagaattcttgcccaccagtggtcccacgacttgatttgggaagccttgttgactctgatgatgaggatcagaacataatacctgaaaatttgccagcaccaacagacaaatgtaaactaaaatatcagcaatgtaaaactgaaattaaagagggctataagcagtatagtcagagaaatgcagaaaatacaaaatcaaatgttacacataaacagtctccaagaaacaagatagatgaaaagtgtgtgcaagatgaagaagccaacacagatgaccttacgactctggataggaaagccatcttacagcaaggttatgcagacaactcttgcgataaacaacagagggcaagaaaatttgatgcagtaagttgtcagcatttttacttatttggaaattgtggctgcagagaagaagaaacagattgttgcagagcaagtgatgatagaccacttatctagggctgtcatcagtgatccagagcaaaatttagccattgagcaaaaagaaagtgatcatatccttccagattcaaagatgacacctcttcgatttagaaaaagaacactacatgaaacaaagataagaactcattctacattaactgaaaatgtgctttctcataaattacagtttgatggtaggatcgtatcacgtaatggacgtgatgcttgcagagagctcattgggttctttttcactcatgaccaatcccttacaatttatgaatatcgacaatttgggaaaaatagaacaaatgtgcttccttttattcaaaaaagcatttatagtcatcagtgtggacgaagaaaaggaaaacaataccgacttggtgatttttatgttggtgcaaccttgacatttttgagttctgatcatctcagccttccagaaagcatcaaagaaaacacattacttaaactccgaatcacaaatattgatcaaatagctttggattctctcaaaactgcttctatggaacaggaggatgatataatcattcaagaaaccaatgataggctggtcttcaaagcaattcaagatgtgctaaaagaaaaactacataaaagaggtgttcgtattttgactggattgggaaaatattttcaacagttggacaaggaaggaaatggacttttagataaggcagattttaagcaagctctaaaagtgtttcacttagaagtgtctgaaaaggattttgagtctgcatggctaattctgaatgacaatggcaatggcaaggttgattatggagaattcaaacgtggtattattggtgaaatgaatgaatacaggaaatcatatgttcgaaaggcctttatgaaactggatttcaacaaaagtggcagtgtgcctattataaacataagaaaatgttactgtgcaaagaagcattctcaagtaatttcaggccattcaacagaggaagaaatcaaatcatcctttctagaaacattaaaagttgcctgcagcaagtctgatgaagtgtcatatggtgaatttgaagattactatgaaggtttaagtataggaatagtagatgatgaagactttgttaacatcttacgtactccatgggggatttagtctttaataatacatatgtcatcaacactaagcattttattggagagatgatatcaatgtaaaggatgatcaaacactggaatatattttcctaggacttcctttattctggtttcttgtttgtttgttttgttttgttttgttttctcaaaaatgttgaatttggaaagagaactatccagaaagatagatgtaggggtgtgttagtgtttgtgcatgtgtatgcctgttcacatgtccttacatttgtaaagatatctttttggtttattacttatcttgcgtatattttagaggtcattttttattaacttcagtaggaaagttacatctgcatcaaacaatatggcaacatctatttattaaccaagtttcctgtcctttcacattgttttttgctacctcttcctcagaatatatttgccaccatggtcaatttgataaattagaattgggcccaaagccagtgagataattcaatgtgtttttaacacatgaaaatattaaaggatatgcaagagaaatttttcaagcagtgtgattatagatgttttctgtatatagaatatttcaaatgatggaggtttaccccatgatgctcatttaaatactgacttgtcttttaaatctgtcttctaaattatgtactgttgttggttaaatagagcacaatgtagttattctaatgcccagttgtatttgttcttttattctgctttttaactgtaatcctttttaccagcatacgattgttattgagcaatatgaaagggaaatgttctttattaaaatcaatacattatcttattaaacaaagatcctaaaagtatattgttgcatatatgaatccaaggaatagttcagtaattattgcctaaaatgtgaaagcatattttgtatcctaaaatgaatgtatgatattctaaacatctgttttagtataacaaacaattgaaacatttccttctaaatatatgttatttaatagttacatgtattataatcattctttctaaattctttgctagtcatttcttcctgggaatacagagaaaagagacaactttatgagttgttttcaacttcataattttaaattttctatgttaatataacataaattagaaaaaataagtgattcaaaatgaaaatatttactttgtagaatatgactttagacatatcactgtatccatctatacttggcagcaacatgagaagtgtgatacatgtgaacccaacaaattcaaagttgcacttttcaagatgtgagaaggtactaaaacttaatactaaaacatgagagggaaaatatgtgtaaacctctagtgctattttcactggctaaattctttatttcttgatttttttaaaaattaggttattaaaattaaaacaatatgctagaagacattttggcagaaataagtctataacactatttttgtcacatatctttttcttggaaaaatttatccaactatagacatcttaaaccctacaaattgttcttgttaaaaatgactaatactgggggtgctcaatatgcatatagtgtttttcattgataatttttatttagttcttaagaaacctgttcttaatgttggcatgtcacatttttctgttactataatcagaaaatgtatagtctgttatactgta

SEQ ID NO: 252049 - DNA, 587 bp, Homo sapiens
acaggtaaaccccaatatcccagtggcttcataaggcagagtttatttcttcctttcatgaagtccactgaaggactacagctctgtaaggcagctttcctccaagctgtgacttggggatccacgctgctaaaattttgtagccacttcatttgaaacaactggctttcaggctgctggaggagaggaagagaaaaggaaaggggtatgtgcccactttctaaagttgccacttctgctcacacaacctcgcaaagccgcaaggagcctggagactgtgggggaagcacatgaccgtcgggccagtagtgcctgtttctgcacagagaaccctgggctggctgtgctgcttcagcaagcattgtgccttttctcttccgctcagcaaggcaaccaatttcccttttaccttgaacaggattcctgaatccaggccgacaaagtttcggggcaaagtccagacctgaacagaagcttcctgacacttagtccagcgccgtctttgacgctaaggaccacgctcaattgtccctcccaacaggatgtggaggagcagtcctggactctgaacggccacccagacattc

SEQ ID NO: 252050 - DNA, 429 bp, Homo sapiens
ggctccagccagttggcacatacctggctcagctctacaggaggaggggcaggaaagaagccaaatgtctctcacaataagaaaagcccatcatctgcaagatcattctcaggcacagggcaggctggatctcctcccaaattgcatgctccatgccaaagaggtcaagccaccaaatgacactgacttcctgcctttaagagctttatctctgcggacctggagctgctggtcaccatggaaacagaagcttttgttcaccacttcctcttctctttttctcgctccccacccctcgtctttccttcctctcctcacacccacttgccctcctctctactttctttcctctatttttattcctaattttctatctcacttgccctgatttcctcatctatttatttaaaacttatttaaattttatta

SEQ ID NO: 252051 - DNA, 377 bp, Homo sapiens
catctgtattgagttgagtagtgtccctccaaaggtatgtccacccagaacctcagaatgtgaccttatttggaaaaagggtctttgcagatataattaaggtaagagtttcaagatgagctcattctgaattagagagagctttagatccaatgatgagtgtctttatgagagacagagaaggagatgacacagaaacagacaagggcaaaggccatgcgaagttgaaggcagaaactggaatcatgcagccccaaccaagccaaggaacaccaagaattgccagcggccccagaagctaggaatgaggcatggaacagactctccctcagagcctccagaaagaacaaaccctgccagtaccttcaatttgcact

SEQ ID NO: 252052 - DNA, 316 bp, Homo sapiens
agaggcaaaaagaggcaaaacaaggaacataaaaatagagaatctacaaattagcatgttataattactctcttgcatagcatttaaggacatctttgaaaagattcaatgtcttcagcaactgtatctaactagcatgtactataactcaaattgacatgattcctaaagagaagcatcgggacaactcttctatagtgatgaggcattactgaacaatgtttttggttgataaacagtaatagaaatttgggattaaaatggccttttcaaaggagtaggtcattcctatgaaaataatagatacttaaattta

SEQ ID NO: 252053 - DNA, 1223 bp, Homo sapiens
atggagttttgctcttgttgcccaggccagagtacaatggcactatcttggctcacctcaacctccccctcccaggttcaagcaattctcccgcctcagccttcccgagtagatgggattacaggtatgcgccaccatgcctggctaattttgtatttttagtagagatggggtttctccatgttggtcaggctggtcttgaactcccgacctcaggtgatccgcccacctcagcctcccaaagtgctgggattacaggtgtgagtcaccacgcccagcctagagtagtcaaattcttaatgacagaaagtagaatagctgtcagaggccagaagaggggataatgggaagttactgtttaatgggtagaggtgtccaattgtgaatgatgagaaaagttctggagatcatggtgatgatggttgcacaacatgaatgtatttaatgccacagactgtacacgttaaaatggtaaatattgttaatgtatatctatatgccacacacacaaaaagttttaaattgccaaagttcccaaccagcagatctcatgctgttggccaatctgcagggtggcaggagctccattgactccttggggaaagtatcagaaggctgctggggatggcactgggaccccccctcctcctagtgacaaggaggcttcttcagaaataagaaaagctactcattaatgatcccacaaaaagtttgggaaccactggacaggatgaacatctgcaaggattaatgctcttattctcatgatctctggccaggccccacctaggagctaattcagtaggaaatttcattcgactcattggtttttgctttttttttttttttttttttttttttttcaaacagtaggtacatacacacagattaacagttcaaagatgctggtcatctccatgcacaccaagttcagagcagtctcctatgcaggggatggaggggactccgctggggtgggcccttgggacctttggctatgtgcctaatgctgctctacagcccagccacacgtgaatatctgcagtgcatggagttacctttagtacctgccagtctgctggtgtgaacggtgcctcactgtgagtaaatgtttcccatatccccggtgaggctgaacccctcaccacacattcactggccagtctggattcctcccctacatttttttgttcataccctttgcctatttcctactgtgctat

SEQ ID NO: 252054 - DNA, 1170 bp, Homo sapiens
atggagttttgctcttgttgcccaggccagagtacaatggcactatcttggctcacctcaacctccccctcccaggttcaagcaattctcccgcctcagccttcccgagtagatgggattacaggtatgcgccaccatgcctggctaattttgtatttttagtagagatggggtttctccatgttggtcaggctggtcttgaactcccgacctcaggtgatccgcccacctcagcctcccaaagtgctgggattacaggtgtgagtcaccacgcccagcctagagtagtcaaattcttaatgacagaaagtagaatagctgtcagaggccagaagaggggataatgggaagttactgtttaatgggtagaggtgtccaattgtgaatgatgagaaaagttctggagatcatggtgatgatggttgcacaacatgaatgtatttaatgccacagactgtacacttttaaattgccaaagttcccaaccagcagatctcatgctgttggccaatctgcagggtggcaggagctccattgactccttggggaaagtatcagaaggctgctggggatggcactgggaccccccctcctcctagtgacaaggaggcttcttcagaaataagaaaagctactcattaatgatcccacaaaaagtttgggaaccactggacaggatgaacatctgcaaggattaatgctcttattctcatgatctctggccaggccccacctaggagctaattcagtaggaaatttcattcgactcattggtttttgctttttttttttttttttttttttttttttcaaacagtaggtacatacacacagattaacagttcaaagatgctggtcatctccatgcacaccaagttcagagcagtctcctatgcaggggatggaggggactccgctggggtgggcccttgggacctttggctatgtgcctaatgctgctctacagcccagccacacgtgaatatctgcagtgcatggagttacctttagtacctgccagtctgctggtgtgaacggtgcctcactgtgagtaaatgtttcccatatccccggtgaggctgaacccctcaccacacattcactggccagtctggattcctcccctacatttttttgttcataccctttgcctatttcctactgtgctat

SEQ ID NO: 252055 - DNA, 484 bp, Homo sapiens
catgtgtctagtgttttaggaacatgaattcaaccatacctgtgtgtgctattcaccatgtggcatcagagatgaatgaggcagaatccctgctcctaaaacacttttcatctaggaggaagatttttgttttaatggtatcaatagatttattaaagttaaaacgtgataaaggctatagtagatgattgaatgatgcagttttgaacacttagaagagagagaagttgcttttggatgaggatcagaggcatttcattgagaaaggaatatattttgcaggtcctgggaggttggctagaatttccatagcagagattggcgttaaggaaaggatcgaaacccagacaaaggaaaatggaggagggaaaccagggcatgcttgtaaaatggtaattattcgactcattaaaggtcgttagaaaaactctgacccttggagagcgagaccatcctggctaacacagtgaaaccctgtctctac

SEQ ID NO: 252056 - DNA, 437 bp, Homo sapiens
gggattacaggcgtgagccacgcgccagcccacttacctgaaattcttatctgaatgtttgattaacatagttgtccctgttttgagggaacaaatatagacacctgtcaaacgaagacataactagttgtttacagtatttgagatgtgtgaaatttcaaaacaaactcactttaaattttttatagtattgatttgatatgtataatgaaaatgcattaaaacttgtacattaggagatcttagtacaatttacaactgttaatttaacatgtatgtgtaatattatgttacccattcaatatgtaatggagacttaatgagtatttcttttttatgtataatcttaaacagtaatacaacctggctatctagatgaaatcagaaatgaatgtagtttataaaggttgtgttgtgaggcatgctcctcttgcttt

SEQ ID NO: 252057 - DNA, 451 bp, Homo sapiens
gcagcagggtctcactctattacctaggctggagtgcagtggcgcgagcatagctcactacaccctcaaactcccagctcaagtaatcctcccgccttggcctcccaaagtgctgggattataggcatgagccactgtgctcagcccacagaaactttcataatatgtatatgtagctgattacatgtatttttgatagtactatcaaatttctataaatttcaattttttttttctgaaaatacgagaggcacacgtccctataaactacattgctaatagggaataatataacctttaatatctctgtcctgtggtaaaatgcaaactcaatttaacacaagaggcatgaattgaatgcctaccatatacaaggtactgttctctggtaaaagcagtcaaaaagagcaaaggaaaaagaaaattaaattgaatcttcttttttctgtgt

SEQ ID NO: 252058 - DNA, 714 bp, Homo sapiens
aagcattccttccaccacaacctcccaaatagcccagctaacttttaaaaaaatttttgtagagttagaatcttactgtgttgcccagtctggtcttgaactcttggcctcaaggaatcctccttccttggcctcccaaaacactgtgattacaggtgtgagccactgtgtttggccatatgctgatattcttcatggtatcatacacgtctttcaggctctgttcgttttttggttttctttctgtttctcagactgtatgtcaactgatcaatcttagagttcacagattctttgttttgctagcttacatctgctgttgagcccctttattgaatttttatttcagttactgtgcttttcaactgtagaatttcaatttggttcttttaataatttctatccctttattgatgttctctatttggttaagctgtaattctctttagttctttaaacatggtttcttttagttctttgaacatatttaagatagctgagttgaagtctttgttcaaaatgtacagtgccttagggataatttctactgaatgcttttttctctatgtatgggtcatactttgctctgcatgtctcattttttttgttgttgaagaatttaaaagtttgttattcttaccgtgttttgtacttgttgtctagtgacttttctgaactgattttgtaatgcttgtattctttgccatttgtggc

SEQ ID NO: 252059 - DNA, 423 bp, Homo sapiens
caccttgcttccctggtctttgcctagtggctggcaatgtttacaagtgtaccttactttatatcaacatgaatttgtgaaaaagctgtatgtcaatggattttttaaaaattaaaaatgtattttgaatgaccctaagggagctggctctttaaaagcatcctaaggtaaagattttttttaaatgaagaatctttttataaagcaatgaacaatctctgattttataaatcttaattttcctatgggttttcttaaagtgaaatacaattataagaatacattttaagggtaacattaacaacctagaacccagtttgggttactaaaaataaaatgtcagtattatcaattgataactaccacagttttatactctgcaagtgtgtactgcatgatggttaaggaaaaacaaatttattt

SEQ ID NO: 252060 - DNA, 490 bp, Homo sapiens
aaattcagaacgatgcttcaaagtttatattggtggtttgaagtaattatttcatggaaaattgaaaatgcctcattaaaaactgatttcctcccctgcctgattttcttattttattgaatccatatgttgatcccaatggcaacaaaccacacttcaaatttcaaatgatgtgagcaattttgccgtccattcctttgtttctttgaatgatgaaaagatttttattttttttcaattcaatttctaagcctatttcttaagcaactaagctgaggctttaaaaatgtccatagatgaggtcaggagatcgaggccatcctggctaacacagtgaaaccccatctctactaaaaaaatacaaaaaattagccgggcttggtggcaggtgcctgtagtcccagctactcgggaggctgaggcaggggtatggcatgaacctggactgcactccagcctaggtgacagagcgagactcagtatcaaaaaa

SEQ ID NO: 252061 - DNA, 435 bp, Homo sapiens
tctcttttctgatctttgaaaaaaaagatctaccaatgaaattaagggaggctcactacagtctttagactgcgtctgatactcgtaatactaatcacattaacagtgctgtagagagataagaaatagcactaatgccagctaagtgtgtttttagaaaaatcaaccacagcaaccccaaatgtttcctggtctccagagcagctgttggcagaggcggtttgaatgggattccttgtagccaagagaccttataggaggtctgtagagatgagtcatgtgtgagcttgcagaaaaatgtctcccaaagtagcccggattggagattgccttgagtgccaggctgggtcttacctcaggccagctgagcgtgttccccatggccaggataagatcacgctctggaaagaggagaggcctgacaacccaccgcct

SEQ ID NO: 252062 - DNA, 324 bp, Homo sapiens
tctcttttctgatctttgaaaaaaaagatctaccaatgaaattaagggaggctcactacagtctttagactgcgtctgatactcgtaatactaatcacattaacagtgctgtagagagataagaaatagcactaatgccagctaagtgtgtttttagaaaaatcaaccacagcaaccccaaatgtttcctggtctccagagcagctgttggcagaggcggtttgaatgggattccttgtagccaagagaccttataggaggtctaatgatgatgatgatgatggaaggcacagctgctttccacaaagtgtccccggatcttgg

SEQ ID NO: 252063 - DNA, 559 bp, Homo sapiens
  misc_feature (105)..(105): n is a, c, g, or t
tcggctcggtacgccgtcagacgctgaactatgtgaatattctttttcttgtatttcctgaggggtgccagggcctgggatccagcgaacatctctgcttcatcngccccaggctgcccagcctctgccagtcttgtgggggaaagggggtgacagtgtctctctgtggaccagcctgggtaacctagggagacctcgtctctaccaaaagcacacacaatttagccggtgtgggtgtgtgcatctgtggtcccagctacttgggaggctgaggtggggggatcgcttgagcctgggaggtggaagttccagagtcaagatcacactactgcactctagcctggacaacagagtgagactctttctctcaaaaaacaaaaaacaaacaaacaaacaaaaccccaggccccacaccccgtgatttttacctaattgcctgggtcatttttatgtggagccaagttccagaaccactggtatcgaaggttttggagggcatcagatgagctaattagttgatacacatagttcagcgtctgacggcacacagacacttgcg

SEQ ID NO: 252064 - DNA, 370 bp, Homo sapiens
agctttcatgcatatatgggcaattggggcatctgtgatgaagtgctgttgacagaagtatggcccgtggtaacatgattgctataataaggaaccatgaagagcctttcacctctagccatgattctgagaacttcccagccatgtggaactatccatctacaagtatattttttcattacaaataattcaagaaaaagaaatcattgaagataaatgaaacattgtattacattttatgccaggtattttgccaaaaaaattgtttaaaaagaagccagtttaattagaaatatgaagtaactattgaattgttctatttgcaatgaaataaattgtaatcatgcaggaaaaatttccttagaacaaa

SEQ ID NO: 252065 - DNA, 480 bp, Homo sapiens
gaattctcagtttctttttaaagaattttagatcttccacttccctctggggcttccatataaaagcacacacacgcaggtctgaatgcttaacattgctcctttccttggaaatacattcagaagaaaccttctgaaggttttctatcatagtggtgcccagaagcaacatctatgtgtctggcctcagttgtcaaccatgttcctacgagaagtgtcctcagaaaatattctcagctgggtgagcctctgaagtaccatttccttttttttaatgggctgatttttcttaactgaaaatccactaccataagaatctcttgattcacagctccattggccacaccatgttctacctccagttatttctagaccaaattcttctaagttttgaatgaaccaaaatacttagtttagacaaagtatgagtacaatcaggcaccctgaatatcaatggcttggaatcactgtgctagtaaa

SEQ ID NO: 252066 - DNA, 459 bp, Homo sapiens
catgccccagccttctagtctatctccaataaccgggtttatcctctgctatagccaatttccttcctaatctgaatctctttagctggatatttgctaacacttgtcacactttcccgatattctgcctaatgaaacttactatcgacttgcttccatataaataattatcaactgatttataaataatacaagacaaataacaattattaatattatcatttgttaataaagagttacaggtcaggcacatttaaatatgtgttttgtttaactttcacaatactgcaaggctgattttataatcggtattttctgggttcaatttctttattctttactactatttttattccaggctctcagctcagaagtaacctgcccaagatatcccagacagctgggagatgccaggattccccagatgctgctattcatgctcttctatgtcacattgtt

SEQ ID NO: 252067 - DNA, 499 bp, Homo sapiens
gtggcaatacctgttagtgtaaaattccaaccctgatgacctccttcctcttttgtccagaatctcttctggcctgctcatcccctgatgctatacttcaataagaggcatctgttggccattttaaacatttcttcttgaattaaggtcaaaccattattattcccatctgggtagctttgtactttttttgattcctacagccacctccccacagccccatcttcctcaccccatcacgtacattggcagttcagagaaaaaaaaaagcagaacctttctgttctatcatgtgctccagatcagtgcttccaagggtcccattcttttctgcccaaactaattcttcattggagatcaaagaaacatattctcttcatttatgatagggaaatgcccctatagtgcattaaattcatcctgtattttcccatataaacaagaagagactttacattttttagataaaggttcttatcttttgcatgtattgaacaca

SEQ ID NO: 252068 - DNA, 486 bp, Homo sapiens
agatggacatgttccagtcacaggcatagagaaagttctctgtttggtgcccatcaacttaagtccttccttatacctggcagtgtcaccatctttcacagtcacagattctgccactttggccaggcgtctcattagtcccacccctcatcacaaaagagtctactggggacaggtcagcacaaacccaccaacgtgaccagaagcataactcacagaacctatcctgctggcagaggggagcaagggcaccaaggacagcctcatcccctggagaaatgtcctcatttgccaggatgcctcattggctgcttgaattggttggactcaggaagtctattagctctgagtccagagctgttgtttgagactcaagatgaaaaaggaggcaatttctacatttatctaatgcacagctaagagtggaggttgggtgaacctgatttcaaaagcaaactgagtattaaatttcaccactttttaaag

SEQ ID NO: 252069 - DNA, 714 bp, Homo sapiens
cgtgtttcaattattagtgttttccctgtggcccattcatgtggataagagacatctctgcattattatcttgtcagaaatacagcccctttcccttcccctcatctgattaggcatgcttctctttggaagcctcatcccatttggctaatgcatcttgacaactcctttaataagagtgcttggtgttcgcattcaaggatgtgtaggagttgacagaaatctaccttgtaatctttccatggcttgaaaataaaacccagggagacctagcacccgcatctctcaactcaaaaatggcgagaaagcttgaggggagagggatggccattgatttaacagaaacagttttatttgtttgtggtttttttcccttccttctgtgtgaaaaagctagcagagggagggaaaatttgggaagcagaaaatgtttcaatctacataaaaaagaggaaaataataacccaacaatgagaagagccaagagaatatgagaaggcagcctctttttgaaatagattaaaggctttattgcaagaacatcgtaggacaaaggtgtctctgcaggactgggaacttcagcaaagcacataaaacctcattctcagacttaaagacagccctggaagaggcagtccacaaagcagtgtgtgcctaggcacctattctaaattcaggagagctctgcagtcatttcctttgggggtgaggctt

SEQ ID NO: 252070 - DNA, 138 bp, Homo sapiens
ggtgggtggatcacttaagcccaagaatctgagatcagcctgggcaacatggcgaaatcccatctctagcgctgccccccacccccaacccctgccaaaaaattagccaggcatggtggtatgtgactgtagtcccag

SEQ ID NO: 252071 - DNA, 363 bp, Homo sapiens
cccgtctcttctaaagctacaaaaaattagctgagcatggtggcaggcgcctgtggtcccagctactcgggaggatatgtgtaggttatatgcaaaaaccacagcactttataaaaggtatttcagcatctgtgaatattggtatctgcaggggccctagcaccaatcccctgtgcatactgagggacaactataaacccagtaacaattttaacaatgaaatactcacttgcctcacctgttttttaaacaaacacatttacattatagctcaatggagcagacccttttctttttctgggatctcaaagattaaatgaaaagaaatagatcatactcaataggccgcatccccaggggggt

SEQ ID NO: 252072 - DNA, 161 bp, Homo sapiens
gtaaacactcattacctcttatatccaggcctagttgagggtgctggggatacaggtataaacatgacagttctcttgaggagcacagagtggttgtgggaaacagacatacagacacacagtttctttctttcttttttctttttttttttttttttgag

SEQ ID NO: 252073 - DNA, 700 bp, Homo sapiens
ggaaccctgtagtccaggaaccaggtctatttttccaagacggctttttaaagcattgactccataaagtcaaacttagttgttaaaatattggtcatatctgattcaaggcacatcagtctcaaatatgacaatttagtcaaagccttcataatataacctatgtttccaattatttcttgtttcaaggggaagagatttttattaaacttacgcaaatagctgtattgccatgaaaataagaatactcaataagagtttctgaattctgcagggcttatagagagaaaaagatgaatgtttcatttttgtttacagacatataatctactaaattgctgtaagtatagagagtttaagagaaaagagaaaggggttccttatatccccagaaaatagaacattagagaactaacaatattccaaacaaaaaggccacaaaaattttaactcttcttcatcaattcatttagtcctatgcaattcatttttgttttgcttgatcttagcagtttaatgaacccctatctcctctattagttctggaaatcttaactcagtctagtggtataatcatcaagttacttaggtaatgtaattagaaacctgtacttctgagtacttgtcatatccctttccgtgggtcttgagagaggcccttttgttaaacatgaagcactttgcccagttgctgattgta

SEQ ID NO: 252074 - DNA, 333 bp, Homo sapiens
gctgtatgctttatgctgttctgacaagactagattaatttggggtatcatgtttcattgaagcacactagccgattaatatgcccagagaagatgacagaatgatgaagaaagggctagcacgtgaaagaagtattagatttgttttgcataattccagaggttagaactattcccaatcagtagaaattgtagggaggtagaacctctagagaggttaagaaagatgcaatgggcataagaaataattttctaataattagaactgtctggaaatgggaagaaagggtgcaacagcacagagctaagatttttgcccccaagagtcttgta

SEQ ID NO: 252075 - DNA, 1061 bp, Homo sapiens
gctttctgactccactcttcctactctggcttgctaatcaactttacctggtttgaaatgcccacccttatatacaggcaattatgtggattagaaattaaggatgaaacatcttcccaaaaggtcactgttaagatttacccatcatcttggtgctcctagctctctacgaccaacacagagtggctgacacttcaaccaggcagcttggattgcaatgaggacaatgcaatgcatttgggctggaaacactgcacagaatttaactgtatgaatgcactctagttcatctatgcggtggttaagagcgtaggctctgaagactgctagggttcaaatcccaggtctttcaacatcaactggctgtgaaacatgggcaagtgagtaaacgtttctgtgctttggtttcctcaccggtaaaatgtggataaaagcaattccttcacagggttgtttggaggagcaaatgactttatgtatgtgaggcacttagaataatctctcagtgttattatttaaccaacatttttgttgaatatttagttcatttccaggttttcactcttacaaatatactgtaattaacaaattcagtgcactcttaattgcttccaaagaaaatatctgtggtcacatttaaaaatcttttccagagtgaatcatgcactcaacacaaattgagtgtccatatgtacaaggcattatgttatgcacaaagaataaacacagttctcttcttgaagacacctaaaatgtagtaaggaagaggagagaaaaaggctcatgcaaatataagcaaaatactatgcagaaagagggcacacatgaagacctatgggagattctttagctggagaatcaaatcattcaatgacagagaaatgcagactccctcctctgctcccaccacctcccaaatccccaaatcggaattcacaatggtctccttttgtcatgttgagaatttgttacctcgaaagagcacacccagggctgtgttccaaagttaaaagctgggatatgggcgtatactgcaagaccaaatatttaggaaatacctt

SEQ ID NO: 252076 - DNA, 474 bp, Homo sapiens
cacagcaagaagaaaaagtccatgtaggactgaatcctgtggtacttctgcggtggcacttcttacacaagtgagaagcagcgacaccgtgacacctgcacgccggagccctgcgttagtgagaagcagcgacaccgtgacacctgcacgccggagccctgcgttagtgagaagcagcgacaccgtgacacctgcacgccggagccctgcgttaggctgggtaagggcggggacctgggcatcacacagtcttagatgtgggcctgcctccaacagctccctcctgggtgtgatgctgaagggggtccttgacacctctgaagtctcagtctcctcaaggtcacacccagcttataggattgtgcttctgtggattaaacaagacacagcagtcctcccttatccatggttctgttttccttggccaaaaatattaaatagaaaattccagaaataaacaatttatgttttaaa

SEQ ID NO: 252077 - DNA, 588 bp, Homo sapiens
tccaccaccctacagagttaagtttgaggttttccaactttgataagtcaccacttattcatctattttaaacctacactttattagctctttctttttcattatcaccataaagcatatgctctttgccctttgagtttattattttactaaaatttactggagattaagacagaagcagacattaatatgtgtacttaatattttatatttaaagaaatatataacatggatagaatttgaaagtgaaattattgagtaaaaaaaaatcaagttccaaaaaatgcacagatgacatcaccaattatgtaaatacatagatatttttaaaggagtggacaagtatacacatgtatctcagtattttcttatgaagatggtgtaggatgtgcgtaaaatggaaacaacaggaacactaatgttcactgtaatgttctactttgtttaaaaaatattctaaactaaaaaggtaaattattataatttttaaatttaatacagaggggtatgtatgtctatcataatattatttttaactttgtatatattttaagtatctcataatttaaaaggtaaaatttatcacgg

SEQ ID NO: 252078 - DNA, 397 bp, Homo sapiens
gtttgcagacagccatcttcttgtgtcctcacatggcagaaagagagtaagaggggttctcttataaggacattaatcccattcgtgagggctctacccttataacccaatcactcccaaaggccccacctccaaataccaccataaaccacggccaaaaaaaaaaaaaagtgacaaagaaggaaaaatatttttgcaactcatctagagatagaactgatttccctaatatttaaagagcttctccaaggcagaaaaagaccaacaatgcaataggggaaggcctttcaaagtatgacaaaaatccagaaaccacaaagggaaagtcataaaatgaattcaatgacacaaaaatcaaaaatttctgagcagcaaataccaccataaaccacggcca

SEQ ID NO: 252079 - DNA, 681 bp, Homo sapiens
atattaaaatatactacaaacgtactcatatatttgaattggcattaatgggcaagtcagtggcaccttatagagtccagaaataatctcaaatacatttgaaattttagtttacattaaggaagcatctcaaatcagtgtgataaaaaaggatgttcaataaatggtgctgggacaattaaatagccttctgggaaaaagaaagtttggtggttcatatttacaccaagataaatcctaaatggttccaaaacttacttgggaaaaaaatttaaccgtaaaagttctaaaaggattcaggagaaaattgtttataagttgggaaggcctttcaaagtatgacaaaaatccagaaaccacaaagggaaagtcataaaatgaattcaatgacacaaaaatcaaaaatttctgagcagcaaataccaccataaaccacggccaaaaaaaaaaaaaagtgacaaagaaggaaaaatatttttgcaactcatctagagatagaactgatttccctaatatttaaagagcttctccaaggcagaaaaagaccaacaatgcaataggggaaggcctttcaaagtatgacaaaaatccagaaaccacaaagggaaagtcataaaatgaattcaatgacacaaaaatcaaaaatttctgagcagcaaataccaccataaaccacggcca

SEQ ID NO: 252080 - DNA, 488 bp, Homo sapiens
ctccagggtgaacctaactcatgcccatcttcaaacttggtccagatatcctgaaggggaaggggaacctgcttcagagtgaagaaaccagtttgaagtgtgaccctgcttcaaccaacagaatgttgcagaagtgaagctacgccagttctgggcttaaacgtcaatcaggcctagcaacttctcttctgtctggatgaaggtagacacagcataagaactacctgtgaccatgatgctctgagaagccagcctaactatgtgcagaggccacatggaggaaaactgaggcctccagcccacagccccagctgaatttctagatgcaatcagcactaacctgccagctatgagtgaggccatctttgaagtggatccctcagccccactcaagccacccagatgatgccatatgaactgcccctgccgagccctgcccagattgcagaatcatgagaaaataaattaaaaaggctttgtttaagtca

SEQ ID NO: 252081 - DNA, 258 bp, Homo sapiens
ccaaagtgtctttataccaccaaatgagtccactagctcccaagtgatggctcttaaccagtcagaaatgactgaaatgacagacatagaattccgcatctgaatgatgaggaagttcattaagattcaggagaaaggtgaaacccaatccaaggaatccagtaaaataatccaagagttgaaagacaaaatagccatttttagaagaatcaaagtgaacttctagggctgaaaagttcactacaagaatttgataat

SEQ ID NO: 252082 - DNA, 224 bp, Homo sapiens
gaacttggctccacaccttcgtggctgcactggggaaggctgccccccaacctaggagcctatttcctcagctggaaacaggggaagcccacctccctcctccaaggccgctgtgaagactgaacaggtaccaaagtgaaggctcgggcctgcccccactgtcagggtgctgctgtgaccagggcacaatctcagcactgctatacgacacctgtctatcccgc

SEQ ID NO: 252083 - DNA, 200 bp, Homo sapiens
tatggaaggataaacaaagacatacttgaagaatgagcaaggagttaggagaaaagaatgttgtatcataaagatgaaaaaaaagtaacacctatttcaagatatttgaaaaaagaggtcaagaaagataaaaactgaaaaatatctgttggctctagtaacagcagaaagtgggttgaagaacgtttgaagaagtaaga

SEQ ID NO: 252084 - DNA, 456 bp, Homo sapiens
cactttcctgttttctcacagtgctccaatcacactggccttctttctggacttcaaacatgccaaatatactctccttgagggacatagcacttactgctacctttgtttggaatgttctttcccagatacccatgtggcacacccaaatgcttgagtggccccttattagtgaggccttcctatagcattatatataagatggatataaggtaggactcagaacatactccctatcctccttactctacttcacctgactccaaacactgtcaccacctgacgtagtacatattttattttttatttgtttagcatctgtctgcctctaactagaatgcaagctccatgaggacagagatttttgttttgtttaccgccatattgtcagcagctagagcaatgtctggcatgtagtagcactcaatgaatattaattgaataaatgagctacct

SEQ ID NO: 252085 - DNA, 461 bp, Homo sapiens
ctttatgtaatttacttctacggacaatcttacctagcaggtactattattattcttcccattttttcaggaaaatctgtaatacaggacccctccagttctaaaaccaaatgtctctgtgatttaaataaaagggttgagatcaagaggtttggagaatctctgtccacttgaggatatgatgctatttttacatttacttaagatttattcttaccagcttttgagagggtttgaaggggcttatagactagatggtgcttaagacatttaagaatcataaagaataaagatcacttggggaaaaaatgatggaagaaaggtctttaagcacccaatttctgagtcagaagattgattaaagctttccatctaaggcaaaacataaaaatataattaattaactaattactaaaaatattggagctttaagttatacacagaatctgttgttatttatt

SEQ ID NO: 252086 - DNA, 868 bp, Homo sapiens
gatttggcctcccaaagtgctgggattataggtgtgagccactgtgtccagccaaggaggctgtttgaactgcatgattgaaaacacatttgcaaaagtagttttagggtattttttaattgcctctggtttgaactgaatggaaaaatcttggctgatttcaatgtatagatcttcaaaagaagtttaaaaggatagtaagatctgttttaaatgtgcacgtgtgtctgaaggctggttaaggaaatcataacagggtttgggaccgattagccagccgttcttcagccccaaggtcctcaaaacactcagatttgaagatgatcccgtcttgttccgtggtctcgtccgctcctccacggtcattcttttcgaacctggccgccagtatgtgccctgagagtctatttctcttgtaaatcattgtaatattcttgactttggtttaaataaaaaaaaagaaagctgcatcaggcttaacctccatttctgtgagtttagaatgtcttacgagagtctgagtatgtagcttggaattttggttagttaacttttctcaggcttgaaataccttttcaaactcagctgagacagactaccctgtcacttcagttcattatggttaatattataaattgttaataaattctaagtcacagataggaacgtgtggctgaaaggagacttggagagggcgggaccctgtggggtggaggcagggccacaggctctccacacgccaggagccagcagcctggccgaggcggctttcctccttatgctcctgtgtcctgaggttgttccccaggggcgagggaaggctgctgtgctgggtgggttctgtgtctggggcggccctaactccagg

SEQ ID NO: 252087 - DNA, 767 bp, Homo sapiens
atattcccttgaggccaggaatggacctaagggtgcctcaggcatgggaagacccgataccggcctctctggagctcgctggcttctggagttctgagttaaggaggtagttgaagagacccatgtatgacccccagatgccagtaaaactaatcatgtgcagggaaggtggtcacgtcaataagattttgaaagcaagattcatcaaaaaataggccagatttgcagtcccacatgaacctgcattgaaccctcattgactatccaggtatgtattactttaaaaaaataaaaactaacataaccttaaaacatattagcaaatttccctgacacactgaaagtaggatattattctaaaatttttcctttatgtatgtagctttttagaaaccctacaaatgtgttttgtgtaaaaggatgtagtctgcaatcattttctgactcttggtgtaataaaaattaagtggcctaattatttaaaagcttgtcgtttgaaattattttttgagaaacagtttaaagcatgatactatttttgcttttcatgtaatgtataagtattcgcagaagctgcttgtatatgtttgtgttccatgtatgaaaatgttgtaaacagggtccatgtatttccccagtgagagttgctgatcttttggctgtaattaccaagtgcttgaggttggggtggctggaaatgaatatcaagcttttcggtgcctggagccaactttgtccaaataaaagagctttgtactgtgaaggaa

SEQ ID NO: 252088 - DNA, 391 bp, Homo sapiens
aagattcagaagccctctgaagattcccaagacaacccggaagggaaaagagagtctttgagggagttccaggaaaaaagccactcccgaaagaccgccgcttcaagaaaacctgaggaagggagagggccaacgctatccagccactctgaccagctgaacgaggaactcaatcaaaaggagccacagcaggaccaggaaagtgaggagacttccaccatctccagcgtctccctggacagccagtaatttcagggcaagttcaaaggactagatctatctgagaggtctccataggtctaaccccagagaaatagccaaaagggtctatggtacattttacacacaacagggtacccctcatggtgatgaaaataaaatgaacctgttg

SEQ ID NO: 252089 - DNA, 293 bp, Homo sapiens
tgtgggaaaattttcagtactatccctgagttcattaactaccatcactaacataatcataaagggatttggggaggttgcttagtctatcttcttgccttatggccaccttgaacctaaaattcccagattcctctaaccaatgaatcccgtttctgagattgacttaagcaaagacagattagtacttctaaaaatttcccttttactagttttcctatttctaccccagtagggatttttgtctattgtaagaattatacattcatgaccccaaagaatcacaccaagac

SEQ ID NO: 252090 - DNA, 346 bp, Homo sapiens
tcctagcgaatgtctttccttggagggaggcagggttataaggacccagagaacactaatccctctaaggaggatccttccagggcaaagagggaaacagactgaagtctgtgcctttgctcaaactaccctctccctcacctctgctagttcccatcctgcaaggccttgaagccaatgtcagcccctccaggaagccttccccaagtcctccagctccagccttcctcctctgaactcctcccctgcagggccaatttgagccccaagccctccctctggaaaggctcacaaatgttgccttatgtaactgaaggaatcacaataaaatgtgaataatggcagc

SEQ ID NO: 252091 - DNA, 607 bp, Homo sapiens
tcagagccccatttctgaagtgtcttacctaagtagcactttgtccctattttaacagatgaggaaacagaggttcagagatgttacataatttacaaaagtctcatagctagtagctccccttccttgccttgtaccataattttcaatttattgaaatcgcaaagtattttattcttaagcaatagtattcaaagaaccccatagatcatataccagaaatcatattttttgctcatttgtgagatttaaatttcagttaactcctttactgatttatgctttctcagaacttcaaacatcagtgagttgatggcatccatatctctgtttttatctctgtttttacacccatacatacaaaagaatatatagggcatgagcagaatgtggtggtatgcatccgtagtcccagctactccagaggctgaggcaggaggatcacttgagcccacaaggttgaatccagcctggacaatagagtaagaccctgtctctcgtgatccgccccgcctcggcctcccaaagtgctgggattacaggcgtgagccatcgcacctggccatatctatttctttatttgaatctgggttctcaaaatcttgtg

SEQ ID NO: 252092 - DNA, 253 bp, Homo sapiens
tatttcatagccaaatatgactaatggccactatattggaaagtacagttataaaacatttccatcattgcaaaaatttggattggactgcactgctctagatctactctaacaaaacttaaaagtaagattctagccgtacgtggtggctcacgcctgtaatcctagcacgttgggaggctgaggtgggtggatttcttgagtccaggagttcatgaccagcctggacaacatggtgaaaccctgttgctac

SEQ ID NO: 252093 - DNA, 510 bp, Homo sapiens
  misc_feature (306)..(307): n is a, c, g, or t
  misc_feature (314)..(314): n is a, c, g, or t
  misc_feature (317)..(317): n is a, c, g, or t
  misc_feature (367)..(367): n is a, c, g, or t
  misc_feature (452)..(452): n is a, c, g, or t
  misc_feature (477)..(477): n is a, c, g, or t
  misc_feature (481)..(482): n is a, c, g, or t
gctatgaatacatagtttaagttctgggcaaaaaccatctatccccgtatgtagataaaatatttacttactgtgttctgggtctgttttctcctaggtatggcaaccgtaacttgagtataatgccacccaattaatgttgatgcctgaattatgaaccagagatggagaagtaaaatcacagagagacaagcaacttcctaaggttacactgctagtgagtgtgggccagggttcaagcccaggcagcttgatgttggagccgatgctcagaaccaccatgctgtattattaaaaaggattatnngcgtganccnccacgccccgcctaaaatccatattcaaagaagcaatttcagttcctttntaagctttgtcagtcaaggggctccactgacttcctaggccctgtaatttaaccagtctttaaggttttgcaggaaagtcccttnttccaagtggtttttccaaatcgcncaanngcaaagccaaacagaggaaccaccatta

SEQ ID NO: 252094 - DNA, 989 bp, Homo sapiens
atttgaaataactaacaggctcttagctaaagcatactttttatatgtatacattttatagtagggaagtggcttagtgtgggcagatagactagagttcaaactttccttatctattgagacactttgaacatggttacggttaacctttctgagtctcagtttcctcatctgttaaatgggcatcatatcatttgcctcacaagatagctatattaaaggaaacactgcacatagtgaacttagccagtggcccatcacataatacatgttcaataaatggtagctattacattgtttgcatttaactattatgatgatttctaaaaacctttaaagccttggaaaaaactagccccattcctcagcctgtttttttttaatcaaataggaatttgggaaaaaatctaaatatgtgcaatgatctgcttttaaaaaataactatcttgtgaaactcactagttctttatagtatcaaaagtgatttttggctgctgaggcagcatggcacagggactaacaataaggctcaacctgcccagcctcaaatctatacaaaatacctttgtaaccttggacaagtcgcttacctcttaaagcctcaatttctgcatcaataaaatagggataatactgcatagggttattgaggtgattaagtgaaatagtctatatgaaatgtttagactatgtgtggttcacaggatgcaaataatggtggctgttattttcccagcacattccgttttacaaataagaatttgcagaagaccaagcacagtggcatgtgcctatagtcccagctcattggtaggctgaagccaaggattcccttgagcctaagaattcgagtccagcctccgcaacgtagcaagagcccatctccaaaaaaagcttttaaatcaaatttgcagaacactgttttttgtgataaatggattttatgaagacatttctatatgtaagaagttgttcttactgttttgtt

SEQ ID NO: 252095 - DNA, 456 bp, Homo sapiens
acattgggatatttatgttatcacttggtataaaatgtacattagtagaaattgagtttagtttttattattttgtgcgtggagatgattgatcaatggcaaacttattttacgctccagatagctaaaacaaacattgatattttgatacataactcattacattttacttcagggtttataaaaaagtaatctctaaaatcagaatttgaatgaattttgatgcaagaggcattccagaggagtagagaagtatagaaacagaatttagtaggacacataaactgatggattaagtgacacccatttctgtcagttttcttattcataaatattgttgctctgtcattcagattttaataaaaaaagtttaaagtaattgacacatttaaaaatattctttagaaaagtcaaaacatcattaaataaaataaattaacccttgcataagaccaa

SEQ ID NO: 252096 - DNA, 316 bp, Homo sapiens
aggcccttggagaatggattttaaccactagagattggaaggagggattccaagtagatgaaacagcttgaccaatgtcatggcagggagaaagcaaagagtatgtttagtacacagagcattcaactcgttcaactgtgggatacacctacaggagtgaatagtattcaggaagttgagaaagggaggatgtgaccagatcgtttaataccttataaaacatctgatgctggcttcagcactgctccgtctagctgtatgacctttgttatgtttcttttcttccgtttatcttggcgttcccatgtattagtga

SEQ ID NO: 252097 - DNA, 288 bp, Homo sapiens
ggtcagctacctttgattgatttaaattttcaattcagttttcttagttcattgaaattgacaaacatcttttctatttctacttgagttcagaaactttaagattgtatttttttgggtgataatcttaccctagttaaaaattacaccagcctggccaacatagtgaaacccggctccactaaaaatacaaaaattagccgggtgtggtggcacgcacctgtagtcccagctaccctggaggctgaggcaagagaatcacttgaagccaggaggtggagaaggttg

SEQ ID NO: 252098 - DNA, 458 bp, Homo sapiens
acgttgcctacttgaggccaaggcagaagcatcaatcacatggggcgtagtttctgtctggctaaagaacggctcacgcggacctcgggaatgcgactgtggaaacgacggggaagctggaagggctgggtggcgggggaagctggagggcacagcttccagattccagtttgttaagaatcacctgaaggacgtttctctgaagggaaagtgggcatctgtgaagggttagaggcacatacttcaactttccctagcacaagagtggaaatccatactccttggggagggactttgtcactgaaccttaagaaaatggttactggactgagcttggttacttatgcctgtaatcctgacgttttggtagatggaagtgggagcatcgattgaggccaggagttctagcctaggcaatgtagtgagactctcatcgaaaagaaaataaaaaaaagaag

SEQ ID NO: 252099 - DNA, 602 bp, Homo sapiens
aacagacattcaccaaaaaaggtatgtgatttgtaaataagcaagatgcttgagatcattagttattagggaaatgcagattaaaaccacaacgagataccactatacatctgtcagtataactaaaattaaagactgaatgtatcaagggttgacaaaaatgtggaggatgtggacctctggaacatccactttgcaaaacagtatgtagcgatcttaagaagctagacatacacgtaccatatgatccaaccactcctctcttagaagtttacccaagagaatttcaagtggatgtccatacacaaacttgtatggaaatgtccattagcaatttcacttgcatagtcaaaaactggaaacagcccaaacattcatcaacagaaaaatggatgaacaaattgcatttgtttatcttaagatactattcaacaatttaaaagaataaactattgatacatgcaacgtaagtgaatctcaaaattattatgctgagtggaaaaagtaagatttttaaaaagagtatatgctgtatgattctacttatagtaagctgtaaaacatgcaaactggcctgccacagtggctcctgcccataatcc

SEQ ID NO: 252100 - DNA, 137 bp, Homo sapiens
gtgaaatcttaagcttatctgcacagttgcattactggttgcaggtaggggtgttattcatgacagaaacatcccttcatacatcgttcaaggctaaggtaaagaggactattgtttatttgggggaaagctgacgt

SEQ ID NO: 252101 - DNA, 668 bp, Homo sapiens
ccgtgttagccaggatggtctcgatctcctgacctcgtgatccgtctgcctcagcctcccaaagtgctgggattataggcatgagccaccgtgcccggccccatcctgccttctaaaaccatctcgtcatattctcaaatctttctgaccctgtatgctatattttctgatatccttttaaattttcttaccttttcctgttatttcctttttatgcaattcttctttatagaattgtagagtttagcagttttctcattttgcttttgttgcacctgatttttaaattttcctttcctttaagattgatttatttccagcaatcggattccatggtgccctcaaagccctcatctctatggctaacataggagatgaaagctcagttcccacaatacccaaacaccagccactagaagaatcaatgaagagagggagagaaagaaaagcagagtgttagacttcagaataagaagtgagaatggtcacatgggaagcctgcttcatatccaaatcctaaaaacactttccaattccactttgacaatttattgccattttcttatactgataattggtatttaattaatctaacaagaagtacaaggcaaagacagttttattcccacgttccattcagattatagcacctaagctcctttatattc

SEQ ID NO: 252102 - DNA, 562 bp, Homo sapiens
aaccacatagctcccatgatccatccaataattcctcacgtcctcttcactctttactccatgcataaaacagaatttttttttctcatcctgggtatgaagcaattaataatttacggatttagcctatttggattcaatcccttcaaactccatactacatccaaggtggaagtgacttaaactctgatatcaatcatcaggcttgtaatataggctttgttaatggcaggagagtctaataaaactttctgttccttatccttcatttaaatgaaaaactttttattgaaaacaatcataactctagctcatcataaatataattcatgaggacattttattatttttatattaaagaaataatattatagatgtaaactttgcacctttctaattattatcatgagttaagctaatacttgtcttctggtccctagatgatgattcttttttgccttactggaggagcccttgtcttgaagtgagttgcttcaacagcagaggacttctagtttctcccagttgagcctaaagtgaacttttcatcttcttcagagga

SEQ ID NO: 252103 - DNA, 235 bp, Homo sapiens
tgtagagaaaggatctcaccatcttgctcaggctggtcttgaactcctgggctcaagcgatcctcctgcctcagtgtcccaaagtgctgggattagagacgtgagccaccgtgcctgaatttagccttctttcatagtcatcattttatttgtgagactcatccatattgatagacttagctcattctttttaattttttttttttcccgaaacagaatctccctctgttgccca

SEQ ID NO: 252104 - DNA, 451 bp, Homo sapiens
tgtatgttacatgtattgtgtactgtattcttaaagtaagctaaagaaaatgttactaagaaaatcataaggaagagaaaacatattcactattcattaagtggaagtggatcaccgtaaaggtcttcatcctcatcttcatgttgagtaggctgaggaggaggaagaggaggaagaggaggggttggtcttgctgtctcaggggtggggaggcagagaggtggaggaggtggaaggggaggcaggagggacaggcacattctgttacttttattgaaaaaggctacgtatgagtgggcctgcgcagttcaaacctgtattgttcaaactgtctacatgtttgaagtaataatggctgagacctttccaaaattggtgaaccaaaccacagatccaggatgctgagagaacaccaagcggaataaatttaaaaagaataaccttgttggta

SEQ ID NO: 252105 - DNA, 1467 bp, Homo sapiens
gtggggcccatttgtagaatgaaggtgataactgcctcgtggggttattggcattaaatgaagaatgtagggaacctagcatggttcttgatgtctaggaggtgctcggtgaagggtgcctatgattcgctttgtcttctaaatacttttggcagcacttgaggtgttaaagtctgtatcccagactttattagtcttgttgttttacgtgacttaagcgattagctcaaacgcccaagtacaaaatggggctaaacccaggttttccgacacgattctacctccatggctctatctccagctccacccaaggcctccaaaatggtgttctcctaaagtgaccaacaaaacaccaagctgtgtcatggtgccactttggcgatgtggtctcttaggagagggaattctaagtagttaattagcttgttcctttctacgttgtagtcttgaccaaggacaatgtgttggcatttaatgccactgaagatttaagagactaaggaatcagatcctctgagattcctaaatctgtgtaataaaatgggttctacacatagctattccaaaaaattcagtcagatattactaacaagatagacagattataatctgtatgaaatttctaggagtaataaaaatcagaatagaccccgtaaaaaaaaaaaaaaaaaaaaaaaaaaaaaaaaaaaaaaaaaaaaaaaaaaaaaaaaaaaaaaaaaaagggggcgggccggtaaaaatatatttcctccccaggggcgccccacatttccgccccataccccgcattttttgttgacaaaagggtggcccccattaagggagctttttttatatataagcaacgacggccgggcgcgccggattttataaaaaagatggataaatgtgtgtgaaacaacagggacacacacagtcgggatatatttgtggtaaacagagaaacccttatatgttggggagagggagagaaaattatgggagcacacaacaacacacctctccacaaacactatcttaaacaccctctctcaagagagcacactactatacaacaccttattccaaaatactttaccaacgctctaacaaaaacacacaccctgcccaattaattacctaccacacgtaaacaaaacatatattccctacaccaacacatcttacctcctattaccaaaaccatatttatttacaccccagacaactcaccatccctcaaacaaattacctacatctccactccatccagaactaacatcactccatctatctccacttctcacccaacgaccaccacactcctaccacaatcatacaaccctactcactccgtactaactctgtactacacctacctacaagtcctcctatacccattatctttcaatctcaaaacctacacccacctcatcgaacatctatcttacccccacataaccacaaccaaacataaacaccacacct

SEQ ID NO: 252106 - DNA, 390 bp, Homo sapiens
tgtacatatagaccagtattgctttatgcacgttttttttttattaaaaaaccacactgttgcaattttctgtttttttttaacaaaggacaaaataataattttttatattaaaaatcagttcctggatattaacaactgattttctttcaaggataaactgtgctatttaatagttacattaaaaaaaaaccttcataatcttaattgtaacctaaggacagtaatacctagcccacttaaatctccggttattatggagatgaaacaaagaaacatgtgtaaataatctgataaatgctcattcttggatgtaagttatatctatattttattaattctgtttctttaatgatacctcttactcaataaataaaacttttattttca

SEQ ID NO: 252107 - DNA, 244 bp, Homo sapiens
tgttatttttagttatttgataaacacttgctgcgtgtctgtttaagcaaacctttagaaacacatatgttatctgctgtctcattagagcatgtatggtaaaagaaaaaatcatggacgaaaggaatcagactaaagtctagggtttgaaaataattttaagtctttgtttgcagtgaggtattttaggatgagaattatgggcttatttcaatgtgctcttccaaaccatgttatcatctgt

SEQ ID NO: 252108 - DNA, 516 bp, Homo sapiens
aggctaggagatcaaagaggcagaattagaccgttttagaccaataaatttttcctggggtgacacacagcaagacgcaaagagaaaagaccaaggcccccgccgccgccgtctgtctagactcaagcgactgaaggggccaacagagctggtgtttaaagtagaacctgcccagtccaacagcccgagcagggagcgatttcggggatcgcgggaaggaacgcacttcgccaagggagggccgggtgccctcgccaccggctcattcctgctccggttttgcccgatgcgcgtccaggaggttctggcaggacgcactgcccctctgccccggccaaggaggatgcggatactgcccgcaaggcttcggcctttatggacccaagtcagccaactgggccgagtcctgcggacaccgaaacctccctttcgtttccaggcttccttctcccctcttgccctctgtggtctgatttaaaacgaaaaggtcggataaaatcaggctttcaataaaaa

SEQ ID NO: 252109 - DNA, 454 bp, Homo sapiens
actataaaggggtagcatgaaaaacaaaccaaatgtccatcaaccgatgaagagatgaacaaattctggcatattaattcagtggaataccactcagcacacaaagggaatgaaatatttatattacaaagactgaccaatcttgtgatcactatgttcagtgaaagaagccaggcagaaaagactactacataagtttatttatatgacattctaaaaagggcaaaaccatagtgactgaaagcagatcagtgactgcctgggaccagtgaccaagggaggggatcaatcatcatgcaaagggcataagcaaacttttcagcgtcaggaaactgttctgtatcatgattgtggtgatggttacacaactgtgtacagtgaccaaaactaataaaactatacacttaaagtagggaaattttatttttaaataacacttcaataaatctggagg

SEQ ID NO: 252110 - DNA, 262 bp, Homo sapiens
cagtgatgttaaaatggttaatataactctattccgtatgtccaaaaagctagaggaaagattgaacatgttaagtagaaacattaaaggatttttttaaaagacccaaagcaaaattatagagatgaaaataattatgtatgaaattaaaaatatactggatgggatgaatgatagataagacattaaagaataaataattaacaaacttaaaaacacagcaatggaaactatctgtaataaaacacagagagaatgtaag

SEQ ID NO: 252111 - DNA, 425 bp, Homo sapiens
aaaaatcctgtggaacagttactttttgcttataaacttcttgacagagcaatcggtggaataaatttgaattgcatgttaacctctttgccaaatggatcatcagtaattgaccactgctatgccaagcgtacccaccatatagatggagatacttacaaaccacttgcctcaaatagtttcatgatggatttgcatcttgaactaattcaagctcagcatcgaatagctgttgtgcttctggacaaattgcaaggtagtagtcactaaagcaagtaaccattctgaatcaattttaagccagactccagtacagaatcaatttaatttgaaaactgtgttcttgttgacttaagttttcagataaatttcatttttttctacttccctaattaatatcaataaaaacataattaaatctttcc

SEQ ID NO: 252112 - DNA, 814 bp, Homo sapiens
aaaaatcctgtggaacagttactttttgcttataaacttcttgacagagcaatcggtggaataaatttgaattgcatgttaacctctttgccaaatggatcatcagtaattgaccactgctatgccaagcgtacccaccatatagatggagatacttacaaaccacttgcctcaaatagtttcatgatggatttgcatcttgaactaattcaagctcagcatcgaatagctgttgtgcttctggacaaattgcaagttttgcagactccaactgttagcaaagatatttctaccaagggtccggaaaagttaaaacaatctggaagcactgattgttttacagaattaaatataatgaataaaataaagaagaatacattatccaaagcaatttacttaatgcagaaagctcttttaatattcgagaaagatgcaacttctacatcttcatgggaacttttgatgattcactatatataattcatcctgaccaggggaactaattcgtacctccagttctgaattctgaaatgagagattctctttttatcagaacttcatgcaatctacatgagaagacaaataaaatcagaaggactcaaaatgagggaaattatagaattggagtgacactttaccagcttaatgtattctttacaatggaattaaaattcttaaagtccattggctgaggaagcatattccttaattcagaggattgaagctgaacaaaatgccctatattcctatcagaaatatttggaaagttcaaaaagaaagaaaagcagagtcccccctccacctatcctgctgt

SEQ ID NO: 252113 - DNA, 694 bp, Homo sapiens
acgtagcccacctgtgaatttccagtcttgagcacatttcatcaatccacttctaactgtctatagcacatcctctggctgagtctcctggagaatggaaataacaaaatcagggccaagtgaggggaagcccaggctcctcagagactgtgccttccccacagcagcttcctggggatgcctgtgacagactctctttgttgaagactgggccctcactgttctctttgtgagggtaacctgctactccggaaagtagcatggctactccggaaagtagcatgtaagtaggacccaaggcaccgcagataataaaatcttggctgatgtgatgggctacggcttttcttttctttttttttttaataaaataaactaatgataataatagctagtgttcattgaaggcttacttgtgccgggtactatgctaagtattttgtgtccattatctgactttaacctcaaagcaaccttatttaatacagatattattagctctattttataaataaagaaactgaagcttagaacaattaagtatttccttaaatgccttaaagctagtagttgcaaacttgggatatgaacttgcttctgtctgtcttgaaagtctgttctcataaccattttaccatgttgtcttgttttcgagtagggcaaaatggttaaaggaaaagtagattaaaagaaa

SEQ ID NO: 252114 - DNA, 377 bp, Homo sapiens
cagggcaattaaggagacctgaggatcaaggaccgaattcaggggacactgcaattatagcaaatacaatatgagaggtcagagaagaagtgacaggagagactataagaaaagctggaagtgggccgggcatggtggctcacacctgtaatcacagcactttggggctgaggtgggcagatcacatgaggccaagagtttgagagcagcctggccaacatggcgaaatcccatctctactaaaaatacaaatattagccagatgtggtggtgcatgcctgtagtcccagctactcaggcggctgaggcatgagaattgcttgaacccgggaggcagagattgcagtgagccgaggttgcacgactgcactccagcc

SEQ ID NO: 252115 - DNA, 765 bp, Homo sapiens
aataaatataattataggaaggaggggggacagggtaggtgttaaaaaggagtttcctgggaaaataaggaagtgaagaaaggcattccaggcataaaatatgcttgctatgtgcaaaacaacagtgggaaatagcatagactcttccatgtacatactgcaagtgggtatgtgatggtggagctacagttggaaaggtaggtaggggtcgtatcatctagcccgatttactagagtttaactttatttactcatgaataggtagatcttgacagattttaatgaggggagggacatcaggtgccaagtacctacaaacatttaaacaagggaagggttttatggttgcagtgattaggacacgtttgaggaatatttagacaattaagttagtggaacttatatttttataggatgtaaatgaaggggcacagggaagccaccgaaggtgatttctgagattctgttttgcataacttggtacatgatatgccacagacataaaggggaaatgctttcaaagagatctgtgtttttctcaaattttacccaatatatttgcataaagctcaatgtagattggaactatggcaatttgattcagttccacagcttaagtaagtgttattttgttcagttaattgaaaatgaaactatacctgacaggaagctgattacttatatgctaatgtgacagtattatagatcataggacttataacacctattaatttggtaaatgggaaaaacaaaactgtatactgt

SEQ ID NO: 252116 - DNA, 351 bp, Homo sapiens
aatcctgtatgtcacatttgatgaccttagcaattatacagacagggaaaatgtttatcttgatttctgctacagcaacactgaagccagaggtgtctgagctttggctaatgtcacttgatgtaggtcagccctactgtgagcgtcaaccctggtttctaaatgtgctgctggaggaatcccacttcacttccagtttaagtgtcagctgaggcctcgcctgatcatttgattcagagcagccctagttctcacaacactatctgaattttctacatatcacatcacagactaatattgtttataccagtcttgtttcctcctaataaaatataagtgccatgaaagaac

SEQ ID NO: 252117 - DNA, 429 bp, Homo sapiens
ctataaatttaaaatttaaaattatttgtaattattgagtgaaaaaaagatcattttctctttaacaaaatagtgagccataagttttcaagaatatagcatttggcaatgtaagtataagaaaaagaatcagggctgggcacagtggctcacgcctgtaatcccagcactttgggaggccgaggtgggtggatcacaaggtcaggagagcaagactatcctagccaacgtggtgaaaccccatctctaccaaaattcaaaaacattagccgggcatggttgtgcgcgcctgtagtcccagctactcgggaggctaaggcaggggaatcgcttgaacccaggaggcggagatttcagtgagctgagatcgcgccactgcactccaggctgcctggcgacagagcgagactccctctcaaaaaaaaaaaa

SEQ ID NO: 252118 - DNA, 491 bp, Homo sapiens
actttctagttacttgggctcaggaatctcgattttaacaaggattgcctgatggttctctttccatcactaaagtttgagaatcactgctctagagctttatggattacaccagttctgcctttggcctagaagcaggttttcttattccctgttcagtgatacttgactcaccatatgttgcctaccaatttcttacccatctacaaaatcaggattgtaaagaaagatatttgtgctgggttgataattttagttgaaggaaataagtcattagaaatacatattttagatcctgggtctgtcagtacctatgatttgcaaaataagtaaatttaacttatttccagtcttttgtaaaacatatttatttgctctaaaaatgtatctgcagttatttaagtgtttaatacatcagactgggattttcaattatagctacttgaaaatactgctaactcagaataattgaggtcggatccagtgtaaat

SEQ ID NO: 252119 - DNA, 736 bp, Homo sapiens
  misc_feature (7)..(7): n is a, c, g, or t
gagtgtntgtataaaaattcacgcaaagttgctagagagcatacaatttccaagaaatgtcggggtgttgttattttcagttttctaaggatgcactccaatcaatggaaaaatgcagacattatgcaagatttcattatctttggtaaaagtattctcattattttgtctcttcacagtattaactctgatatccactttgtgtgagtctgctattgaaacttctaaaactaggcctagttttagaagtttcaatagcaggaacaattatggagagattggagtgttacagatagcttgggctttatccagtaaaaaacagagaggcattgtatgtattctaagatactggcaagatgaaaaaattaacctgacatatagaatggattggggaaggggggaattaaagacacataagataattatgggacttttgcttataatctcaacagtgaaaatggagagaaagaaatgaacctaaaacattctgaaggaataaacagtggtctgtgtgttagtccattttactgaaatagagttgctctaagttgctattgaacttctaaactaggattcattttactaccaaaaggaacagactttctggggtctgaagggatttgtacttgaagatactccgtcagcagaggctcatgttgacattctgccagacagagctgtttcagtctgcagctgctattgaaacttctaaactaggggtaccggctcgattcta

SEQ ID NO: 252120 - DNA, 867 bp, Homo sapiens
  misc_feature (7)..(7): n is a, c, g, or t
gagtgtntgtataaaaattcacgcaaagttgctagagagcatacaatttccaagaaatgtcggggtgttgttattttcagttttctaaggatgcactccaatcaatggaaaaatgcagacattatgcaagatttcattatctttggtaaaagtattctcattattttgtctcttcacagtattaactctgatatccactttgtgtgagtctgctattgaaacttctaaaactaggcctagttttagaagtttcaatagcaggaacaattatggagagattggagtgttacagatagcttgggctttatccagtaaaaaacagagaggcattgtatgtattctaagatactggcaagatgaaaaaattaacctgacatatagaatggattggggaaggggggaattaaagacacataagataattatgggacttttgcttataatctcaacagtgaaaatggagagaaagaaatgaacctaaaacattctgaaggaataaacagtggtctgtgtgttagtccattttactgaaatagagttgctctaagttgctattgaaaacttcttaaaatagggctaattttagaaagtttcaatagcacttccctggggggactgacaaaaagctgaacttattttagtggcactgtcactacaaaaggggaaaaaatgtctcaaaggcaagaaacccatttcctacaaagaaacagtaaaggcccttactatgtaagtcgagagcccaccagtttgctgtttaaatccaagtaattcaatcagggcaccaaattacagcccggaacaagacaaaaagcctacattataacatgggttaactgctattgaaattctaaaataggggggatcctc

SEQ ID NO: 252121 - DNA, 484 bp, Homo sapiens
tattctcaggggatcatagtcaatctctggtgatagaggtcaggaaagaggttacttttggtaggggtagtaactaaaagaagaccttaggaggacttttttggggtactgctattgttcagtttattgatccgtatggtgcttcatggtgtgtttgtgaaaatttatagaactgtatactagttatttgtgtactttttacacatattttatactttaagtttactttaaaagggaattacacacttgtatcatcacaggtttgttgtggaaatcagatgaacaaatgtttttaaaattgctttaaaaattaaaattctatgctataaaaataatggagtaaggaattattgggtgataaagatggctagacaagataggaacaattatggagagattggagtgttacagatagcttgggctttatccagtaaaaaacagagaggcattgtatgtattctaagatactggcaagatgaaaaaa

SEQ ID NO: 252122 - DNA, 310 bp, Homo sapiens
ttagggctgctggatggacaaaaggtgactgtgtccacagagcgtccctgggcaccgagtaaacccgcagcatctcacagggcagccgccagcatcggggctgctggctgggctcggggactgcatgcgttgctactgagaggtgccctggacgccctgggtgtaaaacacatgttgggtttccttggatttcgaagctccaccataaagagtgtaaaatggctcaatcgcaagtttgcatctgatgacaggttcaaatgagagtattttggacctgttgagctaaataaatatattagtaaagttgatt

SEQ ID NO: 252123 - DNA, 209 bp, Homo sapiens
agtggttgcctggggggaaatggggagtaactactgatggattaagtgttcttgagggggacagaaatgttctaaaattgatagtggtgatggttgcccaagtatgtgaatatactaaaacctactgaacgttatgctttaaatgaataaattgtaggatatgtgaattattagtatatctccataaaacagttgaaaaataaatgaac

SEQ ID NO: 252124 - DNA, 606 bp, Homo sapiens
gttgcccactgcttttttctcttaaggttgaaaagtaattttgcttggaaacaccaacaaccattagcctagatgtttttgtagaatagcgtccatctttctagaatctacctgagaagttagacttttttctggctttgtcattttattttttatcaaagtggtgatacatgcatataatgtttatttaaacaactttattgaagtatgatttagacactgtaacatttgtctattttaaggatacaattcagtgacatagtgaatttacagaattatgcaactgtcactactgtgtaattttagaacatttccatcccaccctaaagattcctcctgcccatttgtagtcactcccattcccacacccaacctcacaagtctactttttgtctcaatagagttgcctttcttggacatttcacataaatgaaatcacaatatttaatctttttgcatctggctggttttttaaatatcttttgagacaataccatgtgcttcattcctttttaatgctgaataatattctattatatggatataccacattttcttcattcatctgttcatagacacttgagttattttcagggttttttttta

SEQ ID NO: 252125 - DNA, 535 bp, Homo sapiens
tctgggtgacctttatacacagcatccatcagtcttctttcacctttcttagacttttttctggctttgtcattttattttttatcaaagtggtgatacatgcatataatgtttatttaaacaactttattgaagtatgatttagacactgtaacatttgtctattttaaggatacaattcagtgacatagtgaatttacagaattatgcaactgtcactactgtgtaattttagaacatttccatcccaccctaaagattcctcctgcccatttgtagtcactcccattcccacacccaacctcacaagtctactttttgtctcaatagagttgcctttcttggacatttcacataaatgaaatcacaatatttaatctttttgcatctggctggttttttaaatatcttttgagacaataccatgtgcttcattcctttttaatgctgaataatattctattatatggatataccacattttcttcattcatctgttcatagacacttgagttattttcagggttttttttta

SEQ ID NO: 252126 - DNA, 441 bp, Homo sapiens
gaaaccctcaagatctagggctaggcaaagagttcttagacttgacaccaaaagcacaatccataaaaagaaaagctggtcaactagacttcttgaaaattaaaatttttattccacaaaaaacaagtcacagactgggagaaaatacttgcaaaccacctatctgacaaagacaaaggagtagtatctaggaaatatacacctttcaaaatggctaaaatacagtgataacaccaagtgctagtaagaatgtggaaaaaatggatcactcatacattgctagtccaaatattgaatagtacagctactctggaaaacatcctggcaggttattaaaaaaactaaacatgcaataattagccaagtgtggtggcgcacacctgtaatcccagctatttgagtggctaaggcatgagaatcgcttgaacctgggaggcgcag

SEQ ID NO: 252127 - DNA, 559 bp, Homo sapiens
taagaaaatatccttgaacattattgggggaaatgggaaatgttacagtcttcctaaaaaacaacctggtaatctccaataaaataaaaaatatatttatcctgttgcccaacgattctaatcctgagaagaagaagaaaaaaataccagttcataacaacatatatatgagaatattttctactgacataatttatagtagccaagaactagaaataaagtaatgcccacctatagaagaataaatacattatggtttaataccagatattgtccagccacttaaaaagattgaactgagttaaactagatgatttgaagaaattttaatgaaacattgttgcattaaaaggaaaaaaatctgtaaaatgatagacaagcatttgtttatgtatatgtaggtctacataggattgtataaacagaaaatacagtgtatgcacactagataattacctggggaagtagggactggctgtgagagaagagacaggaaaattgtctataataaaaacagcatgtgtgttatgttcttatttctataaaattaaaaaagtat

SEQ ID NO: 252128 - DNA, 402 bp, Homo sapiens
gcaaagcccccaacatcattgcttttcatgattggttttgacactaccgtgcttgtgataagagagatttgtttgtttgttaattaccggggccagaagtgggatcattctattccttccacacatgcctctcgcccaggtgctctttggtgagggtgggttgtgtgcttagaggcgaagtcatgacatgttatttttgccacctcctgtgtttgtcgacttaggcaagcatgtttttgcagttaatacttatcctccttagtctttttgttgttgttgttgagatggagtctcactctgtcgcctaggctggagttgcagtgagccgagatcatgccattgcactccagcctgggcgacaagagcgaaactcttgtctcaaaaaaaaaaaaaaaaaaaaat

SEQ ID NO: 252129 - DNA, 463 bp, Homo sapiens
atctctctctctctctctctctctctctcaaaaggcagtgaaataacgacttatttggggaaaaaataaaggcagagaatttgttgccagcagactagcataaaaaaaaggaagtccttgaaacagaagagaaatgataaaagatggaaatttggatatatactaaagaatgaggattgctaaaagtgacatacatagataaatatgaaatatatttttattttaaaatttatttaaagcaaaaataaaaatacatcatatttataacatagaaataaaaaatgtatgataatagcataaaggataagtggacaaatgctgttgtcgtatttttggtaaaatgcactattatttgaaagtagaccatcgtgaattcgatgcatattgtaaaccaaatagaacactaaaaaatgaaaataaagagatatggctaatgtgccaatggtggagataagatagatgc

SEQ ID NO: 252130 - DNA, 735 bp, Homo sapiens
ataactttcagccaccgatctcaatatttataagggaaatgataatgtctcaacacatgccccatagggaaagagccagaatagaaatatttttgacacttccatttggaaccagaatctctcatatttactatctaaaactaaggagcctttcccaagttagtttattatgatactaccacgaataagttaaatattaatctgttccctaaagataagttttattgctttgaaggatgaaaaaaatatgaaataatcactttgtgtgaggtgtgtctgtgtttgtgtgtgtgtgaagtaaaaatcaagttaggaataaaacatctttttaaagtttatcttataattccaaacgaatccctggaaactgaactactgtgtgccatttgtttttgttgaaatggttgttaaattattctgattatttagcgatgccagaggctctcttagagtaatttgatatatcactcggtgtctttgtttcacctcagctaggtccagaaagagacctggaagggaggtggataatcataataaatgaaagccagcctttctagtttagttatgcacaaaggttaaaataatttgttagccaacaaagtgtttgtgcaattaccataggtctttaatcatgttttgccactattgccacctgtctgaaatcttagacatcttatgttctgttataacattatttgaagttgccccgaacattatcttatgtgatccctcaga

SEQ ID NO: 252131 - DNA, 478 bp, Homo sapiens
cgcgcgcgcgccttggcgggagccctgcgcctcccggggtctccctgctccttacttggacctcgggcgcaaggtcccctccgcgcagagctgaagccgcggcgggcggcccacgggggatcagaccctcgggcatccgcgtttcccctccgccgtccgccggacccccacctcttctccaagctccactcccgacttttcttccccgcccccgggaagctctggaaacccgcacccccggctctgaggtcagggctggcaggagtaatccaccctttccaggtgtgtggcgcaaacacggacgcaaagatctcccctagggtctgtaacaatttccaggctgaaaggtgataactccttctccttccataacataccttccccccgcccccacttcctttactatcctaactttgggaggaatattgattcttgatcaaagtaaatgcactgtcttacctttggtatcggcacaggc

SEQ ID NO: 252132 - DNA, 235 bp, Homo sapiens
gcaagttatttgtggctctctgaggcattcacttaacactgttctatagcgcaattttaggaagtagagttggaattttctagtccttgttagaatgttttcttcaatccagaagtgttctacaacacaaaaagccccatggtaaagaacaagctcacagaaagaacactgaggaatgacacttggaatgtgccactgttttgtcatccctgatacactgatctggagtgaactg

SEQ ID NO: 252133 - DNA, 949 bp, Homo sapiens
accacacacgtgtcctaattattccaaaggtgatacatttgcatgtttccctttaaactcctttccctctgtcactctgtggagggttcacatgctgcaatatttctgttccaagtaaagatcacaggttttgatcctcagtcctcagtatacacacctcttttagggatttctgggcttcttgactagctcaagctcttcagaggcatgcactttatcttggtgttcagtcttgactggtttaaacttttgatgtccagaaggttttcttcatgtgttgttgtgtggaattgtaaatattttctagcttttgtaaggttgtggctcatatttatatttctcctggtttgaaagaagagagagaaagaagtatgtcaaattgagactcttagattggaaatctgaatttatttacacgattgagattgatctagagttttattttttctgctgtaactgaaatttggattcaagattatatgtgttttgtgaatatgtttggtaacattgtgacttttctataatttagggaagtttgatgtaggagaaagagaaaaaatttttgagagaatcctaaattcatatatggcctaaccttttaatatctatgtaattttagataataaataatttgtttgagattatgtggctctaacaacacctgcttcacagtgtaattatgaggatttcatagaatttgtatagtgagcgttagttttgatgttactttaaacctctttgccttatacattctgttttttccatggaatattatatgatttcatgtccacatattaatctcatactttcaattacattttatgtttaaattgaatattatggtaatcgttatgtaaatgattaaaaatttaaagggacaacatttaatgttgctctggaattcacctttagtcataaaataaagatttaaagtatcatctgtagacaa

SEQ ID NO: 252134 - DNA, 506 bp, Homo sapiens
cagggtatgacacactggtgaccttataactgtaaggagtgtggataagtatttattagtccttgtgtgttttagatacatgaaagaatttactcaaaaggaaactctatgaatgtaaagaatgtggtaaaacctgtgtagtttcagtttctcttgaataaagtcatttcctggtattctcaggggattggttccagcaccccttgagaatatataattttgctcaagtgctttatagaaaagtgtattgcctataactaggcaatcctgtatactttaaatcatctctagattacttataatacctaatgcattgtaaatgctatgaagacaactgttttattgtatttagggaagtatgacaagaaaaaacaactgtacatattcagtacagacacaaccaccatacggctacctacctagtacacattatctacaatataacattttctttttaaaaaacagttatggattggtttcattaaatgacctgcaagcgtgtgtta

SEQ ID NO: 252135 - DNA, 499 bp, Homo sapiens
gtgagccacagcacctggccaatatatttttgtattaatttttcaattttgtctagtccacatggctcttaacactttctctgcattcttttctttgtcattttgtaattatcccaaatatttaccattctcctcagcttatccccctcttactttcagacacagattggatctaccttatctctgaaattgaggaaatacagctgtaaattctcttgacgtctccctacccccagtatttcctagttctaacacatttctatttaaccttaccaacctccaattttattctgactctttttcaaggccagtcctcttcctgtcttaataataccattcttatttccttctatctcttccagaacagtgctgtcagttttattttctcctattttttattttttatattttatatttctccttcttcaacctattcatttcttccaccttctttcctttattctaaacactctcaagtgtctcccattgggagaagaaa

SEQ ID NO: 252136 - DNA, 435 bp, Homo sapiens
gtcattgatgatcattgcctagatccattaattcatttagagttgcaaataatgatattccaattctattcgtcccttcatttattagctgaggtacttctatgaaaggaaacttctcctattagttattagtaactttgaagtacagttcatctagtaaagccggataaatgtttgattcttggccgagcacagtggctcacacctgtaatcccagcactttgggaggccgaggcgggcggattgcctgaggtcaggagttcgagaccagcctggccaacatagtgaatccccgtctctattaaaaatacaaatttagtcgggtgtgatgatacacgcctgtagtcccatctacttgggaggctgaggcaggagaatcgcttgaacccgggaggtggaggttgcagtgagccaagatcgtaccactgcactccg

SEQ ID NO: 252137 - DNA, 252 bp, Homo sapiens
gttggtttgttatatgggtgcaggctggaaatgtagggcagctccactgcagccttactctagagtggccaggaaagacaggggtaagggaaaaatcctcccaactggttccttcagagagggaagaatagcccaagttcaggacagctgtggaatcaagggcagcagcaagtggcttggctgcctagtcagaggccagaaacacaaagactggaagaggaagaattaggaaatcggggtaaagagacatag

SEQ ID NO: 252138 - DNA, 429 bp, Homo sapiens
tattgaacagaataccaagtactagcagcctagaccttaagaacattgattgattgcttaaggggaatctagaggtaagcagtgctatgtttggtttggcaactcagcacttcatcacacttctctcttaactccataattttcagcatgttgactttcatttttcataacctcatggtggcaagacagtggccacagctgcatcttgccttcacacaactccttcagattgggaactggaaaaggagctgaggctttctcatctggtttcttccttttgtcactgagaaaaatctttccctgaagaagggacggagaggtgttgagcaatcaatacaacagatgttttctatcttcctctgcctttctttatgaccagtcctccttgaaggtcttagcccatcttccaccaatatttaaaacatttta

SEQ ID NO: 252139 - DNA, 380 bp, Homo sapiens
ttaatattaatgctatattgcttcattaaaatttttttttcctctttctgtatttctcgaaaattcatttatcattggaattatctactccttaaaagtttgggccgggcacagtgggtcatgcctgtaatcccagcacttttggaggctgaggtgggcggattacgaggtcagcagatggagaccatcctggctaacacagtgaaaccctgcctttactaaaaatacaaaaagttagccaggcatggtggcacgtgcctgtagtcccagccccttgggaggctgaggcaagagaatcgcttgaacccaggaggtggaggttgcagtgagccaatattgtgccactgcactccagcctaggcgacagagcgagactctgt

SEQ ID NO: 252140 - DNA, 1001 bp, Homo sapiens
ccgggttgaagcgattctcctgccttagccttccaagtagctgggattacaggcatccaccaccacacccagctaattttttatatttttagtagagacagggtttcaccatgttggccaggctggtcttgaactcctgacctgaagtgatccacccgcctcggcctccgaaagtgctgggattataggcatgagccaccgcactcgactgagcatcatttttatttcagactgaatgagatataattaatacattaaaaatcaacttattctatattccaaaactgtagaactcctaaaatgtatcccagagtcaataataaagttatccactcacttcattagaggaagagtttgagctttggtgtcagaaaggtagcacctggaatccaagctctgccacttaataactatgaccctgggcaagctatttatccctcaagtctcagctcctccatctgtaaaatggtgtattaatgcctatctcaaagggttgtggtgaggtttaagtgagctaacttacataaagcactggctgtaataaggtactcgataattggtagctgcattctaaaccatcaagtttactgttagccacttctctcttcagaggttcacttaagatgactgcaaggtgagaagattcacaacctgagttacgagcttaagcaccttaaaatcctttaggagcaaaggactgactttagttactcttctcccagtagttggccccattcccttgctttccatcactgtataaagaagctcaattctggcatgatatgaaacaaaccatattttacttgactcaaaaacttctcctaatggaggaataaacactattgttaggttggaaactgaatgttagtcacagatacggtctgtaattttctaatcatgagagatgttacctggatgctgaaaaatgccaaatctcaaaatcctgaggggaggattcattactaaataaagaatggctagcacaaggaatgggaaagaaa

SEQ ID NO: 252141 - DNA, 596 bp, Homo sapiens
gacccaggttagactaacaatactatttatccctcaagtctcagctcctccatctgtaaaatggtgtattaatgcctatctcaaagggttgtggtgaggtttaagtgagctaacttacataaagcactggctgtaataaggtactcgataattggtagctgcattctaaaccatcaagtttactgttagccacttctctcttcagaggttcacttaagatgactgcaaggtgagaagattcacaacctgagttacgagcttaagcaccttaaaatcctttaggagcaaaggactgactttagttactcttctcccagtagttggccccattcccttgctttccatcactgtataaagaagctcaattctggcatgatatgaaacaaaccatattttacttgactcaaaaacttctcctaatggaggaataaacactattgttaggttggaaactgaatgttagtcacagatacggtctgtaattttctaatcatgagagatgttacctggatgctgaaaaatgccaaatctcaaaatcctgaggggaggattcattactaaataaagaatggctagcacaaggaatgggaaagaaa

SEQ ID NO: 252142 - DNA, 598 bp, Homo sapiens
gtaagaactgatattgaagcacaactcagtgaagttaatcctgtcaggctaggttcacacaagaaaacttctgacaaaatcctagaattccggcaaatgcaggcatggaatgagagattcctattccatctgcctcgttgtgcctggggccaggcctgagtgttgaagacagcttgttccaatgtaagatcaaatgagattgttcataacaggagtctgcaggaatatggcacctctgatttgaaatgatggatgattttcatcagccgtgtatctgcttccttggcagcaccccaagtgcagaccccaggctgtttcagtgtgtcatctggcaggcccaaacagaggatgtctcaattgtgcatgtgtaacacagctttaattcataatttcatttctggatggaattttgagcagatgggcattgctgtcctttttaatggtaaaaaatcaatgaaagacaccgtggttttgaaattaatgagcacttgaaaaataccagctttgtttggctttgcgtttttttttttcctctcctcctaagttgtttgcagcaaaatattcaattgaaaactcaacatgtccactgcctcccaaa

SEQ ID NO: 252143 - DNA, 455 bp, Homo sapiens
tgggagccgcaagtcctccgagagtgacgatgatgtgcgtggagtgcccagcccagattgaagcgcggccaaggcgggtcgctatctgggcaccgctcagctccagagggcgccactcccgcggagcctgcgggatcggggcttcccgggagcagcgcgatcagcaccacgactcggggacacagccagggcccggtttctacaggaagcgcctcatttggagcctttttgtgatagaatgatcattagtcctaagcccattcagaggttcaagaatggggtcggctcaatttcagggccttattacccaagcccggctgcccttcggtgccaccagcaccactgctccgtcgctgcggaattccaaaggcaggtttggcgttagggccttggccccagagaggacgccgagcgctccacggaaagtctccgcccggctcccagggcgcacactc

SEQ ID NO: 252144 - DNA, 681 bp, Homo sapiens
tgagtaaactccagaagaaactaccattgcataaatctggttggccctaggcagtcttatcattcttgtgttttagtctttgccagactcaaagtgcctatatttcatcccatgagtctgcaaacctgctttgtggtaacctgcctggctacttgccattcattaactgcttcttgacccatgttgattccctctgtcacttactctgaaaagacctgttagaaataagcttgtgatctgcttgagactttggcaatactggtttagccagaatagagaaatccttaagtagcacagcaatcctttctgaatcttctatttgtttcttctttgttctctgtgtctctcccacctaacatccctctccaatttaagtaatcaaaatagaaagaggggcccaggcaaggtggcccacgcctataatcccagcactttgggaggccaaagtgggtggattggtttagcccaggagttggagaacagcctgggaaagatggcaaaaccccatctctacaaaaaatacaaaaatcagctgtgtattgtggcatgtgcctgtagtcccagctacttgcggggtctgagacaggaggatcacttgagcctgggaggtcgaggttacagtgagcagtgactggaatgctactgcattccagtctgggtgacagagggagaccctgtctc

SEQ ID NO: 252145 - DNA, 843 bp, Homo sapiens
agcaataatacaacagaggagagggagcagcattctgttctagtgactcagaaatgccgattaaatacacaaactaatttagaaaaaaatgtgccctcctccaggcttagtcacaaagtaaaatatgcaaacagcatcagtgttttaaaaatctcacaaaactaaaacttaaactattttaacaagagaaaaagaacttagttttcaatacaagcaacaataacagacccccgcaaataacaccttttgtcatggtcggttttcatgttgctttccaccagtctgaattctattttaaacggattatcctacaagtggcagatatactgtcctctccagagtcagccttgaaatgaaacagctgatggtgggcctggcctgggtgtagggcgtgccccgatagcatctccactcaatgatccctccaacaccaccacagtatcctgaaccagttgtcaaagcaaagccacaacacctcacatcaaccaggtgccaaaaaagaactagtgtatgaattcagaattccgccaccagaccagaagtccttcaaaggatatctagataatattattgcacgcttttgaataaagggtttaaaaatgtcttccaacctttgcttggtggaaagccaatattttggcatgcaatcaggtaggggtaaggggaagaaccctcacatgttcagagacaaggaagtacaaaatatactagaagggaaaagcttgaacaagaaacctatgacttctatatgtgttccctgggggaaaaaatccacaccacgtgagagagaaatgaaacctaagagatgtcacaatttcaaaataaatgctgcaccataaatgt

SEQ ID NO: 252146 - DNA, 391 bp, Homo sapiens
gttggtgtaggtgaggagtggggtgggcattttgtctcttgtgaccccgaataatgtttccttgcagaattggaagcctctaggacaggtggatgccagctagatttagccattcacattggcaaagtaggtgatccatctttccacacactcttctgtcaggcttccagaaaggctttctgctcccatcccttaaacacctccctgtgtttcactgtcactgtgcctggaatcataccttcctgtagccttccagttcctgttcaggtggtatgtgctctgagaaggctgggaccataaatgctgtaatcagccgggaatagctaagctcagagccagagccaagaaggaaagggttacccaaaattgaggcatgaactgttgattcact

SEQ ID NO: 252147 - DNA, 468 bp, Homo sapiens
atgactgtgtctgaagatgcttctttcttatgtagatgtaactgtgttcacttagctgcattcactgagctgcacctgcacgtgttctgaatgtgtgacgggcattttgattaacattctgtgtgacctgaggcacagcacttttctgggcatcagttttctcagctgttagatgaagatggtggactttttatttttttcagcttggaaattccagggggcactaattatatgtgtataattggggcaatggaaataagttcagggttttggtgtcctgggagagggactattaatttgtatgcatctcagtcatttctctttctccaaaggtaactgttagaaaatcctggaatctctagaacctcaaattcttccagcccaattgtgaaactggagttaatttaattatgtattatcatgcatggtggcctttaaagaaaagaaatactttttcttgcattcccc

SEQ ID NO: 252148 - DNA, 572 bp, Homo sapiens
agtaatggataccatataacttgtgtgatactgtagcttttataatgaattacttcttgaaagttttttttcctatacaatgtattattaaacaattgtaacgatagtctctttttgtttaactatagaaaatggtagatagtgtggtacagcaaacaagattaacaaattttcgttggagagaaattatttgggctcaggcttgcaataacattatgatgattttaagaaaaattgcagttcctgtgagttatatattgataaggcagatttttaaacacttagttgctaaaattagttttcctaaagtcgtatttgggaaagtctgagtagagaaccagtaagtcactctaatcatcccaacagagagcaaatattttagtcttaaattacctcaaaaaatctgtatgtcgtttataatatgtaaatgcacaatatgtaaaggataacataagttctcgaaattgtcataagtccttcctaaaaactgaacctaagtgtttaggtatctgtactgttacagagatccttgaaaatatgaaataaagataatcgaaattaagatgaaatgt

SEQ ID NO: 252149 - DNA, 251 bp, Homo sapiens
tctcaaagtcagggattacaggtgtgagccactgtgcccggcctcctcagtccatttttaatactgaaggtataaattgtataaagatgtttagaaagttctaattcattttatgcatttttgcaaatttgactccatgaaagtgcattatcacgaagctgaatttgtgtaagcattgtgcatgtatgtaaaaacattgcaacttcctcaataaaatatcttctttttgtacatccatatttgtgaaagat

SEQ ID NO: 252150 - DNA, 280 bp, Homo sapiens
caatatttcatggttaaaaatggaagaatatttcagggctacgaaaattatatgaattcaaaatttgatgatcgtaaacaaagttttactgcaacatagtcatcatttacatattgtctatggctgctaccatgaaagaacagcagagttggatagttgtgacagagaccttatgacccacaaaacctaaaatatttactgcctgatttgccaacacctgctctaaaaggtctgttcagtggtcacaagataaagcattaaagccagtaaatgctcatat

SEQ ID NO: 252151 - DNA, 322 bp, Homo sapiens
gaaggcccggacaccgggcgacgcacaccggccagctcacgcgggagccagcgagaagggtcggcgcgagcgcgcgcggggtctcacgcggctcggcagcgcggagcgcatgctcagtccggcagctctccctgctgggcgggggagccggcgctccgaggcggggggaggagcgctcaagcagccgcccctgaccggagcgggctcggccgctgctgcagcgctcagcgcccgggccctgctgaagccgggtctagcatgtgccgcggctccccggcggcggcggcggctcctctgcagcagcctcagcagcagcggccgc

SEQ ID NO: 252152 - DNA, 453 bp, Homo sapiens
gctaatcatgcctccagccccattctctgattcatagctctggtttggctgtgttcctcactagaccattttgcctttaaactccacctgccacttcttagttcccctgttctctaggctctaggcagccccgttcctgattaaactcaacctcttttatcaagggaaggaaagtgaaggaatgtacaattgcagtccaaccacaggccaacccaggtgtctccgtgccaggatctgaagatcggatctgtcttgtttgctgtcatatccctaatccccggcccagtcgtggactcatagtagatattctgaaaaagtatttatcaaatgaatacactgacagtacagcatgatgattaggactgtagaactgggcatcagacagttctggatttgaaatctgactgcctcttactagcattgtgtctttttttttttttatttttttgagac

SEQ ID NO: 252153 - DNA, 934 bp, Homo sapiens
  misc_feature (934)..(934): n is a, c, g, or t
tataggtagtggtcaagcagtggatgaccacgaagtagtgggtatacagccatgggtggaattcagccattatgcagacaaagtaggaagcctgggcattctctgccattcttgaaattttctgcttaagtttcaggttgaaatgtttggttatcaaatgtcttaaaacatagccctgaatcccccctttttaaaatagaacctttatagccatatagagtttcatttcattaaaggaaaggtgtgacagcagccttgttaatcggagggtgaagaagatgatcagctaaagctttggcattcagtatggcccagattagcatttcaaatgcagatttctgcatgccctctctccccaacccccatctcctaattttactagtgaattgaattcctgggtgatttttatgtacgctaaaggttgaaaacctctattctggatattgtactgtgtcataggagagagcagaagcatccacagtgaaaggaagaaaacgcattttagattctggtattcctcttctttcacatttttaaatgttattaacatcaatacctactatttctagttaaaattcagatggagaagaaaaataatagctcccacgcattacatttgtaacttcaaatggtaagcctctcaggagcttctacagctgcttggaatttctatacaacgatcttacttaacctactttctttcagatcaattccttgcatctaaacgatgatgacgtttaccgaagctctcttgacacatcttgcaaacctcttgttgatggtacttaatgacagttcaacggccgcgatgattgctgtcacttacttgggaaccacctgccggacgactgcgtgagtcccttgcgattctaataaacatgtactagcttgtattacgaccacacgtctcatgttaccctggagtggactctcn

SEQ ID NO: 252154 - DNA, 349 bp, Homo sapiens
ttgcctctttatagccacattcactccttctccccatcctaccctatctccatccctcacccccagcagcacttccctattctacatttctgtaagttggtcaattcacaaaggttaaacaaatggaaacacacagtatgaaacatttttgtattgcctttttttccccacttggcataaatccctagagatctacccaagttgctgcatttttattgctgagtagtattccatggtatagatgggccagtttctgtagtcactcacctgttgaaggacacctaggctttttttttttttttccagtttttgactgtacaaataaagctgctatcagcatttgtgaaca

SEQ ID NO: 252155 - DNA, 501 bp, Homo sapiens
catgaaatacaacaatatacagatataacgattgaacctatcaaggataataatgggagagagatcaaagcgaaagtcattccctccagggaaagattttcctttgatcttctccattttctcttgggttttcacatgttttcattgacttaggatttctcccctgatttattaaactttgtgttatagtaattttagttgttgtcttcaagtcctacgcttgtttgctttttttgagacagtctgggcaacaagagtgaaactctgtctaaaaaaaaaaaaaagaaagaaaaaaaaagaggtgatcaggccaggagggctctgctctggggatggattaatgctgttattgtaggggtcagttcctaataaagggatgagttcatctcctcccccttgttctcactgtcacctttgacgcagcatgaagcccctcaccagatgccgcaccatgctcttagactttcgaactatgaggcaaataaacttctgttcatttaa

SEQ ID NO: 252156 - DNA, 712 bp, Homo sapiens
catatatggatgaggaggggcgtgagggagccgcgtgcagggcgggaagccttctgcatcttgagttgggcggtcgttacacaggtgcgcacagatacagacaaagaggggcgtgagggagctgcctgcaggggaagaagccttccgtatcgagctgggcggtcattacacaggtgcgcacagatatggatgaggaggggcgtgagggagccacgtgcagggcagcaagtcctctatatcttgagctgggtggtcattgcacaggtgcgcacagatacaaaaatttaccaagttgtacactcaagatttgtgaattttattctgtgtaagttatatctaaaaaaagaaaagaaaagaaaaagctagattccctaaaacagagacagcagggctcgagtctgagctagctatagccatgccagcagctagatccatgaaaaggttggggttggctttgcccaggtgatcattcggggacgggggacgtgctgtgaatggaagatgtgcctgctgtcagcactgatgttgcccaccctttatttctacaacgctgtcttccccgcacaacctggaaaccctcgcctggcgtcggctccatctccagatgttactcactggctaccgctaggtggctgcgaagggtggcggcgtcactgatgcgcagctcaggcagcagccatggggaggttgaatccccggggcatctgcctct

SEQ ID NO: 252157 - DNA, 512 bp, Homo sapiens
ggataaactatctgtatgattgagtttaaaaggcatggaaagactattacgaagtattgatcccactcagtgagagcaagcacagctttcaaatgatacagatctggctatgaatttgaatggtgactgtgcctagctgtgtgaccaagggcaactttcttaacctctctgggcctctgagtcctcgtctttaaaatgagacaaataagcccttgcaagacgcttgtgatgataaaataaaagagtatgggtgaaagtccttaacagaatgcctgatatgtagcagatactcaacagagttagcaatgtttcatttaattaaagcatttgagagcaggatagggagcaccactaacttcagctcttcaacaattttgcctggggctggctctggggaatagacttggattctcacgagtatgtgaatcttcagttacttccttgaaaggacagacagttataaaagcaagcagtgaagtctgggaaggtggaggagaatggttatggaaagt

SEQ ID NO: 252158 - DNA, 241 bp, Homo sapiens
gcagatgagccggtacctttcaaagcggagatgctgcaggacaacactaaatccagtgcccagcctgaaaacctgattcccatgtggtcctctgacattgtcactggggaaaagaatgaaccagtgaagcctctgcagcccctaatcaaagaacaaaagccaaaggaccagagtcttgccctgtcgcccaagctggagtgcagtggcacaatcttggctcacagcatctccgctttggaaa

SEQ ID NO: 252159 - DNA, 376 bp, Homo sapiens
gtaaattttggagagggtttcccatgccttaagaagtcctatttcatggctatgatagactagacatgaaatatatctctccgatgacactacagctgtgaaatatagcctgtttgcactaaatgaaagtactcacattttacacatcacatagcttactagtttactttcccaaactggctctgtctaccctttgggaggtcacattatcattgggagaatccaaactgctccatttggacagtttttatggtggattccttccaaaatttgacattagctctagaaaagggttccttataaactaaaaatgcaaagtaaatcattcttatctattcaataaatcttcccattaaaattcctcctgccattgggg

SEQ ID NO: 252160 - DNA, 185 bp, Homo sapiens
accccagcatcgggccaggtcagagtgaggaaccgactatgctggctggccagaaggagggctggccaggagaggggggcccagaggagggggacccagggattcaggcaccctcagaagaagctcctgagacttgtgtctctgagagctaaaaccaaaacatatgagcaaataaaccaagtaac

SEQ ID NO: 252161 - DNA, 574 bp, Homo sapiens
tgagcagctgtggaaactggttagtaactaattctttacccagatgttccttcaagatttcattacatcttgcagtgatcattgacaccagttgtcactgtatggttaacagagatcttgaactggccaattaccaggctaatggagaattttttttttaatcgaatgggatactgcagtttttagacctttttgagtagaggaggggagagtatgagtcttagtttatttttaattgtccaacaaattccaagttcttaattaaaatattgaaaattcattacttttaggacaaaataattcattttataaatgactaagacttctgtcgtagaaagccctggagctctgcttatcagaaaacactctggataaggagatgtgacatgctggttttttgtgtcatctttacgctataaacttcctctgctaatctaagtattctttgttcacgtgagactgcaaatttaagctgctgcttctagcaagatttccaccatatgctagaacttaaatagaagcgtgttttttgtacatttctgttatgtgtgaaaaataaagttttgaaattata

SEQ ID NO: 252162 - DNA, 412 bp, Homo sapiens
tgaatgggccttgtttggattctaatttaaataaaccaactatagaaaaacatgttttaggcaatcagattttttgttatgggctaaatatttagaagatgttaagaaatgtttattaatttcattaggtaaaataatgttggtgtggttatgtagagtatgacttacgtgcacagaacagaatgataaggtgtccaggatttgctttaaaatattctagatttttttaaaaggtgagaggaaatgacacatgtatatctaaattttgatggttgttgaagctggctggtaggtacctagtatttcattatactttttcctttgtgtgtttggaaatttttataataagcaggaaaaataaaagtaagaatatatgtattatagataatttgaaatatgtagaatcatgaaa

SEQ ID NO: 252163 - DNA, 347 bp, Homo sapiens
tgagacaccttggacagctcctggcacatagacacctcccagtaatactagcaggtgtgaggactgggatgaccccttcccattaaaccaggcagtttctcctggctcatgctgggcggcccaaaagtcccctccttaggaagccaccttagattctgccaactgtggtaactttgtctgcacctcagttatagcttttatgacataaaaatcatatgttcaggctgggtacggtggctcacacctataatcccagaactctggggagctgaggcctgcagatcacctgaggttaggagttcgagactagcctggacaatatggcaaaaccccgtctctactaaaac

SEQ ID NO: 252164 - DNA, 446 bp, Homo sapiens
accaagtccttgcctgataaggaaataaacccaacagtaaatcaaatgtatgaaggaaagaccaggcatgtttctttgtgttctcaagtgctgaaagcaaaatagcatgtcaaaaggctgatcttcattcttagttatgtactagactaatcaagtcccagaaagagtaaagcgatcagttcttttactcaggcagaagttcttgcccatttctttggatcatgtccctggtcctccttgtattctacagtgttgctgtgtgggagaggagccttgatggaataccaaagcccagtgcacgtgagcaatctgtgagtggtccagctcatcagcaggcttgtatcttacgaggtttccttctgagctaggagtccacttcagccttccttcagagaacgtttcctagaatatgtacttgtgattaaactattcaaaagttgttttct

SEQ ID NO: 252165 - DNA, 582 bp, Homo sapiens
ccaataactattccttagtcacctaagtttcagcttattatggaggctaaagttcctaaccacctgagttcaaagctcaatgtggtcaagtatgagactggctggaattgctggaccttaaatctcctttactccttcaaactcaaaatgccagtgctatcacagacaccggcattgttgagcccttctccctatctcacaacctaaatgatgttaggtatcttacttatcagttcctcagtaatctaaaattcatacctcacaggtattttttggactcaacatggaagcatcatcattacaggtaaagactataggcttttaaagttgaatagacttgggtttgaaggccagtttcatcacttactagctgtgtatcctcaggctacacaacctttttgaacctttgtttctttgtctgtaaatcaggataacagtatcttctacacattggttttataaagattaaataactaatacatataaaacactaagcaccaggaagctattttgtccaaaactagatagagcagagtagtactcaactgcctggtttgaatctcgcttcttaccaacagcata

SEQ ID NO: 252166 - DNA, 463 bp, Homo sapiens
tctggtttgtcaatcatcaaggccagactgggccagaggggctttgtcaggtggactcagagagagactcacttgtcagtgcacaagagggcagccactgcacagacataggctgagagctgcgaagagggaacctaaagcaagtgtcgccagatatccccattattagttatcagctaactcttagttttcagttaacatcatagtttccaggaaatattttagttttctattaatattttaattaactactagcatcagagtcatcagcaaatatctaagtcatcagtaaacatcttaggtgtcagtttcctctgagtgaatgtagtagacctcttagtcatcatttacttcattattaccagttatgcactaataattagtggtctgctaatatctcgtctaccaatcatcttcagcaataaacatgctttaattatcagctgataattaatgtagccat

SEQ ID NO: 252167 - DNA, 352 bp, Homo sapiens
cagggccatcacgcctgctcttccctctttctggaatgttcttttggcatctctcctcacagtcgcattcactctcacttcttcaggcagcccttcatgatcactctgtaaaaagcaggtcaccccgccactccctgtcacagcacccgggccattgcctgtgtgacgcataccagaatgttctcctggattccttatgaaagtgttcacatgctcgttgtctatcactggggagctctagtggggtttttcctgttcttttattgcacccctagcacgcagctcatggctgtgttcatgaacaagtgtaagttgtaaataaatttcctctctgtccacctctctccacaca

SEQ ID NO: 252168 - DNA, 496 bp, Homo sapiens
cagatattgctccaaagctgtttgttaaatacttccctactcttcctaaacccctgcccctccccaaaagaaaaataaatcatattcagaccatcgtgcgatggttatatctctggcctccctggtcacccagcctctagctctctgctagcaccactccaaattgctgcttcaaaagaggtcagtcagcccctttcccttactcctcaaccatgacctggtctgtctggaaagaggatgagatacatggaccaatacatcctatttaaaagggagcttgctttctcactagggactttagactgcctgacacacaggaaatgactagaaaatctgaccagtggagcataactcattgctaaaatggcaggtttggacggctgcaggatgggagagcaggcttcctgaagaggcaggaaggggcagctggatgggaaaacagtgacttttgagtttttccttttagagtatggtgacgtaggccgtttattaaaaa

SEQ ID NO: 252169 - DNA, 230 bp, Homo sapiens
agaaaaaaaacccattctaaaatttgtatggaatctcaaaggaccccaaatagccaaaataatcttgaaaaagaataaagctggaggactcacacttcttgatttcaaaacttactacaaagccacagtaatcaaaacagtgtggtacttgcataaagacaaatgtgtagaaaaatggaatagaataaataaacccataatagaataaataaaggcccagaaataaacct

SEQ ID NO: 252170 - DNA, 130 bp, Homo sapiens
caccaaaaataaggcattattgttcttaaataactatttttaatgccatttctgagtgaatttcctcccggaaagacctgcctagaagcattcatgcatagttttcaggcaataattttcaagaaatgta

SEQ ID NO: 252171 - DNA, 444 bp, Homo sapiens
gcttgggaacttttcagaacgtcctcagaaccgcaggagccaagaggaaatctcccgtaggggatctcaggtagggcgtgccaagaaattccaagagacgggatggagaagagaagccggagaaaaatcggccaattagactcctgtaaaaatgtgtgtctccatgtttgtcctccctcctgaaataagaaattcatagctgggggtggggagtagatgggggctgggggaaaaactttctcacattcacggagcagcttccctcaaagcggcacggaatcgggaaccccactcaggacaggggaaaacggccaagttcctagaaatttgttttctttgtggggagcaattcatgatgggcgttcttgtctggtttccccccactccgtcccctgacgccgagtaacacttaaacctttctagttgcaaagtcaaatcagagtt

SEQ ID NO: 252172 - DNA, 445 bp, Homo sapiens
aagacagatgtttatgaactgtacagaactgacttggagaaaatgttttgaaaaaggccaaaacagaagaaaatgtgaaagagctttaaaatgttctagcccaggggcctgggggcaggggtgctgttggaactgggatggatggatcggggagatcaggggagcagagccaagattccctctagagttaagggcagatggaaagtggtgcttggagaaatgcagggccacagggaggcaaactcagggtctgcctgatccgtgtaaacaataattaaacctaatcttatgatctagtgacttgtaagaacagccaccacctacagctacctagttgtgcaaatgttcacaatattatgctcatactaatatacaaatgttcacaatattatgcaaatgttcacaataatatgcaacacttaatttggcaaactcccaggctcaa

SEQ ID NO: 252173 - DNA, 295 bp, Homo sapiens
cagcctcccaagtagtggaagcacaggcatgcaccgctaggcctggctacaatgtctgacatttggaaggaagatattaagactcagaaaatggtcaaagtgtcaactgctgaaaaatgtccaaataggttgatgcaaaggacattggatttaactacaaggtggacttggtgacttctgatagcagaatttgaatgaaaagactaggagagtctgtgtagatacccaaattgaagggatagtgaccgtaataattgcctacaagataatagtgctgataaacatttcaaatagt

SEQ ID NO: 252174 - DNA, 1617 bp, Homo sapiens
ggagaatgctgatagaatggtatttttggatcaagataggagggtgtgatatgggaacttctagtccccccctttctcaggagagagctgtcttttgaagaaatccatcgcacgaaaagcaggcgagagaggggaaacctgacattgtttgagcccctgcagtcagctgccatcaaagcctttgacttcgcatgacttgaaccactgaatcattttttttctttttttttttttttgacagagtctcgctctgtcacccaggctggagtgcagtggcacgatcttggctcactgcaacctgcgcctcttgggttcaggcggttctcgtgcttcagcctcccgagtagctgggactacaggcacccgccaccacatctggctaatttttgtatttttagtagagacaggattttgccttgctggccaggctggtcttgaactcctggccttaagtgatccacctacctcagcctcccaaagtgctggaattacaggtgtgagccaccacacccggcctgaattgtcttttatctcaagttccttcattgctactcaaagtgtgctccacaacccagcacagccacatcatcggagagcttgctagaatgttgggccctatcttagacctactgagtcagactctgtattttaagaaggtgcccacgtgactcacgtccacgctaaagtttgaaaaatgctgagctacttcaacctggactttgtcacctataatagaattaaatccccttcatcagttgcgacaacagaaaccccaactcaaacttccctaaatcattagggtatctttgattggccaggtgcaatggcccacatctgtaattctagcactttgggaggctgaagcaggggcatcgcttgaggccaggagtttgagaacagcccaagtaacgtagcaagagacctcatctttacaaaaagttaaaaaaaagaaaagaaaagaaaagaaaaagaaattagctaggtggtagcacgagcctatagtcctagctactcaggaggctgagctggaggatcccttgggcccaagagctggaaggctgcagtgagctatgtttgcaccactgcactccagcctgggccagagcgagacactgtctctaacaaaaaaggatatattttacttaagaagccccatggtagagcagactcgagagactcaactgagccaagcaaagatccagattttcttcatctcagctctgtcatcctcagtgtggacttcattatcacaccataccaaggtaatcatcagcaggtctaggcctgatcatgtctctaggccttcttaggagtgatagaatctttattagaagcctcctaggccgggcgcagtggcttacgcttgtgatcccagcactttaggaggctgaggcgagcaggtcacctgaggtcaggagtttgagaccagcctggccaacatggtgaaaccccgtctctgctaaaaatacagaaatttgccaggtgtgatggcgcacacctgtaatcccagctactcgggtgactgaggtatgaaaatcgcttgaacctgggaggtggaggttgcagtgagccgggaacgtgccattgcattccagcctgggtaacagagcaagactc

SEQ ID NO: 252175 - DNA, 464 bp, Homo sapiens
aggctgaggttctgactgctggcctaaaagaaacagggtctttctctgtcccccaggctggagggcagtggtacaatcatagctcactaaagccttggatttctgggctcaagcagtcctctctcctcagcctcccaagtatctaggactacagccaggattcccccagttggactctcacatacctgtggacctcaagtgctccttcatatgtgttttcaatgaacttcatccaaaccacatcaaatggctgtgtataacactaaggaaatgtcatattgtctcctagtcctctaccatgtcttttacacacactgaagatcatgtgaagaaagagagaagatggtcatctatacaccaagttaaacgaccctcagaagaaaccaaccctatggacaacttgatcttgaacttctagctttcagacctgtgagaaaataaattgctgttgtttaaatttaaaa

SEQ ID NO: 252176 - DNA, 689 bp, Homo sapiens
cgattggcgggcacttacaggtggggattacagagaatctcttatccaacatcaacagtctggtcagatttgaactcttcaatctcttgcactcgaggcgttgtaagatagttaagcgtgcataagttgcccgccaatcgattcgattgcctggcaacttaaagggcactggtagatgttattagtcttctttttgaaagttcttcttctctcgctccttttcaagtattgtttggttgatttgctaatactccttaaccttgtctttttggctccatagggctcagaatggaatgcctccaacttagaggacttacagaaccgaggggtacggtatatcttgaatgtcactcgagagatagataacttcttcccaggagtctttgagtatcataacattcgggtatatgatgaagaggcaacggatctcctggcgtactggaatgacacttacaaattcatctctaaagcaaagtgagtaatagtcctgcacaatgttgtgatctctgttcctcttgccccaccacacatggctgggtcctgagggctatagacaacttactgatggtactcaggaaaaaggaactaaggaaaggaggagactgaaatctttttaatcctaggcaaaagactagtgactcactttaagtaaagtaaacccctaggagaaagtaacctcatgttggcta

SEQ ID NO: 252177 - DNA, 525 bp, Homo sapiens
ggagtttttaagattaatgagttcgtacatattaggtcagtagaatagtgtcgcgtacatagtatgcactcagtaagcattagctactatatgtctttctgtctctctgtttatctatctgtccatttatttatgtatttattgagacagagtcttgctctggcacccaggctggagtgcagtggcatgatctctgctcattccgagttcaaggaattctcccaccctagcctcctgagtagctgggactctgacactaaaaaagacactaatttgtttctaaatcatgaagttttactggttatcttatatgtaaaacattttagcctatatattataaactgtagccaatgattgtgacctctatagtatagctcctagtagaaaaagacaaagacaactgtgggccaggtgtggtggttcatgcctgtatcccagggctttgggagaagcatagaatttttagagaagaatttaaaataatgctgtgcctaggcaacatagtgagagcctgtctctacagaa

SEQ ID NO: 252178 - DNA, 455 bp, Homo sapiens
tggaagaattttctactctgaagatgccacagatagtgtcatccccagggcaatgacacaatcctaggaccagctcacttccaatcacagaaaaaaggtggatccccaagaatacccactgaattaggcaccagatctgatttggctctgtgtccccacccaaatctcctgttgaattataatccccatgtgttgaaggaggggcctggtgagggggtgtgtgattgaatcatggaagtggatgtcccccttgctgttctcatgacaagagttctcacaagatctggttatttgaaaagtgtgtagcacttcccccttcactctctctcctgtcaccatgtgaggatatacaggtttcccctttgccttccaccatgattgtaagtttccccagccatgcctcttttacagcctgtggaactgtgagtcacttaaacctcttttctttataaatt

SEQ ID NO: 252179 - DNA, 405 bp, Homo sapiens
gagagaaagagaaagagaaggaaggaaggagaaagagaaggaaagaaggagccttctaattttatttcatttctccaataaatgttcctatattaagactttagacaaagattagaaatatgatttgacagaaagtgtatggatgtgttgttctattgcattgtaagtaaagtatccatggcaatatacaaataatacagctcctacccctattctctgttgttactttcatgtgttgtcttaactttttaaatttcaagataatattgcgcttatttatttttccatgaggaggcctaggatttagcttgattagaaaagctgtggaaaatgaatgtgctaattactttaaatcaaattgaaaataaattttatcctgtttcatgcaaaacatagtgtatttga

SEQ ID NO: 252180 - DNA, 559 bp, Homo sapiens
ggcttttacttgagaaagaggaagagaaacgtctgtgtttgcagtaaaatgtatgcccttccatttttgcttttaagcattcgtaggcatagctattctttccatcagagtggaaggggtgggtgctgggtgctgtgtggttacgatgtcaaaattaagatggatgagggagcaaccaagtgaaacatccaattcctagttttaaaatatcccctcccccacctccactaagcaatattggcaaagcaattttataatgtgtgaaagccacacgaagagatgagaatgcagccctccgtaatattgttagtggaagggctctaaaatttgttccctggcctatttgctcctattttttcaatgggtttcatatgattttagaagagtcctgtatgtaaaatgtcatcattttcacaccaaaataaattttacaaaaatagaaacaagaatttataaaacaatggattttaaaaaggcactatcacattaaatcctgtcatttagtgaatgcagaaactgagatttagagagggtaaactgcttcgttacaaaaaagaaa

SEQ ID NO: 252181 - DNA, 1104 bp, Homo sapiens
aacaacacttccctttctcaagcttaggaaattttttaaaagttacggaaagggccccatagtgcacttcggttggaaagaactgtgtactgcacgtgattatttacagccaagtggagagtgactggatcctaaatacatgtttccgtccctcagcccctgtgttggtctgtttgcttaataatgtaattagtgctcagagggagaatattgacgctgctgccagcaggctttgctcttccgtgcgtttccgaaccgttccttttgcccacttggcttttgcatcacctagtttggtagcttcagctgtgcacctagccatgcctactccgccccacacactcctcagaggcccctctcctaatagaagcccaactccacactccccacctgcgggctgtctagttctacatttgcgaggttcacatcttaaacgttcagatggaatgttccttgagagaagcagctatgaagaccacctctaatttctttctgaccttttagtaaggaaaggttggacgtactgcttgctgtgcatttccctagcaatgtcccttatctggtattaatctgtcagtgacttggggcccgactcactaagacactacccatcttttaatgcagtcttgctggaggctgaaaatggtgcaaactccactatctggaaatggaactctgggctaatacctcagctcggcaatgtttttccttcttaccccagctggaggtgaagacagtaactcttactaagctattttctcctggaaacacagacgctccctgagagagaatgagagaatgaccagtgatgccatctcccgttggcagcgccatgctgtggtgcggcccagatgggcctccatgggactgctgctacccgtgggatcacggcccctccgtggatttgggggatctgagaacacgttttctcaggtgtttatctggcaacctacaaaatcccccagcccttctccagtagaagcccagaagggtgattatggtttaaaaagccaagtcataaatcgggctttctctactcaacttgctttgtagctgaggaaatccgcagagagcaatttaaaaggaaaagaaaaaggctgagaa

SEQ ID NO: 252182 - DNA, 447 bp, Homo sapiens
agctaaacaactatttcctactttccaatttggctttaatgagcccgtatattctactttccaattttgttacagggggagtgtaacctaaaggtcaggttcagtctcctgtcccctgagatctaaggacaattgattcaacaccctcctctaatcctcatagggtagagaagtccaagctttccctagagcaccttaaaattccacgtcacccaaaagggatacccttctcagtttccacataaaatgctctcccaggcagtccccatgtaggaggcttactaaaagggcctatttcctcactggttttaaaaaaaaaaggcatcagctggtctctttggactctgccagcccccaaatagtgaatccttctcattcttcctttttttccatctctcccacttccttctcctctcttctcaaccctcctttccttaaaaaaaaaaa

SEQ ID NO: 252183 - DNA, 636 bp, Homo sapiens
ttttaaaagagaaaatgcctagcaggtaaagatacaatatcacagtttagaagagagaacagggtatcatcagtaccatcaaaatattattaagttttactaagtacttggtaggtgcaaagtaccatgccaagagctctctaggttttcactcatttaataccataaatttaaaacgtagaaactattattatagccattttacagatgggaatactaagattcagagtggttaagtagcttgcccaaggttacaataactggtaatgcttagttttcaaacctgcacagtcttatttcagaacctagcctttaaacaatctgctagtaaaaaaaaaattatgattttgcctcctaacaagccctgaaaaaaaataaataatgactgtgaacaaaatccatcccttcctccaaattacacacagaaagaacgtgtaagttttcttggcactagcctaaatgcctatttcctaaatttaactcaaaactttgctttcaaaatatgcacttgctttatttacatttttcctgtttaaaattaatgtattaaaactttttgattttatttaaatcttgagttttctaatatgatttataaaatattgacagtgaagtaaaaggtaaatacaaacaaca

SEQ ID NO: 252184 - DNA, 507 bp, Homo sapiens
ttgcgccgtttcagtcctccagtcgctgttgaatggagtttccgtctccagtctcagccaaagcaggcaaggcggacaacctcggcctggcaaccagaagtatcattccttgattcaggatcaggctcaagagttaacccaactccgaaacctctgtaggggccgacctgctggaaaagaatcttgctgagatacagaacctgcgccagcgcctggaggagtccatcagtctcaatgaccgcctgagggagaggctgcagcatgtgcttagcaatggtgaccaaggaaaaggtactgcacagtccactgtagcccctcattcatatactcagagtcactcttctggctgtggtgaggacatcctgtgacatgatgcctagagagtctggaagaatgttctccagaacttttccagccctatccaacagaattcttgggtgggaacttggaggcattggatattatctttaaatgaagagatcaaattaataaattatttttaaaatt

SEQ ID NO: 252185 - DNA, 545 bp, Homo sapiens
cactagtatcttgaggaagatgcataatatgagtaaagtgacagaagtcctagagaccaagtgggatgcccggtcccagactcagccccagatctggtgcagcaaccacacccggtctagcccacatcactccctgagcagcacgtctccacagcttgacaaggaggaagtgcatccttcagtgactgtagtcataggggccgacctgctggaaaagaatcttgctgagatacagaacctgcgccagcgcctggaggagtccatcagtctcaatgaccgcctgagggagaggctgcagcatgtgcttagcaatggtgaccaaggaaaaggtactgcacagtccactgtagcccctcattcatatactcagagtcactcttctggctgtggtgaggacatcctgtgacatgatgcctagagagtctggaagaatgttctccagaacttttccagccctatccaacagaattcttgggtgggaacttggaggcattggatattatctttaaatgaagagatcaaattaataaattatttttaaaatt

SEQ ID NO: 252186 - DNA, 384 bp, Homo sapiens
gagacggagtctcactctatcgcccaggctggagcgtagtggtgcgatctgggctcactgccacctctgcctcccaggttcaagcgattcctctgcctcagcctcctgagtagctgggattataggcatgtgccaccacgcccagctaatttttgtatttttagtagagatgaggtgtcaccatgttgtccaggctggtctcgaactcctgacctcaagtgatctgcccacctcggcctcccaaagtgctgggattacaggcatgagccaccgcacccggcctactgtcctttttttaacttagtatgcaagtatacaactctgcgtctttgggtctccatttcttatgaaggctcccatgccacattaaacttgtattaacta

SEQ ID NO: 252187 - DNA, 367 bp, Homo sapiens
cattcccaatgccatttaactaacaggaagcagaagctgtctaactccatttgtcccaaattaaccaccactctccagtgcgtttactttttctttattttgctttgagcccacatcaaaaacaaaaaacaaaactctggttcatcgacctgactgctgattgaaagagctgacagtggtagatgagcaggagatctctttcagaagaccagtacctttggaaatcttgaggaatcctcattgagaggaaaagttaagacctaataggttattttaaaagaatacattgattccaatgacttatgttttagaatgtctttcgtatcataaattacttaattttaataaataaagtgtataaattaaa

SEQ ID NO: 252188 - DNA, 711 bp, Homo sapiens
catctgtcatccatctagtgaggtcaggagagtggctgcttaacttctgggggttgcagaaaaggaagaagaatcagcagagagcatttgtggccagcaaagcttaaaatatttcctaaccgatcctttgcaaaaaaagttcacccactcctgtagtcagcagctcccctactgtgcgcagtcagtgtgccatctcagactagcaaagttgtccagagaggaaagacaggccaaaatagttcagtatgctgtcttactgggaggacaacagcttaagccacaaagccctgagtttgaccctagaactctgtggctactggtgactcatcttgaaaattatcagattgaatcttctctaccggtttgataacaactgatgagtggaaaaagaacgccaatcaaatgtgcatgcttaataagcagcctccttattcccctctgcagatttgtgcttggatcatctacacttccctgaatgttgaagaagatatgctatccatgcaatccttgtcgactgcttgattaaaaagtggataaactgtcttcaggcccttggagtatggtgtctgtgtgaagaagggaatgaggcagaagtagcagtcagtggtggctgaagtaggagaatcgcttgaacccgggaggcggaggttgcagtgagccgagatcgggccattgcactgcagcctgggtgacagagcgagactctgtctc

SEQ ID NO: 252189 - DNA, 308 bp, Homo sapiens
aaatagtgtgttaagtgctacggcagcaaattgctacatgtgctggatatctcttgttttcccctccagctccactctgctcttgcccacaaagctgacccgaatggaccacagcagtgggctcctatgcctcctggcttctgagtgggtttggccaaggagtgtcctggccagagatcagaggatggtagggtgcctattctcggctcttctcctggggttggggggctgccttagcagccaaaggtcacttctcccaaactccttccctgctttccaggttgccagtccctgcactcttcctttct

SEQ ID NO: 252190 - DNA, 555 bp, Homo sapiens
ctgggctttaagtcatgggcacaaacatctttcacctcccaccctggccaggtgacagtgccccttgcctagttcctgaccctgcccttgagtcttggttagtctgagtcctccaagaaggggctagggagttttttacccttgcctcccctccctggcctcttcccgtctgcctggctacagaggtaactgagaaaggattgctctggtgccaggtggcttttggctcgcaacttatttcctgtggccggcccttaacaacttgtcatccctccctcccctcattcccgggggcccccacgtgaagccccatagtgggtcactcgggggctgtggccacctcacccttgctttcagaactcccctattcctctcctagaacacaccacaacctacctgcaggaatacccatggctgggggtgggtgggggcaggtaaagggcttggaacagaagagcaacgctgggcagcagggcagggggagcaggtgttgctgtgccctccctggtggaaggctggcccagagagcctgctcaggaatgaggcactctcagg

SEQ ID NO: 252191 - DNA, 442 bp, Homo sapiens
taaaacaggcatgctaatagtgcctccccacagggctgtggtggaggacctaatgagagcgtgcatgcagggggacattggcgaagccatcactcacatggcccctgggtcccccaggaagtgcagggcacagaactgagcaaaggaactggagaaaggcaacagcgctgccctccaagtctgaggacctctggagtcttatccagatagccccaccctgccctaggttctgcctcctctgtaccaggcaccatggcaaggtgcttataagcacagattctggattctgacagagctcagcaaatcatcgtgttactttgggcaaatcattttgcttctctgagcctcagtttcctcatctataaaatgggcatcattacctcctagtacaattatgaagatcagatgagctaatgagtataaaaaaattagcatggtatct

SEQ ID NO: 252192 - DNA, 746 bp, Homo sapiens
ctgtaatagactgtctcaacttgtcaactctctgagctgccacagagattgtttggtgtaggatttagaagaaagaattttggagacaatcttggatttacatgccaacttcacttaacggtgcacagtaaagtggccttgtgaaaggtacataataatctctaaaccccagtttctttacctgtaaaatgggaataaataggatgtgtacacaatatatacgacaataaatgtaaagcacttagcataacatcacaaataataacaataatactcattggagatggtcctgtgtgtggccttatactttctattccagtttttctgaacctcttgagctaaatagtgacagtaattttggtatggacaacttgagtaaagtttttgccccgtggactaaggggccagagagcagtgtcaaaaagcatgatggcaggattttgaatgtgacagatcatggaaggagtttgacttaaggagatttatggacttcaagagtagagatcggcatagccacttctaagtgtactcagccttcttgctcccggagactaagaagcggttaaacatctgagctgcatcactgttcgtgacaggaattttggatacaggaggctttttcttattctttatcctcttattctctcagcaagatctggtagttcatctgtgtctggattttcactacctgtaggactaccagcttttggattatattaataaccaggcctgaacccaagtgagac

SEQ ID NO: 252193 - DNA, 413 bp, Homo sapiens
tatgcatgcagatgatacggtgcctggcattctgaatacatgcactaaatccaccacttttccccatttatagatttggattaacacactaacttactcatatctgcaagtataaataaaaaaaattgctggtgccaatttcaaaaaaaaaaaaaaaacagaccaagccaacaggaacccagcaatcgaccaatacagctgtgactctgactggctagtagtctctggcaccctgtccgtctccagccagccagctcatttcactttacacgctcatggactgagtttatactcgccttttatgaaagcactgcatgaataaaattattcctttgtatttttacttttaaatgtcttctgtattcacttatatgttctaattaataaattatttattattaagaataaaaaaa

SEQ ID NO: 252194 - DNA, 568 bp, Homo sapiens
  misc_feature (58)..(58): n is a, c, g, or t
  misc_feature (78)..(78): n is a, c, g, or t
tgccaaagcgtagtacccaataaacagagaccatagctactagctaaggagaatttanaaacaagaactgaattaganagaggccaggtgcagtggctcacgcctgttatcccagctactcgggaggctgagccaggagaaaggcgtgaacctgggaggcggaacttgcagtgaggcaagatcgcgccactgcactccagcctgggcaacagagtaagactccgtctccgagactgaaataaacttgaaggggctaataaagacatgtgtgagacagtccatcagtggcacaaggcctgtcttctcagaacacactacaccaaaacacactgcattgggtactacgctttggcatgccaaagcgtagtacccaacacgacagttttttgacctgagtggtatcagaaataggctttactataaccaggtaaatacctgaacaaaggaaccctcatcaggaaggcactgtcactcttggcagcagcaatcccacaggaaaggagttcccctggcagagacagagagacagctactcatctgacaaaactctctcagtctgtcctttgcc

SEQ ID NO: 252195 - DNA, 314 bp, Homo sapiens
tcgatacgacttttttttttcatagaaaatgacattagcagtgtctcctaaggtcattttctatgaaaacataataccgtatcttgaatcactttcttcatttggtttcttgattctcctcatatttcactggctccttctcccaggtctcttttgctggttcttcttcagcttcctgacctctaaacagtggaatacacagggctctgtcattggatctcttctcttctccctctacatacacattgtgggtcatttcattaactctaaggccttaaatgctatctacttgctgatgacttccgttttctctc

SEQ ID NO: 252196 - DNA, 799 bp, Homo sapiens
gacaaactacaaacaattagagaactcaggtaaaatgctggtgtacacatagggtcccaagttgacgagtagcaccaagcagccatcttgaaacagtctccccggccctcctcttgataattgtctctggtgaggactaaccacacaattaactggtttagattttctgattttcaaatgatatgtttatcctcccaactctgaatattctcttcaagaccatgtcctcagattatccaacggaatctttttggcatgtttatcatctgaaagccaccagctgtactcggtttgtcccctctcctgtgacagtgctggtcctacctgagacttttcaacttgtgtgaattgggtcttccaagcattatcaaaggaaaagcaactttccagggaagggtggttgtagtaatcatcgtgcctatgtctcttgcaataatacttaaaatcagatggtgctgacccacttagaaacaaggattaaagaaatctgcttagaattgaattgagtccaccatagcaacttgccaagagaaatgcattccacagaatgcccttcagagaacctctcattagccagactgcaaacctttgatttcttttcatttaatatatgactgcctggaattcatttaaacatggatgtgatacatgttcatatgtatgttcacagcatattagtctagtcttttatttttcctggacaacatacacaagtcttatgtaggacttagtcatctgtagctctaacctaaattttaaaagttgtatatttttaataaaaagtatatatattctaaaa

SEQ ID NO: 252197 - DNA, 723 bp, Homo sapiens
gacaaactacaaacaattagagaactcaggtaaaatgctggtgtacacatagggtcccaagttgacgagtagcaccaagcagccatcttgaaacagtctccccggccctcctcttgataattgtctctggtgaggactaaccacacaattaactggtttagattttctgattttcaaatgatatgtttatcctcccaactctgaatattctcttcaagaccatgtcctcagattatccaacggaatctctgagacttttcaacttgtgtgaattgggtcttccaagcattatcaaaggaaaagcaactttccagggaagggtggttgtagtaatcatcgtgcctatgtctcttgcaataatacttaaaatcagatggtgctgacccacttagaaacaaggattaaagaaatctgcttagaattgaattgagtccaccatagcaacttgccaagagaaatgcattccacagaatgcccttcagagaacctctcattagccagactgcaaacctttgatttcttttcatttaatatatgactgcctggaattcatttaaacatggatgtgatacatgttcatatgtatgttcacagcatattagtctagtcttttatttttcctggacaacatacacaagtcttatgtaggacttagtcatctgtagctctaacctaaattttaaaagttgtatatttttaataaaaagtatatatattctaaaa

SEQ ID NO: 252198 - DNA, 661 bp, Homo sapiens
ctccacgtgccactgaggctgagcgaggaaaagtcatggcaaagaaacctgggacttagaaatagttccacgcatgctcagcgaaagaacaaaaggctgcatatgaactggacagtgtggaatgagcagacctgtagcacgggaagcagctaaactggacggtgtggaacgggcggacctgtagcacgggaagctgctacaggcactgggaggagaatgggcagcagcaaacggccttgggagacgaaaagcgtctcaaaaccaattgtggtgacggctgcaactccatgaatgtccacgtggacatttccacgagtcacggccgtgctataggtatgaggattcataactgtggtcagaatacggtgctgagaataaatactacctaagagaaggaggtgagagccctacgaagtggggtttgttgtggaccccgttgagtgtgtgtggggtctgtcttccgagccaccgagcctgggctgtatcgcggtgctgttcactctgacagagtgcgcctgaaggacgtagcctccaggtcccagagtcacagaagcgtcagagcatcagagcatccgtctcatcgcatggaccagaaacaagacagtgggctggtgtgatcacagctatcacccagcgaccggcctttcgctattggcaactc

SEQ ID NO: 252199 - DNA, 404 bp, Homo sapiens
gatacggtctcactctgtagcccaggctggagtacaggggcatgatcttggctcactgctacctccgcctcctgggtgcaagcaatcctcccacctcagcctctcaagtagctgggattacaggcgcacaccaccacacctggttatttttaaatttttggtagagatgggattttgctatgttgcctgagctggtctcacactcctgagctccagtgatccgcccacctcagcctctcaaagtcctggaattacaggcatgagccaccatgcccagcctcattactatttaacctgggcacaaagtaattattttacaatggaaaaacctgaccggcacctttttaacccagtgataaaagggcacctggcaaggaccaggtgtcccactacggtgctcctcc

SEQ ID NO: 252200 - DNA, 367 bp, Homo sapiens
aaaaaaggaaaagaaagaaaaagaaaagcaagaaagcaactgtgtaatcggtgtcctgagatatcaaagccacattctggtccccagcggccctcacctttctctccagccctgtcacctggtgaattccgaggatgtgtcttgtctgaattctgaagagtccccattagcagtcacaaaaagcctttgtgtgttttagaccactgtaggcatgtggacagcatgtgtgtctgtctctgtgtgtgtttgtgtgtgtgtgtgtgtgtctacacacattaggatttacagctgcctgttgtaataggttcagtctgaaagaataaacaagcctccttattttgccattaaaatacatttcttcccatgg

SEQ ID NO: 252201 - DNA, 345 bp, Homo sapiens
gttttctggctgagttaataaatgaatggaatggttcagaatttccagccacagtgtgacaagtaattggtgaaatctgcaaaatacctagtgcctatttaaaaagatgttatgttttcagatcattaaaatacagcattttatttgccaatgatttattttatttgtaaagtatcttactcataatgaaatgaaatagccatgactttagctcaataaaatattttactgcttctaaaacctatgactgtgtgtgtgtatgaagtaaaagagttgaaattaccctgaaactgtctccatctgtaattattattatttttagataaaaagattttttaaaatctg

SEQ ID NO: 252202 - DNA, 371 bp, Homo sapiens
tggtttaactgcaagggcctgatgaccttccagaaacaaagaagttctgctccaaggtgactttctgtgtctgctgctagaaactgctagcaactgcagttctcctgcttaaagaaaaaaaatccagtttcagttcaccaagcgtctgtacagagcagagatggtggtagcctagcgcagagcaaaacccgagtcacaggaatggtggcaagcctagaggagcaggagcagcgtcccagggacctctccagcctgccccgtgaggcctggccactcagccgagctggggggtcaccacccaaaagaggcctgcacaagcagtcggggaagcacccaagaagaacctgaggtcggccagtccaccccattca

SEQ ID NO: 252203 - DNA, 412 bp, Homo sapiens
gtaaattggtttcattcttcaccttgttgtcctcatagctgattttattagggatccctaaagacagcaagaaagcagcctatataagggaaaattacttcataatttaatctaaaatgtttccatctactttacaaataagttacagtgcaatagagatcataaactggcaggaagtgatttttatatgatcaaatagccactcaagaagaatggcgccacttgcatttcttgattttgaaaaataaaataataataggacgtcatggttacactgcagtgataacaatagtatgttttgttttggagacagtcttgctctgtcacccaggctggagtgcagtgagctgagactgtgccattgccctccagcctgggcaacagaacaagactctgtctcaaaaaaaaaaaa

SEQ ID NO: 252204 - DNA, 364 bp, Homo sapiens
gagttttggaagtcaatgtccaggcataaaacgaaaatacatggaaaaataggaaatcaggcagaaccagtgtcccgcagcatatctcctttccttttgctacccacccaccatcctgtacacacataccttcaaaaaatcaataaaagcttcacaactggagaaaagcaaggaaggaaaggcacagggaatatgttgatggcagcaactggtaggacacagtgactgaccagagtcagaattcagaaacccaccacctccactcaagtgaaaatcatccatccatagtatctgagaaccctgtggacagctgttcagctcttgggatttgtgcaggaggagcattatagaccttcagtagagg

SEQ ID NO: 252205 - DNA, 370 bp, Homo sapiens
tcttttttaaaaccttggtggaaactgtgctggcaaggcaaacagggaggagaggaagctccatgtggggcttgggcttggcggacgacttggggctggccggactttgggtggccgccgaggaccattgctaaatatgcccctttcgtcctgaaatagtcacttccccggctggcttttgtgttggtcggtcgccacaaatgtgtggctgttgttcaaggaggcctcctgggatataaaaagagagaatggggccaggctgcggccagggctgtgtaggaagacaggagagctgccttttctcctgtcccaccacggactcattgtaagattcagagggagtgccgtggtacacgccaggccgtcccag

SEQ ID NO: 252206 - DNA, 358 bp, Homo sapiens
gttttataatcgtttgtatgacattccttcctttttctgtcttctatttgttagttttggtgttttacctaacttgcttttctagtctttccacatttataggcttcatacagcattgtttatatgtgatataaataagctgatctgaaattgttataaaatcaactgccgtttctgaatatcaccaacatgtacttgaatccttctggttttcaggatcctggcacctctccaaggcctctgtcctcccttgttctttgttctcaactctgcccccgtcacttctggaccaggcatgctggtttgcttgcaacccctgagctaccctttaccaacagctctctccatgactttttca

SEQ ID NO: 252207 - DNA, 796 bp, Homo sapiens
cacacctctgtattccttcaggattatatttaacactgaatgaaggccttactagtgtggcaaatataggctatttatccagaagtctggcttcaaaactcacaggagagctgtcactacggaaatgccttttgaatgtaatgtttgcaaaaaagcactgtgccttctgtcattgaatcctagaacactgagatgagaaaaacactgtagatgtataggttagatatatagggaatgttattattttttcctttttttggagagacggtctcactccatcacccatgctggtgtgcagtgctgcgatcgtagctcactgcatcctccgccccctaggctcaagtgatcttcccaccttagcctccatgtagctgggtccacaggcatgcaccaccatgcctggctattttctcatattagtagatatagggttttaccatgtttccaggctggtatcgaactcctgagctcaagcaatctgtacacctcagcctcccaaagtgctgagattgtaggtttgagtcactgtgctcagccaattatgtttttctgtgtaacatgggaggagatcctttgagggcaccatgtgcccaaattgaaaaaactccaggcatgtggcatctgtattatattttttactatgccctgttatcttgctagacttatgtgactgccacttatctggcaaaagccattacatctcagctacttggtaggtacccacattgcatcattcacctatttcgtattctagaagtatattttggttgtctcccattcacgagagatttttttt

SEQ ID NO: 252208 - DNA, 361 bp, Homo sapiens
atagcatgcattggtcattgggagaatactggttcatcaagtcacatagatatttcaaacgttgacatattttattatgtaatatttttaaaagatcacattgatcactgattccatcagaaaagctgttaagaattgggaagctgtcaagcttgccagtggatacagattttctaaaattcaaattttcatttgaaagtttgaactttatcattggcaacaaatattgtcagttattttccttgaaatgacaagctcactttattcctgtttggaaaaagaaaaatgaccaaatagccaagtccagataattatagtttgtcatttttttaaataaaaatggtattccatgaaaaaaatg

SEQ ID NO: 252209 - DNA, 558 bp, Homo sapiens
tgtcttatactattttaattgaactaacagggcagaaaaattagataaaattagcaaaatagctgtttattaaaatgcctcattataaatgttgccttaaaaacctggatatattgctgagtgatagaagtggtgacaaaaataagacctcttaaaatatgttgttttgtgtaccttttatgtttactttttattttaacagaaaaatctatatagatgtttcatttaatgataaattggtaaagtcctgttccaataaagtaaatattgattatgacttttatataatcttggacgtaaagtaaccatggactgaaaaagtgatttttcacttgatgcctcaaaaatttgattttattatgccaatagtgatattgagtttgtgactagaaaacccagcagagggcgccacaatcataattctttgtcatagcccaatataattaggataaatagctcaaataataaccctaagcttttaccatgtagacatataaagatgtgtctaaacatttctatttgattcatttataatatatttaatatattcagtaattc

SEQ ID NO: 252210 - DNA, 924 bp, Homo sapiens
ttgaaccatcacaagtattttgggaccgataacaaaccccttttatgctaatttaattcttgacttgggtaataggtgcacctggataatttataaagctgtccatagatctaagtttagtggtacagatactactgggcaggagaaaaagcacaagttaaaatatttctacagtcagctcttaatattcccacatcttgtttgcaaaattttatggtcacgttctggcttttttacatgaggaaaacaaagttttaacagttttctcttctgtccccttctccagaggaggtgtgaaccagaactgaggaggccagttatattttaggcttttcagtagtacgattttgtcctctcccactgaggaggagggaagaagggggaagccagtgggagttccacacacgtggtcagtgctgtaagttcccggatatcagtgtctctcacatcaacacagaaatagggcacttctcaacattaattttggaattattcaccatttaaaaattgtcactgctctttttcattactgtagataactgagagttagctgttctaggaaaaggccatgtttcagttagtgctatgacttcttttttcgattaaggttgaagcagtgttctcttagtagcctgaacacttctcaaagcgacttatcactagcggctttaatattgagcttctatatcgttgtgtccacctcactttttaaggctgttcatacctggcaatattcacttactctgctatttttaaaaactattttaaagttttaagcacaatgttgactcttctgtaatttcctaaaattatattgttttcctacagacagctcaactttccttgatatgtaacactctaggaaaataactgccttgtaaaataaacgtgattttttttttcttttataccagaacaaatctg

SEQ ID NO: 252211 - DNA, 851 bp, Homo sapiens
ttgaaccatcacaagtattttgggaccgataacaaaccccttttatgctaatttaattcttgacttgggtaataggtgcacctggataatttataaagctgtccatagatctaagtttagtggtacagatactactgggcaggagaaaaagcacaagttaaaatatttctacagtcagctcttaatattcccacatcttgtttgcaaaattttatggtcacgttctggcttttttacatgaggaaaacaaagttttaacagttttctcttctgtccccttctccagaggaggtgtgaaccagaactgaggaggccagttatattttaggcttttcagtagtacgattttgtcctctcccactgaggaggagggaagaagggggaagccagtgggagttccacacacgtggtcagtgctgtaagttcccggatatcagtgtctctcacatcaacacagaaatagggcacttctcaacattaattttggaattattcaccatttaaaaattgtcactgctctttttcattactgtagataactgagagttagctgttctaggaaaaggccatgtttcagttagtgctatgacttcttttttcgattaaggttgaagcagtgttctcttagtagcctgaacacttctcaaagcgacttatcactagcggctttaatattgagcttctatatcgttgtgtccacctcactttttaaggctgttcatacctggcaatattcacttactctgctatttttaaaaactattttaaagttttaagcacaatgttgactcttctgtaatttcctaaaattatattgttttcctacagacaaaaaataaatgaagaagtcg

SEQ ID NO: 252212 - DNA, 213 bp, Homo sapiens
aaaatgttcaaacttctcaatatgatatcaatatgaccccaattaatgtttccagtcttttcccctcttttttcctttttcgtatgtttcttctcacctctcgccggtctaatgattcggccacactgcttggtttttgctgccttctggatttttgcttgttaattctatgttcctgcagtacctttaattaaaacagacatttaatacatc

SEQ ID NO: 252213 - DNA, 260 bp, Homo sapiens
catagcctgcctctggggaaagaagccaagtctttcttcatagtcattatgctctatgcatgtgactctgccattcctatgactactactgagccagggggtctgtgcctgggccaaagggcagccatgtccatgagaaaggcccatgcagaggctctacaagagactgcccaatagcagggcaccatattagatggtatcaaatggatccagtttcctcctctctctcagtgagaataaatgtgagatacacagagcag

SEQ ID NO: 252214 - DNA, 235 bp, Homo sapiens
gcgacacagtaagatcttgtctcaaaaaaaaaaaaaagatgtttttaatgccccctcagagaacattttccccagtaaaccccctctaccccttagctggctcctgtcaatattccccctctacccctgaccagggtaccaggaatctactttctgtccctatagattagcctattctgaacattttatataaatggaatcatagactatgtggcccttcattgtctggcttctt

SEQ ID NO: 252215 - DNA, 453 bp, Homo sapiens
gcatggtgcctggcacaggatctctggtaagcaaatgaaggaatgaatgaaaactaactacgaacctgttccatttccctataaaccacccagggtcacacaagggccatccacggtgaccagcggtgagaaacgcaatgctgtcctcgtgccatgctggaggtgaacgaggagaacgtgagctggggtctcctcaccaactgctccccccaccccaacccccctgacggccagggctgtgtccagggctcagggcacaaggctccgttagctgggcagcagctggcccatgaaacagccctttcagctccacctctgaatggcagttctatgggctcctcggaagaacacaggcgccttctctgtgtcacttctccgctcattagcagagctgcagaaatacactacaggtaacttttcaggaacagagatgggtccccccccgaacaccac

SEQ ID NO: 252216 - DNA, 309 bp, Homo sapiens
ttatcaagggtgttacactgggcttccattacaagatgaggtctgtgcatactcctttccccatcaacttagttatccaggagcatgggtctcttgataaaatccaaaatttcttgggtgaaaaatacatctggatggtttagataaggccgggtgttgcttattaagttatcttaagtccagaaaaatgtattaatccttgaaggaaatgacattgagtttgtttcaaattcaactgctttgatttagcaatccacaacagttaaaaacaaagataacagaaaactttcagatgatctgtatgtcact

SEQ ID NO: 252217 - DNA, 431 bp, Homo sapiens
aaggactgcaccctgaaatagcttcagagaagagggaactttgaaataggattcaaattctaagagagcaaaaggatagagaaaagcagaagggcagaccataaggtgttccagtagtttagctgattgaaaactagcttgtccacagcaagaatggaaggggatggctttgaaaaatattaaagaagatataataattagatgtaaatgatgaacgacatagaggaatatttagagtaatccttagattgatgagcagaactttgaaggatagttacaattagaaagttgaggactaccgggcatggtggctcacgcctgtaatcccagcactttgggaggcggaggcgggcgtatcacctgaggtcgggagttcaagaccagcctgaccaatttggtgaaaccccgcctctactaaaaatacaaaaatt

SEQ ID NO: 252218 - DNA, 373 bp, Homo sapiens
acattattgttaaatatttctttcatgtaatcatttagttgctctcttttatttgcatgatttatttcaagtggtttgtagccttctttattttcccattttctcttaccccttttttccttcagcaaaccaaagatagaaattatattttgtatttcctgtttctattgcatgtaatagacaactttctccacatcaaacatcaccatgtttttttataaagtcacagaataaaatttcttggtatagatgaaattgttccttaagcaaggaataccaatttccgcaacgttggattcagtccccttatgtcttctaaaagctatagtttatacactattttcaagcaataaaattgtctattgaaaccaat

SEQ ID NO: 252219 - DNA, 468 bp, Homo sapiens
tattctacaacacagtaatgtgacattttagatgatcaagaacagaaatatcctctttcccctggaatatggatgactgggccagggttcctcaagttgttatgaaccacaggcctggtcagagacctctgaagcatgtgtcaagcaccctctccctcagggctttgtgtgtgtcttccctctgccaggaacatcctttccctaaaaagtcacatggttcattcaggtctctgctcagatgtggccttctccaggacacctttcttgcccatcctgtccaaagttgctttactctctttacacatgattatttttcctacctaacaccatgtgtcctatggttgtcattttgtaatctgtttcccaacagattgatatgagcttcccaaggacaggagctctgtctcactcactctgcatctccagtgcttgtatacggttggtacttaataaatatgtgaattgcat

SEQ ID NO: 252220 - DNA, 463 bp, Homo sapiens
gtagctgaggaggcttgacatgcccactgcttgcggggtgtctgaatgctgccttggagaaggacagacagtcatgacacgtggggcctgaacaggggcgcttgctgcacggagtagctctagccttgctgacggagaggtacccaggagagcaggtgccggaaccttccatctttagcaccaaaggcagaaaggagccggcgttatggtcagctcatcacgcccttcacggttcctacgttccttttgtgtgctgagaggctgctgccgtgagtgtgcagtctgtggaaatgtggaaggggcaggaaagagaggggactctagaagttccttccattgctcctgtgaaaacacgtgcaacatggaagtcagcaccatcctgtaaaaatagaatgtgtgccacacaggtcattttgaaatttccttggagtcacattaaaaaagtacgataaaggatgtcttg

SEQ ID NO: 252221 - DNA, 505 bp, Homo sapiens
attcaacccatctgggcctccaaattgcattcccatctaagcttccatctttgcagacaaggtacagtcacaattccagttgtgagatgtcccttctcttttcttctctattagccacaccctccttcatttaaacttgggataatcatgaccttcagaaaaaatgattttcactcaaagcaatattccaagcatataggaagaaactcagaaaacccttagtgaccagaaattaaaactgcttttctttcatttgcaaaacacacaaaaacagataatctcctgaaaaacacagacaagcaacatggacccagaggcccttaggctaaggaaattcatttggcatggaacttacagagttcattgttaagatagataacaaaagccatttataacaagagtgttctcattatcatcatctcttgtagcccagttgaagacaagtagtgtcttctaagatcccatctttcatactttgcacacttttcctccacccatggaattt

SEQ ID NO: 252222 - DNA, 567 bp, Homo sapiens
agatatcagttggtcagccttctgttaggatgagttacagacagagtgtgaagaaaggagggttggaaaacaggttggtgaccgacaggaagtcatcgtgaaggtcctggtcgcctgtcctctccgttcttctctgtgccttgctggggatcagctccagacaatctgacacattgtcttttggctttaatatgtttgtaagattccagactcttagtaatgagccttggtatagggttctatcagttaggatggttttggctgctagaaacaaaacacccaaccaaacataccttaaacaatatggggtttagtatctcacatggtggttccaaggttagttcattaatgcagtgatggcatcagaatcatgagttctttccacttttctactccactgtcctcaggttctttgcttgatccttgggctccttccttccttcccttccttcccttcctttctttcgttctttctttgcttgaaccctggtggcagaagttgtggtgagccaagattgtgccattgcactccagcctgggcaacaagagtgaaagtctaaatccaaa

SEQ ID NO: 252223 - DNA, 438 bp, Homo sapiens
ataataccagtgtggaatacatactgtttctttgcatttatagtattccaaacacactatctttccatctatgtattcaacaaaacatatttgttgagtaccaagtacgtgccaggcacagtgcaaggtgtgagagaaatacataggtttgcattgtgctgtggcaaaatatagaaaatctgaatttaataaacacagtaatctattatgaagtcatttttagacttgtttatattttgtaatcacccaggtaaaaactcaagtatagttgatagacagatatgtttccccatggtcttttgccattgtgtataaaatatgcttaaacatttgtggaattagattgtcttgttttgaagaaaggctcatcaaagtttgaattttatgagtataatatgtattcaagtatcagtgttcaaaggcattagcctagccaat

SEQ ID NO: 252224 - DNA, 353 bp, Homo sapiens
gtttgtacaaatgatgacagcaaagtgaacaacttgtacagaatgtgttaaatttcttgtacaaaattgtttatttgccttttctttgtttgtaacttatctgtaaaaggtttctccctactgtctaaaaaatatgcatgtatagtaattaggacttcattcctccatgttttcttcccttatcttactgtcattgtcctaaaaccttattttagaaaattgatcaagtaacatgttgcatgtggcttactctggatatatctaagcccttctgcacatctaaacttagatggcgttggtcaaatgagggaacatctgggttatgccttttttaaagtagttttctttaggaa

SEQ ID NO: 252225 - DNA, 731 bp, Homo sapiens
aggacggtaggaaaaccccaggcactttcggaggggttctgccggcagtcacggcgtcgggaggaagacatccccaccagcccttccctttctccccgcttccgcacatccacgcttcagcgcgcctttggcttctgtttttccatttctgaggactgggcccgccatcctccaggctcccctcgccgtcgctgcagctcgtagccgtttacatcgggctttcgcagcaccccttaggtgggagcgttgttataatccggttccggggaagcccaaagggatcaacgacttcctcaacgaaacacagctagtaagaaatggggccgggatgccctcaaagccatttttcagttcagctgtgccccatcaggtgtccagttcagagaaagactcctggagttccttctcattgttagaagagtgaagttgtcaagaagagcaaatgtaccttccacagagctgggaaattattttgtcaaaaactcttgtacccaagtttgaacaacgctatcagatgactcagtctagctcacctgactccagctctgtttcaaattttgagctctaagctttggtggcaataactctggcagtgaaaaaaccctcaggcttgtagatagctttgcttctttgtcttcttttgcttcatcgttatcatccttcatcattctggaaagattgacagtttagtgttcaagggcacagactctgcagtcaaggctgaggtctta

SEQ ID NO: 252226 - DNA, 431 bp, Homo sapiens
tggttctttggaacaaatcattaactgataaaccagtggccagaatgacaagaaagcacagatccccagtatttggtatggaagaggatattctgtagaccccacaggcatcaaaagagtacaatgaacaacctcatgcccatacatttgaaaatttggataaaatggaccaattcctttaacccaagaagaaatagcttgagtatctcttaagtagataacccgtatctatgaaggaagttgtagatgcataatctaaagtctgaaaaggctctttttccagagaagccagaaattgtgtctgtgtgtgggtgtgtgtgtgtttacagagttaccaactgattagaaacaaagtgttgaaactcaagtgtgagctgatgctgcatgccaagtaaagccacgggctttgtgtgggaagtagcctgtccctg

SEQ ID NO: 252227 - DNA, 451 bp, Homo sapiens
atacataggaaagctgtaacttaaaataactgtaaatattgaaattgcagtttttatttatgctgcatagttatttggtcttgctggttgattaactactcacaaaagatgtattcatttatttatatatttagttacatatttagttagatgctttctagattatgtagcccatgactacttaggatattgatatacccacagccaaaaataaaacacaaaaatattataaatgatctgataattcagagatacactgtcttgtttctttgctatttgtacttccagcctatttttattaaaaatatgcatatatatttacatattataaaaataacatcaaaatttacatcgtgttttgtaacttgtattttttgtaatgcagaagtatatcatggtcactttatgccattaaataatcttttatcaaaataaatgatttataatttga

SEQ ID NO: 252228 - DNA, 281 bp, Homo sapiens
aggatcatagctttttttttttttttagacagagtctcactctgcaacctctgcctcctgggttcgagcaaaccgggatcatagctcttgcactgccatgcgtagataattgcagcacacttgtctgtgatgtatgtacaagtcattattttttggatggtggggtgcatttttcttattttctctatctttcctctttctttctttttctttctttcttctgtcttttctttctctctttttctttcactctcttttccttctcccttccttcttttctt

SEQ ID NO: 252229 - DNA, 449 bp, Homo sapiens
cctttttgttttgaaagctttgagttgtgagacttgaactgactcatttcactagaatttgttactgaacatggttgtttttgtttctgttaggcgtttagatgccaaccatattacctcagtccccgaggacagttttgaaggacttgttcagttacggcatctgtggctggatgacaacagcttgacggaggtgcctgtgcaccccctcagcaatctgcccaccctacaggcgctgaccctggctctcaacaagatctcaagcatccctgactttgcatttaccaacctttcaagcctggtagttctgcatcttcataacaataaaattagaagcctgagtcaacactgttttgatggactagataacctggagaccttgtaagtatattcatattttgggcaactgcattgtgatattgaaagtataattttatacttcactgcag

SEQ ID NO: 252230 - DNA, 5533 bp, Homo sapiens
tcgtgccgaattcggcacgaggggacgggaagagattgagccgcggctgggagacagcgagccagagtctgggtgtttgtgcgagagccacggcgggggctggggcgagtggccggcatggctgaaggctgcgctctgcaaccttgaagagccgctgcattgagaggccagggacagggagaccggtgcgatggcagagcgcggcccccgccgctgcgccgggccggcccggctggcctgagccgccggaggagcggggctgcctctgcgcgtccatggagcagcgggaagggcgaaactccggagcgccgcgtccctgcgccgctgcggcggactgctgaaggggccgagcccgcgcggaccgccgaggaagagacccccgctccagcccgcaggccggctgcccgggggcggcgggggacatcggagggcagcggagcgagcagcgccgcgggagaggccggcgcgggaggcggccgcagcaatgccgggcccgctagggctgctctgcttcctcgccctggggctgctcggctcggccgggcccagcggcgcggcgccgcctctctgcgcggcgccctgcagctgcgacggcgaccgtcgggtggactgctccgggaaggggctgacggccgtgcccgaggggctcagcgccttcacccaagcgctggatatcagtatgaacaacattactcagttgccagaagatgcatttaagaactttccttttctagaagagctacaattggcgggcaacgacctttcttttatccacccaaaggccttgtctgggttgaaagaactcaaagttctaacgctccagaataatcagttgaaaacagtacccagtgaagccattcgagggctgagtgctttgcagtctttgcgtttagatgccaaccatattacctcagtccccgaggacagttttgaaggacttgttcagttacggcatctgtggctggatgacaacagcttgacggaggtgcctgtgcaccccctcagcaatctgcccaccctacaggcgctgaccctggctctcaacaagatctcaagcatccctgactttgcatttaccaacctttcaagcctggtagttctgcatcttcataacaataaaattagaagcctgagtcaacactgttttgatggactagataacctggagaccttagacttgagttataataacttgggggaatttcctcaggctattaaagcccgtcctagccttaaagagctaggatttcatagtaattctatttctgttatccctgatggagcatttgatggtaatccactcttaagaactatacatttgtatgataatcctctgtcttttgtggggaactcagcatttcacaatttatctgatcttcattccctagtcattcgtggtgcaagcatggtgcagcagttccccaatcttacaggaactgtccacctggaaagtctgactttgacaggtacaaagataagcagcatacctaataatttgtgtcaagaacaaaagatgcttaggactttggacttgtcttacaataatataagagaccttccaagttttaatggttgccatgctctggaagaaatttctttacagcgtaatcaaatctaccaaataaaggaaggcacctttcaaggcctgatatctctaaggattctagatctgagtagaaacctgatacatgaaattcacagtagagcttttgccacacttgggccaataactaacctagatgtaagtttcaatgaattaacttcctttcctacggaaggcctgaatgggctaaatcaactgaaacttgtgggcaacttcaagctgaaagaagccttagcagcaaaagactttgttaacctcaggtctttatcggtaccatatgcttatcagtgctgtgcattttggggttgtgactcttatgcaaatttaaacacagaagataacagcctccaggaccacagtgtggcacaggagaaaggtactgctgatgcagcaaatgtcacaagcactcttgaaaatgaagaacatagtcaaataattatccattgtacaccttcaacaggtgcttttaagccctgtgaatatttactgggaagctggatgattcgtcttactgtgtggttcattttcttggttgcattatttttcaacctgcttgttattttaacaacatttgcatcttgtacatcactgccttcgtccaaattgtttataggcttgatttctgtgtctaacttattcatgggaatctatactggcatcctaacttttcttgatgctgtgtcctggggcagattcgctgaatttggcatttggtgggaaactggcagtggctgcaaagtagctgggtttcttgcagttttctcctcagaaagtgccatatttttattaatgctagcaactgtcgaaagaagcttatctgcaaaagatataatgaaaaatgggaagagcaatcatctcaaacagttccgggttgctgcccttttggctttcctaggtgctacagtagcaggctgttttccccttttccatagaggggaatattctgcatcacccctttgtttgccatttcctacaggtgaaacgccatcattaggattcactgtaacgttagtgctattaaactcactagcatttttattaatggccgttatctacactaagctatactgcaacttggaaaaagaggacctctcagaaaactcacaatctagcatgattaagcatgtcgcttggctaatcttcaccaattgcatctttttctgccctgtggcgtttttttcatttgcaccattgatcactgcaatctctatcagccccgaaataatgaagtctgttactctgatattttttccattgcctgcttgcctgaatccagtcctgtatgttttcttcaacccaaagtttaaagaagactggaagttactgaagcgacgtgttaccaagaaaagtggatcagtttcagtttccatcagtagccaaggtggttgtctggaacaggatttctactacgactgtggcatgtactcacatttgcagggcaacctgactgtttgcgactgctgcgaatcgtttcttttaacaaagccagtatcatgcaaacacttgataaaatcacacagctgtcctgcattggcagtggcttcttgccaaagacctgagggctactggtccgactgtggcacacagtcggcccactctgattatgcagatgaagaagattcctttgtctcagacagttctgaccaggtgcaggcctgtggacgagcctgcttctaccagagtagaggattccctttggtgcgctatgcttacaatctaccaagagttaaagactgaactactgtgtgtgtaaccgtttcccccgtcaaccaaaatcagtgtttatagagtgaaccctattctcatctttcatctgggaagcacttctgtaatcactgcctggtgtcacttagaagaaggagaggtggcagtttatttctcaaaccagtcattttcaaagaacaggtgcctaaattataaattggtgaaaaatgcaatgtccaagcaatgtatgatctgtttgaaacaaatatatgacttgaaaaggatcttaggtgtagtagagcaatataatgttagttttttctgatccataagaagcaaatttatacctatttgtgtattaagcacaagataaagaacagctgttaatattttttaaaaatctattttaaaatgtgattttctataactgaagaaaatatcttgctaattttacctaatgtttcatccttaatctcaggacaacttactgcagggccaaaaaagggactgtcccagctagaactgtgagagtatacataggcattactttattatgttttcacttgccatccttgacataagagaactataaattttgtttaagcaatttataaatctaaaacctgaagatgtttttaaaacaatattaacagctgttaggttaaaaaaatagctggacatttgttttcagtcattatacattgctttggtccaatcagtaattttttcttaagtgttttgtgattacactactagaaaaaaagtaaaaggctaattgctgtgtgggtttagtcgatttggctaaactactaactaatgtgggggtttaatagtatctgagggatttggtggcttcatgtaatgttctcattaatgaatacttcctaatatcgttggctctactaatattttccaatttgctgggatgtcacctagcaatagcttggattatatagaaagtaaactgtggtcaatacttgcatttaattagacgaaacggggagtaattatgacacgaagtacttatgtttatttcttagtgagctggattatcttgaacctgtgctattaaatggaaatttccatacatcttccccatactattttttataaaagagcctattcaatagctcagaggttgaactctggttaaacaagataatatgttattaataaaaatagaagaagaaagaataaagcttagtcctgtgtctttaaaaattaaaaattttacttgattcccatctatgggctttagacctattactgggtggagtcttaaagttataattgttcaatatgttttttgaacagtgtgctaaatcaatagcaaacccactgccatattagttattctgaatatactaaaaaaatccagctagattgcagtttaataattaaactgtacatactgtgcatataatgaatttttatcttatgtaaattatttttagaacacaagttgggaaatgtggcttctgttcatttcgtttaattaaagctacctcctaaactatagtggctgccagtagcagactgttaaattgtggtttatatactttttgcattgtaaatagtctttgttgtacattgtcagtgtaataaaaacagaatctttgtatatcaaaatcatgtagtttgtataaaatgtgggaaggatttatttacagtgtgttgtaattttgtaaggccaactatttacaagttttaaaaattgctatcatgtatatttacacatctgataaatattaaatcataacttggtaagaaactcctaattaaaaggttttttccaaaattcaggttattgaaaatttttcattttattcatttaaaaactagaataacagatatataaaagtgttaatctttgtgctatatggtatgaaatacaatattgtactcagtgttttgaattattaaagtttctagaaagcaatctattttgccttaatttaaaactaggtatattaatgaatttagttttaaagtaagcaaattaaatatttgtaagtggacagtattagaagaaatgttggaagtaaccattagaaaacactattttgatatttatttgtaaacatataagaacattttgctgaaacttagaaataaggttttatcctaagtctgaactatactcatggaaaacagattatgaaatttcagaaaaaccattgattcaatctttatctaaaaagcaaatgattaaaaaatctgcatgat

SEQ ID NO: 252231 - DNA, 5244 bp, Homo sapiens
tcgtgccgaattcggcacgaggggacgggaagagattgagccgcggctgggagacagcgagccagagtctgggtgtttgtgcgagagccacggcgggggctggggcgagtggccggcatggctgaaggctgcgctctgcaaccttgaagagccgctgcattgagaggccagggacagggagaccggtgcgatggcagagcgcggcccccgccgctgcgccgggccggcccggctggcctgagccgccggaggagcggggctgcctctgcgcgtccatggagcagcgggaagggcgaaactccggagcgccgcgtccctgcgccgctgcggcggactgctgaaggggccgagcccgcgcggaccgccgaggaagagacccccgctccagcccgcaggccggctgcccgggggcggcgggggacatcggagggcagcggagcgagcagcgccgcgggagaggccggcgcgggaggcggccgcagcaatgccgggcccgctagggctgctctgcttcctcgccctggggctgctcggctcggccgggcccagcggcgcggcgccgcctctctgcgcggcgccctgcagctgcgacggcgaccgtcgggtggactgctccgggaaggggctgacggccgtgcccgaggggctcagcgccttcacccaagcgctggatatcagtatgaacaacattactcagttgccagaagatgcatttaagaactttccttttctagaagagctacaattggcgggcaacgacctttcttttatccacccaaaggccttgtctgggttgaaagaactcaaagttctaacgctccagaataatcagttgaaaacagtacccagtgaagccattcgagggctgagtgctttgcagtctttgcgtttagatgccaaccatattacctcagtccccgaggacagttttgaaggacttgttcagttacggcatctgtggctggatgacaacagcttgacggaggtgcctgtgcaccccctcagcaatctgcccaccctacaggcgctgaccctggctctcaacaagatctcaagcatccctgactttgcatttaccaacctttcaagcctggtagttctgcatcttcataacaataaaattagaagcctgagtcaacactgttttgatggactagataacctggagaccttagacttgagttataataacttgggggaatttcctcaggctattaaagcccgtcctagccttaaagagctaggatttcatagtaattctatttctgttatccctgatggagcatttgatggtaatccactcttaagaactatacatttgtatgataatcctctgtcttttgtggggaactcagcatttcacaatttatctgatcttcattccctagtcattcgtggtgcaagcatggtgcagcagttccccaatcttacaggaactgtccacctggaaagtctgactttgacaggtacaaagataagcagcatacctaataatttgtgtcaagaacaaaagatgcttaggactttggacttgtcttacaataatataagagaccttccaagttttaatggttgccatgctctggaagaaatttctttacagcgtaatcaaatctaccaaataaaggaaggcacctttcaaggcctgatatctctaaggattctagatctgagtagaaacctgatacatgaaattcacagtagagcttttgccacacttgggccaataactaacctagatgtaagtttcaatgaattaacttcctttcctacggaaggcctgaatgggctaaatcaactgaaacttgtgggcaacttcaagctgaaagaagccttagcagcaaaagactttgttaacctcaggtctttatcggtaccatatgcttatcagtgctgtgcattttggggttgtgactcttatgcaaatttaaacacagaagataacagcctccaggaccacagtgtggcacaggagaaaggtactgctgatgcagcaaatgtcacaagcactcttgaaaatgaagaacatagtcaaataattatccattgtacaccttcaacaggtgcttttaagccctgtgaatatttactgggaagctggatgattcgtcttactgtgtggttcattttcttggttgcattatttttcaacctgcttgttattttaacaacatttgcatcttgtacatcactgccttcgtccaaattgtttataggcttgatttctgtgtctaacttattcatgggaatctatactggcatcctaacttttcttgatgctgtgtcctggggcagattcgctgaatttggcatttggtgggaaactggcagtggctgcaaagtagctgggtttcttgcagttttctcctcagaaagtgccatatttttattaatgctagcaactgtcgaaagaagcttatctgcaaaagatataatgaaaaatgggaagagcaatcatctcaaacagttccgggttgctgcccttttggctttcctaggtgctacagtagcaggctgttttccccttttccatagaggggaatattctgcatcacccctttgtttgccatttcctacaggtgaaacgccatcattaggattcactgtaacgttagtgctattaaactcactagcatttttattaatggccgttatctacactaagctatactgcaacttggaaaaagaggacctctcagaaaactcacaatctagcatgattaagcatgtcgcttggctaatcttcaccaattgcatctttttctgccctgtggcgtttttttcatttgcaccattgatcactgcaatctctatcagccccgaaataatgaagtctgttactctgatattttttccattgcctgcttgcctgaatccagtcctgtatgttttcttcaacccaaagtttaaagaagactggaagttactgaagcgacgtgttaccaagaaaagtggatcagtttcagtttccatcagtagccaaggtggttgtctggaacaggatttctactacgactgtggcatgtactcacatttgcagggcaacctgactgtttgcgactgctgcgaatcgtttcttttaacaaagccagtatcatgcaaacacttgataaaatcacacagctgtcctgcattggcagtggcttcttgccaaagacctgagggctactggtccgactgtggcacacagtcggcccactctgattatgcagatgaagaagattcctttgtctcagacagttctgaccaggtgcaggcctgtggacgagcctgcttctaccagagtagaggattccctttggtgcgctatgcttacaatctaccaagagttaaagactgaactactgtgtgtgtaaccgtttcccccgtcaaccaaaatcagtgtttatagagtgaaccctattctcatctttcatctgggaagcacttctgtaatcactgcctggtgtcacttagaagaaggagaggtggcagtttatttctcaaaccagtcattttcaaagaacaggtgcctaaattataaattggtgaaaaatgcaatgtccaagcaatgtatgatctgtttgaaacaaatatatgacttgaaaaggatcttaggtgtagtagagcaatataatgttagttttttctgatccataagaagcaaatttatacctatttgtgtattaagcacaagataaagaacagctgttaatattttttaaaaatctattttaaaatgtgattttctataactgaagaaaatatcttgctaattttacctaatgtttcatccttaatctcaggacaacttactgcagggccaaaaaagggactgtcccagctagaactgtgagagtatacataggcattactttattatgttttcacttgccatccttgacataagagaactataaattttgtttaagcaatttataaatctaaaacctgaagatgtttttaaaacaatattaacagctgttaggttaaaaaaatagctggacatttgttttcagtcattatacattgctttggtccaatcagtaattttttcttaagtgttttgtgattacactactagaaaaaaagtaaaaggctaattgctgtgtgggtttagtcgatttggctaaactactaactaatgtgggggtttaatagtatctgagggatttggtggcttcatgtaatgttctcattaatgaatacttcctaatatcgttggctctactaatattttccaatttgctgggatgtcacctagcaatagcttggattatatagaaagtaaactgtggtcaatacttgcatttaattagacgaaacggggagtaattatgacacgaagtacttatgtttatttcttagtgagctggattatcttgaacctgtgctattaaatggaaatttccatacatcttccccatactattttttataaaagagcctattcaatagctcagaggttgaactctggttaaacaagataatatgttattaataaaaatagaagaagaaagaataaagcttagtcctgtgtctttaaaaattaaaaattttacttgattcccatctatgggctttagacctattactgggtggagtcttaaagttataattgttcaatatgttttttgaacagtgtgctaaatcaatagcaaacccactgccatattagttattctgaatatactaaaaaaatccagctagattgcagtttaataattaaactgtacatactgtgcatataatgaatttttatcttatgtaaattatttttagaacacaagttgggaaatgtggcttctgttcatttcgtttaattaaagctacctcctaaactatagtggctgccagtagcagactgttaaattgtggtttatatactttttgcattgtaaatagtctttgttgtacattgtcagtgtaataaaaacagaatctttgtatatcaaaatcatgtagtttgtataaaatgtgggaaggatttatttacagtgtgttgtaattttgtaaggccaactatttacaagttttaaaaattgctatcatgtatatttacacatctgataaatattaaatcataacttggtaagaaactcctaattaaaaggttttttccaaaattcaggttattgaaaatttttcattttattcatttaaaaactagaataacagatatataaaagtgttaatctttgtgctatatggtatgaaatacaatattgtactcagtgttttgaattattaaagtttctagaaagc

SEQ ID NO: 252232 - DNA, 5389 bp, Homo sapiens
tcgtgccgaattcggcacgaggggacgggaagagattgagccgcggctgggagacagcgagccagagtctgggtgtttgtgcgagagccacggcgggggctggggcgagtggccggcatggctgaaggctgcgctctgcaaccttgaagagccgctgcattgagaggccagggacagggagaccggtgcgatggcagagcgcggcccccgccgctgcgccgggccggcccggctggcctgagccgccggaggagcggggctgcctctgcgcgtccatggagcagcgggaagggcgaaactccggagcgccgcgtccctgcgccgctgcggcggactgctgaaggggccgagcccgcgcggaccgccgaggaagagacccccgctccagcccgcaggccggctgcccgggggcggcgggggacatcggagggcagcggagcgagcagcgccgcgggagaggccggcgcgggaggcggccgcagcaatgccgggcccgctagggctgctctgcttcctcgccctggggctgctcggctcggccgggcccagcggcgcggcgccgcctctctgcgcggcgccctgcagctgcgacggcgaccgtcgggtggactgctccgggaaggggctgacggccgtgcccgaggggctcagcgccttcacccaagcgctggatatcagtatgaacaacattactcagttgccagaagatgcatttaagaactttccttttctagaagagctgcgtttagatgccaaccatattacctcagtccccgaggacagttttgaaggacttgttcagttacggcatctgtggctggatgacaacagcttgacggaggtgcctgtgcaccccctcagcaatctgcccaccctacaggcgctgaccctggctctcaacaagatctcaagcatccctgactttgcatttaccaacctttcaagcctggtagttctgcatcttcataacaataaaattagaagcctgagtcaacactgttttgatggactagataacctggagaccttagacttgagttataataacttgggggaatttcctcaggctattaaagcccgtcctagccttaaagagctaggatttcatagtaattctatttctgttatccctgatggagcatttgatggtaatccactcttaagaactatacatttgtatgataatcctctgtcttttgtggggaactcagcatttcacaatttatctgatcttcattccctagtcattcgtggtgcaagcatggtgcagcagttccccaatcttacaggaactgtccacctggaaagtctgactttgacaggtacaaagataagcagcatacctaataatttgtgtcaagaacaaaagatgcttaggactttggacttgtcttacaataatataagagaccttccaagttttaatggttgccatgctctggaagaaatttctttacagcgtaatcaaatctaccaaataaaggaaggcacctttcaaggcctgatatctctaaggattctagatctgagtagaaacctgatacatgaaattcacagtagagcttttgccacacttgggccaataactaacctagatgtaagtttcaatgaattaacttcctttcctacggaaggcctgaatgggctaaatcaactgaaacttgtgggcaacttcaagctgaaagaagccttagcagcaaaagactttgttaacctcaggtctttatcggtaccatatgcttatcagtgctgtgcattttggggttgtgactcttatgcaaatttaaacacagaagataacagcctccaggaccacagtgtggcacaggagaaaggtactgctgatgcagcaaatgtcacaagcactcttgaaaatgaagaacatagtcaaataattatccattgtacaccttcaacaggtgcttttaagccctgtgaatatttactgggaagctggatgattcgtcttactgtgtggttcattttcttggttgcattatttttcaacctgcttgttattttaacaacatttgcatcttgtacatcactgccttcgtccaaattgtttataggcttgatttctgtgtctaacttattcatgggaatctatactggcatcctaacttttcttgatgctgtgtcctggggcagattcgctgaatttggcatttggtgggaaactggcagtggctgcaaagtagctgggtttcttgcagttttctcctcagaaagtgccatatttttattaatgctagcaactgtcgaaagaagcttatctgcaaaagatataatgaaaaatgggaagagcaatcatctcaaacagttccgggttgctgcccttttggctttcctaggtgctacagtagcaggctgttttccccttttccatagaggggaatattctgcatcacccctttgtttgccatttcctacaggtgaaacgccatcattaggattcactgtaacgttagtgctattaaactcactagcatttttattaatggccgttatctacactaagctatactgcaacttggaaaaagaggacctctcagaaaactcacaatctagcatgattaagcatgtcgcttggctaatcttcaccaattgcatctttttctgccctgtggcgtttttttcatttgcaccattgatcactgcaatctctatcagccccgaaataatgaagtctgttactctgatattttttccattgcctgcttgcctgaatccagtcctgtatgttttcttcaacccaaagtttaaagaagactggaagttactgaagcgacgtgttaccaagaaaagtggatcagtttcagtttccatcagtagccaaggtggttgtctggaacaggatttctactacgactgtggcatgtactcacatttgcagggcaacctgactgtttgcgactgctgcgaatcgtttcttttaacaaagccagtatcatgcaaacacttgataaaatcacacagctgtcctgcattggcagtggcttcttgccaaagacctgagggctactggtccgactgtggcacacagtcggcccactctgattatgcagatgaagaagattcctttgtctcagacagttctgaccaggtgcaggcctgtggacgagcctgcttctaccagagtagaggattccctttggtgcgctatgcttacaatctaccaagagttaaagactgaactactgtgtgtgtaaccgtttcccccgtcaaccaaaatcagtgtttatagagtgaaccctattctcatctttcatctgggaagcacttctgtaatcactgcctggtgtcacttagaagaaggagaggtggcagtttatttctcaaaccagtcattttcaaagaacaggtgcctaaattataaattggtgaaaaatgcaatgtccaagcaatgtatgatctgtttgaaacaaatatatgacttgaaaaggatcttaggtgtagtagagcaatataatgttagttttttctgatccataagaagcaaatttatacctatttgtgtattaagcacaagataaagaacagctgttaatattttttaaaaatctattttaaaatgtgattttctataactgaagaaaatatcttgctaattttacctaatgtttcatccttaatctcaggacaacttactgcagggccaaaaaagggactgtcccagctagaactgtgagagtatacataggcattactttattatgttttcacttgccatccttgacataagagaactataaattttgtttaagcaatttataaatctaaaacctgaagatgtttttaaaacaatattaacagctgttaggttaaaaaaatagctggacatttgttttcagtcattatacattgctttggtccaatcagtaattttttcttaagtgttttgtgattacactactagaaaaaaagtaaaaggctaattgctgtgtgggtttagtcgatttggctaaactactaactaatgtgggggtttaatagtatctgagggatttggtggcttcatgtaatgttctcattaatgaatacttcctaatatcgttggctctactaatattttccaatttgctgggatgtcacctagcaatagcttggattatatagaaagtaaactgtggtcaatacttgcatttaattagacgaaacggggagtaattatgacacgaagtacttatgtttatttcttagtgagctggattatcttgaacctgtgctattaaatggaaatttccatacatcttccccatactattttttataaaagagcctattcaatagctcagaggttgaactctggttaaacaagataatatgttattaataaaaatagaagaagaaagaataaagcttagtcctgtgtctttaaaaattaaaaattttacttgattcccatctatgggctttagacctattactgggtggagtcttaaagttataattgttcaatatgttttttgaacagtgtgctaaatcaatagcaaacccactgccatattagttattctgaatatactaaaaaaatccagctagattgcagtttaataattaaactgtacatactgtgcatataatgaatttttatcttatgtaaattatttttagaacacaagttgggaaatgtggcttctgttcatttcgtttaattaaagctacctcctaaactatagtggctgccagtagcagactgttaaattgtggtttatatactttttgcattgtaaatagtctttgttgtacattgtcagtgtaataaaaacagaatctttgtatatcaaaatcatgtagtttgtataaaatgtgggaaggatttatttacagtgtgttgtaattttgtaaggccaactatttacaagttttaaaaattgctatcatgtatatttacacatctgataaatattaaatcataacttggtaagaaactcctaattaaaaggttttttccaaaattcaggttattgaaaatttttcattttattcatttaaaaactagaataacagatatataaaagtgttaatctttgtgctatatggtatgaaatacaatattgtactcagtgttttgaattattaaagtttctagaaagcaatctattttgccttaatttaaaactaggtatattaatgaatttagttttaaagtaagcaaattaaatatttgtaagtggacagtattagaagaaatgttggaagtaaccattagaaaacactattttgatatttatttgtaaacatataagaacattttgctgaaacttagaaataaggttttatcctaagtctgaactatactcatggaaaacagattatgaaatttcagaaaaaccattgattcaatctttatctaaaaagcaaatgattaaaaaatctgcatgat

SEQ ID NO: 252233 - DNA, 5479 bp, Homo sapiens
tcgtgccgaattcggcacgaggggacgggaagagattgagccgcggctgggagacagcgagccagagtctgggtgtttgtgcgagagccacggcgggggctggggcgagtggccggcatggctgaaggctgcgctctgcaaccttgaagagccgctgcattgagaggccagggacagggagaccggtgcgatggcagagcgcggcccccgccgctgcgccgggccggcccggctggcctgagccgccggaggagcggggctgcctctgcgcgtccatggagcagcgggaagggcgaaactccggagcgccgcgtccctgcgccgctgcggcggactgctgaaggggccgagcccgcgcggaccgccgaggaagagacccccgctccagcccgcaggccggctgcccgggggcggcgggggacatcggagggcagcggagcgagcagcgccgcgggagaggccggcgcgggaggcggccgcagcaatgccgggcccgctagggctgctctgcttcctcgccctggggctgctcggctcggccgggcccagcggcgcggcgccgcctctctgcgcggcgccctgcagctgcgacggcgaccgtcgggtggactgctccgggaaggggctgacggccgtgcccgaggggctcagcgccttcacccaagcgctggatatcagtatgaacaacattactcagttgccagaagatgcatttaagaactttccttttctagaagagctacaattggcgggcaacgacctttcttttatccacccaaaggccttgtctgggttgaaagaactcaaagttctaacgctccagaataatcagttgaaaacagtacccagtgaagccattcgagggctgagtgctttgcagtctttgcgtttagatgccaaccatattacctcagtccccgaggacagttttgaaggacttgttcagttacggcatctgtggctggatgacaacagcttgacggaggtgcctgtgcaccccctcagcaatctgcccaccctacaggcgctgaccctggctctcaacaagatctcaagcatccctgactttgcatttaccaacctttcaagcctggtagttctgcatcttcataacaataaaattagaagcctgagtcaacactgttttgatggactagataacctggagaccttagacttgagttataataacttgggggaatttcctcaggctattaaagcccgtcctagccttaaagagctaggatttcatagtaattctatttctgttatccctgatggagcatttgatggtaatccactcttaagaactatacatttgtatgataatcctctgtcttttgtggggaactcagcatttcacaatttatctgatcttcattccctagtcattcgtggtgcaagcatggtgcagcagttccccaatcttacaggaactgtccacctggaaagtctgactttgacaggtacaaagataagcagcatacctaataatttgtgtcaagaacaaaagatgcttaggactttggacttgtcttacaataatataagagaccttccaagttttaatggttgccatgctctggaagaaatttctttacagcgtaatcaaatctaccaaataaaggaaggcacctttcaaggcctgatatctctaaggattctagatctgagtagaaacctgatacatgaaattcacagtagagcttttgccacacttgggccaataactaacctagatgtaagtttcaatgaattaacttcctttcctacggaaggcctgaatgggctaaatcaactgaaacttgtgggcaacttcaagctgaaagaagccttagcagcaaaagactttgttaacctcaggtctttatcggtaccatatgcttatcagtgctgtgcattttggggttgtgactcttatgcaaatttaaacacagaagataacagcctccaggaccacagtgtggcacaggagaaaggtactgctgatgcagcaaatgtcacaagcactcttgaaaatgaagaacatagtcaaataattatccattgtacaccttcaacaggtgcttttaagccctgtgaatatttactgggaagctggatgattcgtcttactgtgtggttcattttcttggttgcattatttttcaacctgcttgttattttaacaacatttgcatcttgtacatcactgccttcgtccaaattgtttataggcttgatttctgtgtctaacttattcatgggaatctatactggcatcctaacttttcttgatgctgtgtcctggggcagattcgctgaatttggcatttggtgggaaactggcagtggctgcaaagtagctgggtttcttgcagttttctcctcagaaagtgccatatttttattaatgctagcaactgtcgaaagaagcttatctgcaaaagatataatgaaaaatgggaagagcaatcatctcaaacagttccgggttgctgcccttttggctttcctaggtgctacagtagcaggctgttttccccttttccatagaggggaatattctgcatcacccctttgtttgccatttcctacaggtgaaacgccatcattaggattcactgtaacgttagtgctattaaactcactagcatttttattaatggccgttatctacactaagctatactgcaacttggaaaaagaggacctctcagaaaactcacaatctagcatgattaagcatgtcgcttggctaatcttcaccaattgcatctttttctgccctgtggcgtttttttcatttgcaccattgatcactgcaatctctatcagccccgaaataatgaagtctgttactctgatattttttccattgcctgcttgcctgaatccagtcctgtatgttttcttcaacccaaagtttaaagaagactggaagttactgaagcgacgtgttaccaaggatttctactacgactgtggcatgtactcacatttgcagggcaacctgactgtttgcgactgctgcgaatcgtttcttttaacaaagccagtatcatgcaaacacttgataaaatcacacagctgtcctgcattggcagtggcttcttgccaaagacctgagggctactggtccgactgtggcacacagtcggcccactctgattatgcagatgaagaagattcctttgtctcagacagttctgaccaggtgcaggcctgtggacgagcctgcttctaccagagtagaggattccctttggtgcgctatgcttacaatctaccaagagttaaagactgaactactgtgtgtgtaaccgtttcccccgtcaaccaaaatcagtgtttatagagtgaaccctattctcatctttcatctgggaagcacttctgtaatcactgcctggtgtcacttagaagaaggagaggtggcagtttatttctcaaaccagtcattttcaaagaacaggtgcctaaattataaattggtgaaaaatgcaatgtccaagcaatgtatgatctgtttgaaacaaatatatgacttgaaaaggatcttaggtgtagtagagcaatataatgttagttttttctgatccataagaagcaaatttatacctatttgtgtattaagcacaagataaagaacagctgttaatattttttaaaaatctattttaaaatgtgattttctataactgaagaaaatatcttgctaattttacctaatgtttcatccttaatctcaggacaacttactgcagggccaaaaaagggactgtcccagctagaactgtgagagtatacataggcattactttattatgttttcacttgccatccttgacataagagaactataaattttgtttaagcaatttataaatctaaaacctgaagatgtttttaaaacaatattaacagctgttaggttaaaaaaatagctggacatttgttttcagtcattatacattgctttggtccaatcagtaattttttcttaagtgttttgtgattacactactagaaaaaaagtaaaaggctaattgctgtgtgggtttagtcgatttggctaaactactaactaatgtgggggtttaatagtatctgagggatttggtggcttcatgtaatgttctcattaatgaatacttcctaatatcgttggctctactaatattttccaatttgctgggatgtcacctagcaatagcttggattatatagaaagtaaactgtggtcaatacttgcatttaattagacgaaacggggagtaattatgacacgaagtacttatgtttatttcttagtgagctggattatcttgaacctgtgctattaaatggaaatttccatacatcttccccatactattttttataaaagagcctattcaatagctcagaggttgaactctggttaaacaagataatatgttattaataaaaatagaagaagaaagaataaagcttagtcctgtgtctttaaaaattaaaaattttacttgattcccatctatgggctttagacctattactgggtggagtcttaaagttataattgttcaatatgttttttgaacagtgtgctaaatcaatagcaaacccactgccatattagttattctgaatatactaaaaaaatccagctagattgcagtttaataattaaactgtacatactgtgcatataatgaatttttatcttatgtaaattatttttagaacacaagttgggaaatgtggcttctgttcatttcgtttaattaaagctacctcctaaactatagtggctgccagtagcagactgttaaattgtggtttatatactttttgcattgtaaatagtctttgttgtacattgtcagtgtaataaaaacagaatctttgtatatcaaaatcatgtagtttgtataaaatgtgggaaggatttatttacagtgtgttgtaattttgtaaggccaactatttacaagttttaaaaattgctatcatgtatatttacacatctgataaatattaaatcataacttggtaagaaactcctaattaaaaggttttttccaaaattcaggttattgaaaatttttcattttattcatttaaaaactagaataacagatatataaaagtgttaatctttgtgctatatggtatgaaatacaatattgtactcagtgttttgaattattaaagtttctagaaagcaatctattttgccttaatttaaaactaggtatattaatgaatttagttttaaagtaagcaaattaaatatttgtaagtggacagtattagaagaaatgttggaagtaaccattagaaaacactattttgatatttatttgtaaacatataagaacattttgctgaaacttagaaataaggttttatcctaagtctgaactatactcatggaaaacagattatgaaatttcagaaaaaccattgattcaatctttatctaaaaagcaaatgattaaaaaatctgcatgat

SEQ ID NO: 252234 - DNA, 5483 bp, Homo sapiens
tcgtgccgaattcggcacgaggggacgggaagagattgagccgcggctgggagacagcgagccagagtctgggtgtttgtgcgagagccacggcgggggctggggcgagtggccggcatggctgaaggctgcgctctgcaaccttgaagagccgctgcattgagaggccagggacagggagaccggtgcgatggcagagcgcggcccccgccgctctgcgcgtccatggagcagcgggaagggcgaaactccggagcgccgcgtccctgcgccgctgcggcggactgctgaaggggccgagcccgcgcggaccgccgaggaagagacccccgctccagcccgcaggccggctgcccgggggcggcgggggacatcggagggcagcggagcgagcagcgccgcgggagaggccggcgcgggaggcggccgcagcaatgccgggcccgctagggctgctctgcttcctcgccctggggctgctcggctcggccgggcccagcggcgcggcgccgcctctctgcgcggcgccctgcagctgcgacggcgaccgtcgggtggactgctccgggaaggggctgacggccgtgcccgaggggctcagcgccttcacccaagcgctggatatcagtatgaacaacattactcagttgccagaagatgcatttaagaactttccttttctagaagagctacaattggcgggcaacgacctttcttttatccacccaaaggccttgtctgggttgaaagaactcaaagttctaacgctccagaataatcagttgaaaacagtacccagtgaagccattcgagggctgagtgctttgcagtctttgcgtttagatgccaaccatattacctcagtccccgaggacagttttgaaggacttgttcagttacggcatctgtggctggatgacaacagcttgacggaggtgcctgtgcaccccctcagcaatctgcccaccctacaggcgctgaccctggctctcaacaagatctcaagcatccctgactttgcatttaccaacctttcaagcctggtagttctgcatcttcataacaataaaattagaagcctgagtcaacactgttttgatggactagataacctggagaccttagacttgagttataataacttgggggaatttcctcaggctattaaagcccgtcctagccttaaagagctaggatttcatagtaattctatttctgttatccctgatggagcatttgatggtaatccactcttaagaactatacatttgtatgataatcctctgtcttttgtggggaactcagcatttcacaatttatctgatcttcattccctagtcattcgtggtgcaagcatggtgcagcagttccccaatcttacaggaactgtccacctggaaagtctgactttgacaggtacaaagataagcagcatacctaataatttgtgtcaagaacaaaagatgcttaggactttggacttgtcttacaataatataagagaccttccaagttttaatggttgccatgctctggaagaaatttctttacagcgtaatcaaatctaccaaataaaggaaggcacctttcaaggcctgatatctctaaggattctagatctgagtagaaacctgatacatgaaattcacagtagagcttttgccacacttgggccaataactaacctagatgtaagtttcaatgaattaacttcctttcctacggaaggcctgaatgggctaaatcaactgaaacttgtgggcaacttcaagctgaaagaagccttagcagcaaaagactttgttaacctcaggtctttatcggtaccatatgcttatcagtgctgtgcattttggggttgtgactcttatgcaaatttaaacacagaagataacagcctccaggaccacagtgtggcacaggagaaaggtactgctgatgcagcaaatgtcacaagcactcttgaaaatgaagaacatagtcaaataattatccattgtacaccttcaacaggtgcttttaagccctgtgaatatttactgggaagctggatgattcgtcttactgtgtggttcattttcttggttgcattatttttcaacctgcttgttattttaacaacatttgcatcttgtacatcactgccttcgtccaaattgtttataggcttgatttctgtgtctaacttattcatgggaatctatactggcatcctaacttttcttgatgctgtgtcctggggcagattcgctgaatttggcatttggtgggaaactggcagtggctgcaaagtagctgggtttcttgcagttttctcctcagaaagtgccatatttttattaatgctagcaactgtcgaaagaagcttatctgcaaaagatataatgaaaaatgggaagagcaatcatctcaaacagttccgggttgctgcccttttggctttcctaggtgctacagtagcaggctgttttccccttttccatagaggggaatattctgcatcacccctttgtttgccatttcctacaggtgaaacgccatcattaggattcactgtaacgttagtgctattaaactcactagcatttttattaatggccgttatctacactaagctatactgcaacttggaaaaagaggacctctcagaaaactcacaatctagcatgattaagcatgtcgcttggctaatcttcaccaattgcatctttttctgccctgtggcgtttttttcatttgcaccattgatcactgcaatctctatcagccccgaaataatgaagtctgttactctgatattttttccattgcctgcttgcctgaatccagtcctgtatgttttcttcaacccaaagtttaaagaagactggaagttactgaagcgacgtgttaccaagaaaagtggatcagtttcagtttccatcagtagccaaggtggttgtctggaacaggatttctactacgactgtggcatgtactcacatttgcagggcaacctgactgtttgcgactgctgcgaatcgtttcttttaacaaagccagtatcatgcaaacacttgataaaatcacacagctgtcctgcattggcagtggcttcttgccaaagacctgagggctactggtccgactgtggcacacagtcggcccactctgattatgcagatgaagaagattcctttgtctcagacagttctgaccaggtgcaggcctgtggacgagcctgcttctaccagagtagaggattccctttggtgcgctatgcttacaatctaccaagagttaaagactgaactactgtgtgtgtaaccgtttcccccgtcaaccaaaatcagtgtttatagagtgaaccctattctcatctttcatctgggaagcacttctgtaatcactgcctggtgtcacttagaagaaggagaggtggcagtttatttctcaaaccagtcattttcaaagaacaggtgcctaaattataaattggtgaaaaatgcaatgtccaagcaatgtatgatctgtttgaaacaaatatatgacttgaaaaggatcttaggtgtagtagagcaatataatgttagttttttctgatccataagaagcaaatttatacctatttgtgtattaagcacaagataaagaacagctgttaatattttttaaaaatctattttaaaatgtgattttctataactgaagaaaatatcttgctaattttacctaatgtttcatccttaatctcaggacaacttactgcagggccaaaaaagggactgtcccagctagaactgtgagagtatacataggcattactttattatgttttcacttgccatccttgacataagagaactataaattttgtttaagcaatttataaatctaaaacctgaagatgtttttaaaacaatattaacagctgttaggttaaaaaaatagctggacatttgttttcagtcattatacattgctttggtccaatcagtaattttttcttaagtgttttgtgattacactactagaaaaaaagtaaaaggctaattgctgtgtgggtttagtcgatttggctaaactactaactaatgtgggggtttaatagtatctgagggatttggtggcttcatgtaatgttctcattaatgaatacttcctaatatcgttggctctactaatattttccaatttgctgggatgtcacctagcaatagcttggattatatagaaagtaaactgtggtcaatacttgcatttaattagacgaaacggggagtaattatgacacgaagtacttatgtttatttcttagtgagctggattatcttgaacctgtgctattaaatggaaatttccatacatcttccccatactattttttataaaagagcctattcaatagctcagaggttgaactctggttaaacaagataatatgttattaataaaaatagaagaagaaagaataaagcttagtcctgtgtctttaaaaattaaaaattttacttgattcccatctatgggctttagacctattactgggtggagtcttaaagttataattgttcaatatgttttttgaacagtgtgctaaatcaatagcaaacccactgccatattagttattctgaatatactaaaaaaatccagctagattgcagtttaataattaaactgtacatactgtgcatataatgaatttttatcttatgtaaattatttttagaacacaagttgggaaatgtggcttctgttcatttcgtttaattaaagctacctcctaaactatagtggctgccagtagcagactgttaaattgtggtttatatactttttgcattgtaaatagtctttgttgtacattgtcagtgtaataaaaacagaatctttgtatatcaaaatcatgtagtttgtataaaatgtgggaaggatttatttacagtgtgttgtaattttgtaaggccaactatttacaagttttaaaaattgctatcatgtatatttacacatctgataaatattaaatcataacttggtaagaaactcctaattaaaaggttttttccaaaattcaggttattgaaaatttttcattttattcatttaaaaactagaataacagatatataaaagtgttaatctttgtgctatatggtatgaaatacaatattgtactcagtgttttgaattattaaagtttctagaaagcaatctattttgccttaatttaaaactaggtatattaatgaatttagttttaaagtaagcaaattaaatatttgtaagtggacagtattagaagaaatgttggaagtaaccattagaaaacactattttgatatttatttgtaaacatataagaacattttgctgaaacttagaaataaggttttatcctaagtctgaactatactcatggaaaacagattatgaaatttcagaaaaaccattgattcaatctttatctaaaaagcaaatgattaaaaaatctgcatgat

SEQ ID NO: 252235 - DNA, 5312 bp, Homo sapiens
tcgtgccgaattcggcacgaggggacgggaagagattgagccgcggctgggagacagcgagccagagtctgggtgtttgtgcgagagccacggcgggggctggggcgagtggccggcatggctgaaggctgcgctctgcaaccttgaagagccgctgcattgagaggccagggacagggagaccggtgcgatggcagagcgcggcccccgccgctgcgccgggccggcccggctggcctgagccgccggaggagcggggctgcctctgcgcgtccatggagcagcgggaagggcgaaactccggagcgccgcgtccctgcgccgctgcggcggactgctgaaggggccgagcccgcgcggaccgccgaggaagagacccccgctccagcccgcaggccggctgcccgggggcggcgggggacatcggagggcagcggagcgagcagcgccgcgggagaggccggcgcgggaggcggccgcagcaatgccgggcccgctagggctgctctgcttcctcgccctggggctgctcggctcggccgggcccagcggcgcggcgccgcctctctgcgcggcgccctgcagctgcgacggcgaccgtcgggtggactgctccgggaaggggctgacggccgtgcccgaggggctcagcgccttcacccaagcgctggatatcagtatgaacaacattactcagttgccagaagatgcatttaagaactttccttttctagaagagctacaattggcgggcaacgacctttcttttatccacccaaaggccttgtctgggttgaaagaactcaaagttctaacgctccagaataatcagttgaaaacagtacccagtgaagccattcgagggctgagtgctttgcagtctttgcgtttagatgccaaccatattacctcagtccccgaggacagttttgaaggacttgttcagttacggcatctgtggctggatgacaacagcttgacggaggtgcctgtgcaccccctcagcaatctgcccaccctacaggcgctgaccctggctctcaacaagatctcaagcatccctgactttgcatttaccaacctttcaagcctggtagttctgcatcttcataacaataaaattagaagcctgagtcaacactgttttgatggactagataacctggagaccttagacttgagttataataacttgggggaatttcctcaggctattaaagcccgtcctagccttaaagagctaggatttcatagtaattctatttctgttatccctgatggagcatttgatggtaatccactcttaagaactatacatttgtatgataatcctctgtcttttgtggggaactcagcatttcacaatttatctgatcttcattccctagtcattcgtggtgcaagcatggtgcagcagttccccaatcttacaggaactgtccacctggaaagtctgactttgacaggtacaaagataagcagcatacctaataatttgtgtcaagaacaaaagatgcttaggactttggacttgtcttacaataatataagagaccttccaagttttaatggttgccatgctctggaagaaatttctttacagcgtaatcaaatctaccaaataaaggaaggcacctttcaaggcctgatatctctaaggattctagatctgagtagaaacctgatacatgaaattcacagtagagcttttgccacacttgggccaataactaacctagatgtaagtttcaatgaattaacttcctttcctacggaaggcctgaatgggctaaatcaactgaaacttgtgggcaacttcaagctgaaagaagccttagcagcaaaagactttgttaacctcaggtctttatcggtaccatatgcttatcagtgctgtgcattttggggttgtgactcttatgcaaatttaaacacagaagataacagcctccaggaccacagtgtggcacaggagaaaggtactgctgatgcagcaaatgtcacaagcactcttgaaaatgaagaacatagtcaaataattatccattgtacaccttcaacaggtgcttttaagccctgtgaatatttactgggaagctggatgattcgtcttactgtgtggttcattttcttggttgcattatttttcaacctgcttgttattttaacaacatttgcatcttgtacatcactgccttcgtccaaattgtttataggcttgatttctgtgtctaacttattcatgggaatctatactggcatcctaacttttcttgatgctgtgtcctggggcagattcgctgaatttggcatttggtgggaaactggcagtggctgcaaagtagctgggtttcttgcagttttctcctcagaaagtgccatatttttattaatgctagcaactgtcgaaagaagcttatctgcaaaagatataatgaaaaatgggaagagcaatcatctcaaacagttccgggttgctgcccttttggctttcctaggtgctacagtagcaggctgttttccccttttccatagaggggaatattctgcatcacccctttgtttgccatttcctacaggtgaaacgccatcattaggattcactgtaacgttagtgctattaaactcactagcatttttattaatggccgttatctacactaagctatactgcaacttggaaaaagaggacctctcagaaaactcacaatctagcatgattaagcatgtcgcttggctaatcttcaccaattgcatctttttctgccctgtggcgtttttttcatttgcaccattgatcactgcaatctctatcagccccgaaataatgaagtctgttactctgatattttttccattgcctgcttgcctgaatccagtcctgtatgttttcttcaacccaaagtttaaagaagactggaagttactgaagcgacgtgttaccaagaaaagtggatcagtttcagtttccatcagtagccaaggtggttgtctggaacaggatttctactacgactgtggcatgtactcacatttgcagggcaacctgactgtttgcgactgctgcgaatcgtttcttttaacaaagccagtatcatgcaaacacttgataaaatcacacagctgtcctgcattggcagtggcttcttgccaaagacctgagggctactggtccgactgtggcacacagtcggcccactctgattatgcagatgaagaagattcctttgtctcagacagttctgaccaggtgcaggcctgtggacgagcctgcttctaccagagtagaggattccctttggtgcgctatgcttacaatctaccaagagttaaagactgaactactgtgtgtgtaaccgtttcccccgtcaaccaaaatcagtgtttatagagtgaaccctattctcatctttcatctgggaagcacttctgtaatcactgcctggtgtcacttagaagaaggagaggtggcagtttatttctcaaaccagtcattttcaaagaacaggtgcctaaattataaattggtgaaaaatgcaatgtccaagcaatgtatgatctgtttgaaacaaatatatgacttgaaaaggatcttaggtgtagtagagcaatataatgttagttttttctgatccataagaagcaaatttatacctatttgtgtattaagcacaagataaagaacagctgttaatattttttaaaaatctattttaaaatgtgattttctataactgaagaaaatatcttgctaattttacctaatgtttcatccttaatctcaggacaacttactgcagggccaaaaaagggactgtcccagctagaactgtgagagtatacataggcattactttattatgttttcacttgccatccttgacataagagaactataaattttgtttaagcaatttataaatctaaaacctgaagatgtttttaaaacaatattaacagctgttaggttaaaaaaatagctggacatttgttttcagtcattatacattgctttggtccaatcagtaattttttcttaagtgttttgtgattacactactagaaaaaaagtaaaaggctaattgctgtgtgggtttagtcgatttggctaaactactaactaatgtgggggtttaatagtatctgagggatttggtggcttcatgtaatgttctcattaatgaatacttcctaatatcgttggctctactaatattttccaatttgctgggatgtcacctagcaatagcttggattatatagaaagtaaactgtggtcaatacttgcatttaattagacgaaacggggagtaattatgacacgaagtacttatgtttatttcttagtgagctggattatcttgaacctgtgctattaaatggaaatttccatacatcttccccatactattttttataaaagagcctattcaatagctcagaggttgaactctggttaaacaagataatatgttattaataaaaatagaagaagaaagaataaagcttagtcctgtgtctttaaaaattaaaaattttacttgattcccatctatgggctttagacctattactgggtggagtcttaaagttataattgttcaatatgttttttgaacagtgtgctaaatcaatagcaaacccactgccatattagttattctgaatatactaaaaaaatccagctagattgcagtttaataattaaactgtacatactgtgcatataatgaatttttatcttatgtaaattatttttagaacacaagttgggaaatgtggcttctgttcatttcgtttaattaaagctacctcctaaactatagtggctgccagtagcagactgttaaattgtggtttatatactttttgcattgtaaatagtctttgttgtacattgtcagtgtaataaaaacagaatctttgtatatcaaaatcatgtagtttgtataaaatgtgggaaggatttatttacagtgtgttgtaattttgtaaggccaactatttacaagttttaaaaattgctatcatgtatatttacacatctgataaatattaaatcataacttggtaagaaactcctaattaaaaggttttttccccaaatcaggtatgaaatttcatctatcattaaaatagatacgcttttaagtgtactggtattggatgaatccactgtccaggttgatatcagtttagagattaaaaaaaaaaaacccaccaaaaaaatccaaaaacaaaaattgggggcgcaaaaaatggggggagaaaaatgagcgctgtgtcacacggggggacagcgtttacaccgg

SEQ ID NO: 252236 - DNA, 5171 bp, Homo sapiens
tcgtgccgaattcggcacgaggggacgggaagagattgagccgcggctgggagacagcgagccagagtctgggtgtttgtgcgagagccacggcgggggctggggcgagtggccggcatggctgaaggctgcgctctgcaaccttgaagagccgctgcattgagaggccagggacagggagaccggtgcgatggcagagcgcggcccccgccgctgcgccgggccggcccggctggcctgagccgccggaggagcggggctgcctctgcgcgtccatggagcagcgggaagggcgaaactccggagcgccgcgtccctgcgccgctgcggcggactgctgaaggggccgagcccgcgcggaccgccgaggaagagacccccgctccagcccgcaggccggctgcccgggggcggcgggggacatcggagggcagcggagcgagcagcgccgcgggagaggccggcgcgggaggcggccgcagcaatgccgggcccgctagggctgctctgcttcctcgccctggggctgctcggctcggccgggcccagcggcgcggcgccgcctctctgcgcggcgccctgcagctgcgacggcgaccgtcgggtggactgctccgggaaggggctgacggccgtgcccgaggggctcagcgccttcacccaagcgctggatatcagtatgaacaacattactcagttgccagaagatgcatttaagaactttccttttctagaagagctacaattggcgggcaacgacctttcttttatccacccaaaggccttgtctgggttgaaagaactcaaagttctaacgctccagaataatcagttgaaaacagtacccagtgaagccattcgagggctgagtgctttgcagtctttgcgtttagatgccaaccatattacctcagtccccgaggacagttttgaaggacttgttcagttacggcatctgtggctggatgacaacagcttgacggaggtgcctgtgcaccccctcagcaatctgcccaccctacaggcgctgaccctggctctcaacaagatctcaagcatccctgactttgcatttaccaacctttcaagcctggtagttctgcatcttcataacaataaaattagaagcctgagtcaacactgttttgatggactagataacctggagaccttagacttgagttataataacttgggggaatttcctcaggctattaaagcccgtcctagccttaaagagctaggatttcatagtaattctatttctgttatccctgatggagcatttgatggtaatccactcttaagaactatacatttgtatgataatcctctgtcttttgtggggaactcagcatttcacaatttatctgatcttcattccctagtcattcgtggtgcaagcatggtgcagcagttccccaatcttacaggaactgtccacctggaaagtctgactttgacaggtacaaagataagcagcatacctaataatttgtgtcaagaacaaaagatgcttaggactttggacttgtcttacaataatataagagaccttccaagttttaatggttgccatgctctggaagaaatttctttacagcgtaatcaaatctaccaaataaaggaaggcacctttcaaggcctgatatctctaaggattctagatctgagtagaaacctgatacatgaaattcacagtagagcttttgccacacttgggccaataactaacctagatgtaagtttcaatgaattaacttcctttcctacggaaggcctgaatgggctaaatcaactgaaacttgtgggcaacttcaagctgaaagaagccttagcagcaaaagactttgttaacctcaggtctttatcggtaccatatgcttatcagtgctgtgcattttggggttgtgactcttatgcaaatttaaacacagaagataacagcctccaggaccacagtgtggcacaggagaaaggtactgctgatgcagcaaatgtcacaagcactcttgaaaatgaagaacatagtcaaataattatccattgtacaccttcaacaggtgcttttaagccctgtgaatatttactgggaagctggatgattcgtcttactgtgtggttcattttcttggttgcattatttttcaacctgcttgttattttaacaacatttgcatcttgtacatcactgccttcgtccaaattgtttataggcttgatttctgtgtctaacttattcatgggaatctatactggcatcctaacttttcttgatgctgtgtcctggggcagattcgctgaatttggcatttggtgggaaactggcagtggctgcaaagtagctgggtttcttgcagttttctcctcagaaagtgccatatttttattaatgctagcaactgtcgaaagaagcttatctgcaaaagatataatgaaaaatgggaagagcaatcatctcaaacagttccgggttgctgcccttttggctttcctaggtgctacagtagcaggctgttttccccttttccatagaggggaatattctgcatcacccctttgtttgccatttcctacaggtgaaacgccatcattaggattcactgtaacgttagtgctattaaactcactagcatttttattaatggccgttatctacactaagctatactgcaacttggaaaaagaggacctctcagaaaactcacaatctagcatgattaagcatgtcgcttggctaatcttcaccaattgcatctttttctgccctgtggcgtttttttcatttgcaccattgatcactgcaatctctatcagccccgaaataatgaagtctgttactctgatattttttccattgcctgcttgcctgaatccagtcctgtatgttttcttcaacccaaagtttaaagaagactggaagttactgaagcgacgtgttaccaagaaaagtggatcagtttcagtttccatcagtagccaaggtggttgtctggaacaggatttctactacgactgtggcatgtactcacatttgcagggcaacctgactgtttgcgactgctgcgaatcgtttcttttaacaaagccagtatcatgcaaacacttgataaaatcacacagctgtcctgcattggcagtggcttcttgccaaagacctgagggctactggtccgactgtggcacacagtcggcccactctgattatgcagatgaagaagattcctttgtctcagacagttctgaccaggtgcaggcctgtggacgagcctgcttctaccagagtagaggattccctttggtgcgctatgcttacaatctaccaagagttaaagactgaactactgtgtgtgtaaccgtttcccccgtcaaccaaaatcagtgtttatagagtgaaccctattctcatctttcatctgggaagcacttctgtaatcactgcctggtgtcacttagaagaaggagaggtggcagtttatttctcaaaccagtcattttcaaagaacaggtgcctaaattataaattggtgaaaaatgcaatgtccaagcaatgtatgatctgtttgaaacaaatatatgacttgaaaaggatcttaggtgtagtagagcaatataatgttagttttttctgatccataagaagcaaatttatacctatttgtgtattaagcacaagataaagaacagctgttaatattttttaaaaatctattttaaaatgtgattttctataactgaagaaaatatcttgctaattttacctaatgtttcatccttaatctcaggacaacttactgcagggccaaaaaagggactgtcccagctagaactgtgagagtatacataggcattactttattatgttttcacttgccatccttgacataagagaactataaattttgtttaagcaatttataaatctaaaacctgaagatgtttttaaaacaatattaacagctgttaggttaaaaaaatagctggacatttgttttcagtcattatacattgctttggtccaatcagtaattttttcttaagtgttttgtgattacactactagaaaaaaagtaaaaggctaattgctgtgtgggtttagtcgatttggctaaactactaactaatgtgggggtttaatagtatctgagggatttggtggcttcatgtaatgttctcattaatgaatacttcctaatatcgttggctctactaatattttccaatttgctgggatgtcacctagcaatagcttggattatatagaaagtaaactgtggtcaatacttgcatttaattagacgaaacggggagtaattatgacacgaagtacttatgtttatttcttagtgagctggattatcttgaacctgtgctattaaatggaaatttccatacatcttccccatactattttttataaaagagcctattcaatagctcagaggttgaactctggttaaacaagataatatgttattaataaaaatagaagaagaaagaataaagcttagtcctgtgtctttaaaaattaaaaattttacttgattcccatctatgggctttagacctattactgggtggagtcttaaagttataattgttcaatatgttttttgaacagtgtgctaaatcaatagcaaacccactgccatattagttattctgaatatactaaaaaaatccagctagattgcagtttaataattaaactgtacatactgtgcatataatgaatttttatcttatgtaaattatttttagaacacaagttgggaaatgtggcttctgttcatttcgtttaattaaagctacctcctaaactatagtggctgccagtagcagactgttaaattgtggtttatatactttttgcattgtaaatagtctttgttgtacattgtcagtgtaataaaaacagaatctttgtatatcaaaatcatgtagtttgtataaaatgtgggaaggatttatttacagtgtgttgtaattttgtaaggccaactatttacaagttttaaaaattgctatcatgtatatttacacatctgataaatattaaatcataacttggtaagaaactcctaattaaaaggttttttccaaaaaacagaaccgatggcctttcccaacagtagtacaaccctgaagggaaaatgaaaattgaaagcgta

SEQ ID NO: 252237 - DNA, 3062 bp, Homo sapiens
  misc_feature (21)..(21): n is a, c, g, or t
actctattgatcccctgcctngatgtcgtgctacagtagcaggctgttttccccttttccatagaggggaatattctgcatcacccctttgtttgccatttcctacaggtgaaacgccatcattaggattcactgtaacgttagtgctattaaactcactagcatttttattaatggccgttatctacactaagctatactgcaacttggaaaaagaggacctctcagaaaactcacaatctagcatgattaagcatgtcgcttggctaatcttcaccaattgcatctttttctgccctgtggcgtttttttcatttgcaccattgatcactgcaatctctatcagccccgaaataatgaagtctgttactctgatattttttccattgcctgcttgcctgaatccagtcctgtatgttttcttcaacccaaagtttaaagaagactggaagttactgaagcgacgtgttaccaagaaaagtggatcagtttcagtttccatcagtagccaaggtggttgtctggaacaggatttctactacgactgtggcatgtactcacatttgcagggcaacctgactgtttgcgactgctgcgaatcgtttcttttaacaaagccagtatcatgcaaacacttgataaaatcacacagctgtcctgcattggcagtggcttcttgccaaagacctgagggctactggtccgactgtggcacacagtcggcccactctgattatgcagatgaagaagattcctttgtctcagacagttctgaccaggtgcaggcctgtggacgagcctgcttctaccagagtagaggattccctttggtgcgctatgcttacaatctaccaagagttaaagactgaactactgtgtgtgtaaccgtttcccccgtcaaccaaaatcagtgtttatagagtgaaccctattctcatctttcatctgggaagcacttctgtaatcactgcctggtgtcacttagaagaaggagaggtggcagtttatttctcaaaccagtcattttcaaagaacaggtgcctaaattataaattggtgaaaaatgcaatgtccaagcaatgtatgatctgtttgaaacaaatatatgacttgaaaaggatcttaggtgtagtagagcaatataatgttagttttttctgatccataagaagcaaatttatacctatttgtgtattaagcacaagataaagaacagctgttaatattttttaaaaatctattttaaaatgtgattttctataactgaagaaaatatcttgctaattttacctaatgtttcatccttaatctcaggacaacttactgcagggccaaaaaagggactgtcccagctagaactgtgagagtatacataggcattactttattatgttttcacttgccatccttgacataagagaactataaattttgtttaagcaatttataaatctaaaacctgaagatgtttttaaaacaatattaacagctgttaggttaaaaaaatagctggacatttgttttcagtcattatacattgctttggtccaatcagtaattttttcttaagtgttttgtgattacactactagaaaaaaagtaaaaggctaattgctgtgtgggtttagtcgatttggctaaactactaactaatgtgggggtttaatagtatctgagggatttggtggcttcatgtaatgttctcattaatgaatacttcctaatatcgttggctctactaatattttccaatttgctgggatgtcacctagcaatagcttggattatatagaaagtaaactgtggtcaatacttgcatttaattagacgaaacggggagtaattatgacacgaagtacttatgtttatttcttagtgagctggattatcttgaacctgtgctattaaatggaaatttccatacatcttccccatactattttttataaaagagcctattcaatagctcagaggttgaactctggttaaacaagataatatgttattaataaaaatagaagaagaaagaataaagcttagtcctgtgtctttaaaaattaaaaattttacttgattcccatctatgggctttagacctattactgggtggagtcttaaagttataattgttcaatatgttttttgaacagtgtgctaaatcaatagcaaacccactgccatattagttattctgaatatactaaaaaaatccagctagattgcagtttaataattaaactgtacatactgtgcatataatgaatttttatcttatgtaaattatttttagaacacaagttgggaaatgtggcttctgttcatttcgtttaattaaagctacctcctaaactatagtggctgccagtagcagactgttaaattgtggtttatatactttttgcattgtaaatagtctttgttgtacattgtcagtgtaataaaaacagaatctttgtatatcaaaatcatgtagtttgtataaaatgtgggaaggatttatttacagtgtgttgtaattttgtaaggccaactatttacaagttttaaaaattgctatcatgtatatttacacatctgataaatattaaatcataacttggtaagaaactcctaattaaaaggttttttccaaaattcaggttattgaaaatttttcattttattcatttaaaaactagaataacagatatataaaagtgttaatctttgtgctatatggtatgaaatacaatattgtactcagtgttttgaattattaaagtttctagaaagcaatctattttgccttaatttaaaactaggtatattaatgaatttagttttaaagtaagcaaattaaatatttgtaagtggacagtattagaagaaatgttggaagtaaccattagaaaacactattttgatatttatttgtaaacatataagaacattttgctgaaacttagaaataaggttttatcctaagtctgaactatactcatggaaaacagattatgaaatttcagaaaaaccattgattcaatctttatctaaaaagcaaatgattaaaaaatctgcatgat

SEQ ID NO: 252238 - DNA, 5146 bp, Homo sapiens
tcgtgccgaattcggcacgaggggacgggaagagattgagccgcggctgggagacagcgagccagagtctgggtgtttgtgcgagagccacggcgggggctggggcgagtggccggcatggctgaaggctgcgctctgcaaccttgaagagccgctgcattgagaggccagggacagggagaccggtgcgatggcagagcgcggcccccgccgctgcgccgggccggcccggctggcctgagccgccggaggagcggggctgcctctgcgcgtccatggagcagcgggaagggcgaaactccggagcgccgcgtccctgcgccgctgcggcggactgctgaaggggccgagcccgcgcggaccgccgaggaagagacccccgctccagcccgcaggccggctgcccgggggcggcgggggacatcggagggcagcggagcgagcagcgccgcgggagaggccggcgcgggaggcggccgcagcaatgccgggcccgctagggctgctctgcttcctcgccctggggctgctcggctcggccgggcccagcggcgcggcgccgcctctctgcgcggcgccctgcagctgcgacggcgaccgtcgggtggactgctccgggaaggggctgacggccgtgcccgaggggctcagcgccttcacccaagcgctggatatcagtatgaacaacattactcagttgccagaagatgcatttaagaactttccttttctagaagagctacaattggcgggcaacgacctttcttttatccacccaaaggccttgtctgggttgaaagaactcaaagttctaacgctccagaataatcagttgaaaacagtacccagtgaagccattcgagggctgagtgctttgcagtctttgcgtttagatgccaaccatattacctcagtccccgaggacagttttgaaggacttgttcagttacggcatctgtggctggatgacaacagcttgacggaggtgcctgtgcaccccctcagcaatctgcccaccctacaggcgctgaccctggctctcaacaagatctcaagcatccctgactttgcatttaccaacctttcaagcctggtagttctgcatcttcataacaataaaattagaagcctgagtcaacactgttttgatggactagataacctggagaccttagacttgagttataataacttgggggaatttcctcaggctattaaagcccgtcctagccttaaagagctaggatttcatagtaattctatttctgttatccctgatggagcatttgatggtaatccactcttaagaactatacatttgtatgataatcctctgtcttttgtggggaactcagcatttcacaatttatctgatcttcattccctagtcattcgtggtgcaagcatggtgcagcagttccccaatcttacaggaactgtccacctggaaagtctgactttgacaggtacaaagataagcagcatacctaataatttgtgtcaagaacaaaagatgcttaggactttggacttgtcttacaataatataagagaccttccaagttttaatggttgccatgctctggaagaaatttctttacagcgtaatcaaatctaccaaataaaggaaggcacctttcaaggcctgatatctctaaggattctagatctgagtagaaacctgatacatgaaattcacagtagagcttttgccacacttgggccaataactaacctagatgtaagtttcaatgaattaacttcctttcctacggaaggcctgaatgggctaaatcaactgaaacttgtgggcaacttcaagctgaaagaagccttagcagcaaaagactttgttaacctcaggtctttatcggtaccatatgcttatcagtgctgtgcattttggggttgtgactcttatgcaaatttaaacacagaagataacagcctccaggaccacagtgtggcacaggagaaaggtactgctgatgcagcaaatgtcacaagcactcttgaaaatgaagaacatagtcaaataattatccattgtacaccttcaacaggtgcttttaagccctgtgaatatttactgggaagctggatgattcgtcttactgtgtggttcattttcttggttgcattatttttcaacctgcttgttattttaacaacatttgcatcttgtacatcactgccttcgtccaaattgtttataggcttgatttctgtgtctaacttattcatgggaatctatactggcatcctaacttttcttgatgctgtgtcctggggcagattcgctgaatttggcatttggtgggaaactggcagtggctgcaaagtagctgggtttcttgcagttttctcctcagaaagtgccatatttttattaatgctagcaactgtcgaaagaagcttatctgcaaaagatataatgaaaaatgggaagagcaatcatctcaaacagttccgggttgctgcccttttggctttcctaggtgctacagtagcaggctgttttccccttttccatagaggggaatattctgcatcacccctttgtttgccatttcctacaggtgaaacgccatcattaggattcactgtaacgttagtgctattaaactcactagcatttttattaatggccgttatctacactaagctatactgcaacttggaaaaagaggacctctcagaaaactcacaatctagcatgattaagcatgtcgcttggctaatcttcaccaattgcatctttttctgccctgtggcgtttttttcatttgcaccattgatcactgcaatctctatcagccccgaaataatgaagtctgttactctgatattttttccattgcctgcttgcctgaatccagtcctgtatgttttcttcaacccaaagtttaaagaagactggaagttactgaagcgacgtgttaccaagaaaagtggatcagtttcagtttccatcagtagccaaggtggttgtctggaacaggatttctactacgactgtggcatgtactcacatttgcagggcaacctgactgtttgcgactgctgcgaatcgtttcttttaacaaagccagtatcatgcaaacacttgataaaatcacacagctgtcctgcattggcagtggcttcttgccaaagacctgagggctactggtccgactgtggcacacagtcggcccactctgattatgcagatgaagaagattcctttgtctcagacagttctgaccaggtgcaggcctgtggacgagcctgcttctaccagagtagaggattccctttggtgcgctatgcttacaatctaccaagagttaaagactgaactactgtgtgtgtaaccgtttcccccgtcaaccaaaatcagtgtttatagagtgaaccctattctcatctttcatctgggaagcacttctgtaatcactgcctggtgtcacttagaagaaggagaggtggcagtttatttctcaaaccagtcattttcaaagaacaggtgcctaaattataaattggtgaaaaatgcaatgtccaagcaatgtatgatctgtttgaaacaaatatatgacttgaaaaggatcttaggtgtagtagagcaatataatgttagttttttctgatccataagaagcaaatttatacctatttgtgtattaagcacaagataaagaacagctgttaatattttttaaaaatctattttaaaatgtgattttctataactgaagaaaatatcttgctaattttacctaatgtttcatccttaatctcaggacaacttactgcagggccaaaaaagggactgtcccagctagaactgtgagagtatacataggcattactttattatgttttcacttgccatccttgacataagagaactataaattttgtttaagcaatttataaatctaaaacctgaagatgtttttaaaacaatattaacagctgttaggttaaaaaaatagctggacatttgttttcagtcattatacattgctttggtccaatcagtaattttttcttaagtgttttgtgattacactactagaaaaaaagtaaaaggctaattgctgtgtgggtttagtcgatttggctaaactactaactaatgtgggggtttaatagtatctgagggatttggtggcttcatgtaatgttctcattaatgaatacttcctaatatcgttggctctactaatattttccaatttgctgggatgtcacctagcaatagcttggattatatagaaagtaaactgtggtcaatacttgcatttaattagacgaaacggggagtaattatgacacgaagtacttatgtttatttcttagtgagctggattatcttgaacctgtgctattaaatggaaatttccatacatcttccccatactattttttataaaagagcctattcaatagctcagaggttgaactctggttaaacaagataatatgttattaataaaaatagaagaagaaagaataaagcttagtcctgtgtctttaaaaattaaaaattttacttgattcccatctatgggctttagacctattactgggtggagtcttaaagttataattgttcaatatgttttttgaacagtgtgctaaatcaatagcaaacccactgccatattagttattctgaatatactaaaaaaatccagctagattgcagtttaataattaaactgtacatactgtgcatataatgaatttttatcttatgtaaattatttttagaacacaagttgggaaatgtggcttctgttcatttcgtttaattaaagctacctcctaaactatagtggctgccagtagcagactgttaaattgtggtttatatactttttgcattgtaaatagtctttgttgtacattgtcagtgtaataaaaacagaatctttgtatatcaaaaaaaaaaaaaaaaaaaaaaaaacttttggggggcgccgggcccgggaaaagttttaaaccattgggtggggccgggcccctggttatggaacacgggccacagggtaccaggaacccggccgcaacgggtgtgggttccccaaaaaaggccggggccgcgcgttcggaacacccaagggtcggggccgcgtccaccggggccagacgcaag

SEQ ID NO: 252239 - DNA, 2031 bp, Homo sapiens
  misc_feature (3)..(3): n is a, c, g, or t
  misc_feature (15)..(15): n is a, c, g, or t
  misc_feature (24)..(25): n is a, c, g, or t
aanatggtatcaacncagagtggnnattacggccggaatgtccaagcaatgtatgatctgtttgaaacaaatatatgacttgaaaaggatcttaggtgtagtagagcaatataatgttagttttttctgatccataagaagcaaatttatacctatttgtgtattaagcacaagataaagaacagctgttaatattttttaaaaatctattttaaaatgtgattttctataactgaagaaaatatcttgctaattttacctaatgtttcatccttaatctcaggacaacttactgcagggccaaaaaagggactgtcccagctagaactgtgagagtatacataggcattactttattatgttttcacttgccatccttgacataagagaactataaattttgtttaagcaatttataaatctaaaacctgaagatgtttttaaaacaatattaacagctgttaggttaaaaaaatagctggacatttgttttcagtcattatacattgctttggtccaatcagtaattttttcttaagtgttttgtgattacactactagaaaaaaagtaaaaggctaattgctgtgtgggtttagtcgatttggctaaactactaactaatgtgggggtttaatagtatctgagggatttggtggcttcatgtaatgttctcattaatgaatacttcctaatatcgttggctctactaatattttccaatttgctgggatgtcacctagcaatagcttggattatatagaaagtaaactgtggtcaatacttgcatttaattagacgaaacggggagtaattatgacacgaagtacttatgtttatttcttagtgagctggattatcttgaacctgtgctattaaatggaaatttccatacatcttccccatactattttttataaaagagcctattcaatagctcagaggttgaactctggttaaacaagataatatgttattaataaaaatagaagaagaaagaataaagcttagtcctgtgtctttaaaaattaaaaattttacttgattcccatctatgggctttagacctattactgggtggagtcttaaagttataattgttcaatatgttttttgaacagtgtgctaaatcaatagcaaacccactgccatattagttattctgaatatactaaaaaaatccagctagattgcagtttaataattaaactgtacatactgtgcatataatgaatttttatcttatgtaaattatttttagaacacaagttgggaaatgtggcttctgttcatttcgtttaattaaagctacctcctaaactatagtggctgccagtagcagactgttaaattgtggtttatatactttttgcattgtaaatagtctttgttgtacattgtcagtgtaataaaaacagaatctttgtatatcaaaatcatgtagtttgtataaaatgtgggaaggatttatttacagtgtgttgtaattttgtaaggccaactatttacaagttttaaaaattgctatcatgtatatttacacatctgataaatattaaatcataacttggtaagaaactcctaattaaaaggttttttccaaaattcaggttattgaaaatttttcattttattcatttaaaaactagaataacagatatataaaagtgttaatctttgtgctatatggtatgaaatacaatattgtactcagtgttttgaattattaaagtttctagaaagcaatctattttgccttaatttaaaactaggtatattaatgaatttagttttaaagtaagcaaattaaatatttgtaagtggacagtattagaagaaatgttggaagtaaccattagaaaacactattttgatatttatttgtaaacatataagaacattttgctgaaacttagaaataaggttttatcctaagtctgaactatactcatggaaaacagattatgaaatttcagaaaaaccattgattcaatctttatctaaaaagcaaatgattaaaaaatctgcatgat

SEQ ID NO: 252240 - DNA, 4316 bp, Homo sapiens
tcgtgccgaattcggcacgaggggacgggaagagattgagccgcggctgggagacagcgagccagagtctgggtgtttgtgcgagagccacggcgggggctggggcgagtggccggcatggctgaaggctgcgctctgcaaccttgaagagccgctgcattgagaggccagggacagggagaccggtgcgatggcagagcgcggcccccgccgctgcgccgggccggcccggctggcctgagccgccggaggagcggggctgcctctgcgcgtccatggagcagcgggaagggcgaaactccggagcgccgcgtccctgcgccgctgcggcggactgctgaaggggccgagcccgcgcggaccgccgaggaagagacccccgctccagcccgcaggccggctgcccgggggcggcgggggacatcggagggcagcggagcgagcagcgccgcgggagaggccggcgcgggaggcggccgcagcaatgccgggcccgctagggctgctctgcttcctcgccctggggctgctcggctcggccgggcccagcggcgcggcgccgcctctctgcgcggcgccctgcagctgcgacggcgaccgtcgggtggactgctccgggaaggggctgacggccgtgcccgaggggctcagcgccttcacccaagcgctggatatcagtatgaacaacattactcagttgccagaagatgcatttaagaactttccttttctagaagagctacaattggcgggcaacgacctttcttttatccacccaaaggccttgtctgggttgaaagaactcaaagttctaacgctccagaataatcagttgaaaacagtacccagtgaagccattcgagggctgagtgctttgcagtctttgcgtttagatgccaaccatattacctcagtccccgaggacagttttgaaggacttgttcagttacggcatctgtggctggatgacaacagcttgacggaggtgcctgtgcaccccctcagcaatctgcccaccctacaggcgctgaccctggctctcaacaagatctcaagcatccctgactttgcatttaccaacctttcaagcctggtagttctgcatcttcataacaataaaattagaagcctgagtcaacactgttttgatggactagataacctggagaccttagacttgagttataataacttgggggaatttcctcaggctattaaagcccgtcctagccttaaagagctaggatttcatagtaattctatttctgttatccctgatggagcatttgatggtaatccactcttaagaactatacatttgtatgataatcctctgtcttttgtggggaactcagcatttcacaatttatctgatcttcattccctagtcattcgtggtgcaagcatggtgcagcagttccccaatcttacaggaactgtccacctggaaagtctgactttgacaggtacaaagataagcagcatacctaataatttgtgtcaagaacaaaagatgcttaggactttggacttgtcttacaataatataagagaccttccaagttttaatggttgccatgctctggaagaaatttctttacagcgtaatcaaatctaccaaataaaggaaggcacctttcaaggcctgatatctctaaggattctagatctgagtagaaacctgatacatgaaattcacagtagagcttttgccacacttgggccaataactaacctagatgtaagtttcaatgaattaacttcctttcctacggaaggcctgaatgggctaaatcaactgaaacttgtgggcaacttcaagctgaaagaagccttagcagcaaaagactttgttaacctcaggtctttatcggtaccatatgcttatcagtgctgtgcattttggggttgtgactcttatgcaaatttaaacacagaagataacagcctccaggaccacagtgtggcacaggagaaaggtactgctgatgcagcaaatgtcacaagcactcttgaaaatgaagaacatagtcaaataattatccattgtacaccttcaacaggtgcttttaagccctgtgaatatttactgggaagctggatgattcgtcttactgtgtggttcattttcttggttgcattatttttcaacctgcttgttattttaacaacatttgcatcttgtacatcactgccttcgtccaaattgtttataggcttgatttctgtgtctaacttattcatgggaatctatactggcatcctaacttttcttgatgctgtgtcctggggcagattcgctgaatttggcatttggtgggaaactggcagtggctgcaaagtagctgggtttcttgcagttttctcctcagaaagtgccatatttttattaatgctagcaactgtcgaaagaagcttatctgcaaaagatataatgaaaaatgggaagagcaatcatctcaaacagttccgggttgctgcccttttggctttcctaggtgctacagtagcaggctgttttccccttttccatagaggggaatattctgcatcacccctttgtttgccatttcctacaggtgaaacgccatcattaggattcactgtaacgttagtgctattaaactcactagcatttttattaatggccgttatctacactaagctatactgcaacttggaaaaagaggacctctcagaaaactcacaatctagcatgattaagcatgtcgcttggctaatcttcaccaattgcatctttttctgccctgtggcgtttttttcatttgcaccattgatcactgcaatctctatcagccccgaaataatgaagtctgttactctgatattttttccattgcctgcttgcctgaatccagtcctgtatgttttcttcaacccaaagtttaaagaagactggaagttactgaagcgacgtgttaccaagaaaagtggatcagtttcagtttccatcagtagccaaggtggttgtctggaacaggatttctactacgactgtggcatgtactcacatttgcagggcaacctgactgtttgcgactgctgcgaatcgtttcttttaacaaagccagtatcatgcaaacacttgataaaatcacacagctgtcctgcattggcagtggcttcttgccaaagacctgagggctactggtccgactgtggcacacagtcggcccactctgattatgcagatgaagaagattcctttgtctcagacagttctgaccaggtgcaggcctgtggacgagcctgcttctaccagagtagaggattccctttggtgcgctatgcttacaatctaccaagagttaaagactgaactactgtgtgtgtaaccgtttcccccgtcaaccaaaatcagtgtttatagagtgaaccctattctcatctttcatctgggaagcacttctgtaatcactgcctggtgtcacttagaagaaggagaggtggcagtttatttctcaaaccagtcattttcaaagaacaggtgcctaaattataaattggtgaaaaatgcaatgtccaagcaatgtatgatctgtttgaaacaaatatatgacttgaaaaggatcttaggtgtagtagagcaatataatgttagttttttctgatccataagaagcaaatttatacctatttgtgtattaagcacaagataaagaacagctgttaatattttttaaaaatctattttaaaatgtgattttctataactgaagaaaatatcttgctaattttacctaatgtttcatccttaatctcaggacaacttactgcagggccaaaaaagggactgtcccagctagaactgtgagagtatacataggcattactttattatgttttcacttgccatccttgacataagagaactataaattttgtttaagcaatttataaatctaaaacctgaagatgtttttaaaacaatattaacagctgttaggttaaaaaaatagctggacatttgttttcagtcattatacattgctttggtccaatcagtaattttttcttaagtgttttgtgattacactactagaaaaaaagtaaaaggctaattgctgtgtgggtttagtcgatttggctaaactactaactaatgtgggggtttaatagtatctgagggatttggtggcttcatgtaatgttctcattaatgaatacttcctaatatcgttggctctactaatattttccaatttgctgggatgtcacctagcaatagcttggattatatagaaagtaaactgtggtcactcatatttggctcagaataaatctcttaaaatata

SEQ ID NO: 252241 - DNA, 1726 bp, Homo sapiens
gttttcacttgccatccttgacataagagaactataaatttgtttaagcaaattttttaaaaatctattttaaaatgtgattttctataactgaagaaaatatcttgctaattttacctaatgtttcatccttaatctcaggacaacttactgcagggccaaaaaagggactgtcccagctagaactgtgagagtatacaattgctttggtccaatcagtaattttttcttaagtgttttgtgattacactactagaaaaaaagtaaaaggctaattgctgtgtgggtttagtcgatttggctaaactactaactaatgtgggggtttaatagtatctgagggatttggtggcttcatgtaatgttctcattaatgaatacttcctaatatcgttggctctactaatattttccaatttgctgggatgtcacctagcaatagcttggattatatagaaagtaaactgtggtcaatacttgcatttaattagacgaaacggggagtaattatgacacgaagtacttatgtttatttcttagtgagctggattatcttgaacctgtgctattaaatggaaatttccatacatcttccccatactattttttataaaagagcctattcaatagctcagaggttgaactctggttaaacaagataatatgttattaataaaaatagaagaagaaagaataaagcttagtcctgtgtctttaaaaattaaaaattttacttgattcccatctatgggctttagacctattactgggtggagtcttaaagttataattgttcaatatgttttttgaacagtgtgctaaatcaatagcaaacccactgccatattagttattctgaatatactaaaaaaatccagctagattgcagtttaataattaaactgtacatactgtgcatataatgaatttttatcttatgtaaattatttttagaacacaagttgggaaatgtggcttctgttcatttcgtttaattaaagctacctcctaaactatagtggctgccagtagcagactgttaaattgtggtttatatactttttgcattgtaaatagtctttgttgtacattgtcagtgtaataaaaacagaatctttgtatatcaaaatcatgtagtttgtataaaatgtgggaaggatttatttacagtgtgttgtaattttgtaaggccaactatttacaagttttaaaaattgctatcatgtatatttacacatctgataaatattaaatcataacttggtaagaaactcctaattaaaaggttttttccaaaattcaggttattgaaaatttttcattttattcatttaaaaactagaataacagatatataaaagtgttaatctttgtgctatatggtatgaaatacaatattgtactcagtgttttgaattattaaagtttctagaaagcaatctattttgccttaatttaaaactaggtatattaatgaatttagttttaaagtaagcaaattaaatatttgtaagtggacagtattagaagaaatgttggaagtaaccattagaaaacactattttgatatttatttgtaaacatataagaacattttgctgaaacttagaaataaggttttatcctaagtctgaactatactcatggaaaacagattatgaaatttcagaaaaaccattgattcaatctttatctaaaaagcaaatgattaaaaaatctgcatgat

SEQ ID NO: 252242 - DNA, 3719 bp, Homo sapiens
tcgtgccgaattcggcacgaggggacgggaagagattgagccgcggctgggagacagcgagccagagtctgggtgtttgtgcgagagccacggcgggggctggggcgagtggccggcatggctgaaggctgcgctctgcaaccttgaagagccgctgcattgagaggccagggacagggagaccggtgcgatggcagagcgcggcccccgccgctgcgccgggccggcccggctggcctgagccgccggaggagcggggctgcctctgcgcgtccatggagcagcgggaagggcgaaactccggagcgccgcgtccctgcgccgctgcggcggactgctgaaggggccgagcccgcgcggaccgccgaggaagagacccccgctccagcccgcaggccggctgcccgggggcggcgggggacatcggagggcagcggagcgagcagcgccgcgggagaggccggcgcgggaggcggccgcagcaatgccgggcccgctagggctgctctgcttcctcgccctggggctgctcggctcggccgggcccagcggcgcggcgccgcctctctgcgcggcgccctgcagctgcgacggcgaccgtcgggtggactgctccgggaaggggctgacggccgtgcccgaggggctcagcgccttcacccaagcgctggatatcagtatgaacaacattactcagttgccagaagatgcatttaagaactttccttttctagaagagctacaattggcgggcaacgacctttcttttatccacccaaaggccttgtctgggttgaaagaactcaaagttctaacgctccagaataatcagttgaaaacagtacccagtgaagccattcgagggctgagtgctttgcagtctttgcgtttagatgccaaccatattacctcagtccccgaggacagttttgaaggacttgttcagttacggcatctgtggctggatgacaacagcttgacggaggtgcctgtgcaccccctcagcaatctgcccaccctacaggcgctgaccctggctctcaacaagatctcaagcatccctgactttgcatttaccaacctttcaagcctggtagttctgcatcttcataacaataaaattagaagcctgagtcaacactgttttgatggactagataacctggagaccttagacttgagttataataacttgggggaatttcctcaggctattaaagcccgtcctagccttaaagagctaggatttcatagtaattctatttctgttatccctgatggagcatttgatggtaatccactcttaagaactatacatttgtatgataatcctctgtcttttgtggggaactcagcatttcacaatttatctgatcttcattccctagtcattcgtggtgcaagcatggtgcagcagttccccaatcttacaggaactgtccacctggaaagtctgactttgacaggtacaaagataagcagcatacctaataatttgtgtcaagaacaaaagatgcttaggactttggacttgtcttacaataatataagagaccttccaagttttaatggttgccatgctctggaagaaatttctttacagcgtaatcaaatctaccaaataaaggaaggcacctttcaaggcctgatatctctaaggattctagatctgagtagaaacctgatacatgaaattcacagtagagcttttgccacacttgggccaataactaacctagatgtaagtttcaatgaattaacttcctttcctacggaaggcctgaatgggctaaatcaactgaaacttgtgggcaacttcaagctgaaagaagccttagcagcaaaagactttgttaacctcaggtctttatcggtaccatatgcttatcagtgctgtgcattttggggttgtgactcttatgcaaatttaaacacagaagataacagcctccaggaccacagtgtggcacaggagaaaggtactgctgatgcagcaaatgtcacaagcactcttgaaaatgaagaacatagtcaaataattatccattgtacaccttcaacaggtgcttttaagccctgtgaatatttactgggaagctggatgattcgtcttactgtgtggttcattttcttggttgcattatttttcaacctgcttgttattttaacaacatttgcatcttgtacatcactgccttcgtccaaattgtttataggcttgatttctgtgtctaacttattcatgggaatctatactggcatcctaacttttcttgatgctgtgtcctggggcagattcgctgaatttggcatttggtgggaaactggcagtggctgcaaagtagctgggtttcttgcagttttctcctcagaaagtgccatatttttattaatgctagcaactgtcgaaagaagcttatctgcaaaagatataatgaaaaatgggaagagcaatcatctcaaacagttccgggttgctgcccttttggctttcctaggtgctacagtagcaggctgttttccccttttccatagaggggaatattctgcatcacccctttgtttgccatttcctacaggtgaaacgccatcattaggattcactgtaacgttagtgctattaaactcactagcatttttattaatggccgttatctacactaagctatactgcaacttggaaaaagaggacctctcagaaaactcacaatctagcatgattaagcatgtcgcttggctaatcttcaccaattgcatctttttctgccctgtggcgtttttttcatttgcaccattgatcactgcaatctctatcagccccgaaataatgaagtctgttactctgatattttttccattgcctgcttgcctgaatccagtcctgtatgttttcttcaacccaaagtttaaagaagactggaagttactgaagcgacgtgttaccaagaaaagtggatcagtttcagtttccatcagtagccaaggtggttgtctggaacaggatttctactacgactgtggcatgtactcacatttgcagggcaacctgactgtttgcgactgctgcgaatcgtttcttttaacaaagccagtatcatgcaaacacttgataaaatcacacagctgtcctgcattggcagtggcttcttgccaaagacctgagggctactggtccgactgtggcacacagtcggcccactctgattatgcagatgaagaagattcctttgtctcagacagttctgaccaggtgcaggcctgtggacgagcctgcttctaccagagtagaggattccctttggtgcgctatgcttacaatctaccaagagttaaagactgaactactgtgtgtgtaaccgtttcccccgtcaaccaaaatcagtgtttatagagtgaaccctattctcatctttcatctgggaagcacttctgtaatcactgcctggtgtcacttagaagaaggagaggtggcagtttatttctcaaaccagtcattttcaaagaacaggtgcctaaattataaattggtgaaaaatgcaatgtccaagcaatgtatgatctgtttgaaacaaatatatgacttgaaaaggatcttaggtgtagtagagcaatataatgttagttttttctgatccataagaagcaaatttatacctatttgtgtattaagcacaagataaagaacagctgttaattactggggggtcctctagagctcc

SEQ ID NO: 252243 - DNA, 3536 bp, Homo sapiens
tcgtgccgaattcggcacgaggggacgggaagagattgagccgcggctgggagacagcgagccagagtctgggtgtttgtgcgagagccacggcgggggctggggcgagtggccggcatggctgaaggctgcgctctgcaaccttgaagagccgctgcattgagaggccagggacagggagaccggtgcgatggcagagcgcggcccccgccgctgcgccgggccggcccggctggcctgagccgccggaggagcggggctgcctctgcgcgtccatggagcagcgggaagggcgaaactccggagcgccgcgtccctgcgccgctgcggcggactgctgaaggggccgagcccgcgcggaccgccgaggaagagacccccgctccagcccgcaggccggctgcccgggggcggcgggggacatcggagggcagcggagcgagcagcgccgcgggagaggccggcgcgggaggcggccgcagcaatgccgggcccgctagggctgctctgcttcctcgccctggggctgctcggctcggccgggcccagcggcgcggcgccgcctctctgcgcggcgccctgcagctgcgacggcgaccgtcgggtggactgctccgggaaggggctgacggccgtgcccgaggggctcagcgccttcacccaagcgctggatatcagtatgaacaacattactcagttgccagaagatgcatttaagaactttccttttctagaagagctacaattggcgggcaacgacctttcttttatccacccaaaggccttgtctgggttgaaagaactcaaagttctaacgctccagaataatcagttgaaaacagtacccagtgaagccattcgagggctgagtgctttgcagtctttgcgtttagatgccaaccatattacctcagtccccgaggacagttttgaaggacttgttcagttacggcatctgtggctggatgacaacagcttgacggaggtgcctgtgcaccccctcagcaatctgcccaccctacaggcgctgaccctggctctcaacaagatctcaagcatccctgactttgcatttaccaacctttcaagcctggtagttctgcatcttcataacaataaaattagaagcctgagtcaacactgttttgatggactagataacctggagaccttagacttgagttataataacttgggggaatttcctcaggctattaaagcccgtcctagccttaaagagctaggatttcatagtaattctatttctgttatccctgatggagcatttgatggtaatccactcttaagaactatacatttgtatgataatcctctgtcttttgtggggaactcagcatttcacaatttatctgatcttcattccctagtcattcgtggtgcaagcatggtgcagcagttccccaatcttacaggaactgtccacctggaaagtctgactttgacaggtacaaagataagcagcatacctaataatttgtgtcaagaacaaaagatgcttaggactttggacttgtcttacaataatataagagaccttccaagttttaatggttgccatgctctggaagaaatttctttacagcgtaatcaaatctaccaaataaaggaaggcacctttcaaggcctgatatctctaaggattctagatctgagtagaaacctgatacatgaaattcacagtagagcttttgccacacttgggccaataactaacctagatgtaagtttcaatgaattaacttcctttcctacggaaggcctgaatgggctaaatcaactgaaacttgtgggcaacttcaagctgaaagaagccttagcagcaaaagactttgttaacctcaggtctttatcggtaccatatgcttatcagtgctgtgcattttggggttgtgactcttatgcaaatttaaacacagaagataacagcctccaggaccacagtgtggcacaggagaaaggtactgctgatgcagcaaatgtcacaagcactcttgaaaatgaagaacatagtcaaataattatccattgtacaccttcaacaggtgcttttaagccctgtgaatatttactgggaagctggatgattcgtcttactgtgtggttcattttcttggttgcattatttttcaacctgcttgttattttaacaacatttgcatcttgtacatcactgccttcgtccaaattgtttataggcttgatttctgtgtctaacttattcatgggaatctatactggcatcctaacttttcttgatgctgtgtcctggggcagattcgctgaatttggcatttggtgggaaactggcagtggctgcaaagtagctgggtttcttgcagttttctcctcagaaagtgccatatttttattaatgctagcaactgtcgaaagaagcttatctgcaaaagatataatgaaaaatgggaagagcaatcatctcaaacagttccgggttgctgcccttttggctttcctaggtgctacagtagcaggctgttttccccttttccatagaggggaatattctgcatcacccctttgtttgccatttcctacaggtgaaacgccatcattaggattcactgtaacgttagtgctattaaactcactagcatttttattaatggccgttatctacactaagctatactgcaacttggaaaaagaggacctctcagaaaactcacaatctagcatgattaagcatgtcgcttggctaatcttcaccaattgcatctttttctgccctgtggcgtttttttcatttgcaccattgatcactgcaatctctatcagccccgaaataatgaagtctgttactctgatattttttccattgcctgcttgcctgaatccagtcctgtatgttttcttcaacccaaagtttaaagaagactggaagttactgaagcgacgtgttaccaagaaaagtggatcagtttcagtttccatcagtagccaaggtggttgtctggaacaggatttctactacgactgtggcatgtactcacatttgcagggcaacctgactgtttgcgactgctgcgaatcgtttcttttaacaaagccagtatcatgcaaacacttgataaaatcacacagctgtcctgcattggcagtggcttcttgccaaagacctgagggctactggtccgactgtggcacacagtcggcccactctgattatgcagatgaagaagattcctttgtctcagacagttctgaccaggtgcaggcctgtggacgagcctgcttctaccagagtagaggattccctttggtgcgctatgcttacaatctaccaagagttaaagactgaactactgtgtgtgtaaccgtttcccccgtcaaccaaaatcagtgtttatagagtgaaccctattctcatctttcatctgggaagcacttctgtaatcactgcctggtgtcacttagaagaaggagaggtggcagtttatttctcgctagtgacacattttctatttacccttctacccacattgtccccacatttg

SEQ ID NO: 252244 - DNA, 1153 bp, Homo sapiens
  misc_feature (3)..(3): n is a, c, g, or t
  misc_feature (15)..(15): n is a, c, g, or t
  misc_feature (24)..(25): n is a, c, g, or t
aanatggtatcaacncagagtggnnattacggccggataaaagagcctattcaatagctcagaggttgaactctggttaaacaagataatatgttattaataaaaatagaagaagaaagaataaagcttagtcctgtgtctttaaaaattaaaaattttacttgattcccatctatgggctttagacctattactgggtggagtcttaaagttataattgttcaatatgttttttgaacagtgtgctaaatcaatagcaaacccactgccatattagttattctgaatatactaaaaaaatccagctagattgcagtttaataattaaactgtacatactgtgcatataatgaatttttatcttatgtaaattatttttagaacacaagttgggaaatgtggcttctgttcatttcgtttaattaaagctacctcctaaactatagtggctgccagtagcagactgttaaattgtggtttatatactttttgcattgtaaatagtctttgttgtacattgtcagtgtaataaaaacagaatctttgtatatcaaaatcatgtagtttgtataaaatgtgggaaggatttatttacagtgtgttgtaattttgtaaggccaactatttacaagttttaaaaattgctatcatgtatatttacacatctgataaatattaaatcataacttggtaagaaactcctaattaaaaggttttttccaaaattcaggttattgaaaatttttcattttattcatttaaaaactagaataacagatatataaaagtgttaatctttgtgctatatggtatgaaatacaatattgtactcagtgttttgaattattaaagtttctagaaagcaatctattttgccttaatttaaaactaggtatattaatgaatttagttttaaagtaagcaaattaaatatttgtaagtggacagtattagaagaaatgttggaagtaaccattagaaaacactattttgatatttatttgtaaacatataagaacattttgctgaaacttagaaataaggttttatcctaagtctgaactatactcatggaaaacagattatgaaatttcagaaaaaccattgattcaatctttatctaaaaagcaaatgattaaaaaatctgcatgat

SEQ ID NO: 252245 - DNA, 1241 bp, Homo sapiens
tcgtgccgaattcggcacgaggggacgggaagagattgagccgcggctgggagacagcgagccagagtctgggtgtttgtgcgagagccacggcgggggctggggcgagtggccggcatggctgaaggctgcgctctgcaaccttgaagagccgctgcattgagaggccagggacagggagaccggtgcgatggcagagcgcggcccccgccgctgcgccgggccggcccggctggcctgagccgccggaggagcggggctgcctctgcgcgtccatggagcagcgggaagggcgaaactccggagcgccgcgtccctgcgccgctgcggcggactgctgaaggggccgagcccgcgcggaccgccgaggaagagacccccgctccagcccgcaggccggctgcccgggggcggcgggggacatcggagggcagcggagcgagcagcgccgcgggagaggccggcgcgggaggcggccgcagcaatgccgggcccgctagggctgctctgcttcctcgccctggggctgctcggctcggccgggcccagcggcgcggcgccgcctctctgcgcggcgccctgcagctgcgacggcgaccgtcgggtggactgctccgggaaggggctgacggccgtgcccgaggggctcagcgccttcacccaagcgctggatatcagtatgaacaacattactcagttgccagaagatgcatttaagaactttccttttctagaagagctacaattggcgggcaacgacctttcttttatccacccaaaggccttgtctgggttgaaagaactcaaagttctaacgctccagaataatcagttgaaaacagtacccagtgaagccattcgagggctgagtgctttgcagtctttgcgtttagatgccaaccatattacctcagtccccgaggacagttttgaaggacttgttcagttacggcatctgtggctggatgacaacagcttgacggaggtgcctgtgcaccccctcagcaatctgcccaccctacaggcgctgaccctggctctcaacaagatctcaagcatccctgactttgcatttaccaacctttcaagcctggtagttctgcatcttcataacaataaaattagaagcctgagtcaacactgttttgatggactagataacctggagaccttgtaagtatattcatattttgggcaactgcattgtgatattgaaagtataattttatacttcactgcag

SEQ ID NO: 252246 - DNA, 1288 bp, Homo sapiens
tcgtgccgaattcggcacgaggggacgggaagagattgagccgcggctgggagacagcgagccagagtctgggtgtttgtgcgagagccacggcgggggctggggcgagtggccggcatggctgaaggctgcgctctgcaaccttgaagagccgctgcattgagaggccagggacagggagaccggtgcgatggcagagcgcggcccccgccgctgcgccgggccggcccggctggcctgagccgccggaggagcggggctgcctctgcgcgtccatggagcagcgggaagggcgaaactccggagcgccgcgtccctgcgccgctgcggcggactgctgaaggggccgagcccgcgcggaccgccgaggaagagacccccgctccagcccgcaggccggctgcccgggggcggcgggggacatcggagggcagcggagcgagcagcgccgcgggagaggccggcgcgggaggcggccgcagcaatgccgggcccgctagggctgctctgcttcctcgccctggggctgctcggctcggccgggcccagcggcgcggcgccgcctctctgcgcggcgccctgcagctgcgacggcgaccgtcgggtggactgctccgggaaggggctgacggccgtgcccgaggggctcagcgccttcacccaagcgctggatatcagtatgaacaacattactcagttgccagaagatgcatttaagaactttccttttctagaagagctacaattggcgggcaacgacctttcttttatccacccaaaggccttgtctgggttgaaagaactcaaagttctgtaagtaatgcaattttagagtttcacagctggctgtgtattttctttctgcgtagtcaacatgcttggaactaggttaagcacagtttcttttagttcaggattaaaagatttaaggagtggccagtgagtagtatgggaggccagagtttgatttaggcaaccctgcatctagattaacaaaagttaaaactctaaataatacgtattctgacctccagtatattacggttgaatgttaggctttttgggtgcctaatgcattggagcaaacccttacttcagttttactggtagggttttgtttctacttattttatagctataagaactttgaattacctgactctaaaagggaaaaaggcttacaagtgctccaaatgttaaaataattttagagctcaagggaattcagatgcctacaatttgtatagccagcgaatggtgaggaaataaattcttggcagtggtcagg

SEQ ID NO: 252247 - DNA, 347 bp, Homo sapiens
tttttggatattttcacagacatttgtatgataatcctctgtcttttgtggggaactcagcatttcacaatttatctgatcttcattccctgtaagtatgtgaatttaaaaacaaacctggatatttatacagttgttttagtggaaaacaagaatttattactggaactccagaaaacaaaatctttaaaatttttttctcccttgggcagaatttataattgttcttatttttgtgaatactttgccacattatcatactttcaagtacattcaagagatgaaactagttttatttttagttatagttgcactgtaattttaaactgtttaaaacataaaatatg

SEQ ID NO: 252248 - DNA, 310 bp, Homo sapiens
tgtgaacatagagttaatattagagtgcttgtgaacatatgaaaattttactttttttggatattttcacagacatttgtatgataatcctctgtcttttgtggggaactcagcatttcacaatttatctgatcttcattccctgtaagtatgtgaatttaaaaacaaacctggatatttatacagttgttttagtggaaaacaagaatttattactggaactccagaaaacaaaatctttaaaatttttttctcccttgggcagaatttataattgttcttatttttgtgaatactttgccacattatc

SEQ ID NO: 252249 - DNA, 685 bp, Homo sapiens
catccctgccacatcgaagccactgccactctggcctccaccactgatctctggcctcctcactgacctctcctcttgcctccttccagtctgttctccccagtgagcatacagagagccttcacaggagtaatctaagtcactggcactcttcagcttaaccttgccaggggctttccacacaataaaagttaaatacttatttataccgcacttattatgtgccgaaggatgttagtgctttacagattgtcagtcttcacaacactcctgtgaggccagctgtggcatgatctacatcctacagctattatacatccacctatcagagagggcatatgactatcctgaggtcttacagctcccatgtggaagagtcaggataagacctccacagattagctctggagtgcactctatgccgtcctgccttgtgcctcacccacaaaagaattcacatttgcgtggcctaaaggactgcagcatcctgccctagtacctacctgaccccatttcctaccactcagcctcctctgtacacattggcatctttgctgctcctttgacatgctaagagcatagcaaaaccctctgcagcagcaccctcctgcagcagcacttccctgcagcagcaccctcctgccaacacccccctgcagcagcaccttagtacctgctcttctct

SEQ ID NO: 252250 - DNA, 584 bp, Homo sapiens
atcaatatgtactctgtgtgtgtgtgtgagagagagagagagagagaagaaaaaatagcttcttttaatggaaggaatgaacaatttagaaaattgctactttgtaatctctctaatgtgaaaattacttcaggcacaggccatcaaagataaaaggctgttagagaacagaatatgtcctttaaccggaatctaattatgacaaaacaagtatacaaattttgactactcatcatttcagaaagtaaagaataaagaagatcatgttatttacaatgcattaagaatcagactgataacaggttgaatacaagaatacaatattttaatatctttaaaatcgaatagaaaacatttggacctagaattctatttctaggaacgttctcaaacaagcttaagagcaaagtataaaaacgatgttcagcatataataatatgaaaaaattttgtcctagacattttatatgaaaatgtatactttagagcatgcttcaggaaaaaaagaaagaaaaattaatcctgggaaatgggtgacattagatacaaggagcagtggcagttgagtatgtcccaaaggaagt

SEQ ID NO: 252251 - DNA, 382 bp, Homo sapiens
gtttcaccaaaagagttctaagcctggaaaaagacttcaaaaaaaatcttagaatacaaaatcagcacaaatgcatagcatttctgtacaccaataatattcaaactgagaacaaaataaaaaacacagctctatttacaatagcaacaaacacacaaaaaaatacctagaaatacattaaatcaagggggtaaaatatctctacaaagaacaacaaaacattgctgaaagaaacgagagacaatgcaaataaatggaaaaatattgctcatggattcaaataatataattaaaatggtcattctgcctaaagcaacctacagattaagtgctatttttatcagactatccatgacgatttttattgaattagaaaaagaaa

SEQ ID NO: 252252 - DNA, 665 bp, Homo sapiens
agaggactgaaaacttagaagaaaggagctctgatgacagacccccttttcccacagctgccaccacaggattcccacccactcacaaacacacacactagacattgacatgtccaccctcctcccaggagtaggcaccaccctcaggaccttcaccacggcgtttttgatcctagtgtttcttgccaagaacccacaagtctctacaagtctcctggcgtatccccacccccagacactaaatctgcagcagcaatctgttttctccaccaacctagcattttgaatcagctgttcataatctcatatgtctgcgtgcacacagtaataaatcagagtacagctgcaccaggacaactatctgtagcaaaaatcagtcctctcacctacattgcaatctctcccacccagggatttaattttttcttttagcttttatttttgttttggggtacacatgagtttgttttggtgcatgggggttttgcgtgcagattattttgtcactgaggtattaagcatagcaccaaacaggtatgttttctgattctcttagtcttccaccctccaccctcaactaggccgcagcgtctgttgttctcctctttgtgtttgtgtgttcttattatttagctgttacttataaataaaaacatgcatttggt

SEQ ID NO: 252253 - DNA, 210 bp, Homo sapiens
gtaactctgcttatcctctgctttctctgttttcccgtatggaggggtagacatggaaagaaaggcagatcatgattaaaggttacagaaggagaagtagcaaggctttaatcctagagcccatcctcccagagaataaatggtaaaaatgtttgcctttgtgccttgggaagcgctaggctcctgctgctctttcattgaaaaaaaaaa

SEQ ID NO: 252254 - DNA, 283 bp, Homo sapiens
agagctcaggctggaggagcctcatacccgcccctctagatgcttataaaaatacttcccacctttgaatcaagtggaaaatgaggctctccagtcaaaagccgcgactgtatagaaagccctgagttgcccaatctgttcacatggcatcaccaacctctgtgtcatcatcaagctgtccaggggactcgatggccacctggccaggaactgcgggctgattggaagctgttgttcccattgtataatcacacacatcataaaataatcagtcttgtctcta

SEQ ID NO: 252255 - DNA, 383 bp, Homo sapiens
agtcttcgaattacatctcatcacttttgccgtaatctgtttgttagcagtcagtcactaggtccagcctgtgctcaggtggaggggattatacaaggtcaggaataccaggaggcaggattgctgcaggctattttagagactgcctagtgtgggtctgttagcaacacatttccttagttttcatttgtttcaacagccttttatttaaccttcagttttgaaagatatttccctaggtaagaattccaacttagcagttattttcttttgatactctgaagatgacattccattatcttctggctttcagatttgtggaaaaaaatctatctttctgttgtttctttaaataaaatgtgcttttttcctctgaattcttt

SEQ ID NO: 252256 - DNA, 509 bp, Homo sapiens
gggcctacctagataatccagtgtgattttctcatctcacatttcttaacctaatcacctcagcagagaccctttttccacttgaagtgacaatcatggattccagggattgtgacttggtatctttgtgagctatgagtcagcctcctataccatctgaacctctctgtcctgtgaaatggcagaaaacatcctcataccacagggctttataagaggtcaataaaagcgtcaaatagaagggccttcagcacagtagctgtctacttcgcccagctgacatgtcatcagggccacatggggtttgtgtgttcctgggtcagtccgtgttgagcccctttctgtgctgaggcccaacctgggtgctgggctccctgtggggaaccagacctctgtcgaggcagagcctccctgcaatcctgtagatcaggccgttgtccaaggacaggctttcagtcttcaccggatgacagtgctctgagtgtagcatttctactgcatgaaaaatt

SEQ ID NO: 252257 - DNA, 181 bp, Homo sapiens
agcagaggatgataccatattgcatgacaaaatgccttcgttttttctttttttccaaatatagtttactttacaaccaggtggtgttcttagtgatggggatgttgctcagacattgatgtaacttcagcaaacactgcagcagggaacattcttctcccctgacaggttttatagctaa

SEQ ID NO: 252258 - DNA, 303 bp, Homo sapiens
tctgcaaggcctgaatgtttatattctcctgaagtccataggctgaaatcctaaccttcaaagtggtggtattagaaggtgaggtctttgagttgtgagggtggaggcctcatgaatgagattagtgccagtataaaagtggtcccagggagctccctcaccctttccaccatgtgaggacacagtgggaaggtgctgtatatgaaccaggaagttggtcctcaccagacgccaagtcagctgggaccttgatcttagactttcagcctctagaactgtgagcaataaacatctgttgcttat

SEQ ID NO: 252259 - DNA, 385 bp, Homo sapiens
ctcaagctgggtcagagagcagggctgactctgccagtgcctgcatcagcctcatcgctctcctaggctcctggcctgctggactctgggctgcaggtccttcttgaaaggctgtgagtagtgagacaaggagcaggagtgaggggtggcaggagagaagatagagattgagagagagagagagagagagacagagagagaggaagagacagagacaaaaggagagagaacggcttagacaaggagagaaagatggaaagataaagagactgggcgcagtggctcacgcctgtaatcccaacacttggggaggccaaggtgggaggatggcttgaaggaaagagtctgagatcaacctggccaacatagtgagaccccgtctcta

SEQ ID NO: 252260 - DNA, 433 bp, Homo sapiens
tatacttatgtaacaaacctacacattctgcacatgtatctcagaacttaaagtgaaaaaaaaaactttggttgggctcattttttctgaggtagaataattaagactcatgatgagtgtgactttttcaagatatttaagaatttagaataaacaaatatgtgaatgaattcattatacctttatacacaaagcatgtaactatttgtgtaaacatactccacttggtggtgtaaggaaagcctctgagtgattttacacaccagttaatagatgggtagtgttggatgagagcccaaaaaaggctctttattgtcattctttaggattacagcacagtttacgtatgtctcatttggccctttgcaatacaaataaggcctatatgtatgttctccctatgttttgctaatgaagaaatgaagactaaaaa

SEQ ID NO: 252261 - DNA, 315 bp, Homo sapiens
agtgctggggttacaggtgtgagccaccatgcctggccaaaaactaagtgccagtctatatattagtattaattagttttacaaaattatgaggccaattcttaaacattgaaggacaaagcaccaaactcctgatagaaaaatggaggaaaatgagcaatttacaaaaaacatacaaagtgtccctaaaatgcatttttaattcaaatgtgagtgatggatacattaatttgcttcactctagtaaccttctatttatgtgtatcccataacaggtatacttttaaacacaataaaatttatttttaaaaattc

SEQ ID NO: 252262 - DNA, 488 bp, Homo sapiens
gctagaataacatcattttatttgatgtcattttgttatcacattgatgaaaaaaaattcagttcccaacctgagccactgtctgtgtggagtttgcatgttctgcatgggttttcatcaggtactctggtttcctcccacatcgcaaaaatgagcacttccagtaaattggggtgtctagatggtgccacagtgagtgagggtgtgggtgtgagcatgccctacagccagataccatcctctccagggttgatgcccacttagtgctctgagccactgggataggctctggccacccacaactctgaactggaatcattgggtgagtaattattatttgtttttagtaatttttttttttttgagacaaagtctcactctgtcacccaggaggtggaggctgcagtgagcagtgatagcaccactgcactccagcttgggtgacacagcgagaccctgtctctaaataaataaataggaaaacatca

SEQ ID NO: 252263 - DNA, 332 bp, Homo sapiens
gatctaccccctggagttttgggtgaagttgcctttctctgagtcatgtagacacttgaacaaatttgagttctgaaaggatggaaagagagggagaaattggtggggtaggcaactcaatgtatccacttcttgtctttcagaacagactccttactgtgcaccttaaaaagttgaaaattgctaacccttgctgagagtactattgtatacaaaatgccttaaataagagcccagacagaaaaaaaaaaacccaaaatgggtgatgatggagcaatggtaaaagcgagatgacatgggaaagtggtctttcattccttccaaaaaaaaaa

SEQ ID NO: 252264 - DNA, 388 bp, Homo sapiens
tttaattaatgagagtttgttttaggggtatgggcccaggtgcagctactgaatccagtgcaagagtggaaataagcttccaaaacagtatcacctgagagagaactgagtccatccctgtagtaccatctgagttacagcttcctgggcaaaggctcagaatcataaaaactttacatatgtgtcatgtgctgtgattcttctgtgtcactgtatgttgagctatatctgtgtggtgccacttacacttaatgagatgagattccttctacttgtttcacgtcactcgtgatctctgaagctacttcagatttctgctttaatatgtaaagagcatgtcaatcatcacccacattcttaccataataaaagtctggaaaattgatta

SEQ ID NO: 252265 - DNA, 943 bp, Homo sapiens
ctgtccaaatgaggatttgaaagtcattctagactagagagtgaagtattttacttctccagactcagaagaatgtaatggtttcacctaaaaaatcaaaacaaaagcattagcaaaaacacttacatgttgactggtgtgacatttttgtcacctcctaaactttttggagattcagcctttatagaagttaattcagttctcaagaaccctcagagacctatatgatttatacatgttctcaacaactggctgtaatgccatagtcatgtgatctgaacttctatagcaggacatttggccagagtccgttgaaactttctgtttaagttccacagatcaataacattagatttctaccttttcgcaactctcaaatgtattccatattcaaacaattgaaacttattactcataaagtagatgattcttttagagtaaaaattttaagaggaaatccatgtctaaggtatgacttacagacctaacacagactataggaactggaagagacccgggaagatgagaaaatagagacacaagaaggtaaagaggcttctggaggccacctagctgattagggatggagctgtgactgggtctgccttccgtagcagctgcctggacagccagcctgagctttcctcactcctttcttcctcttagcactttccctatgcatccctaacatttttctttcccagtttattccaaccgaaactgtatgcagagactccagtgacagtgggatccatatgggacttgctcttcacttgaggccaccttggtgtcaaaagcctttgcagtccctcttagctgcttgctgtgtgagccttagctcttgaaatcactccttattcaactttcttttcaatagacctacgagaattttctctttctgctcttctcaattttccagcctctccattccattatttttgac

SEQ ID NO: 252266 - DNA, 687 bp, Homo sapiens
ctgcctctttgcttcttatttttcaggaaacaagttagtaactgaggggaaaagcaccacgatctcccggtgcgttgtttgcaagagtgcttcagcagtcagtgtctttcttgttgtttgccagataaagatattttgtctgcatatctgcatagcttaacagtaactcaggtgctgacgtagaagtaaagcatgtgagaatgcttttggatcatacacttttcacataataacaaatttttctcgaattggtttaacagtatcgttttatgctttttaaaatgtatctttgatatgagttgtttgtcatttgcacaagttaatgattttacctccccagctgcaacatatttttcaaatttaggaacccaacttaaccatctgaacatccttcttaaaaaaaataaagaagaaagctcacaactatgcctgtgatctgaactagttgattttgttaacggaatgttatttatatagtgatggttagagaaggctctggtcatttctatttatattgtatgtgatgttttactagaaaaacaagttttaccttaacatgaaaaaaatacattgtagaacctaatggcaagttcacctccgaagagggctaggcggggactgtaccctgggttttatctcttcctctccctcctaggacaggttgggggttgggatgcttacttttga

SEQ ID NO: 252267 - DNA, 375 bp, Homo sapiens
caggcaaagagacttaagaagtttatagaccaatttgcatcgaagtttggtttgtcaagacctctcgtggcctttgtgttcctcagagcatcctctgtgctttggcttctgaggccaattgcctgttcgtttcctacctccttttgcgttcctgagagataattggattggcccaggtcctcttttttgttctaggctgtaggtcagaggtcagccggtggactacctggtttgatcatatgtcctcctttgacttactcagctggaggtaaagggccaaggggacctcatgaggaaggggtgatgtgtgcagctgctcaacaccctgaaaggcaatttggggaccaagagggagagttaataaactgacctaac

SEQ ID NO: 252268 - DNA, 264 bp, Homo sapiens
atgaaggtgctgagggcctggctcctgtgcctgctgatgctgggcctggccctgcggggagctgcaagtcgtacccatcggcactccatggagatccgcacccctgacatcaatcctgcctggtacgccagtcgcgggatcaggcctgtgggccgcttcggtcggaggagggcaaccctgggggacgtccccaagcctggcctgcgaccccggctgacctgcttccccctggaaggcggtgctatgtcgtcccaggatggctga

SEQ ID NO: 252269 - DNA, 216 bp, Homo sapiens
agagaaaactgcattcatccacatgtcccagcaagagctatcaccaaaggcattgtgaagcagttgagcagttacatctgctctcctttaacaggaatgagtctttagtacccggttgcaaatgttgacttttaccttttctttaaatgtctgctactctttgtcatatttcttctccttctctccaaattctaccaataaaagtaaaaattactg

SEQ ID NO: 252270 - DNA, 2835 bp, Homo sapiens
ggctggggggaggcggtggcggctgagggaaggaggaggataaggaggaggaacgaggccagcaggaggcaacggcagcgacggggccggggtgatggtgcaggtgcctggggtcggtgcggagctgccgggctgagggacgcctggtccagggtccgcagcgccgccgcgtcgctcccgggcgggcgggcgggaagatgctgagcaggttgatgagcggcagcagcaggagcctggagcgcgagtacagctgcaccgtgcggctgctggacgacagcgagtacacctgcaccatccagagagatgccaaaggccagtacctgtttgaccttctttgccaccatctgaacctacttgagaaagactattttggtatccgctttgtagacccagataagcagcggcattggctggaatttacaaagtctgtggtgaaacaattgagatcccagcctccattcaccatgtgcttccgtgtgaagttttatcctgcagaccctgctgctctgaaagaagaaataaccagtgcagtcgcaacagagtggacttctttccttcaagaagtgtgaatactacctcttgaactggtcactctcaaagggctctggagtaactaatcagaagcgtcttttcttttacctatgatgttgccactgtggacatttttggagagagctatgttgctgcttatttcggaggttgcaaatagattcaagtggtctaatggatatacttggaaaatgccaaaggcataacactgaaagataagctgggagatactgaagatttaaaatcaaaatggataaactctgtggtgctgttggatcaggtatttagtcttcctgcagatcaaaagggatctctaccatggccgactcctctgtaaaacatcggatgctgccttgttagcagcttacatccttcaagcggagattggggattatgactcagggaaacaccctgaaggctacagctccaagttccagtttttccctaaacattcagagaagctggaaaggaaaattgctgagattcacaagacggaactgagtggtcaaacaccagcaacatcagagctgaacttcttaagaaaagcacagacattggaaacatatggagtggatcctcacccatgtaaggacgtgtcaggaaatgctgcatttctggccttcactccttttgggtttgttgttcttcaaggaaacaagagggtccacttcattaaatggaatgaggtgaccaagctgaaatttgaaggaaagactttctatttatacgtaagtcagaaagaggaaaagaaaattattcttacatattttgctccaactcctgaagcgtgtaagcacctctggaaatgtggaatcgagaaccaagccttctacaagctggagaagtcaagccaagtccgcacagtgtccagcagcaatttattctttaaagggagccggttccgatacaggtaaatagtgacatggccgagttgcaaaggaagtcatggaatcaagtgctaagatcaaacgggagccaccggaaatacacagagcagggatggttcccagccggagctgtccctccataacccatggcccaaggctgagcagcgtccccaggacccgcagaagagctgttcacatctccatcatggaaggcctagagtccttacgggacagtgcccattccacaccagtgcgttccacttcccatggggacaccttcctgcctcacgtgagaagcagccggacagatagcaatgagcgagtagctgtgattgcagacgaggcctacagccctgcagacagcgtgctgcccacccctgtggctgagcacagcctggagctgatgttgctttcccggcagatcaatggagccacctgcagcattgaggaggagaaggaatctgaagccagcaccccaactgctacagaggtggaggcccttgggggagagctgagggccctgtgtcaggggcacagcgggcccgaggaggaacaggtgaataagtttgttctaagtgtcctccgtttgctccttgtgaccatgggactcctctttgttttgctcctcctcctgatcatccttaccgagtctgaccttgacattgcctttttccgtgatatccgccagacccccgagttcgaacaattccactatcaatacttttgtcccctcaggcgatggtttgcctgcaaaatccgctcagtggtgagcctgctcattgacacctgagaaggcatgactcctcccaaaaactagccaggtggaccaaggaacccggctacccattcccagcaatgggacccatcgcggaaccatcggcacatataccaagtcctcctctcatgactcaaagtccactgcagcctaggagggtgtttcccagaagaagaaagggataggctcatgccctgtctaaacaaactgggaaaactcattttcttcagaagttatttcaagaaaggctcagcgactctgtttctcatctttccaatttgcaggataatttttggttttgaattttgatttttcatagatgtatattattttgaagtatcaaataaaaataatttattttactattactgattattgcagtagtatcacctagcagaggggacactagttgaaaactagagagctgctgtcctctgtattctgcaggagcttttcctgctggtgccactgggttccagtagactcatcactgcagcctcagcagggcaggccagggatctggacaatggggactgtttagttttttgtttgttttttttgccagccagaacttttaaaaaagtaaacatccatgtagaatgattaaatggaaagttgcttctt

SEQ ID NO: 252271 - DNA, 2939 bp, Homo sapiens
ggctggggggaggcggtggcggctgagggaaggaggaggataaggaggaggaacgaggccagcaggaggcaacggcagcgacggggccggggtgatggtgcaggtgcctggggtcggtgcggagctgccgggctgagggacgcctggtccagggtccgcagcgccgccgcgtcgctcccgggcgggcgggcgggaagatgctgagcaggttgatgagcggcagcagcaggagcctggagcgcgagtacagctgcaccgtgcggctgctggacgacagcgagtacacctgcaccatccagagagatgccaaaggccagtacctgtttgaccttctttgccaccatctgaacctacttgagaaagactattttggtatccgctttgtagacccagataagcagcggcattggctggaatttacaaagtctgtggtgaaacaattgagatcccagcctccattcaccatgtgcttccgtgtgaagttttatcctgcagaccctgctgctctgaaagaagaaataaccaggtatttagtcttcctgcagatcaaaagggatctctaccatggccgactcctctgtaaaacatcggatgctgccttgttagcagcttacatccttcaagcggagattggggattatgactcagggaaacaccctgaaggctacagctccaagttccagtttttccctaaacattcagagaagctggaaaggaaaattgctgagattcacaagacggaactgagtggtcaaacaccagcaacatcagagctgaacttcttaagaaaagcacagacattggaaacatatggagtggatcctcacccatgtaaggacgtgtcaggaaatgctgcatttctggccttcactccttttgggtttgttgttcttcaaggaaacaagagggtccacttcattaaatggaatgaggtgaccaagctgaaatttgaaggaaagactttctatttatacgtaagtcagaaagaggaaaagaaaattattcttacatattttgctccaactcctgaagcgtgtaagcacctctggaaatgtggaatcgagaaccaagccttctacaagctggagaagtcaagccaagtccgcacagtgtccagcagcaatttattctttaaagggagccggttccgatacaggtaaatagtgacatggccgagttgcaaaggaagtcatggaatcaagtgctaagatcaaacgggagccaccggaaatacacagagcagggatggttcccagccggagctgtccctccataacccatggcccaaggctgagcagcgtccccaggacccgcagaagagctgttcacatctccatcatggaaggcctagagtccttacgggacagtgcccattccacaccagtgcgttccacttcccatggggacaccttcctgcctcacgtgagaagcagccggacagatagcaatgagcgagtagctgtgattgcagacgaggcctacagccctgcagacagcgtgctgcccacccctgtggctgagcacagcctggagctgatgttgctttcccggcagatcaatggagccacctgcagcattgaggaggagaaggaatctgaagccagcaccccaactgctacagaggtggaggcccttgggggagagctgagggccctgtgtcaggggcacagcgggcccgaggaggaacaggtgaataagtttgttctaagtgtcctccgtttgctccttgtgaccatgggactcctctttgttttgctcctcctcctgatcatccttaccgagtctgaccttgacattgcctttttccgtgatatccgccagacccccgagttcgaacaattccactatcaatacttttgtcccctcaggcgatggtttgcctgcaaaatccgctcagtggtgagcctgctcattgacacctgagaaggcatgactcctcccaaaaactagccaggtggaccaaggaacccggctacccattcccagcaatgggacccatcgcggaaccatcggcacatataccaagtcctcctctcatgactcaaagtccactgcagcctaggagggtgtttcccagaagaagaaagggataggctcatgccctgtctaaacaaactgggaaaactcattttcttcagaagttatttcaagaaaggctcagcgactctgtttctcatctttccaatttgcaggataatttttggttttgaattttgatttttcatagatgtatattattttgaagtatcaaataaaaataatttattttactattactgattattgcagtagtatcacctagcagaggggacactagttgaaaactagagagctgctgtcctctgtattctgcaggagcttttcctgctggtgccactgggttccagtagactcatcactgcagcctcagcagggcaggccagggatctggacaatggggactgtttagttttttgtttgttttttttgccagccagaacttttaaaaaagtaaacatccatgtagaatgattaaatggaaagttgcttcttatgatggtctgagttggattttcttttccttttgttttttcaaatctgagcagagtgggcatctgaagggaccaccgctacagcaacagcagcatcaggggtggggtaagtctgtccccttagtctagagcctagtgggcatcaccatagttttgtataatgaaactagacttaacgtgattttttttttccgaagaacctcaagacttttatagtgctccaggggcgttaaacgaattcagtggtaccagagatagatagttctgtcagaaatgttggacaaagtgtagttaagagaaagcagagttaagttacctgagagactgttgagatttggatagcagtgcttattttatatacacccccttgacccaaagactatttcaatttatattttaacaacgaaa

SEQ ID NO: 252272 - DNA, 2836 bp, Homo sapiens
ggctggggggaggcggtggcggctgagggaaggaggaggataaggaggaggaacgaggccagcaggaggcaacggcagcgacggggccggggtgatggtgcaggtgttgatgagcggcagcagcaggagcctggagcgcgagtacagctgcaccgtgcggctgctggacgacagcgagtacacctgcaccatccagagagatgccaaaggccagtacctgtttgaccttctttgccaccatctgaacctacttgagaaagactattttggtatccgctttgtagacccagataagcagcggcattggctggaatttacaaagtctgtggtgaaacaattgagatcccagcctccattcaccatgtgcttccgtgtgaagttttatcctgcagaccctgctgctctgaaagaagaaataaccaggtatttagtcttcctgcagatcaaaagggatctctaccatggccgactcctctgtaaaacatcggatgctgccttgttagcagcttacatccttcaagcggagattggggattatgactcagggaaacaccctgaaggctacagctccaagttccagtttttccctaaacattcagagaagctggaaaggaaaattgctgagattcacaagacggaactgagtggtcaaacaccagcaacatcagagctgaacttcttaagaaaagcacagacattggaaacatatggagtggatcctcacccatgtaaggacgtgtcaggaaatgctgcatttctggccttcactccttttgggtttgttgttcttcaaggaaacaagagggtccacttcattaaatggaatgaggtgaccaagctgaaatttgaaggaaagactttctatttatacgtaagtcagaaagaggaaaagaaaattattcttacatattttgctccaactcctgaagcgtgtaagcacctctggaaatgtggaatcgagaaccaagccttctacaagctggagaagtcaagccaagtccgcacagtgtccagcagcaatttattctttaaagggagccggttccgatacaggtaaatagtgacatggccgagttgcaaaggaagtcatggaatcaagtgctaagatcaaacgggagccaccggaaatacacagagcagggatggttcccagccggagctgtccctccataacccatggcccaaggctgagcagcgtccccaggacccgcagaagagctgttcacatctccatcatggaaggcctagagtccttacgggacagtgcccattccacaccagtgcgttccacttcccatggggacaccttcctgcctcacgtgagaagcagccggacagatagcaatgagcgagtagctgtgattgcagacgaggcctacagccctgcagacagcgtgctgcccacccctgtggctgagcacagcctggagctgatgttgctttcccggcagatcaatggagccacctgcagcattgaggaggagaaggaatctgaagccagcaccccaactgctacagaggtggaggcccttgggggagagctgagggccctgtgtcaggggcacagcgggcccgaggaggaacaggtgaataagtttgttctaagtgtcctccgtttgctccttgtgaccatgggactcctctttgttttgctcctcctcctgatcatccttaccgagtctgaccttgacattgcctttttccgtgatatccgccagacccccgagttcgaacaattccactatcaatacttttgtcccctcaggcgatggtttgcctgcaaaatccgctcagtggtgagcctgctcattgacacctgagaaggcatgactcctcccaaaaactagccaggtggaccaaggaacccggctacccattcccagcaatgggacccatcgcggaaccatcggcacatataccaagtcctcctctcatgactcaaagtccactgcagcctaggagggtgtttcccagaagaagaaagggataggctcatgccctgtctaaacaaactgggaaaactcattttcttcagaagttatttcaagaaaggctcagcgactctgtttctcatctttccaatttgcaggataatttttggttttgaattttgatttttcatagatgtatattattttgaagtatcaaataaaaataatttattttactattactgattattgcagtagtatcacctagcagaggggacactagttgaaaactagagagctgctgtcctctgtattctgcaggagcttttcctgctggtgccactgggttccagtagactcatcactgcagcctcagcagggcaggccagggatctggacaatggggactgtttagttttttgtttgttttttttgccagccagaacttttaaaaaagtaaacatccatgtagaatgattaaatggaaagttgcttcttatgatggtctgagttggattttcttttccttttgttttttcaaatctgagcagagtgggcatctgaagggaccaccgctacagcaacagcagcatcaggggtggggtaagtctgtccccttagtctagagcctagtgggcatcaccatagttttgtataatgaaactagacttaacgtgattttttttttccgaagaacctcaagacttttatagtgctccaggggcgttaaacgaattcagtggtaccagagatagatagttctgtcagaaatgttggacaaagtgtagttaagagaaagcagagttaagttacctgagagactgttgagatttggatagcagtgcttattttatatacacccccttgacccaaagactatttcaatttatattttaacaacgaaa

SEQ ID NO: 252273 - DNA, 1102 bp, Homo sapiens
ggctggggggaggcggtggcggctgagggaaggaggaggataaggaggaggaacgaggccagcaggaggcaacggcagcgacggggccggggtgatggtgcaggtgcctggggtcggtgcggagctgccgggctgagggacgcctggtccagggtccgcagcgccgccgcgtcgctcccgggcgggcgggcgggaagatgctgagcaggttgatgagcggcagcagcaggagcctggagcgcgagtacagctgcaccgtgcggctgctggacgacagcgagtacacctgcaccatccagagagatgccaaaggccagtacctgtttgaccttctttgccaccatctgaacctacttgagaaagactattttggtatccgctttgtagacccagataagcagcggcattggctggaatttacaaagtctgtggtgaaacaattgagatcccagcctccattcaccatgtgcttccgtgtgaagttttatcctgcagaccctgctgctctgaaagaagaaataaccaggtatttagtcttcctgcagatcaaaagggatctctaccatggccgactcctctgtaaaacatcggatgctgccttgttagcagcttacatccttcaagcggagattggggattatgactcagggaaacaccctgaaggctacagctccaagttccagtttttccctaaacattcagagaagctggaaaggaaaattgctgagattcacaagacggaactgagtggtcaaacaccagcaacatcagagctgaacttcttaagaaaagcacagacattggaaacatatggagtggatcctcacccatgtaaggtaagaccccctggttggagactgcatgacctttcctcctctagaaggcatcaggagcaagagcccccatgcctgcgctcagaggcccccttcaacgtttacatggctggcactttcagtgagatatcagagaaaatgcctgctttgaaaactcctctggatcacatgctacataattttgtggtgccacatcaatgtcagaggaaccgaggcaaagtcaatctaaataacaaatccaaagctagggccccgcaatgggtaatttg

SEQ ID NO: 252274 - DNA, 312 bp, Homo sapiens
taaggaggaggaacgaggccagcaggaggcaacggcagcgacggggccggggtgatggtgcaggtgcctggggtcggtgcggagctgccgggctgagggacgcctggtccagggtccgcagcgccgccgcgtcgctcccgggcgggcgggcgggaagatgctgagcaggttgatgagcggcagcagcaggagcctggagcgcgagtacagctgcaccgtgcggctgctggacgacagcgagtacacctgcaccatccaggtcagcgccgcgccgccccgccccgcccgcgggacccccttgtcccccaagtc

SEQ ID NO: 252275 - DNA, 381 bp, Homo sapiens
cctttttaaatcatgaggcattttgggtaacattagaatatgtagctcagttatgttctactctaccttgtgagattactgcatttagagctagttgtagcctggtttatatgttgattggcaaaacaaaatgacctggaatttaaatttcattttggagaagcaacagccaaaatcattacgaagtggctgttctttagaagtaaatataactactacgagtcctggtgtagtcatttatatttatttcaaatttcaattgagacaaattctgagggcccttttcagccctctattgagtttacatttctatgcattaaccagggactctgctttcttgttctccaaggatcatttatctaaggccaaattcactaaaaa

SEQ ID NO: 252276 - DNA, 232 bp, Homo sapiens
  misc_feature (1)..(1): n is a, c, g, or t
  misc_feature (4)..(4): n is a, c, g, or t
  misc_feature (8)..(8): n is a, c, g, or t
  misc_feature (12)..(12): n is a, c, g, or t
  misc_feature (226)..(226): n is a, c, g, or t
  misc_feature (228)..(230): n is a, c, g, or t
  misc_feature (232)..(232): n is a, c, g, or t
ncangganaggnagaagaggcaggaagaagaaacactaagcaaataggggtaacaagtatcattaccggtatgtgtcagtgcttggtgctaagactgggagaaagagaaggaagtgcaggggagatggtgatgggtcacagccttggtgacaaaagggtaggaatgatatgtggtgcggacatagaagtacaaggcaaaagagtgacgccgagctgctcagttctncnnnan

SEQ ID NO: 252277 - DNA, 985 bp, Homo sapiens
  misc_feature (926)..(926): n is a, c, g, or t
  misc_feature (982)..(982): n is a, c, g, or t
gcaagactccatctcaaaaaataaaaaaaaaaaaaagccaaagaaaaaattaatgctactgatcctgacactgaccacactctcccgttccctacctcccttgtctgtgtcccccatgggctgagaaggccagaaagcaagagagccattgtcctatcccatacaagatgacttccctaggcacatagctgagtgaagggaagtggagatttgatctggagaagcaaaagatggtacacccagtaccagtgactgcatctgccacactggccatgcctgctggtcacaggcccctgaagtcagcttccttcttcttttacctttttccttcccaagcctgacagccacattaaaggcttctatgcactaagggatatgaactcctgcacaagtgaggccatccatgggcatgagcatgaattgaacccagcactgtgcattcattcagcaaatctgataaatgcctccttgagccagaatctaagccagaccatcaaatggaacccagtgaaacactgattctagggcagtgcccacaccactaccactgtggattatcccttcataatagtatgtgtttatttgagtgttaatagaaaagaaaaactagcacttcaaacatttgatttcacaaatgttaaatttaaataaatatattggaattaatagaagtgagtctagttttaaaagctgttaagaaaacagcagattccgtgggtggttcatgcctgtaatcccagcacttcgggaggccaagacagatggattgcttgaggccaagagttccagactagccgggacaatgtagtgagaccgccccccttcccggttacaaaacttcttaaaaataaccggcatgtaggaacaccgtggccaagtactgagagcttatgcagaagattctttgcgccatagctgaacttcanggacatgccactgactttacttgggcaaaataggacctggtttacatgaaaaaaanaaa

SEQ ID NO: 252278 - DNA, 418 bp, Homo sapiens
ccgcaccaccaccacccaaactagtttattcaaaagacactaagtgtctactctgtggtaagcacagtcttaggttccagatcacgctagaaagtaggagaaacactccctgtctttatggaatcaataggattagatacgcaggaagacaagtatttagagaggaaaactacagtacattgtgatcagtagttctttaatagggacaaatacaggatgcatgaaagcccggagatggaacccctaatgaaggaatagaaagtaagagaaaggagagagacacccaagctgaggcctgaaagattcattccttcattcagtaatttcttgaacatctacatgaaggacagtattctaggcactgtggaccgagcagtgaacaaaataaacaaatctttgccctcagaaaaaaaaaaaa

SEQ ID NO: 252279 - DNA, 476 bp, Homo sapiens
aggcctctggcccattctagtatggtctctcccatcaggaggggaaaggcaaatattgcatgggacctggcaataagattgaatgagacataagcaaagtctgatcgcatccttatccccaccccttaacagccactatatcccttgaggcaagtgaagggccccagaagtgagggatcttattgctaagtagatcagacagagttcttaaagattctaatatgttgcctgtattgtctcatctgtaaaatgggtgttaaaatagcactcatatcttgggttatgaagatgaaagaagataatctatgtaaaggactgagcacagggcctgggacagttagtgatagatacatgttagctactgttgctattttgtattccatgttcaatctatgatattgattaacctgtttattgattgctggattttcatttagtaaattaattttcaataaatgattttcacttaagcattt

SEQ ID NO: 252280 - DNA, 519 bp, Homo sapiens
cttgaatttacttcgatagaggtgaactggtgctgcgtttagtgactttagctgaagaaggctcatggagatagatgatgctttggaggtaggcataactcgatttaaaacccccgctccactgtttactggtcttatgatattgaacaagtcactttgagctctctggcctcagtttcctccagcagcagaatggaatttgttatgaggattagagataatgtatgtaaactcctagcagttcctggcatatgatcatattagagactcaatacatgttaggatatggagcatgttggagtaaaactacagatcattttgtcttatgacaagatttagaagtctggcactgcgatctgcattttttcatttgtgcagatttgggatgaaaaaattgcaaatatttgacttggagcatacctaagtcttgcaggtgcaatgtgcttattggaactttgatttgttgctctatggctggcggaacttggtggggacagtaaaatctagctccaaattcaa

SEQ ID NO: 252281 - DNA, 660 bp, Homo sapiens
gaagattaaataataatccatgtaaagcaataatcatcatgaatatacatagtaaatagtaacttagggttctttgaatccactgattacaagttataggaagaaggcatttctcatgatatattcactagtgtaggccactgtctagcagctatcagggtgtctggtacatggtagaggttcaatagcggtgctgagtgagtcagtgaataaatgcttaaagttttatcctaagtcacttggataatattatatgtaaagtaggaacataaaagatattttgtattaaattcaggcttctttctttctttctttctatcttcctatgtctctaaccaaagttacttgtgttgtattcagatgtggaaaaatatcaaatgaggtgatatttacttagaaacttttaagtgactttatctaccagatgtcacaaaggcttagaagtcaaaaaatatctagacttatacctatattaagaaaagtattataacattctttatgaaaccagattttaaaaaatggttgttcccaacacagaaacttctataaagagagtagaaagattacaaaacctaatattttaaatgtaattcaagaaatcatttacaaattgataataacatagcctccatgcttaaattagaagtaaaatggaaactc

SEQ ID NO: 252282 - DNA, 327 bp, Homo sapiens
ctggtcgtggtccactgcagtgctggaattggccatacagggaggttcattgtgattaatagtcttattgacatcatcagagagaaaggtattaactgcaacattgaccttctcaaaaccatccacacagtgcagtctcagaggtcagggatggcccagacagaagcacagtaccgatttatctatatggcagtccagcattatattgaaacactacagcacaagattgaagaagagcagaaaagcaagaggaaagggcacgaatataaaaatattaagtattctctagcagaccagacaagtggagcccagagccccctcccgcct

SEQ ID NO: 252283 - DNA, 704 bp, Homo sapiens
tgagatcacaccactgcactccagcctgggcaagagagtcagactatcacacacacacacaaaggaatgaactactgaaaacacaacaacatagttaaatctcaaaagcattttgctacctgaaagaagctacatccaaaaggttacaaccatatcattctgtttctttgataatctggaaaactatgggaatggaaattagatcagtggctgccagggttgagaatggagaaggggatgaatgccaagaggcggtacaaagcaatttctgaggtgatggaattgtttggtaactttagtgatggcattaggcaaaagccataaaacggtacaccacaccagtttgcactgtgtaaaaaaataagtaaacatgccaaaaaaggatccccctgcatacccacctaagtgacaacatgtgctgtcaaggacggagagcaaatggaactcacacattgctggtggtaatgtaaattgctacagccgctttaaaaatctgtttttcaatatctgctaaaattaaacatatgcatatcccataaatcatcaattttacctctagacatgtacataacagtaatacatattcaccaaagaaagtaaatccaagcatgttcatagcagctttgcttgtattacaaaaacctgggaacaattccagtatgtacaaatagcagaatgggtaaatatatcatggtatactgata

SEQ ID NO: 252284 - DNA, 307 bp, Homo sapiens
ctcactcccttttagtcaatgtgttttgggttgcatggaatataacatgagaatgccggctagcaaaatgtaactctgggccagtagaattccatagaataagtcaagagaaagtaaaaacgaaggccgttttccccagctgggtatagtaatggagtggaaataggcaaaatcaccctaaagcaggatcctctgtgcctctccctcacccgtggcctgctgtctgccaggcttctgtaatgcagcccgttctgcgtagtgcaaagtgcaagtgactggtggcctctgtttgggtccttcctctgtg

SEQ ID NO: 252285 - DNA, 370 bp, Homo sapiens
caccacgcccggctaacttttttgtatttttagtagagactgggtttcactgtgttggccaggatagtctcaatctcctgacctcatgatccgcccacctaggcccctcaaagtgctgggattacaggtgtgagccactgcgcccggccacttcaggcagtttgactgcacgagtgtcagttccttgagggcaggggcttggtcagttttgtttatgcctgaatccccagcatctcgaagagggcctctggaggctgaggtgggaggattgcttaagcctgggaagtagaggttgcagtgagctgaaattgcaccctatactccagcctgggcaacacagtgagatcccatctcaaaaaaaattttttta

SEQ ID NO: 252286 - DNA, 536 bp, Homo sapiens
aaagcgcagtattagtgtggaagtgacccgattttccaggtgccgtctgtcacccctttctttgactaggaaagggaactccctgaacccttgcgcttcccgagtgaggcaatgcctcaccctcttcggctcacgcagtgtgctgcacccactgtcctgcgcccactctctggcactccctagtgagatgaacccggtacctcagatggaaatgcagaaatcacctgtcttctgcgtcactcacgctgggagctgtagaccggagctgttcctattcggccatcttggctgcccgcaaaagatcaaaattttaaggaaagggcattgctaggaacaatgaatgcctgaaatcaccatgtataaccatgaaattgtactatgtggggggtgtgatatatgtgtgtttattttattctacattagtacttcatttaaaaataactaaggaacataattcaataactagatcctgccttagaaaaccttttgccatgaatgacaaattcatgtaataaagactgtttttaacccaccaa

SEQ ID NO: 252287 - DNA, 412 bp, Homo sapiens
ttagaaaggagtacaattctagctcatgctccaatgtggatgaagcccgaagacatcataagtggaataacctagacacaaaaggacaaacactgtatgattccacctttgtgtacctagaatagtcaaattcagagagacaagaagtagaacagtgattctcaggaactgtgaggaggggaaagtaggctgttatgtttaatgatttcaaagtttgggatgatggaaaagttctggatttggatagtgatgatagttgcacaagaatgtgaatgaacttcatgccactgaactctacacttaaaaatggttaagatggtaaattttatgtatattttaccacattaaaaaatgaatggggtagatttctatgtattgatatgaaaagatttcaaagatgtaatatagggtg

SEQ ID NO: 252288 - DNA, 526 bp, Homo sapiens
tgaacatgttagctcagatttctagtccttgtcttataaatccaccagtccgactcccatgataacccatgaatccattaaccatttaatctattaattcatgaatggattaatctgttcattatggctaaaccctcatgatccaattacctcttaaaggcctcacctctcaaagttgccacattggggagtaagtttcaaaatgaattttttgaggggacatttaaaccatggcagggtatagggtttcagatttgcaagatagaaagtctggagatctgtttcacaacatgtgaacatacttaacactattaaactgtatgcttaatggttaagatgataaattacaggttatgtgttttttactacaatttaaaaaaactatgcctgttttaaataagtagctcactctcttgtaaaatttactaccttatcaaatttttcaaattgaaccagtgactaaactgtggtcttctctagggtacttaaaattactaaaataaaagaataagtatataaaccaaca

SEQ ID NO: 252289 - DNA, 424 bp, Homo sapiens
ctttccacggtttagtgtcactgacgtgcccctccccagcgacgggaacaggtcgaaaggacggggctctagagccagcgtgacttccagcctgggttctgtccctgatttcctagctctgtaccgctaagcatatcagcctctcgccggtctcattttcctcatctgaaaaatgagcttacgtatcagtccttgctgtgaggacgaaatgacaagatacagtgtgtgtagtccgtgtggagcccagtaagcgcttcccggctgttgcgcctccaccaacagcgcgaacaaatctggaacatagcggaacattagacattgcaggcattaaggacggtcatcgttgcctgaccgtgatgcatttttaatccattgaaagtgccccgagcttatctaataaaagattggcaaatgattatatcaa

SEQ ID NO: 252290 - DNA, 451 bp, Homo sapiens
cgtgttaagacttgaaaaattgcctccaaaatgctctagccctgagggaaacaaacgtcccttcttcattgtagggagtcctggttcctgtggccattcgaaataagactcattcgaaaataagactccctcatcttcagggccatcctcagaaacaggacacatgcagaagggttaggttaagagctaggagcacctgaggggcgggacccccttaagagtaccccagaaggaccatcgatgtatgcatacccacaagcctagacaccatttgtgtacctacacgcacgcaagagatgtggagagacaaggcaactgagattcatggtttgatgattaaaattctcatgaaggtttttagttgtattttctgtattttgcattcggcattttccaagttttccatgacatatcttgctattgaagaaaaccatccacttttttccagaaa

SEQ ID NO: 252291 - DNA, 453 bp, Homo sapiens
actttattactgtatttttcttcaggataaaaaaaaattatgggtcaattttcactgaagtgggctggatgtgtgtattcatctctcatcagtgccaaaaggaattatgcacatcattcattggacaacaggatgaaaacttgtctctgattggacactagggatatcagctgtacacacaagataagtgtaaagttgaaaagagaaatacacttagtaattcactcaagctagcatttattaacactttaaaacttgcattaaaatgttcatgatattatttccttcctcatataagaaagctaacattacaattcttaaattgaatgaaacataccatcataaaaattgctttgcagagactgctaatgcaaaaacttttaagctgttcatccttttttaatgaaaaagataataagatcaataaaagcaccattctttaccacttaaaaa

SEQ ID NO: 252292 - DNA, 218 bp, Homo sapiens
ttttgttccttaaagaaagtatgaaagtagtttctttttcacctgcaggagtacaaacaaaattacaaatagagaagcaagctggtgatgtttgtattctggtttgtattccttggtgatttttaactaaggcaaataatatggaatgatttgtagcactttgagactgatttaagttataatgtctgtgaatctgtaatagaaataaactaaattga

SEQ ID NO: 252293 - DNA, 265 bp, Homo sapiens
gcctatttcaatccaaatagtggaacaactttgggctgaatccaacaatgaatcctgctctctggggagcttttctttaggtcttcttatttctctgagttctgtgtcttggcaggtgttttgttgaatggtttagattcttcagggagagaggtaactgagggaaaaagcaggaaaggctgagcttgattaggaaaggatattgtataaaatcaaagggggataatttagacattacatcggtatatattcactcatttgcaaa

SEQ ID NO: 252294 - DNA, 495 bp, Homo sapiens
cagagatgtaatgtgccttgcttaaagccattcagctaaagatatcagactgggacgtttgctctcagttcagtgctcttgagtctggagtaggttgagtttgaagcattgagaaggtacctggatgtataaacttaaggggttggttaggcattaccaactagaaattctattctgatgtgcaagaaattaattaattgtataattgttgctttcttcctgatatctttacccaagcatctatataaatttaactaatatgcaagtgaataacagatgtgcatgtagagatcagttttgggaaattccattcaaaatgtagagaaatgtctagaaatctgagtttaggaaacaaaattcagaaattccagactcttcctaaggaggatacccagaacaaaactgatggcacacggtaaatcgttatctaagcaacagcttgaatcctgtctctggtttatgactctgtatgaaaaaagaaaataaacttggaga

SEQ ID NO: 252295 - DNA, 371 bp, Homo sapiens
aattaagttcaaactgcctttgtaaagttttggggtagtatcaaagaggaataacacccacacttacctgaaaaggttattaaatatactactccctttttcaactacatatttgtgtgaaactggattttcttataatttaaccagaacagcatatcatgataaatggaatacagatgcagatgtgacaatccagttttcttctgttaagctagtcattagagagatttgcaaaaaaaaaaaaaaaaaaagaatcagtaaaagatataaaggagaaaaggacagaaccacaaataggcaacaaatatgttaaaaaaaagtttagcttcacttaaaatgaaataaatgtgattaaaatattaaaaaaaaaa

SEQ ID NO: 252296 - DNA, 453 bp, Homo sapiens
aattttaggtatctttgttcaccactcactcctacagtagccactttctcctagttctcgtggcgatttgttctacacatgtgcaacccagctctataccaaagatttatggagagcctccatgcagacagctgtctccctccatcacatcactcctttctctcttgcccacaaattccagtcacttcaactgtgttgaactctgctctgtcttctagcttgggaagaccaccattttctactggagctctacctcccagggtcaaagtctgaaaaatagtcctaggtagaaggatgaaataatttacataatgcatgtgcctgtgaagcacttagcatgatgtctgcacagagtaaatggccaataaatgttgatttttattatgaaatctgtatttgatacaaattttatctataatattttattaaagaaaaaagtcttataaaatggta

SEQ ID NO: 252297 - DNA, 408 bp, Homo sapiens
aagtcgcgggctggaaacggctgccccagattacagggcagctccctgcttcgctctcgctcctccggccccgggaacgtgcaggggggcgggaggcaagtcccatcagcactttgaactggggctgctttttagtgactcacctcccagacttcctgcaacagacaactctaaatagctcggtcccaccctccagcaggggagacattccggtcgggaagggcaggaggttagaaggtgggtgccccgccagggcagtccagggagacccaaggacaggagacgctggctgcacagcacaggggcgcacgaataggacgttttgtttacaggcttttgttattaaggaaattggtgtcagtcaaggtaattctagctcagatgagcaataaatatgctcccagctaa

SEQ ID NO: 252298 - DNA, 454 bp, Homo sapiens
gctccataatttttttatggcacacctctcggctgtgaacaataatttttaattgttgtgtgattatctcaaagtcagatcaccctgattttcctgctgttgtgcagctgctctgagccctttgtcagccacccatctgaaggactatgtgtttgtcatcaaatgttactaattccacaaatgaacctctgcccactggccttatgttcctgagtgaggggaacactgcccatactagctcgtgcgttctttgctgctctctaaagactggcctgaaacttcagaccctgagacttgaggaagctgagcccccgtgcccagccacgattccgtgatggtcaaagaaatcaaaacgtctgtcagctagtgttcagttcaggctgaggtgaaaaaatttttttacttgtaaaatatacataacataaaacttgggcggcgcgctccgagcccccac

SEQ ID NO: 252299 - DNA, 581 bp, Homo sapiens
tgcagtggcacaagcaactcactgcattctctgcatcctgtgctcaagccattttcccacctcagtctcactagttgctgggactgcaggcatgcacccctatgcccagctaatttttgtagagaccgagtatcgcttagttgcccagggtggtctcaactcctgggctcaaggagatctgcccacctcagcctcccaaagtgcaggcctagcctgggaggggaattttcaaaacgtgagttttgggaaatagtctatcagccttacctggttgattacacttgtaaaagaaagattaaaagcaggccagtgactctggtctgcttgaacatgtgaatgtagtggtttgagcaatctggagtttgccctagtgtcaaattccagactgtccatagtgtccaaaacctgaggcagatactaatgttaacccccagcaccccgtgattggaaacaaacctaaatacgtattgggaacttaatagcaattttaagcattctgatagattttttgtagggatggggtcatgccatgtggcccaggctggtctgaaaactctggcctcaagtgatctcaagctttg

SEQ ID NO: 252300 - DNA, 1179 bp, Homo sapiens
acttacgtggaaccctaggaaagacactaatacagcctcaccacctaggcctgtcatcagctgtcactccccacagcaatagatataagcagtgaggaaaagagaaatgattttcactttttaagctgttccttaggccgctgagagagcctcatcaagacagaagctcataaaaacaaatgggtgctgggtgaggtggcccacgcctgtaatcccaacactttgggaggctgaggcaggcagattgtttgagtccaggagttgagactagcctaggcaacatggcaaaaccccatctctacaaaaaagacaaaaaaaaattaaccaagtgtggtggcatgagcctgtagtcccagctacttgggaggctgaggtgggaggatcacctgagtctggggaggtaaaggctgcagtgagctgtgatggtgccgctgcactgtagcctgggcgacagagcagaacaggaaaaaaacaaaaacaaaacaaatggggcatgttgacatttgctatggtaaacacttacctggtttattttttggcaaatgaagaacaattgtattaaacattttcttttgtgagttttaaagtagtttgttgcatttctagaagaaatgccttgttgaaatagctgatatggctacctcagaagtgccagggagtcaagccagtcctaattcagtgcctggggatggattgcaccgggctggttttaatgcctttatggcaggtcatgtgatggcctatgtgggagtgagacagggaccccagccctgcagctctggaccctggctccctgaatgccataataaggtatatttgagtggcaaagctgtacccctcacagtggccaagagccagttctcctgttcctccaaagcccacactcagaagataaagctggctcggggcagcagctgacccaacttccacctaccactggggtggaatagaggtatttgggtctctctagcctctctctgtaaatgtcatactctcaactaactactgagtttaggggagggggagtatcctggcagaaatatcactgcattgccctggacttcctcctttaccccagtgtcagaggtagaagggtacaagtaagaaggctgaccaacacctttaacactgactttatttatttttaaatctgaaaatgtcttgggaaagttttacaaa

SEQ ID NO: 252301 - DNA, 472 bp, Homo sapiens
acaagtagcccataacatctgaagggacttcattgaaatcacagaggttctttagttctttacctcattagtaggcattagggaagcacatcaactttctaatttaataaggtgcctgttgctttgaaaaactgctcaaaaaaagataggagaggcttacttaaagatatcactataggcgtggcatgctgcttcacacctgtaatcctagtactttgggaggctgaggagagaggatcacttgagtccagaagatcaataccaacctaggtgacatggcaaagccccatctctacaaaacaaaacaaaatcaaaaaaaatatttaggcatggtggcatgtgcttgcattcccagttgctcaggagactgaggtgggagaatcactgagcccagggaggttgaggctgcagtgagccatgatcatgctgctgcattccaatctgggtgacagagcaagagcctgtctcaaaa

SEQ ID NO: 252302 - DNA, 3588 bp, Homo sapiens
  misc_feature (332)..(332): n is a, c, g, or t
agaatgtcatcctcaagggaagtgcagagagatttcttcagtcctcagctgagtataagctggcctcctggagtctgtgaacacaaacgtccaatgtgagtgtgcctgtgcaagcgcccgggcaggtgtttatactccggagggtgtccccgtgcgtcatcggtggagtggaccaaaactggtgatctgtttgccctgtgtgaccttgcccagaaccctgctgactgagagaacacatctgctggaagtcctctgggattcaaggtacagggaagaactcgaggcctcactgaaacggaaagcaaatacaaagaaactttattttaaaaacntgtcttggtctcccaagaagagggcaattggattgctcagccagaatgaagagtagttttacagaaaaaagaggacaatattgggatcacctttgacctttccatttggaaataatattttctattgtgttatagaaaggtgggaagctttcatccagaacaatgaatttcataaaggacaatagccgagcccttattcaaagaatgggaatgactgttataaagcaaatcacagatgacctatttgtatggaatgttctgaatcgcgaagaagtaaacatcatttgctgcgagaaggtggagcaggatgctgctagagggatcattcacatgattttgaaaaagggttcagagtcctgtaacctctttcttaaatcccttaaggagtggaactatcctctatttcaggacttgaatggacaaagtctttttcatcagacatcagaaggagacttggacgatttggctcaggatttaaaggacttgtaccataccccatcttttctgaacttttatccccttggtgaagatattgacattatttttaacttgaaaagcaccttcacagaacctgtcctgtggaggaaggaccaacaccatcaccgcgtggagcagctgaccctgaatggcctcctgcaggctcttcagagcccctgcatcattgaaggggaatctggcaaaggcaagtccactctgctgcagcgcattgccatgctctggggctccggaaagtgcaaggctctgaccaagttcaaattcgtcttcttcctccgtctcagcagggcccagggtggactttttgaaaccctctgtgatcaactcctggatatacctggcacaatcaggaagcagacattcatggccatgctgctgaagctgcggcagagggttcttttccttcttgatggctacaatgaattcaagccccagaactgcccagaaatcgaagccctgataaaggaaaaccaccgcttcaagaacatggtcatcgtcaccactaccactgagtgcctgaggcacatacggcagtttggtgccctgactgctgaggtgggggatatgacagaagacagcgcccaggctctcatccgagaagtgctgatcaaggagcttgctgaaggcttgttgctccaaattcagaaatccaggtgcttgaggaatctcatgaagacccctctctttgtggtcatcacttgtgcaatccagatgggtgaaagtgagttccactctcacacacaaacaacgctgttccataccttctatgatctgttgatacagaaaaacaaacacaaacataaaggtgtggctgcaagtgacttcattcggagcctggaccactgtggagacctagctctggagggtgtgttctcccacaagtttgatttcgaactgcaggatgtgtccagcgtgaatgaggatgtcctgctgacaactgggctcctctgtaaatatacagctcaaaggttcaagccaaagtataaattctttcacaagtcattccaggagtacacagcaggacgaagactcagcagtttattgacgtctcatgagccagaggaggtgaccaaggggaatggttacttgcagaaaatggtttccatttcggacattacatccacttatagcagcctgctccggtacacctgtgggtcatctgtggaagccaccagggctgttatgaagcacctcgcagcagtgtatcaacacggctgccttctcggactttccatcgccaagaggcctctctggagacaggaatctttgcaaagtgtgaaaaacaccactgagcaagaaattctgaaagccataaacatcaattcctttgtagagtgtggcatccatttatatcaagagagtacatccaaatcagccctgagccaagaatttgaagctttctttcaaggtaaaagcttatatatcaactcagggaacatccccgattacttatttgacttctttgaacatttgcccaattgtgcaagtgccctggacttcattaaactggacttttatgggggagctatggcttcatgggaaaaggctgcagaagacacaggtggaatccacatggaagaggccccagaaacctacattcccagcagggctgtatctttgttcttcaactggaagcaggaattcaggactctggaggtcacactccgggatttcagcaagttgaataagcaagatatcagatatctggggaaaatattcagctctgccacaagcctcaggctgcaaataaagagatgtgctggtgtggctggaagcctcagtttggtcctcagcacctgtaagaacatttattctctcatggtggaagccagtcccctcaccatagaagatgagaggcacatcacatctgtaacaaacctgaaaaccttgagtattcatgacctacagaatcaacggctgccgggtggtctgactgacagcttgggtaacttgaagaaccttacaaagctcataatggataacataaagatgaatgaagaagatgctataaaactagctgaaggcctgaaaaacctgaagaagatgtgtttatttcatttgacccacttgtctgacattggagagggaatggattacatagtcaagtctctgtcaagtgaaccctgtgaccttgaagaaattcaattagtctcctgctgcttgtctgcaaatgcagtgaaaatcctagctcagaatcttcacaatttggtcaaactgagcattcttgatttatcagaaaattacctggaaaaagatggaaatgaagctcttcatgaactgatcgacaggatgaacgtgctagaacagctcaccgcactgatgctgccctggggctgtgacgtgcaaggcagcctgagcagcctgttgaaacatttggaggaggtcccacaactcgtcaagcttgggttgaaaaactggagactcacagatacagagattagaattttaggtgcattttttggaaagaaccctctgaaaaacttccagcagttgaatttggcgggaaatcgtgtgagcagtgatggatggcttgccttcatgggtgtatttgagaatcttaagcaattagtgttttttgactttagtactaaagaatttctacctgatccagcattagtcagaaaacttagccaagtgttatccaagttaacttttctgcaagaagctaggcttgttgggtggcaatttgatgatgatgatctcagtgttattacaggtgcttttaaactagtaactgcttaaataaagtgtactcgaagcc

SEQ ID NO: 252303 - DNA, 690 bp, Homo sapiens
agaatgtcatcctcaagggaagtgcagagagatttcttcagtcctcagctgagtataagctggcctcctggagtctgtgaacacaaacgtccaatgtgagtgtgcctgtgcaagcgcccgggcaggtgtttatactccggagggtgtccccgtgcgtcatcggtggagtggaccaaaactggtgatctgtttgccctgtgtgaccttgcccagaaccctgctgactgagagaacacatctgctggaagtcctctgggattcaaggtacagggaatgaagagtagttttacagaaaaaagaggacaatattgggatcacctttgacctttccatttggaaataatattttctattgtgttatagaaaggtgggaagctttcatccagaacaatgaatttcataaaggacaatagccgagcccttattcaaagaatgggaatgactgttataaagcaaatcacagatgacctatttgtatggaatgttctgaatcgcgaagaagtaaacatcatttgctgcgagaaggtggagcaggatgctgctagagggatcattcacatgattttgaaaaagggttcagagtcctgtaacctctttcttaaatcccttaaggagtggaactatcctctatttcaggacttgaatggacaaacttttaacagcttagaaagtacagtagacatactgggg

SEQ ID NO: 252304 - DNA, 463 bp, Homo sapiens
ccaggctgcagtgcagtggtgcgatcttggctcactgcaacctccgcttcctgggattctctgttctctattcgcttctctgaatctcaagtgattctcctgcctcagcctccccagtagctgggattaccggtccatgccgccactataagtgcattttttggaaagaaccctctgaaaaacttccagcagttgaatttggcgggaaatcgtgtgagcagtgatggatggcttgccttcatgggtgtatttgagaatcttaagcaattagtgttttttgactttagtactaaagaatttctacctgatccagcattagtcagaaaacttagccaagtgttatccaagttaacttttctgcaagaagctaggcttgttgggtggcaatttgatgatgatgatctcagtgttattacaggtgcttttaaactagtaactgcttaaataaagtgtactcgaagcc

SEQ ID NO: 252305 - DNA, 6495 bp, Homo sapiens
  misc_feature (94)..(94): n is a, c, g, or t
gtcctctcacagaacaagaaggtatctggtctacaagaactcgaggcctcactgaaacggaaagcaaatacaaagaaactttattttaaaaacntgtcttggtctcccaagaagagggcaattggattgctcagccagaatgaagagtagttttacagaaaaaagaggacaatattgggatcacctttgacctttccatttggaaataatattttctattgtgttatagaaaggtgggaagctttcatccagaacaatgaatttcataaaggacaatagccgagcccttattcaaagaatgggaatgactgttataaagcaaatcacagatgacctatttgtatggaatgttctgaatcgcgaagaagtaaacatcatttgctgcgagaaggtggagcaggatgctgctagagggatcattcacatgattttgaaaaagggttcagagtcctgtaacctctttcttaaatcccttaaggagtggaactatcctctatttcaggacttgaatggacaaagtctttttcatcagacatcagaaggagacttggacgatttggctcaggatttaaaggacttgtaccataccccatcttttctgaacttttatccccttggtgaagatattgacattatttttaacttgaaaagcaccttcacagaacctgtcctgtggaggaaggaccaacaccatcaccgcgtggagcagctgaccctgaatggcctcctgcaggctcttcagagcccctgcatcattgaaggggaatctggcaaaggcaagtccactctgctgcagcgcattgccatgctctggggctccggaaagtgcaaggctctgaccaagttcaaattcgtcttcttcctccgtctcagcagggcccagggtggactttttgaaaccctctgtgatcaactcctggatatacctggcacaatcaggaagcagacattcatggccatgctgctgaagctgcggcagagggttcttttccttcttgatggctacaatgaattcaagccccagaactgcccagaaatcgaagccctgataaaggaaaaccaccgcttcaagaacatggtcatcgtcaccactaccactgagtgcctgaggcacatacggcagtttggtgccctgactgctgaggtgggggatatgacagaagacagcgcccaggctctcatccgagaagtgctgatcaaggagcttgctgaaggcttgttgctccaaattcagaaatccaggtgcttgaggaatctcatgaagacccctctctttgtggtcatcacttgtgcaatccagatgggtgaaagtgagttccactctcacacacaaacaacgctgttccataccttctatgatctgttgatacagaaaaacaaacacaaacataaaggtgtggctgcaagtgacttcattcggagcctggaccactgtggagacctagctctggagggtgtgttctcccacaagtttgatttcgaactgcaggatgtgtccagcgtgaatgaggatgtcctgctgacaactgggctcctctgtaaatatacagctcaaaggttcaagccaaagtataaattctttcacaagtcattccaggagtacacagcaggacgaagactcagcagtttattgacgtctcatgagccagaggaggtgaccaaggggaatggttacttgcagaaaatggtttccatttcggacattacatccacttatagcagcctgctccggtacacctgtgggtcatctgtggaagccaccagggctgttatgaagcacctcgcagcagtgtatcaacacggctgccttctcggactttccatcgccaagaggcctctctggagacaggaatctttgcaaagtgtgaaaaacaccactgagcaagaaattctgaaagccataaacatcaattcctttgtagagtgtggcatccatttatatcaagagagtacatccaaatcagccctgagccaagaatttgaagctttctttcaaggtaaaagcttatatatcaactcagggaacatccccgattacttatttgacttctttgaacatttgcccaattgtgcaagtgccctggacttcattaaactggacttttatgggggagctatggcttcatgggaaaaggctgcagaagacacaggtggaatccacatggaagaggccccagaaacctacattcccagcagggctgtatctttgttcttcaactggaagcaggaattcaggactctggaggtcacactccgggatttcagcaagttgaataagcaagatatcagatatctggggaaaatattcagctctgccacaagcctcaggctgcaaataaagagatgtgctggtgtggctggaagcctcagtttggtcctcagcacctgtaagaacatttattctctcatggtggaagccagtcccctcaccatagaagatgagaggcacatcacatctgtaacaaacctgaaaaccttgagtattcatgacctacagaatcaacggctgccgggtggtctgactgacagcttgggtaacttgaagaaccttacaaagctcataatggataacataaagatgaatgaagaagatgctataaaactagctgaaggcctgaaaaacctgaagaagatgtgtttatttcatttgacccacttgtctgacattggagagggaatggattacatagtcaagtctctgtcaagtgaaccctgtgaccttgaagaaattcaattagtctcctgctgcttgtctgcaaatgcagtgaaaatcctagctcagaatcttcacaatttggtcaaactgagcattcttgatttatcagaaaattacctggaaaaagatggaaatgaagctcttcatgaactgatcgacaggatgaacgtgctagaacagctcaccgcactgatgctgccctggggctgtgacgtgcaaggcagcctgagcagcctgttgaaacatttggaggaggtcccacaactcgtcaagcttgggttgaaaaactggagactcacagatacagagattagaattttaggtgcattttttggaaagaaccctctgaaaaacttccagcagttgaatttggcgggaaatcgtgtgagcagtgatggatggcttgccttcatgggtgtatttgagaatcttaagcaattagtgttttttgactttagtactaaagaatttctacctgatccagcattagtcagaaaacttagccaagtgttatccaagttaacttttctgcaagaagctaggcttgttgggtggcaatttgatgatgatgatctcagtgttattacaggtgcttttaaactagtaactgcttaaataaagtgtactcgaagccagtaagtgctctgggacctcattattttaagcctggtagttaaaaaaaatcttgcaaaaggatgccaaagaagataaggacgtggaaagaagtttaatttgatgattaaaaacatgcaacagttttgtgtcttagctctcctactaggattatcggcgccttgaaggaattctcattcatctttgtgttacctttggtctgggtcacaccaactggtatactgaatgcatattaacttagtatagtgcctggcatgtaagagattctcaacaatattctcaataaatattcgctgaatatgagataaattattaatagctactgaataaagaaagattatttaaaaccagagaggaaactccatatatgttctttaatccaaacagtttaattcaagcaatctggaatataaaaagcactttctgatattagaaggagatcagactcccaaaaaagatcagcattctttagtcaagcaaaacttggaagtttacaaacagctaaatcagaagcttgaaattcaggtcctctccagtacctgctacattatatgtaattccaaacatgacttcagagattaaagaagaaagggaagatgtttcccattcttttgtaccctatataaactaagggtaccctgccctaatcttttttccaacacttccccaaataacccttccttacaaagaaagaagtctaagagaactctctcatctaaatatatttaagtagaggcaagcctgaaaaaaacacaaaaacctaaatggtgttaggctgtggttcacctattctcatggcacctcaaattaatggcttgggtgttggtgtaggtaacgcttggcctgtatgttgaggtagtcactagataaaattctgggcacaacatccgtttagcaattgggcatacattctacagatttagccataacgttttgaagctgattattttacagatcaactaattaattcctctccctaactttacagatgagaaagctcagatgatttgcccatgggttataaaactacttccttacacagtggcagcatcagaactggaattcagatctcttgcctcctaggcagtgtttttcctattataatatggtgacttcgtaaagcagggttaattacattccacaaagcttacatcctaatcacaaacaatgggacaaatatttaaattgaacttctttctctgtctagcttcaagtgattctgtggcaagatttactagtaaggctgctgcctataggcctatgctgggcaagttccttattttcatatccagaagttagtcagagcttggcaaataagacttctctatataataatgcctggcccaatgtcccctgtaacatcttacatgcaggacgtagggccaattctttcataacccacaggcaactgtgagtgtcctttctcaaatagtgaaggtaggtattaaagcacctttggtgggacagatgcacaggtgttgcctctgaattggtgttgaggaagtaggcataaaacctcacacagaactgtgtttggtacctgaacactttaaaatcctatggggatggggaagacatgcatggggtggcagcacatacctcttaaccataactcaggacacggcagttcagatttcatgcatgaccctaattcacatttagttgagatcaatggaggaagaagaatcatcctgtaatagtagaccaataacagatacagtaatagttggaaaacataagataaaggccaaggaacaggttgccttattacattttacgaagtatcattttccccagtagtcaaggtagtgtaggctgtatttctttagcaggtcacatgcctgaacaggggttgcagatgccaaagacaatgaccaactcctcactaagaaaaaggtatttaggacatggtcacttattaccacagatgacaattctgcttgacagagatggcttcttggatgtttttaatccacagtgaagaaaaaggatttcaaagtgctgctcctatttgaaagtgaatgagttgactgaagaaactgttgcaaaagaaaaacaaaaatcttctctagatagctggctgatggctgggaaagtcataaatctccaggagcattggattccaggaaagttaagtccattctcaaaatcccattttaaaactgttatggaatgcataataaaataaaacaataaaaaaccctcctaggtcatgtgtgactgctgcttgttatactttttggaagtaatactagccatgttagaaagtccttaaactctgcatttggaaaacaactaaaaaataacataatctatgtaattctcacatttcatcacagttaacaatttcccatttttgacaaagcaaaacaaaaagaaactgcccactgcagacctaacaatgctgtattctataatctaaggtccattatgctttggtaaaattatatatgctcaaattctttgtgcaacttgaaaagacatcaaattccatattatgtatggaactccatgtgttttggtaatatatctgatatattttgttaataaaataagaaattaaaaagccaatgaatgaaaatgtgtcaggaaagataaattcattatgtcagtatttgattaaatgtaacatagaaaattgggattctttcactgcatatcaccaaaagttgggtagtcacttaatcaaaataaaacactgagaaccatggactatttacaaatgtactaaaatttttaaaggagagaaactttaacaaaaatcttgataattaaaaattcaaattgtgctagatagaatgtattccaaaatttctgctaaaaatttttgcttttagtttgtaagacataattcaggagaacctcaaagaaaaatttagcaattaagtttggaaaagctataaaagagacctttactttttgaacagacatttttccctttcccaaaatgtgtattattcaagaagcatatttataaatttcattaaagaaaatatcggccaggtgcggtggctcacacctaatcccagcactttgggaggctaaggtgggtggatcatgaggtcaggagttcaagtgatctgcctgcctcagcctcccaaagtgttgggattacaggtgcctggccagaaaacatgttttttaag

SEQ ID NO: 252306 - DNA, 5125 bp, Homo sapiens
  misc_feature (94)..(94): n is a, c, g, or t
gtcctctcacagaacaagaaggtatctggtctacaagaactcgaggcctcactgaaacggaaagcaaatacaaagaaactttattttaaaaacntgtcttggtctcccaagaagagggcaattggattgctcagccagaatgaagagtagttttacagaaaaaagaggacaatattgggatcacctttgacctttccatttggaaataatattttctattgtgttatagaaaggtgggaagctttcatccagaacaatgaatttcataaaggacaatagccgagcccttattcaaagaatgggaatgactgttataaagcaaatcacagatgacctatttgtatggaatgttctgaatcgcgaagaagtaaacatcatttgctgcgagaaggtggagcaggatgctgctagagggatcattcacatgattttgaaaaagggttcagagtcctgtaacctctttcttaaatcccttaaggagtggaactatcctctatttcaggacttgaatggacaaagtctttttcatcagacatcagaaggagacttggacgatttggctcaggatttaaaggacttgtaccataccccatcttttctgaacttttatccccttggtgaagatattgacattatttttaacttgaaaagcaccttcacagaacctgtcctgtggaggaaggaccaacaccatcaccgcgtggagcagctgaccctgaatggcctcctgcaggctcttcagagcccctgcatcattgaaggggaatctggcaaaggcaagtccactctgctgcagcgcattgccatgctctggggctccggaaagtgcaaggctctgaccaagttcaaattcgtcttcttcctccgtctcagcagggcccagggtggactttttgaaaccctctgtgatcaactcctggatatacctggcacaatcaggaagcagacattcatggccatgctgctgaagctgcggcagagggttcttttccttcttgatggctacaatgaattcaagccccagaactgcccagaaatcgaagccctgataaaggaaaaccaccgcttcaagaacatggtcatcgtcaccactaccactgagtgcctgaggcacatacggcagtttggtgccctgactgctgaggtgggggatatgacagaagacagcgcccaggctctcatccgagaagtgctgatcaaggagcttgctgaaggcttgttgctccaaattcagaaatccaggtgcttgaggaatctcatgaagacccctctctttgtggtcatcacttgtgcaatccagatgggtgaaagtgagttccactctcacacacaaacaacgctgttccataccttctatgatctgttgatacagaaaaacaaacacaaacataaaggtgtggctgcaagtgacttcattcggagcctggaccactgtggagacctagctctggagggtgtgttctcccacaagtttgatttcgaactgcaggatgtgtccagcgtgaatgaggatgtcctgctgacaactgggctcctctgtaaatatacagctcaaaggttcaagccaaagtataaattctttcacaagtcattccaggagtacacagcaggacgaagactcagcagtttattgacgtctcatgagccagaggaggtgaccaaggggaatggttacttgcagaaaatggtttccatttcggacattacatccacttatagcagcctgctccggtacacctgtgggtcatctgtggaagccaccagggctgttatgaagcacctcgcagcagtgtatcaacacggctgccttctcggactttccatcgccaagaggcctctctggagacaggaatctttgcaaagtgtgaaaaacaccactgagcaagaaattctgaaagccataaacatcaattcctttgtagagtgtggcatccatttatatcaagagagtacatccaaatcagccctgagccaagaatttgaagctttctttcaaggtaaaagcttatatatcaactcagggaacatccccgattacttatttgacttctttgaacatttgcccaattgtgcaagtgccctggacttcattaaactggacttttatgggggagctatggcttcatgggaaaaggctgcagaagacacaggtggaatccacatggaagaggccccagaaacctacattcccagcagggctgtatctttgttcttcaactggaagcaggaattcaggactctggaggtcacactccgggatttcagcaagttgaataagcaagatatcagatatctggggaaaatattcagctctgccacaagcctcaggctgcaaataaagagatgtgctggtgtggctggaagcctcagtttggtcctcagcacctgtaagaacatttattctctcatggtggaagccagtcccctcaccatagaagatgagaggcacatcacatctgtaacaaacctgaaaaccttgagtattcatgacctacagaatcaacggctgccgggtggtctgactgacagcttgggtaacttgaagaaccttacaaagctcataatggataacataaagatgaatgaagaagatgctataaaactagctgaaggcctgaaaaacctgaagaagatgtgtttatttcatttgacccacttgtctgacattggagagggaatggattacatagtcaagtctctgtcaagtgaaccctgtgaccttgaagaaattcaattagtctcctgctgcttgtctgcaaatgcagtgaaaatcctagctcagaatcttcacaatttggtcaaactgagcattcttgatttatcagaaaattacctggaaaaagatggaaatgaagctcttcatgaactgatcgacaggatgaacgtgctagaacagctcaccgcactgatgctgccctggggctgtgacgtgcaaggcagcctgagcagcctgttgaaacatttggaggaggtcccacaactcgtcaagcttgggttgaaaaactggagactcacagatacagagattagaattttaggtgcattttttggaaagaaccctctgaaaaacttccagcagttgaatttggcgggaaatcgtgtgagcagtgatggatggcttgccttcatgggtgtatttgagaatcttaagcaattagtgttttttgactttagtactaaagaatttctacctgatccagcattagtcagaaaacttagccaagtgttatccaagttaacttttctgcaagaagctaggcttgttgggtggcaatttgatgatgatgatctcagtgttattacaggtgcttttaaactagtaactgcttaaataaagtgtactcgaagccagtaagtgctctgggacctcattattttaagcctggtagttaaaaaaaatcttgcaaaaggatgccaaagaagataaggacgtggaaagaagtttaatttgatgattaaaaacatgcaacagttttgtgtcttagctctcctactaggattatcggcgccttgaaggaattctcattcatctttgtgttacctttggtctgggtcacaccaactggtatactgaatgcatattaacttagtatagtgcctggcatgtaagagattctcaacaatattctcaataaatattcgctgaatatgagataaattattaatagctactgaataaagaaagattatttaaaaccagagaggaaactccatatatgttctttaatccaaacagtttaattcaagcaatctggaatataaaaagcactttctgatattagaaggagatcagactcccaaaaaagatcagcattctttagtcaagcaaaacttggaagtttacaaacagctaaatcagaagcttgaaattcaggtcctctccagtacctgctacattatatgtaattccaaacatgacttcagagattaaagaagaaagggaagatgtttcccattcttttgtaccctatataaactaagggtaccctgccctaatcttttttccaacacttccccaaataacccttccttacaaagaaagaagtctaagagaactctctcatctaaatatatttaagtagaggcaagcctgaaaaaaacacaaaaacctaaatggtgttaggctgtggttcacctattctcatggcacctcaaattaatggcttgggtgttggtgtaggtaacgcttggcctgtatgttgaggtagtcactagataaaattctgggcacaacatccgtttagcaattgggcatacattctacagatttagccataacgttttgaagctgattattttacagatcaactaattaattcctctccctaactttacagatgagaaagctcagatgatttgcccatgggttataaaactacttccttacacagtggcagcatcagaactggaattcagatctcttgcctcctaggcagtgtttttcctattataatatggtgacttcgtaaagcagggttaattacattccacaaagcttacatcctaatcacaaacaatgggacaaatatttaaattgaacttctttctctgtctagcttcaagtgattctgtggcaagatttactagtaaggctgctgcctataggcctatgctgggcaagttccttattttcatatccagaagttagtcagagcttggcaaataagacttctctatataataatgcctggcccaatgtcccctgtaacatcttacatgcaggacgtagggccaattctttcataacccacaggcaactgtgagtgtcctttctcaaatagtgaaggtaggtattaaagcacctttggtgggacagatgcacaggtgttgcctctgaattggtgttgaggaagtaggcataaaacctcacacagaactgtgtttggtacctgaacactttaaaatcctatggggatggggaagacatgcatggggtggcagcacatacctcttaaccataactcaggacacggcagttcagatttcatgcatgaccctaattcacatttagttgagatcaatggaggaagaagaatcatcccttcggtcagctgctacaagtctaaattcccgtaacaacttgccaaaaaaggatctttgtggttttcgaaagagatgaattgtc

SEQ ID NO: 252307 - DNA, 3125 bp, Homo sapiens
cggcgtaatttgattttcgggcttctcttgacctccccgtgtaattagtctcccggtatgtgccctctcttgtagtcccttctggagatttgtctcaaggagcccttccggtgtcccccccgggggcgtttttttttttgggtggggaaaactcccaggcgactctttttctctctgctccccggagtttttcctcttgggaaccacgctcttgtggcccactgttctccatttccctacttgggcgccccgccgcgcccaaccggaggggttttaaaaactttttcgcggggcccccggcggcccccacaaagttttttttttttttttttttttttttccatatatgttctttaatccaaacagtttaattcaagcaatctggaatataaaaagcactttctgatattagaaggagatcagactcccaaaaaagatcagcattctttagtcaagcaaaacttggaagtttacaaacagctaaatcagaagcttgaaattcaggtcctctccagtacctgctacattatatgtaattccaaacatgacttcagagattaaagaagaaagggaagatgtttcccattcttttgtaccctatataaactaagggtaccctgccctaatcttttttccaacacttccccaaataacccttccttacaaagaaagaagtctaagagaactctctcatctaaatatatttaagtagaggcaagcctgaaaaaaacacaaaaacctaaatggtgttaggctgtggttcacctattctcatggcacctcaaattaatggcttgggtgttggtgtaggtaacgcttggcctgtatgttgaggtagtcactagataaaattctgggcacaacatccgtttagcaattgggcatacattctacagatttagccataacgttttgaagctgattattttacagatcaactaattaattcctctccctaactttacagatgagaaagctcagatgatttgcccatgggttataaaactacttccttacacagtggcagcatcagaactggaattcagatctcttgcctcctaggcagtgtttttcctattataatatggtgacttcgtaaagcagggttaattacattccacaaagcttacatcctaatcacaaacaatgggacaaatatttaaattgaacttctttctctgtctagcttcaagtgattctgtggcaagatttactagtaaggctgctgcctataggcctatgctgggcaagttccttattttcatatccagaagttagtcagagcttggcaaataagacttctctatataataatgcctggcccaatgtcccctgtaacatcttacatgcaggacgtagggccaattctttcataacccacaggcaactgtgagtgtcctttctcaaatagtgaaggtaggtattaaagcacctttggtgggacagatgcacaggtgttgcctctgaattggtgttgaggaagtaggcataaaacctcacacagaactgtgtttggtacctgaacactttaaaatcctatggggatggggaagacatgcatggggtggcagcacatacctcttaaccataactcaggacacggcagttcagatttcatgcatgaccctaattcacatttagttgagatcaatggaggaagaagaatcatcctgtaatagtagaccaataacagatacagtaatagttggaaaacataagataaaggccaaggaacaggttgccttattacattttacgaagtatcattttccccagtagtcaaggtagtgtaggctgtatttctttagcaggtcacatgcctgaacaggggttgcagatgccaaagacaatgaccaactcctcactaagaaaaaggtatttaggacatggtcacttattaccacagatgacaattctgcttgacagagatggcttcttggatgtttttaatccacagtgaagaaaaaggatttcaaagtgctgctcctatttgaaagtgaatgagttgactgaagaaactgttgcaaaagaaaaacaaaaatcttctctagatagctggctgatggctgggaaagtcataaatctccaggagcattggattccaggaaagttaagtccattctcaaaatcccattttaaaactgttatggaatgcataataaaataaaacaataaaaaaccctcctaggtcatgtgtgactgctgcttgttatactttttggaagtaatactagccatgttagaaagtccttaaactctgcatttggaaaacaactaaaaaataacataatctatgtaattctcacatttcatcacagttaacaatttcccatttttgacaaagcaaaacaaaaagaaactgcccactgcagacctaacaatgctgtattctataatctaaggtccattatgctttggtaaaattatatatgctcaaattctttgtgcaacttgaaaagacatcaaattccatattatgtatggaactccatgtgttttggtaatatatctgatatattttgttaataaaataagaaattaaaaagccaatgaatgaaaatgtgtcaggaaagataaattcattatgtcagtatttgattaaatgtaacatagaaaattgggattctttcactgcatatcaccaaaagttgggtagtcacttaatcaaaataaaacactgagaaccatggactatttacaaatgtactaaaatttttaaaggagagaaactttaacaaaaatcttgataattaaaaattcaaattgtgctagatagaatgtattccaaaatttctgctaaaaatttttgcttttagtttgtaagacataattcaggagaacctcaaagaaaaatttagcaattaagtttggaaaagctataaaagagacctttactttttgaacagacatttttccctttcccaaaatgtgtattattcaagaagcatatttataaatttcattaaagaaaatatcggccaggtgcggtggctcacacctaatcccagcactttgggaggctaaggtgggtggatcatgaggtcaggagttcaagtgatctgcctgcctcagcctcccaaagtgttgggattacaggtgcctggccagaaaacatgttttttaag

SEQ ID NO: 252308 - DNA, 3484 bp, Homo sapiens
agaatgtcatcctcaagggaagtgcagagagatttcttcagtcctcagctgagtataagctggcctcctggagtctgtgaacacaaacgtccaatgtgagtgtgcctgtgcaagcgcccgggcaggtgtttatactccggagggtgtccccgtgcgtcatcggtggagtggaccaaaactggtgatctgtttgccctgtgtgaccttgcccagaaccctgctgactgagagaacacatctgctggaagtcctctgggattcaaggtacagggaatgaagagtagttttacagaaaaaagaggacaatattgggatcacctttgacctttccatttggaaataatattttctattgtgttatagaaaggtgggaagctttcatccagaacaatgaatttcataaaggacaatagccgagcccttattcaaagaatgggaatgactgttataaagcaaatcacagatgacctatttgtatggaatgttctgaatcgcgaagaagtaaacatcatttgctgcgagaaggtggagcaggatgctgctagagggatcattcacatgattttgaaaaagggttcagagtcctgtaacctctttcttaaatcccttaaggagtggaactatcctctatttcaggacttgaatggacaaagtctttttcatcagacatcagaaggagacttggacgatttggctcaggatttaaaggacttgtaccataccccatcttttctgaacttttatccccttggtgaagatattgacattatttttaacttgaaaagcaccttcacagaacctgtcctgtggaggaaggaccaacaccatcaccgcgtggagcagctgaccctgaatggcctcctgcaggctcttcagagcccctgcatcattgaaggggaatctggcaaaggcaagtccactctgctgcagcgcattgccatgctctggggctccggaaagtgcaaggctctgaccaagttcaaattcgtcttcttcctccgtctcagcagggcccagggtggactttttgaaaccctctgtgatcaactcctggatatacctggcacaatcaggaagcagacattcatggccatgctgctgaagctgcggcagagggttcttttccttcttgatggctacaatgaattcaagccccagaactgcccagaaatcgaagccctgataaaggaaaaccaccgcttcaagaacatggtcatcgtcaccactaccactgagtgcctgaggcacatacggcagtttggtgccctgactgctgaggtgggggatatgacagaagacagcgcccaggctctcatccgagaagtgctgatcaaggagcttgctgaaggcttgttgctccaaattcagaaatccaggtgcttgaggaatctcatgaagacccctctctttgtggtcatcacttgtgcaatccagatgggtgaaagtgagttccactctcacacacaaacaacgctgttccataccttctatgatctgttgatacagaaaaacaaacacaaacataaaggtgtggctgcaagtgacttcattcggagcctggaccactgtggagacctagctctggagggtgtgttctcccacaagtttgatttcgaactgcaggatgtgtccagcgtgaatgaggatgtcctgctgacaactgggctcctctgtaaatatacagctcaaaggttcaagccaaagtataaattctttcacaagtcattccaggagtacacagcaggacgaagactcagcagtttattgacgtctcatgagccagaggaggtgaccaaggggaatggttacttgcagaaaatggtttccatttcggacattacatccacttatagcagcctgctccggtacacctgtgggtcatctgtggaagccaccagggctgttatgaagcacctcgcagcagtgtatcaacacggctgccttctcggactttccatcgccaagaggcctctctggagacaggaatctttgcaaagtgtgaaaaacaccactgagcaagaaattctgaaagccataaacatcaattcctttgtagagtgtggcatccatttatatcaagagagtacatccaaatcagccctgagccaagaatttgaagctttctttcaaggtaaaagcttatatatcaactcagggaacatccccgattacttatttgacttctttgaacatttgcccaattgtgcaagtgccctggacttcattaaactggacttttatgggggagctatggcttcatgggaaaaggctgcagaagacacaggtggaatccacatggaagaggccccagaaacctacattcccagcagggctgtatctttgttcttcaactggaagcaggaattcaggactctggaggtcacactccgggatttcagcaagttgaataagcaagatatcagatatctggggaaaatattcagctctgccacaagcctcaggctgcaaataaagagatgtgctggtgtggctggaagcctcagtttggtcctcagcacctgtaagaacatttattctctcatggtggaagccagtcccctcaccatagaagatgagaggcacatcacatctgtaacaaacctgaaaaccttgagtattcatgacctacagaatcaacggctgccgggtggtctgactgacagcttgggtaacttgaagaaccttacaaagctcataatggataacataaagatgaatgaagaagatgctataaaactagctgaaggcctgaaaaacctgaagaagatgtgtttatttcatttgacccacttgtctgacattggagagggaatggattacatagtcaagtctctgtcaagtgaaccctgtgaccttgaagaaattcaattagtctcctgctgcttgtctgcaaatgcagtgaaaatcctagctcagaatcttcacaatttggtcaaactgagcattcttgatttatcagaaaattacctggaaaaagatggaaatgaagctcttcatgaactgatcgacaggatgaacgtgctagaacagctcaccgcactgatgctgccctggggctgtgacgtgcaaggcagcctgagcagcctgttgaaacatttggaggaggtcccacaactcgtcaagcttgggttgaaaaactggagactcacagatacagagattagaattttaggtgcattttttggaaagaaccctctgaaaaacttccagcagttgaatttggcgggaaatcgtgtgagcagtgatggatggcttgccttcatgggtgtatttgagaatcttaagcaattagtgttttttgactttagtactaaagaatttctacctgatccagcattagtcagaaaacttagccaagtgttatccaagttaacttttctgcaagaagctaggcttgttgggtggcaatttgatgatgatgatctcagtgttattacaggtgcttttaaactagtaactgcttaaataaagtgtactcgaagcc

SEQ ID NO: 252309 - DNA, 882 bp, Homo sapiens
agaatgtcatcctcaagggaagtgcagagagatttcttcagtcctcagctgagtataagctggcctcctggagtctgtgaacacaaacgtccaatgtgagtgtgcctgtgcaagcgcccgggcaggtgtttatactccggagggtgtccccgtgcgtcatcggtggagtggaccaaaactggtgatctgtttgccctgtgtgaccttgcccagaaccctgctgactgagagaacacatctgctggaagtcctctgggattcaaggtacagggaatgaagagtagttttacagaaaaaagaggacaatattgggatcacctttgacctttccatttggaaataatattttctattgtgttatagaaaggtgggaagctttcatccagaacaatgaatttcataaaggacaatagccgagcccttattcaaagaatgggaatgactgttataaagcaaatcacagatgacctatttgtatggaatgttctgaatcgcgaagaagtaaacatcatttgctgcgagaaggtggagcaggatgctgctagagggatcattcacatgattttgaaaaagggttcagagtcctgtaacctctttcttaaatcccttaaggagtggaactatcctctatttcaggacttgaatggacaaagtctttttcatcagacatcagaaggagacttggacgatttggctcaggatttaaaggacttgtaccataccccatcttttctgaacttttatccccttggtgaagatattgacattatttttaacttgaaaagcaccttcacagaacctgtcctgtggaggaaggaccaacaccatcaccgcgtggagcagctgaccctagttttatagcatcttctacctgcccgggcg

SEQ ID NO: 252310 - DNA, 6383 bp, Homo sapiens
tatgtttcataaaatattgtttttatttttttaattagtaaataaggtcatgacagattttactcagagtgaaggcctactatgctgacaattatccctaaccatctttctctgccaaattctttactttccttaacccaaaaacaagctcctcccttttccaaccagctgctataagatttggttgtggaaaggaggaaacagaaagcaaaaaggggagtggggtaaaggatgctggggaaagggggagcagacagaaccctttgtgccagctcagaactgggaaaggacattacattcaccaatggcagattctcagcctcacccccccgttcatcctcctgaactctaggttttgaggagacacagaattgggtcttctttaacatcacctcttctctaataggtctttttcatcagacatcagaaggagacttggacgatttggctcaggatttaaaggacttgtaccataccccatcttttctgaacttttatccccttggtgaagatattgacattatttttaacttgaaaagcaccttcacagaacctgtcctgtggaggaaggaccaacaccatcaccgcgtggagcagctgaccctgaatggcctcctgcaggctcttcagagcccctgcatcattgaaggggaatctggcaaaggcaagtccactctgctgcagcgcattgccatgctctggggctccggaaagtgcaaggctctgaccaagttcaaattcgtcttcttcctccgtctcagcagggcccagggtggactttttgaaaccctctgtgatcaactcctggatatacctggcacaatcaggaagcagacattcatggccatgctgctgaagctgcggcagagggttcttttccttcttgatggctacaatgaattcaagccccagaactgcccagaaatcgaagccctgataaaggaaaaccaccgcttcaagaacatggtcatcgtcaccactaccactgagtgcctgaggcacatacggcagtttggtgccctgactgctgaggtgggggatatgacagaagacagcgcccaggctctcatccgagaagtgctgatcaaggagcttgctgaaggcttgttgctccaaattcagaaatccaggtgcttgaggaatctcatgaagacccctctctttgtggtcatcacttgtgcaatccagatgggtgaaagtgagttccactctcacacacaaacaacgctgttccataccttctatgatctgttgatacagaaaaacaaacacaaacataaaggtgtggctgcaagtgacttcattcggagcctggaccactgtggagacctagctctggagggtgtgttctcccacaagtttgatttcgaactgcaggatgtgtccagcgtgaatgaggatgtcctgctgacaactgggctcctctgtaaatatacagctcaaaggttcaagccaaagtataaattctttcacaagtcattccaggagtacacagcaggacgaagactcagcagtttattgacgtctcatgagccagaggaggtgaccaaggggaatggttacttgcagaaaatggtttccatttcggacattacatccacttatagcagcctgctccggtacacctgtgggtcatctgtggaagccaccagggctgttatgaagcacctcgcagcagtgtatcaacacggctgccttctcggactttccatcgccaagaggcctctctggagacaggaatctttgcaaagtgtgaaaaacaccactgagcaagaaattctgaaagccataaacatcaattcctttgtagagtgtggcatccatttatatcaagagagtacatccaaatcagccctgagccaagaatttgaagctttctttcaaggtaaaagcttatatatcaactcagggaacatccccgattacttatttgacttctttgaacatttgcccaattgtgcaagtgccctggacttcattaaactggacttttatgggggagctatggcttcatgggaaaaggctgcagaagacacaggtggaatccacatggaagaggccccagaaacctacattcccagcagggctgtatctttgttcttcaactggaagcaggaattcaggactctggaggtcacactccgggatttcagcaagttgaataagcaagatatcagatatctggggaaaatattcagctctgccacaagcctcaggctgcaaataaagagatgtgctggtgtggctggaagcctcagtttggtcctcagcacctgtaagaacatttattctctcatggtggaagccagtcccctcaccatagaagatgagaggcacatcacatctgtaacaaacctgaaaaccttgagtattcatgacctacagaatcaacggctgccgggtggtctgactgacagcttgggtaacttgaagaaccttacaaagctcataatggataacataaagatgaatgaagaagatgctataaaactagctgaaggcctgaaaaacctgaagaagatgtgtttatttcatttgacccacttgtctgacattggagagggaatggattacatagtcaagtctctgtcaagtgaaccctgtgaccttgaagaaattcaattagtctcctgctgcttgtctgcaaatgcagtgaaaatcctagctcagaatcttcacaatttggtcaaactgagcattcttgatttatcagaaaattacctggaaaaagatggaaatgaagctcttcatgaactgatcgacaggatgaacgtgctagaacagctcaccgcactgatgctgccctggggctgtgacgtgcaaggcagcctgagcagcctgttgaaacatttggaggaggtcccacaactcgtcaagcttgggttgaaaaactggagactcacagatacagagattagaattttaggtgcattttttggaaagaaccctctgaaaaacttccagcagttgaatttggcgggaaatcgtgtgagcagtgatggatggcttgccttcatgggtgtatttgagaatcttaagcaattagtgttttttgactttagtactaaagaatttctacctgatccagcattagtcagaaaacttagccaagtgttatccaagttaacttttctgcaagaagctaggcttgttgggtggcaatttgatgatgatgatctcagtgttattacaggtgcttttaaactagtaactgcttaaataaagtgtactcgaagccagtaagtgctctgggacctcattattttaagcctggtagttaaaaaaaatcttgcaaaaggatgccaaagaagataaggacgtggaaagaagtttaatttgatgattaaaaacatgcaacagttttgtgtcttagctctcctactaggattatcggcgccttgaaggaattctcattcatctttgtgttacctttggtctgggtcacaccaactggtatactgaatgcatattaacttagtatagtgcctggcatgtaagagattctcaacaatattctcaataaatattcgctgaatatgagataaattattaatagctactgaataaagaaagattatttaaaaccagagaggaaactccatatatgttctttaatccaaacagtttaattcaagcaatctggaatataaaaagcactttctgatattagaaggagatcagactcccaaaaaagatcagcattctttagtcaagcaaaacttggaagtttacaaacagctaaatcagaagcttgaaattcaggtcctctccagtacctgctacattatatgtaattccaaacatgacttcagagattaaagaagaaagggaagatgtttcccattcttttgtaccctatataaactaagggtaccctgccctaatcttttttccaacacttccccaaataacccttccttacaaagaaagaagtctaagagaactctctcatctaaatatatttaagtagaggcaagcctgaaaaaaacacaaaaacctaaatggtgttaggctgtggttcacctattctcatggcacctcaaattaatggcttgggtgttggtgtaggtaacgcttggcctgtatgttgaggtagtcactagataaaattctgggcacaacatccgtttagcaattgggcatacattctacagatttagccataacgttttgaagctgattattttacagatcaactaattaattcctctccctaactttacagatgagaaagctcagatgatttgcccatgggttataaaactacttccttacacagtggcagcatcagaactggaattcagatctcttgcctcctaggcagtgtttttcctattataatatggtgacttcgtaaagcagggttaattacattccacaaagcttacatcctaatcacaaacaatgggacaaatatttaaattgaacttctttctctgtctagcttcaagtgattctgtggcaagatttactagtaaggctgctgcctataggcctatgctgggcaagttccttattttcatatccagaagttagtcagagcttggcaaataagacttctctatataataatgcctggcccaatgtcccctgtaacatcttacatgcaggacgtagggccaattctttcataacccacaggcaactgtgagtgtcctttctcaaatagtgaaggtaggtattaaagcacctttggtgggacagatgcacaggtgttgcctctgaattggtgttgaggaagtaggcataaaacctcacacagaactgtgtttggtacctgaacactttaaaatcctatggggatggggaagacatgcatggggtggcagcacatacctcttaaccataactcaggacacggcagttcagatttcatgcatgaccctaattcacatttagttgagatcaatggaggaagaagaatcatcctgtaatagtagaccaataacagatacagtaatagttggaaaacataagataaaggccaaggaacaggttgccttattacattttacgaagtatcattttccccagtagtcaaggtagtgtaggctgtatttctttagcaggtcacatgcctgaacaggggttgcagatgccaaagacaatgaccaactcctcactaagaaaaaggtatttaggacatggtcacttattaccacagatgacaattctgcttgacagagatggcttcttggatgtttttaatccacagtgaagaaaaaggatttcaaagtgctgctcctatttgaaagtgaatgagttgactgaagaaactgttgcaaaagaaaaacaaaaatcttctctagatagctggctgatggctgggaaagtcataaatctccaggagcattggattccaggaaagttaagtccattctcaaaatcccattttaaaactgttatggaatgcataataaaataaaacaataaaaaaccctcctaggtcatgtgtgactgctgcttgttatactttttggaagtaatactagccatgttagaaagtccttaaactctgcatttggaaaacaactaaaaaataacataatctatgtaattctcacatttcatcacagttaacaatttcccatttttgacaaagcaaaacaaaaagaaactgcccactgcagacctaacaatgctgtattctataatctaaggtccattatgctttggtaaaattatatatgctcaaattctttgtgcaacttgaaaagacatcaaattccatattatgtatggaactccatgtgttttggtaatatatctgatatattttgttaataaaataagaaattaaaaagccaatgaatgaaaatgtgtcaggaaagataaattcattatgtcagtatttgattaaatgtaacatagaaaattgggattctttcactgcatatcaccaaaagttgggtagtcacttaatcaaaataaaacactgagaaccatggactatttacaaatgtactaaaatttttaaaggagagaaactttaacaaaaatcttgataattaaaaattcaaattgtgctagatagaatgtattccaaaatttctgctaaaaatttttgcttttagtttgtaagacataattcaggagaacctcaaagaaaaatttagcaattaagtttggaaaagctataaaagagacctttactttttgaacagacatttttccctttcccaaaatgtgtattattcaagaagcatatttataaatttcattaaagaaaatatcggccaggtgcggtggctcacacctaatcccagcactttgggaggctaaggtgggtggatcatgaggtcaggagttcaagtgatctgcctgcctcagcctcccaaagtgttgggattacaggtgcctggccagaaaacatgttttttaag

SEQ ID NO: 252311 - DNA, 1489 bp, Homo sapiens
agaatgtcatcctcaagggaagtgcagagagatttcttcagtcctcagctgagtataagctggcctcctggagtctgtgaacacaaacgtccaatgtgagtgtgcctgtgcaagcgcccgggcaggtgtttatactccggagggtgtccccgtgcgtcatcggtggagtggaccaaaactggtgatctgtttgccctgtgtgaccttgcccagaaccctgctgactgagagaacacatctgctggaagtcctctgggattcaaggtacagggaatgaagagtagttttacagaaaaaagaggacaatattgggatcacctttgacctttccatttggaaataatattttctattgtgttatagaaaggtgggaagctttcatccagaacaatgaatttcataaaggacaatagccgagcccttattcaaagaatgggaatgactgttataaagcaaatcacagatgacctatttgtatggaatgttctgaatcgcgaagaagtaaacatcatttgctgcgagaaggtggagcaggatgctgctagagggatcattcacatgattttgaaaaagggttcagagtcctgtaacctctttcttaaatcccttaaggagtggaactatcctctatttcaggacttgaatggacaaagtggtctgactgacagcttgggtaacttgaagaaccttacaaagctcataatggataacataaagatgaatgaagaagatgctataaaactagctgaaggcctgaaaaacctgaagaagatgtgtttatttcatttgacccacttgtctgacattggagagggaatggattacatagtcaagtctctgtcaagtgaaccctgtgaccttgaagaaattcaattagtctcctgctgcttgtctgcaaatgcagtgaaaatcctagctcagaatcttcacaatttggtcaaactgagcattcttgatttatcagaaaattacctggaaaaagatggaaatgaagctcttcatgaactgatcgacaggatgaacgtgctagaacagctcaccgcactgatgctgccctggggctgtgacgtgcaaggcagcctgagcagcctgttgaaacatttggaggaggtcccacaactcgtcaagcttgggttgaaaaactggagactcacagatacagagattagaattttaggtgcattttttggaaagaaccctctgaaaaacttccagcagttgaatttggcgggaaatcgtgtgagcagtgatggatggcttgccttcatgggtgtatttgagaatcttaagcaattagtgttttttgactttagtactaaagaatttctacctgatccagcattagtcagaaaacttagccaagtgttatccaagttaacttttctgcaagaagctaggcttgttgggtggcaatttgatgatgatgatctcagtgttattacaggtgcttttaaactagtaactgcttaaataaagtgtactcgaagcc

SEQ ID NO: 252312 - DNA, 502 bp, Homo sapiens
ttctaagcaaaatacctggtattaatgaccttgtgcaaattgctggaaaagctgctgcagctggtgttgaagtttgatgactgtaagtctttgcccttatgggatcttggacatagaaatgatgttattagctcacagttccttctcctccttaaggggaacaggcaaatagaataacacaacaagcgatgtcaaaatttcatttccttctaagataaaaggcctgtatgtaaagattcagctgagtggcaatggctaaaagagcaatttcaatgagctatcattaaatgtgggattccatggctactgccaaatacactggaattccatttttcaaatgcgatttatgtttgatctttagacaaccatcttcccaagatttacttgtgtgtaatttctcagtgaaaaacttctcagtgaaaaggaaactcctttccccttccttttgtcgaattgtctctcatccctgatttacttgtattaaaaaaaaggaattggaaaa

SEQ ID NO: 252313 - DNA, 311 bp, Homo sapiens
attgctgcccctttggttaactagcagaaagctccaagttagagtctacaacagaatcacttccttcatgatgcctgtagcatactataaatgctctaaatactcaggaatgggatatcatgtaacttagtggttaaaacatgaatgttagaggcaggtggacctgacttatcagctgtacaactggcaacttatcaaacatctcttcagttttgttacctggggattatcataatttactactaagattgctttgaacattaaatgagctattcaggccatttgattaaaagggcacctggcatacagaa

SEQ ID NO: 252314 - DNA, 431 bp, Homo sapiens
aacatttgctaaaagtactcagtaaaaatttgaggcatttatcgaaagttacgtattttatgacttcaattttgtgttttaatcacaacatcaatattttgctaattattactcttggtttattttatcactgaattgtcaggattattctcacattctttccaaaatcattccatgtcatcatttactaagtatttacaaaattctggctacttgtactaggcaagtgggttcaagatgagtaacactgaccttatcctcaagggtctcaagtcttttcgcatcttaaaatattccatacacatgcatattccatacatacacatagagttttctagatgactgaagcttgtcccttaaaatattaaaacttaactttaaaatgaaaatccgtaaaaaatgaaaaatgtcttgaggggctgttgctgtga

SEQ ID NO: 252315 - DNA, 735 bp, Homo sapiens
cgtctcaggcccctggtgcaggcagagttatctgtgctcgtggatgttctccacagacccgagctgcttttcccagagaacacagacgccagaaggaaatgtgaaagtggcggtttcatttgcaagttaataaagcatacaaaacagctgctagaagaaaatgaagagaagctctgcattaaggtcctacagaccctgagggaaatgatgaccaaagatagaggctatggagaaaagggtgaggcgctcaggcaagttctggtcaaccgttactatggaaacgtcagaccttcgggacgaagagagagccttaccagctttggcaatggcccactgtcagcaggaggacccggcaagcccgggggaggagggggaggttccggatccagctctatgagcaggggtgagatgagtctggccgaggttcagtgtcaccttgacaaggagggggcttccaatctagttatcgacctcatcatgaacgcatccagtgaccgagtgttccatgaaagcattctcctggccattgcccttctggaaggaggcaacaccaccatccagcactcctttttctgtcgcttgacagaagataagaagtcagagaaattctttaaggtgttttatgaccggatgaaggtggcccagcaagaaatcaaagcaacagtgacagtgaacaccagtgacttgggaaataaaaagaaagacgatgaggtagacagggatgccccatcacgg

SEQ ID NO: 252316 - DNA, 446 bp, Homo sapiens
ttccaagaaggacttatagagatttaacatgctgcataataaagcattgaaaatgcttctgcaaaacccacattccatcagactactttcttgttcggagactttcatgtacctattgtacacagtagagtctaaactctagacctggcatttgagactctgtctgcaagttatgtttctaaattcatttcatactacatacttttatatattttatatatttgcacctccccaaaagcatatctgttacttctttttatgtcatgcacattttcctggattttgttcaaactgtttcattcactgtgaatgctttcatctccatatagcataagatatatttcaacttccaacatcaccccctttatttataaggtctcctcagattcccagatgacagtggccctctcttctctgaacaataaagaggttacctcaggactttt

SEQ ID NO: 252317 - DNA, 179 bp, Homo sapiens
ccttctccttctttcctttctactttttttcctttattccttcatctctcctttctttattctttttttttcttttcttccccctctttctcctttctttcttgatgagtacaagcctcccgggagcacagctctcatcttccattgtatgccctccttggcccttctgtcgtcttctc

SEQ ID NO: 252318 - DNA, 308 bp, Homo sapiens
cctttactgggcaataattagcatgcaataaactgcacatatttaaagtatacagtttggtaagtttcgacatatgtatatacctataaaaccttcaccaccatcaagataatgcacatatctactgcaattagtttacctattcacttgttaatgacattaagattgtttgaaattgctgactattaaaaataaagctgacatgaacgttcttgtataagtgtttgtatggacatattcttccttttctcttggatgaatatgtagaagtggaatagttgggtcatatagctttttaagaaaccaat

SEQ ID NO: 252319 - DNA, 354 bp, Homo sapiens
cgatttcagtcatcaggagtaagagttttttggtagaatctttaggtttttctgtatataagatcatgtcatctgcaaacagagacaattttacctactctttccaatttggatgctttttatttctttctcttgcctaattgctctgggaaggacttccactactatgttgaaaaagagggtgagagtgggcatatttgtactgttctagttcttaaaagctgaaactggtctgagtgcgacggctcatgcctgtaatcccagcactttgggaggccgaggcaggcggatcacgaggtcaggagttcgagattagcctggccaacatggtgaaacccatctctactaaaaata

SEQ ID NO: 252320 - DNA, 471 bp, Homo sapiens
aggattggaagaaatgttatgtaatttcttcctcaaatgtaagactaatcatataaactatagcttttacactgttggttcagttagaaacaatgatacatctctagaattcagttaaagagggattcttggtctagcccagtagttctcaaatcaagatgcatattaccactgcctggaggctttttaataaatactaacagcaggtttccatcttcagataccctaatgtgtgacctagtcatcaatattaaagcttctcaggtacttttaatgtgcagcaaaggttgagaacttttagtctagactatatctgaagtctgtagccatctaacacagattttaattctcatttatcagcatcatctagaacaatcttcttaatctttattccatatttttctttcatgtagtcacaagtctatgacttttgttatagttaattactacattaaattatatctttggtta

SEQ ID NO: 252321 - DNA, 444 bp, Homo sapiens
gctgaagaaacaggaaagctggtggtgtgattcagcctgagcctgaagctctgggaacttgtgtataactggggaggctggcagtggaggatggaactggtataaatgccaaagtttaaaaatgtgagaaccaggagctgtgttatccaagagaagaagaagatgaatgtcctagcgcagaaagaaagagagatcttcctccacctttttattctcttcaggcctttaaagattggataatgcctgcctacatttgggaggaaggatttttgccttctcagtctactgattcaaatgctaacttctttccaaaaccctctgatagacacaaccagaaatattatcttaccagctatctgagcagccttagcccagtaaagttggcacataaaattaacatcacacactatgaatgaaaaacctcaaaattaaacccacactcag

SEQ ID NO: 252322 - DNA, 349 bp, Homo sapiens
gctttgggctgtcaatttccttttctactcaagagttccctcagataacctgccttctgtcttatcttgtcaggccttcaccctctccaagttagaaaggggtctttacaagttagtaaatagactttacatgttaagagaaggaagatttttgtttatagcggagccttgaccaaaatctcctttgaagtaagattgagatacaatgttttaccccatgatgctgatgctacatcaagtcagcattttatttatccactaacttaacaaccattggttgagctccaagaattgcatgcaccactctagatcctgaatctacaccaataaatgagagttcagctgcctc

SEQ ID NO: 252323 - DNA, 322 bp, Homo sapiens
aaatgaattatttataagaaattcacaatattaatatgaatgactcagatccctttaaatgttcagacttaactctgtgaccatgtaaaactctatctataaagtgtgctttgagtgaaattgttatttttcaacaaatgcttccaatgcttctatcacattgtaagtggtctgtatgacattaagtcagatcccgtgtatagtaagctggatgttcaagttgtagaagaaatgaggtttattctttaatataataaaacataatttgtgaaatggacagatacatgtatccaacgttcaataaaaaatagttgttgcatga

SEQ ID NO: 252324 - DNA, 275 bp, Homo sapiens
cccggcctaaaagtgaaatttttaagaaataattttacttaatgtgggaactttttcataatacaataatttttaccccaaaaaaagctgcaaaagtgtttttacttggaattttcagcaattggggcattttatttgtttttttagagtcagggtcttgctatgttgcctaggctggtctcgaactcctgggcttacgagctcttcctgcctcagcctcctgagtagctgggactacaggcgagcaatttttcttttgaaatcttagcaaaaaa

SEQ ID NO: 252325 - DNA, 404 bp, Homo sapiens
catcctcctgactttacttccttctctacccaattcttgccctaccaggtattctcatggaaccgtagcttcccctcaccaactgcaagaatagtgttcttgaaaagtaccacagcagccaggcatagtagctaatgcgtgtaatctcagcctcactttgagaggctgaggcaagaggattgcttgagcccagaagttcgagaccagcctggacaatatgccaagaccctgtcttgacaaaaaaatacaaaaattagctgggtgtggtagtgcacacctgtagtcccagctacttgggaggctgagatgggaggatctcttgagcccaggaggttgaggctacaatgagctgtcatcacatcattgcactccagcctaggcagcagagtgagatctcctccaaa

SEQ ID NO: 252326 - DNA, 459 bp, Homo sapiens
gcggcagttgctggcctagactcacttcttcaggagggaggttcgccctggaaaagctgatttgcatttctgctgggatcgatgccgtggagactgaatacattgaggtctccaggtgaaagaagaaagcttaacctggcttctgaattccaagagcacacggcaaagtgggtctaaatcaacgtctggttatgaagggcctagagccagataggagcttcttacagcttttggcagtttctggtggaggccagctctccttgtcatctaccttggcctgagaagcctgttcccctctgcagaggatgagctcagggctacacctttccttccaggctctcatggtgtggtccaggctccatttctttctctttgaacctcacttcaacatgattagagtgactgaaggtaaagaaataggaactgttttaccgtaaataaattagtccctgctacaaa

SEQ ID NO: 252327 - DNA, 416 bp, Homo sapiens
gtctgggtgacagagcaagaccctgtctctaaaaatgaaatatatatatatttcacaaggagcagtgggatttaatctatgttcttcctggacccatagaatagaaagtcatggaatcaaagaatattaagccgataggaactgtaataatcacctggtccaatccctttaatcacgggtgagaaaatggtctccaagatgttagaagtgattaatctgggattgtagaaatgttccatttgcctttaaaataaaaatacaaaaataagaaagcataaaagtgacttacctaaggttccacagccacacagacaaagaatttgtctagaccctgaatctgttgacttccatccctctactggtcctaatggattccatctgaggctagaactgagtttccaaaaatatcctttacc

SEQ ID NO: 252328 - DNA, 536 bp, Homo sapiens
gcatcctttgctcagaatcaggaatcagcaaagcagcagagaggtggggctgccccttgagtaccggttgtagctggggcttctctggtgctcaggcggtcacatgtcccttggttttccttcatggccctgccctcttctgcttggcactgggtctgcttgcctctccttctgcagttggctccttggggttttgtgaccacgttacattctacaaagccatttactgcccaacaattaaggcagtcatgtaggaggaaggctgactgctaggatccctctttcagtaggaggaaggctgactgctaggatccctctttcagggggcttttctgcctttgcatttctgttggggaatagtgtttccacttgggcttgtgctaggatttttcatgatggattaaaaagcgtctctgtttttccactatcgttgaagttttccaggtttttttaggagtgagccatcttatacaggataataatgtccatcataccttaaaattttgaaaataattttacgtaacttctctccctta

SEQ ID NO: 252329 - DNA, 530 bp, Homo sapiens
aaacaaccctatagaaggttttactgcatgcttgtatgttgctgggaaggatccagcacgctcagaataatggacaatttaggagtgagggcaagtaatgtatgtcacagtttctgtctaaatagacatgctgggtttccacctagatagattttgtgcatgttcagccttaatgtgaaaatttgatctcccaagttgtggttctgatttgtactcctgcaagcagtatgtgagttcagattgattttctggattttagaggtagtacagtgatgttaaaagagtagataggttctagagatagaactatctggattcaaattcaaggttttccttcttaacatgaacaagttgcttaacttctctggatcttgtaactatctggattcaaactcaaggttttccttcttaccatgggcaagttgcttaacttctctgaatctttctcttcatctgtactataggaataataatgctgggtacaaatgggggtgtaagggttaagggaggagtaaactggaaatattaga

SEQ ID NO: 252330 - DNA, 466 bp, Homo sapiens
gtaaaataatgtctatgacactgcaggaatagactcttggcagggcctgctgaaactgatgacctccccagccacaaagtctcagcaagaccgtgggctgctttccggacttcatttgtcccctgagcacctatcagagcccccactacacccacgtggaaaaacaagccataggcacaaacctcctggaggcctccactgtggggagaatcctgatgatgtgcctcttgtacctggaccacaacttgatccaaaggaccaccatccccacgggggggtcctttggcaagcctgcagccctgtcttcatctggaacatcccaggccaatccctgctttatccagatattccctgagtttcctgtccttgttatttaaaaaaatgcacatcttccacagtcttctgccatcttcctaacacatcatggttctgtggcaatgaccacatgatacctgcatcctccagg

SEQ ID NO: 252331 - DNA, 439 bp, Homo sapiens
gcaatttaggacctatcccagtgtggatgagagatattgagttggcttagaaacatgttagatagactagatgtggcaagaaagcccattctggggctcaaaagcctgcacatagagttgctggcacataaatggtatgtataaattctttctcagcccatgagatcaggatgtacttcatcagtataccatgctggtatgaagagattcttgcctccaaagggactcagaatatttcagggaacctgtattagtccatttttacactgttgtaaagacactaccccacactgggtaatttacaaagggaaggtgtttaattaatttacagttctgcatcgctggggaggcctcaggaaacttacagtcatggtggaaggcaagacagaagcaggcaccttttttcacaaggtgtcagggagagaagtgagtgcacaga

SEQ ID NO: 252332 - DNA, 331 bp, Homo sapiens
ggaccaagatgcaaactcagcagtctcatttcaaagtatgtcctacacgtagacttgaattcccctaggagtgccccctgacttgaggaattctcaaaaatatacctgccccggaacactttggccctaacctgtggctgatgcctgagtgactgacattggtgcgtctagtacttggagttaggcaatgactattgcagttgtcaatagagagaccagacatccctacttgtcttggccagtcctggttaatgctaacaatcaccacatcattattaatagctctccaaattgttctggtttggccaataaatgacatggtcaccccacc

SEQ ID NO: 252333 - DNA, 310 bp, Homo sapiens
actagctttcactcaaatttttccccactttaaaactatggggcaagcatctatgtcattcacccacagagaagacgatacagacttcagatgcaccaatgaaagaaatccctcccttcagccctttcacaagtatggaaatcaaaagaagcaaattcagccacaccagctgacctctgatttagagagctgttaggctgtgtcttcaccaattagaagccgttatcatattcaacttcctggctacccagagtgagtccacacaatagaaacacatactttcaattttcagagggaagttatatttaac

SEQ ID NO: 252334 - DNA, 395 bp, Homo sapiens
aactttggtaatagtccattgttatacagttcaggaaaagtttggcacaagcgagctagaatagcaggactgtattattattagattttgggaagaaatagaagatacactgatggaatttcattttctgtctcagtttcactatttttctgatcagtatttgggatttatttgtccttaatagaaatattatgtgaagattaatgaacttttgtacatgaattgctttatgttaattatgaacaattttagtatgatgatatgctaattctttcatttccattttgaatatcccagtgccactttcaccagctctcaaggtaccttcaaattctgcccaccataattctctttcttttaaaagtttaccttggaaatgaatttattctgtggta

SEQ ID NO: 252335 - DNA, 358 bp, Homo sapiens
ccaagtttgttactgcctgagaaggtgtttacaaatcatggtagagaagaagtgtagaaataaggtattgagttggaattggaggcatatatacacacaggtggacataaaaacagttatggatggatggatgtgtgtccaccaagaggcttagaaccaatgacaccccaatggcaatgagcatatcaagtgcccagatcttggctcctaaataccatattccattactactttactagaaactagggctccatgaataaatagatgattccagtgatagggcaagaaaacgcaagatgatcctaaatatgttgttctagaaaataagggaatgctcaatgaatggctggggacgtta

SEQ ID NO: 252336 - DNA, 434 bp, Homo sapiens
attcccttacagttctggaggctagaattccaaaatgagtcttccgtgccaaaaatcaaggtgtctctggtgccacattgcctctggagagatgcagattctctaagggagaatctgttttcttgctttttcccatgtctagagctgcattccttggctcatggcccctttatcttcaaaaccggcagtgtagcatcttctgtctgaccctgcttccatcacatgattttctgcttatagtcaaatgtccctcagcttcccccttacaaagatacttgtgcttatgcatgtggtgcttaatacctaggtgatgggtggataggtgcagtaaaccatcatggcatgtgtttacttatgtaacaaacctgcacatcctgtacatgtatcccagaatttaaaataaaataaagtaaaataaaatttaaatttaaaaa

SEQ ID NO: 252337 - DNA, 427 bp, Homo sapiens
gtaataggaagggaattgagatgtatatttgaaaatataaataatccatcctgtccctcagctcagagttctttttaccagacttttaccagactggttcacttttaccagacttgcttgggttatgtcattttagtcagtatatttggcagaactatcagggtgtgttgcagagtgctgtagaatgaaagtcatgagaaatgacttctaatggtagtttcccattcatttacttatatgaccttgacatttctcattccagtgatctctactagtttataaaattacttagttcaagtagttatatgctgacaatacatattctagagaaaatactcattgagattattataaactaagtttttgacttttcagaagttttcaatgcttatgtaaactgcttagaaataaatttatcattttatga

SEQ ID NO: 252338 - DNA, 444 bp, Homo sapiens
agatcggtggttaggggtggaatggggaagagtgtgcctgccaaggggcacacagaacctttgtgctgatggaatagtattcaatgcagggaacagaccagttcatcatggaggcattccatcagagcgtctagttagagaagatatgtcatggactgcatcggcacagaagtggggtttatgtgagagaggagttggaagtcacacctgagtggagagcaacgtgaaaaggtgatgtcagcaagaatttaggatgtatggaaaggatggtaaaggcaccaactggatggatcagggagacatggaatgcagaatgcaggaaatagatgatcacagtcgtgttaaactgcaaaatgctgagaatgattatattaatgccagtttagttgacatagaagaggcacaaaggagttacatcttaacacagggtcaagtaatacgata

SEQ ID NO: 252339 - DNA, 528 bp, Homo sapiens
cccacaatattttatgcaataaagtatcagtactcagagtcacggcttaatataatttcttttttcctttttaaaagcttcaaacaaataatgtcttacctttagatccctataggttaaaatatgtttgttgactaaaaattgtgtatgattgctgaaagtattcaatgcagggaacagaccagttcatcatggaggcattccatcagagcgtctagttagagaagatatgtcatggactgcatcggcacagaagtggggtttatgtgagagaggagttggaagtcacacctgagtggagagcaacgtgaaaaggtgatgtcagcaagaatttaggatgtatggaaaggatggtaaaggcaccaactggatggatcagggagacatggaatgcagaatgcaggaaatagatgatcacagtcgtgttaaactgcaaaatgctgagaatgattatattaatgccagtttagttgacatagaagaggcacaaaggagttacatcttaacacagggtcaagtaatacgata

SEQ ID NO: 252340 - DNA, 504 bp, Homo sapiens
caggtcaagggatggagcaggaaggcttgagatacacaacccatatctttaaggcactttccatctggtagagaaacggaaatgtatgcacatagcggcacatgcgatggcaacagaacccagggcctgtgccaggcctaccaaggagtgagctgatgcggctgagagttttggaatgtgaggctgggatgacaagcctggggcctggctcttctgtgctcagtgaggactgctccagcctcagccccaactcccagcaaagcccagtttacagaggatgaaactgaggcacagagaagtcaagcgtcttgtgcagggccaggattgggacccacgcagcctgctccagagccgggctctgaccctccacaagagccatcactaaagttccacttaccgctgcaccttcaatctcttcctctctccatccctcccacatgttcacagacaaaatcttcttccttatttaataaaacaatataatgaccagcctggcaaaaaaag

SEQ ID NO: 252341 - DNA, 320 bp, Homo sapiens
caggtcaagggatggagcaggaaggcttgagatacacaacccatatctttaaggcactttccatctggtagagaaacggaaattttacagaggatgaaactgaggcacagagaagtcaagcgtcttgtgcagggccaggattgggacccacgcagcctgctccagagccgggctctgaccctccacaagagccatcactaaagttccacttaccgctgcaccttcaatctcttcctctctccatccctcccacatgttcacagacaaaatcttcttccttatttaataaaacaatataatgaccagcctggcaaaaaaag

SEQ ID NO: 252342 - DNA, 435 bp, Homo sapiens
agcttctaggtgatgctgatgatgctggtccatggaccacactttgagtaatactgtgctaggctaatcctggctaatcttgcctggttgtctaacacaggaaggctttccttatcattttaaagggaggcataaaagctattaccattggctgtgaagcttgattagtggttttctgatctgtgtgtaggagaagcattgttttaattcatgagctctgctccttaatttgctctctttgaaagttctcctggtaattgcaaaggactctttaaatgtttcatgtttattgaattaagcaatggcctttatctcaagtagtgtttacttccaggatcattcagattatccccctccccaaacatattaagattaaaatgtaataagtaattattattttccagcctgggtgacagagcaagactgtctgaaaca

SEQ ID NO: 252343 - DNA, 250 bp, Homo sapiens
agagcctcacacagtttaatagattagtaccagcacaaaatggatgcttcttccctctatcttcacaatactaacagccagttagtagaaaggtgctgtgtatgtgcctgcccgcacacacatacacacaacagctcactccatacttgccagctgacaacagcagaaactacaccaccacctcttctgaactgtcttttcccttgttctggaatctgtgaagacgggcaggtggtgtattagcattctc

SEQ ID NO: 252344 - DNA, 423 bp, Homo sapiens
ggataatcgccagaagtcaaatgagctctgaggatcaggcattagcaatgggtcagtgttgactttctgactttggtggttgtcttgtgctatgcaggagaatgtcctggtttgcagggattactcatggttgcatttggaagtgatggaacatcaagctagcaatgtactctcaaatagtttagaatttttaaagtgctttgtactagtcatgcaagtttagttcaagcttgaaattataatagaaaaaaatctgaacgtaataatatttttttaagaaaaagaagcagcagcaatggccagcccttgagagtctctgggtctgcctattcctctgacccttctataaatattggtgttgacctccctagggcgtcagagcaaacctctccagggtggtccacaaaagtccagctctacaag

SEQ ID NO: 252345 - DNA, 441 bp, Homo sapiens
tggccattcctaggatgacctgggaatttatcccctctgcactgctccccaagcacttggataatgaagctgagctgtcttcaactgtattatatgtagacagaaggtcaccatctacagcctggtgaaaaatgagtcagacctttccactgtaaagacaaacacatgagctgagctaagaatctctttaaaatggacatagaagactgcaatggccgctcctatgtgtctgtaggaccaatgaaggaattattggcatgcactaaaggagatagcaagatgggtcagacacacatatgagagtcattggcaacacccgggtaatgtaaggaatccacgcttcctggaaggtgagtggctgggctcacccctgcctgccactgagacgcagacatgcatacaccacccgcactccctcgccgtttccaaggcggcggccgc

SEQ ID NO: 252346 - DNA, 415 bp, Homo sapiens
cctcgcctccctctcccccaacactgtcccctctccccaacccctcacagcctgcgcgcgcgcggagacacctcagtctacatggggaggacagagaagcgcaaagaacaagagaaaagatgcatccatctgagatctaaaaggagacaatgagaatctctttaaaatggacatagaagactgcaatggccgctcctatgtgtctgtaggaccaatgaaggaattattggcatgcactaaaggagatagcaagatgggtcagacacacatatgagagtcattggcaacacccgggtaatgtaaggaatccacgcttcctggaaggtgagtggctgggctcacccctgcctgccactgagacgcagacatgcatacaccacccgcactccctcgccgtttccaaggcggcggccgc

SEQ ID NO: 252347 - DNA, 5383 bp, Homo sapiens
  misc_feature (1443)..(1443): n is a, c, g, or t
  misc_feature (1475)..(1475): n is a, c, g, or t
  misc_feature (1597)..(1597): n is a, c, g, or t
  misc_feature (1679)..(1679): n is a, c, g, or t
  misc_feature (1683)..(1683): n is a, c, g, or t
  misc_feature (2085)..(2085): n is a, c, g, or t
cctcgcctccctctcccccaacactgtcccctctccccaacccctcacagcctgcgcgcgcgcggagacacctcagtctacatggggaggacagagaagcgcaaagaacaagagaaaagatgcatccatctgagatctaaaaggagacaatgagaatctctttaaaatggacatagaagactgcaatggccgctcctatgtgtctgtaggaccaatgaaggaattattggcatgcactaaaggagatagcaagatgggtcagacacacatatgagagtcattggcaacacccgggtaatgtaagatcctgaaccggctgggggctccagagaggaacagtagggaagaatgtctgtcctgaacatctgtcccttctgcagcccccattttcctctccgccctggcgcacccagcctcagccctgcttcctgtggacgtcaggcagtgatgctcttgccctcaggcctagataaaggtagggtaggcaaggcccagccactgagctcacagaaggcagcaccaggcatccagactggcgggggcacaaggtatggtgcccagcatacaacactgctttgtacatggctatgaaggaaatgtttgtgaaatttaactgaatttttttaaaagattaggcaatggacagtagatatctccagctccagctttacctgccctcttgttctctcctccaaggtagcggggactcatctctggagaaggagttcctcggggccccagtggggccctcggtgagcacccccaacagccagcactcttctcctagccgctcactcagtgccaactccatcaaggtggagatgtacagcgatgaggagtcaagcagactgctggggccagatgagcggctcctggaaaaggacgacagcgtgattgtggaagattcattgtctgagcccctgggctactgtgatgggagtgggccagagcctcactcccctgggggcatccggctgcccaatggcaagctcaagtgtgacgtctgcggcatggtctgtattggacccaacgtgctcatggtgcacaagcgcagtcacactggtgaaaggcccttccattgcaaccagtgtggtgcctccttcacccagaaggggaacctgctgcgccacatcaagctgcactctggggagaagccctttaaatgtcccttctgcaactatgcctgccgccggcgtgatgcactcactggtcacctccgcacacactcagtctcctctcccacagtgggcaagccctacaagtgtaactactgtggccggagctacaaacagcagagtaccctggaggagcacaaggagcggtgccataactacctacagagtctcagcactgaagcccaagctttggctggccaaccaggtgacgaaatacgtgacctggagatggtgccagactccatgctgcactcatcctctgagcggncaactttcatcgatcgtctggccaatagcctnaccaaacgcaagcgttccacaccccagaagtttgtaggcgaaaagcagatgcgcttcagcctctcagacctcccctatgatgtgaactcgggtggctatgaaaaggatgtggagttggtggnacaccacagcctagagcctggctttggaagttccctggcctttgtgggtgcagagcatctgcgtcccctccgccttccaccnaccnattgcatctcagaactcacgcctgtcatcagctctgtctacacccagatgcagcccctccctggtcgactggagcttccaggatcccgagaagcaggtgagggacctgaggacctggctgatggaggtcccctcctctaccggccccgaggccccctgactgaccctggggcatcccccagcaatggctgccaggactccacagacacagaaagcaaccacgaagatcgggttgcgggggtggtatccctccctcagggtcccccaccccagccacctcccaccattgtggtgggccggcacagtcctgcctacgccaaagaggaccccaagccacaggaggggttattgcggggcaccccaggcccctccaaggaagtgcttcgggtggtgggcgagagtngtgagcctgtgaaggccttcaagtgtgagcactgccgtatcctcttcctggaccacgtcatgttcactatccacatgggctgccatggcttcagagacccttttgagtgcaacatctgtggttatcacagccaggaccggtacgaattctcttcccacattgtccggggggagcataaggtgggctagcaacctctccctctctcctcagtccaccactccactgccctgactacaggcattgatccctgtccccaccatttcccaaggagttttgctttgtagccctcactactggccacctgacctcacacctgaccctgacccctcctcacctattctcttcctctatcctgaccgatgtaagcattgtgatgaaacagatcttttgcttatgtttttcctttttatcttctctcatcccagcatactgagttatttattaattagttgatttatttttgcctttttaaattttaacttatatcagtcacttgccactcccccaccctcctgtccacaactcctttccactttaggccaatttttctctcttagatcttccagcagccccaggggtaggaagctcctcttagtactaagagacttcaagcttcttgctttaagtcctcaccctttacattatctaattcttcagttttgatgctgatacctgcccccggccctaccttagctctgtggcattatatctcctctctgggactcttcaacctggtactccatacctcttgtgccctctcactttaggcagcttgcactattcttgaatgaatgaagaattatttcctcatttggaagtaggagggactgaagaaattctccccaggcactgtgggactgagagtcctattcccctagtaataggtcatattcccctagtaatatgagttctcaaagcctacattcaggatctccctctaggatgtgatagatctggtccctctccttgaactacccctccacacgctctagtcccttcaacctaccggtctattaagtggtggcttttctctccttggagtgccccaattttatattctcaggggccaaggctaggtctgcaaccctctgtctctgacagattgggagccacaggtgcctaattgggaaccagggcatgggaaaggagtgggtcaaaattcttctctttctcctccacctctcaaacttcttcactatagtgaccttcctaggctctcaggggctccttcagtccccatcctatgagaaactagtgggttgctgcctgatgacaaggggttgtttcagcccctcagtcatgctgccttctgctgctccctcccagcaggattcaccctctcattcccgggctcctgggccctgttcttaggatcagtggcagggagaaacgggtatctcttttctctcttctaattttcagtataaccaaaaattatcccagcatgagcacgggcacgtgcccttcaccccattccacccttgttccagcaagactgggatgggtacaactgaactggggtcttcctttactacccccttctacactcagctcccagacacagggtaggaggggggactgctggctactgcagagacccttggctatttgagtaacctaggattagtgagaaggggcagaaggagatacaactccactgcaagtggaggtttctttctacaagagttttctgcccaaggccacagccatcccactctctgcttccttgagattcaaaccaaaggctgtttttctatgtttaaagaaaaaaaaaagtaaaaaccaaacacaacacctcacaagttgtaactcttggtccttctctctctccttttctcttcccttccttccccttccatctttctttccacatgtcctttccttattggctcttttacctcctacttttctcactccctatcagggatattttggggggggatggtaaagggtgggctaaggaacagaccctgggattagggccttaagggctctgagaggagtctaccttgccttcttatgggaagggagaccctaaaaaactttctcctctttgtcctcctttttctcccccactctgaggtttccccaagagaaccagattggcagggagaagcattgtggggcaattgttcctccttgacaatgtagcaataaatagatgctgccaagggcagaaaatggggaggttagctcagagcagagtagtctctagagaaaggaagaatcctcaacggcaccctggggtgctagctcctttttagaatgtcagcagagctgagattaatatctgggcttttcctgaactattctggttattgagcccttcctgttagacctaccgcctcccacctcttctgtgtctgctgtgtatttggtgacacttcataaggactagtcccttctggggtatcagagccttagggtgcccccatccccttccccagtcaactgtggcacctgtaacctcccggaacatgaaggactatgctctgaggctatactctgtgcccatgagagcagagactggaagggcaagaccaggtgctaaggaggggagagggggcatcctgtctctctccagaccatcactgcactttaaccagggtcttaggtacaaaatcctacttttcagagccttccagctctggaacctcaaacatcctcatgctctctcccagctccttttgcataaaaaaaaaagtaaagaaaaagaaaaaaaaatacacacacactgaaacccacatggagaaaagaggtgtttccttttatattgctattcaaaatcaataccaccaacaaaatatttctaagtagacacttttccagacctttgtttttttgtgtcagtgtccaagctgcagataggattttgtaatacttctggcagcttctttccttgtgtacataatatatatatatacatatatatatatatttttaatcagaagttatgaagaacaaaaagaaaaaataaacacagaagcaagtgcaataccacctctcttctccctctctcctagggtttcctttgtagcctatgtttggtgtctcttttgacctttaccccttcacctcctcctctcttcttctgattcccctcccccccttttttaaagagtttttctcctttctcaaggggagttaaactagcttttgagacttattgcaaagcattttgtatatgtaatatattgtaagtaaatatttgtgtaacggagatatactactgtaagttttgtactgtactggctgaaagtctgttataaataaacatgagtaatttaacacctctggt

SEQ ID NO: 252348 - DNA, 5235 bp, Homo sapiens
  misc_feature (1295)..(1295): n is a, c, g, or t
  misc_feature (1327)..(1327): n is a, c, g, or t
  misc_feature (1449)..(1449): n is a, c, g, or t
  misc_feature (1531)..(1531): n is a, c, g, or t
  misc_feature (1535)..(1535): n is a, c, g, or t
  misc_feature (1937)..(1937): n is a, c, g, or t
cctcgcctccctctcccccaacactgtcccctctccccaacccctcacagcctgcgcgcgcgcggagacacctcagtctacatggggaggacagagaagcgcaaagaacaagagaaaagatgcatccatctgagatctaaaaggagacaatgagaatctctttaaaatggacatagaagactgcaatggccgctcctatgtgtctgtaggaccaatgaaggaattattggcatgcactaaaggagatagcaagatgggtcagacacacatatgagagtcattggcaacacccgggtaatgtaagatcctgaaccggctgggggctccagagaggaacagtagggaagaatgtctgtcctgaacatctgtcccttctgcagcccccattttcctctccgccctggcgcacccagcctcagccctgcttcctgtggacgtcaggcagtgatgctcttgccctcaggcctagataaaggtagggtaggcaaggcccagccactgagctcacagaaggcagcaccaggcatccagactggcgggggcacaaggtagcggggactcatctctggagaaggagttcctcggggccccagtggggccctcggtgagcacccccaacagccagcactcttctcctagccgctcactcagtgccaactccatcaaggtggagatgtacagcgatgaggagtcaagcagactgctggggccagatgagcggctcctggaaaaggacgacagcgtgattgtggaagattcattgtctgagcccctgggctactgtgatgggagtgggccagagcctcactcccctgggggcatccggctgcccaatggcaagctcaagtgtgacgtctgcggcatggtctgtattggacccaacgtgctcatggtgcacaagcgcagtcacactggtgaaaggcccttccattgcaaccagtgtggtgcctccttcacccagaaggggaacctgctgcgccacatcaagctgcactctggggagaagccctttaaatgtcccttctgcaactatgcctgccgccggcgtgatgcactcactggtcacctccgcacacactcagtctcctctcccacagtgggcaagccctacaagtgtaactactgtggccggagctacaaacagcagagtaccctggaggagcacaaggagcggtgccataactacctacagagtctcagcactgaagcccaagctttggctggccaaccaggtgacgaaatacgtgacctggagatggtgccagactccatgctgcactcatcctctgagcggncaactttcatcgatcgtctggccaatagcctnaccaaacgcaagcgttccacaccccagaagtttgtaggcgaaaagcagatgcgcttcagcctctcagacctcccctatgatgtgaactcgggtggctatgaaaaggatgtggagttggtggnacaccacagcctagagcctggctttggaagttccctggcctttgtgggtgcagagcatctgcgtcccctccgccttccaccnaccnattgcatctcagaactcacgcctgtcatcagctctgtctacacccagatgcagcccctccctggtcgactggagcttccaggatcccgagaagcaggtgagggacctgaggacctggctgatggaggtcccctcctctaccggccccgaggccccctgactgaccctggggcatcccccagcaatggctgccaggactccacagacacagaaagcaaccacgaagatcgggttgcgggggtggtatccctccctcagggtcccccaccccagccacctcccaccattgtggtgggccggcacagtcctgcctacgccaaagaggaccccaagccacaggaggggttattgcggggcaccccaggcccctccaaggaagtgcttcgggtggtgggcgagagtngtgagcctgtgaaggccttcaagtgtgagcactgccgtatcctcttcctggaccacgtcatgttcactatccacatgggctgccatggcttcagagacccttttgagtgcaacatctgtggttatcacagccaggaccggtacgaattctcttcccacattgtccggggggagcataaggtgggctagcaacctctccctctctcctcagtccaccactccactgccctgactacaggcattgatccctgtccccaccatttcccaaggagttttgctttgtagccctcactactggccacctgacctcacacctgaccctgacccctcctcacctattctcttcctctatcctgaccgatgtaagcattgtgatgaaacagatcttttgcttatgtttttcctttttatcttctctcatcccagcatactgagttatttattaattagttgatttatttttgcctttttaaattttaacttatatcagtcacttgccactcccccaccctcctgtccacaactcctttccactttaggccaatttttctctcttagatcttccagcagccccaggggtaggaagctcctcttagtactaagagacttcaagcttcttgctttaagtcctcaccctttacattatctaattcttcagttttgatgctgatacctgcccccggccctaccttagctctgtggcattatatctcctctctgggactcttcaacctggtactccatacctcttgtgccctctcactttaggcagcttgcactattcttgaatgaatgaagaattatttcctcatttggaagtaggagggactgaagaaattctccccaggcactgtgggactgagagtcctattcccctagtaataggtcatattcccctagtaatatgagttctcaaagcctacattcaggatctccctctaggatgtgatagatctggtccctctccttgaactacccctccacacgctctagtcccttcaacctaccggtctattaagtggtggcttttctctccttggagtgccccaattttatattctcaggggccaaggctaggtctgcaaccctctgtctctgacagattgggagccacaggtgcctaattgggaaccagggcatgggaaaggagtgggtcaaaattcttctctttctcctccacctctcaaacttcttcactatagtgaccttcctaggctctcaggggctccttcagtccccatcctatgagaaactagtgggttgctgcctgatgacaaggggttgtttcagcccctcagtcatgctgccttctgctgctccctcccagcaggattcaccctctcattcccgggctcctgggccctgttcttaggatcagtggcagggagaaacgggtatctcttttctctcttctaattttcagtataaccaaaaattatcccagcatgagcacgggcacgtgcccttcaccccattccacccttgttccagcaagactgggatgggtacaactgaactggggtcttcctttactacccccttctacactcagctcccagacacagggtaggaggggggactgctggctactgcagagacccttggctatttgagtaacctaggattagtgagaaggggcagaaggagatacaactccactgcaagtggaggtttctttctacaagagttttctgcccaaggccacagccatcccactctctgcttccttgagattcaaaccaaaggctgtttttctatgtttaaagaaaaaaaaaagtaaaaaccaaacacaacacctcacaagttgtaactcttggtccttctctctctccttttctcttcccttccttccccttccatctttctttccacatgtcctttccttattggctcttttacctcctacttttctcactccctatcagggatattttggggggggatggtaaagggtgggctaaggaacagaccctgggattagggccttaagggctctgagaggagtctaccttgccttcttatgggaagggagaccctaaaaaactttctcctctttgtcctcctttttctcccccactctgaggtttccccaagagaaccagattggcagggagaagcattgtggggcaattgttcctccttgacaatgtagcaataaatagatgctgccaagggcagaaaatggggaggttagctcagagcagagtagtctctagagaaaggaagaatcctcaacggcaccctggggtgctagctcctttttagaatgtcagcagagctgagattaatatctgggcttttcctgaactattctggttattgagcccttcctgttagacctaccgcctcccacctcttctgtgtctgctgtgtatttggtgacacttcataaggactagtcccttctggggtatcagagccttagggtgcccccatccccttccccagtcaactgtggcacctgtaacctcccggaacatgaaggactatgctctgaggctatactctgtgcccatgagagcagagactggaagggcaagaccaggtgctaaggaggggagagggggcatcctgtctctctccagaccatcactgcactttaaccagggtcttaggtacaaaatcctacttttcagagccttccagctctggaacctcaaacatcctcatgctctctcccagctccttttgcataaaaaaaaaagtaaagaaaaagaaaaaaaaatacacacacactgaaacccacatggagaaaagaggtgtttccttttatattgctattcaaaatcaataccaccaacaaaatatttctaagtagacacttttccagacctttgtttttttgtgtcagtgtccaagctgcagataggattttgtaatacttctggcagcttctttccttgtgtacataatatatatatatacatatatatatatatttttaatcagaagttatgaagaacaaaaagaaaaaataaacacagaagcaagtgcaataccacctctcttctccctctctcctagggtttcctttgtagcctatgtttggtgtctcttttgacctttaccccttcacctcctcctctcttcttctgattcccctcccccccttttttaaagagtttttctcctttctcaaggggagttaaactagcttttgagacttattgcaaagcattttgtatatgtaatatattgtaagtaaatatttgtgtaacggagatatactactgtaagttttgtactgtactggctgaaagtctgttataaataaacatgagtaatttaacacctctggt

SEQ ID NO: 252349 - DNA, 3574 bp, Homo sapiens
  misc_feature (769)..(769): n is a, c, g, or t
  misc_feature (801)..(801): n is a, c, g, or t
  misc_feature (923)..(923): n is a, c, g, or t
  misc_feature (1005)..(1005): n is a, c, g, or t
  misc_feature (1009)..(1009): n is a, c, g, or t
  misc_feature (1411)..(1411): n is a, c, g, or t
atggaatctttattttgtgaaagtagcggggactcatctctggagaaggagttcctcggggccccagtggggccctcggtgagcacccccaacagccagcactcttctcctagccgctcactcagtgccaactccatcaaggtggagatgtacagcgatgaggagtcaagcagactgctggggccagatgagcggctcctggaaaaggacgacagcgtgattgtggaagattcattgtctgagcccctgggctactgtgatgggagtgggccagagcctcactcccctgggggcatccggctgcccaatggcaagctcaagtgtgacgtctgcggcatggtctgtattggacccaacgtgctcatggtgcacaagcgcagtcacactggtgaaaggcccttccattgcaaccagtgtggtgcctccttcacccagaaggggaacctgctgcgccacatcaagctgcactctggggagaagccctttaaatgtcccttctgcaactatgcctgccgccggcgtgatgcactcactggtcacctccgcacacactcagtctcctctcccacagtgggcaagccctacaagtgtaactactgtggccggagctacaaacagcagagtaccctggaggagcacaaggagcggtgccataactacctacagagtctcagcactgaagcccaagctttggctggccaaccaggtgacgaaatacgtgacctggagatggtgccagactccatgctgcactcatcctctgagcggncaactttcatcgatcgtctggccaatagcctnaccaaacgcaagcgttccacaccccagaagtttgtaggcgaaaagcagatgcgcttcagcctctcagacctcccctatgatgtgaactcgggtggctatgaaaaggatgtggagttggtggnacaccacagcctagagcctggctttggaagttccctggcctttgtgggtgcagagcatctgcgtcccctccgccttccaccnaccnattgcatctcagaactcacgcctgtcatcagctctgtctacacccagatgcagcccctccctggtcgactggagcttccaggatcccgagaagcaggtgagggacctgaggacctggctgatggaggtcccctcctctaccggccccgaggccccctgactgaccctggggcatcccccagcaatggctgccaggactccacagacacagaaagcaaccacgaagatcgggttgcgggggtggtatccctccctcagggtcccccaccccagccacctcccaccattgtggtgggccggcacagtcctgcctacgccaaagaggaccccaagccacaggaggggttattgcggggcaccccaggcccctccaaggaagtgcttcgggtggtgggcgagagtngtgagcctgtgaaggccttcaagtgtgagcactgccgtatcctcttcctggaccacgtcatgttcactatccacatgggctgccatggcttcagagacccttttgagtgcaacatctgtggttatcacagccaggaccggtacgaattctcttcccacattgtccggggggagcataaggtgggctagcaacctctccctctctcctcagtccaccactccactgccctgactacaggcattgatccctgtccccaccatttcccaaggagttttgctttgtagccctcactactggccacctgacctcacacctgaccctgacccctcctcacctattctcttcctctatcctgaccgatgtaagcattgtgatgaaacagatcttttgcttatgtttttcctttttatcttctctcatcccagcatactgagttatttattaattagttgatttatttttgcctttttaaattttaacttatatcagtcacttgccactcccccaccctcctgtccacaactcctttccactttaggccaatttttctctcttagatcttccagcagccccaggggtaggaagctcctcttagtactaagagacttcaagcttcttgctttaagtcctcaccctttacattatctaattcttcagttttgatgctgatacctgcccccggccctaccttagctctgtggcattatatctcctctctgggactcttcaacctggtactccatacctcttgtgccctctcactttaggcagcttgcactattcttgaatgaatgaagaattatttcctcatttggaagtaggagggactgaagaaattctccccaggcactgtgggactgagagtcctattcccctagtaataggtcatattcccctagtaatatgagttctcaaagcctacattcaggatctccctctaggatgtgatagatctggtccctctccttgaactacccctccacacgctctagtcccttcaacctaccggtctattaagtggtggcttttctctccttggagtgccccaattttatattctcaggggccaaggctaggtctgcaaccctctgtctctgacagattgggagccacaggtgcctaattgggaaccagggcatgggaaaggagtgggtcaaaattcttctctttctcctccacctctcaaacttcttcactatagtgaccttcctaggctctcaggggctccttcagtccccatcctatgagaaactagtgggttgctgcctgatgacaaggggttgtttcagcccctcagtcatgctgccttctgctgctccctcccagcaggattcaccctctcattcccgggctcctgggccctgttcttaggatcagtggcagggagaaacgggtatctcttttctctcttctaattttcagtataaccaaaaattatcccagcatgagcacgggcacgtgcccttcaccccattccacccttgttccagcaagactgggatgggtacaactgaactggggtcttcctttactacccccttctacactcagctcccagacacagggtaggaggggggactgctggctactgcagagacccttggctatttgagtaacctaggattagtgagaaggggcagaaggagatacaactccactgcaagtggaggtttctttctacaagagttttctgcccaaggccacagccatcccactctctgcttccttgagattcaaaccaaaggctgtttttctatgtttaaagaaaaaaaaaagtaaaaaccaaacacaacacctcacaagttgtaactcttggtccttctctctctccttttctcttcccttccttccccttccatctttctttccacatgtcctttccttattggctcttttacctcctacttttctcactccctatcagggatattttggggggggatggtaaagggtgggctaaggaacagaccctgggattagggccttaagggctctgagaggagtctaccttgccttcttatgggaagggagaccctaaaaaactttctcctctttgtcctcctttttctcccccactctgaggtttccccaagagaaccagattggcagaagcaggaagcagcagaagcaggaagcggcagaagcaggggcagaagcaggaag

SEQ ID NO: 252350 - DNA, 4709 bp, Homo sapiens
  misc_feature (769)..(769): n is a, c, g, or t
  misc_feature (801)..(801): n is a, c, g, or t
  misc_feature (923)..(923): n is a, c, g, or t
  misc_feature (1005)..(1005): n is a, c, g, or t
  misc_feature (1009)..(1009): n is a, c, g, or t
  misc_feature (1411)..(1411): n is a, c, g, or t
atggaatctttattttgtgaaagtagcggggactcatctctggagaaggagttcctcggggccccagtggggccctcggtgagcacccccaacagccagcactcttctcctagccgctcactcagtgccaactccatcaaggtggagatgtacagcgatgaggagtcaagcagactgctggggccagatgagcggctcctggaaaaggacgacagcgtgattgtggaagattcattgtctgagcccctgggctactgtgatgggagtgggccagagcctcactcccctgggggcatccggctgcccaatggcaagctcaagtgtgacgtctgcggcatggtctgtattggacccaacgtgctcatggtgcacaagcgcagtcacactggtgaaaggcccttccattgcaaccagtgtggtgcctccttcacccagaaggggaacctgctgcgccacatcaagctgcactctggggagaagccctttaaatgtcccttctgcaactatgcctgccgccggcgtgatgcactcactggtcacctccgcacacactcagtctcctctcccacagtgggcaagccctacaagtgtaactactgtggccggagctacaaacagcagagtaccctggaggagcacaaggagcggtgccataactacctacagagtctcagcactgaagcccaagctttggctggccaaccaggtgacgaaatacgtgacctggagatggtgccagactccatgctgcactcatcctctgagcggncaactttcatcgatcgtctggccaatagcctnaccaaacgcaagcgttccacaccccagaagtttgtaggcgaaaagcagatgcgcttcagcctctcagacctcccctatgatgtgaactcgggtggctatgaaaaggatgtggagttggtggnacaccacagcctagagcctggctttggaagttccctggcctttgtgggtgcagagcatctgcgtcccctccgccttccaccnaccnattgcatctcagaactcacgcctgtcatcagctctgtctacacccagatgcagcccctccctggtcgactggagcttccaggatcccgagaagcaggtgagggacctgaggacctggctgatggaggtcccctcctctaccggccccgaggccccctgactgaccctggggcatcccccagcaatggctgccaggactccacagacacagaaagcaaccacgaagatcgggttgcgggggtggtatccctccctcagggtcccccaccccagccacctcccaccattgtggtgggccggcacagtcctgcctacgccaaagaggaccccaagccacaggaggggttattgcggggcaccccaggcccctccaaggaagtgcttcgggtggtgggcgagagtngtgagcctgtgaaggccttcaagtgtgagcactgccgtatcctcttcctggaccacgtcatgttcactatccacatgggctgccatggcttcagagacccttttgagtgcaacatctgtggttatcacagccaggaccggtacgaattctcttcccacattgtccggggggagcataaggtgggctagcaacctctccctctctcctcagtccaccactccactgccctgactacaggcattgatccctgtccccaccatttcccaaggagttttgctttgtagccctcactactggccacctgacctcacacctgaccctgacccctcctcacctattctcttcctctatcctgaccgatgtaagcattgtgatgaaacagatcttttgcttatgtttttcctttttatcttctctcatcccagcatactgagttatttattaattagttgatttatttttgcctttttaaattttaacttatatcagtcacttgccactcccccaccctcctgtccacaactcctttccactttaggccaatttttctctcttagatcttccagcagccccaggggtaggaagctcctcttagtactaagagacttcaagcttcttgctttaagtcctcaccctttacattatctaattcttcagttttgatgctgatacctgcccccggccctaccttagctctgtggcattatatctcctctctgggactcttcaacctggtactccatacctcttgtgccctctcactttaggcagcttgcactattcttgaatgaatgaagaattatttcctcatttggaagtaggagggactgaagaaattctccccaggcactgtgggactgagagtcctattcccctagtaataggtcatattcccctagtaatatgagttctcaaagcctacattcaggatctccctctaggatgtgatagatctggtccctctccttgaactacccctccacacgctctagtcccttcaacctaccggtctattaagtggtggcttttctctccttggagtgccccaattttatattctcaggggccaaggctaggtctgcaaccctctgtctctgacagattgggagccacaggtgcctaattgggaaccagggcatgggaaaggagtgggtcaaaattcttctctttctcctccacctctcaaacttcttcactatagtgaccttcctaggctctcaggggctccttcagtccccatcctatgagaaactagtgggttgctgcctgatgacaaggggttgtttcagcccctcagtcatgctgccttctgctgctccctcccagcaggattcaccctctcattcccgggctcctgggccctgttcttaggatcagtggcagggagaaacgggtatctcttttctctcttctaattttcagtataaccaaaaattatcccagcatgagcacgggcacgtgcccttcaccccattccacccttgttccagcaagactgggatgggtacaactgaactggggtcttcctttactacccccttctacactcagctcccagacacagggtaggaggggggactgctggctactgcagagacccttggctatttgagtaacctaggattagtgagaaggggcagaaggagatacaactccactgcaagtggaggtttctttctacaagagttttctgcccaaggccacagccatcccactctctgcttccttgagattcaaaccaaaggctgtttttctatgtttaaagaaaaaaaaaagtaaaaaccaaacacaacacctcacaagttgtaactcttggtccttctctctctccttttctcttcccttccttccccttccatctttctttccacatgtcctttccttattggctcttttacctcctacttttctcactccctatcagggatattttggggggggatggtaaagggtgggctaaggaacagaccctgggattagggccttaagggctctgagaggagtctaccttgccttcttatgggaagggagaccctaaaaaactttctcctctttgtcctcctttttctcccccactctgaggtttccccaagagaaccagattggcagggagaagcattgtggggcaattgttcctccttgacaatgtagcaataaatagatgctgccaagggcagaaaatggggaggttagctcagagcagagtagtctctagagaaaggaagaatcctcaacggcaccctggggtgctagctcctttttagaatgtcagcagagctgagattaatatctgggcttttcctgaactattctggttattgagcccttcctgttagacctaccgcctcccacctcttctgtgtctgctgtgtatttggtgacacttcataaggactagtcccttctggggtatcagagccttagggtgcccccatccccttccccagtcaactgtggcacctgtaacctcccggaacatgaaggactatgctctgaggctatactctgtgcccatgagagcagagactggaagggcaagaccaggtgctaaggaggggagagggggcatcctgtctctctccagaccatcactgcactttaaccagggtcttaggtacaaaatcctacttttcagagccttccagctctggaacctcaaacatcctcatgctctctcccagctccttttgcataaaaaaaaaagtaaagaaaaagaaaaaaaaatacacacacactgaaacccacatggagaaaagaggtgtttccttttatattgctattcaaaatcaataccaccaacaaaatatttctaagtagacacttttccagacctttgtttttttgtgtcagtgtccaagctgcagataggattttgtaatacttctggcagcttctttccttgtgtacataatatatatatatacatatatatatatatttttaatcagaagttatgaagaacaaaaagaaaaaataaacacagaagcaagtgcaataccacctctcttctccctctctcctagggtttcctttgtagcctatgtttggtgtctcttttgacctttaccccttcacctcctcctctcttcttctgattcccctcccccccttttttaaagagtttttctcctttctcaaggggagttaaactagcttttgagacttattgcaaagcattttgtatatgtaatatattgtaagtaaatatttgtgtaacggagatatactactgtaagttttgtactgtactggctgaaagtctgttataaataaacatgagtaatttaacacctctggt

SEQ ID NO: 252351 - DNA, 1445 bp, Homo sapiens
  misc_feature (587)..(587): n is a, c, g, or t
  misc_feature (1079)..(1079): n is a, c, g, or t
ggagaaggggtggggcagggtatcgctgactcagcagcttccaggttgctctgatgatatattaaggctcctgaatcctaagagaatgttggtgaagatcttaacaccacgccttgagcaagtcgcaagagcgggaggacacagaccaggaaccgagaagggacaagcacatggaagccagcccagcatccgggcccagacacttgatggatccacacatattcacttccaactttaacaatggcattggaaggcataagacctacctgtgctacgaagtggagcgcctggacaatggcacctcggtcaagatggaccagcacaggggctttctacacaaccaggctaagaatcttctctgtggcttttacggccgccatgcggagctgcgcttcttggacctggttccttctttgcagttggacccggcccagatctacagggtcacttggttcatctcctggagcccctgcttctcctggggctgtgccggggaagtgcgtgcgttccttcaggagaacacacacgtgagactgcgtatcttcgctgcccgcatctatgattacgaccccctatataaggaggcnctgcaaatgctgcgggatgctggggcccaagtctccatcatgacctacgatgaatttaagcactgctgggacacctttgtggaccaccagggatgtcccttccagccctgggatggactagatgagcacagccaagccctgagtgggaggctgcgggccattctccagaatcagggaaactgaaggatgggcctcagtctctaaggaaggcagagacctgggttgagcagcagaataaaagatcttcttccaagaaatgcaaacagaccgttcaccaccatctccagctgctcacagacgccagcaaagcagtatgctcccgatcaagtagatttttaaaaaatcagagtgggccgggcgcggtggctcacgcctgtaatcccagcactttggaggccaaggcgggtggatcacgaggtcaggagatcgagaccatcctggctaacacggtgaaaccctgtctctactaaaaatacaaaaaattagccaggngtggtggcgggcgcctgtagtcccagctactctggaggctgaggcaggagagtagcgtgaacccgggaggcagagcttgcggtgagccgagattgcgctactgcactccagcctgggcgacagtaccagactccatctcaaaaaaaaaaaaaaccagactgaattaattttaactgaaaatttctcttatgttccaagtacacaatagtaagattatgctcaatattctcagaataattttcaatgtattaatgaaatgaaatgataatttggcttcatatctagactaacacaaaattaagaatcttccataattgcttttgctcagtaactgtgtcatgaattgcaagagtttccacaaacact

SEQ ID NO: 252352 - DNA, 645 bp, Homo sapiens
gtgatccacctgcctcggtctcccaaagttctgggttcacagacgtgagccaccatgcccacgtagaatgaagtttcttaaatacactagttaattattgaaacatatgcagtattgagtgctcctacacaaacacgctcagcctctgcccccagtgtgctctgtgctatccacagccttagtagaacatgaggctttttgtcatttcaccagtcattcaataatgactcatttgagtatggatcatgcactagctaaataaccagttgcgctcatgtaccctgaagcaaattgtttagcctgacccatgtgtaagaagatcacagagattcccaacctttcagtgtcaaaaagcctttccatatatattactttaaaacccattttcccccatgtgtaatagtctatgttaatgacggttcgggtttcttctacattgtttgtgacctgagaaagtttaaaagagcctcagtttctttcatctataaaaataaaagagatagaaggacagtttacctaaggaataaatctggtaacatgtaaagtactgaaataggctgggtgcagtggctcatgcttataatcctaatactttgggaggccaaggcaggaggatcccttttaggccaagagttcaataaatag

SEQ ID NO: 252353 - DNA, 354 bp, Homo sapiens
tgtgtagtatcttttattcttttccatataaagtctttactagaaaagtcagcaaatataataaatttatacagagttcccgggtttggtttaactggttccaagctactgtatttcaaattgtatttccaaacttttaccacattttgaatgaataaatgagaaagcttgccaatatttccagtaaactgcattgtgttacttttataaaggacgacttttgccttctatttgtatgtttgctgtttggaaaaatttttattttattatgatgaaaaaagctatccatgaagtaaataagtggactaaaatctttttcttaccctcataataaaattacttattttaaatcta

SEQ ID NO: 252354 - DNA, 570 bp, Homo sapiens
  misc_feature (145)..(145): n is a, c, g, or t
gaaagaactacagagggacgatgtccaaacaaaaaatggcatcacctgtcaaaaatggagttccacttctccccgcagacctagataaagaaatgggggctcagagcagtcaagaacatgccccaagttattcgtcagtgaggcngaaattgtggtgtccttgtgtttgttcacatattgtcattacataccagagcacaccttcatttaaaacacatcaagactccgtgaaatgtcaattgctccaagtggaagacttacctgaaatgctatgagatagcacaatgcagccagctcagaaagagctcgccattgaacattattaccatgctgacccatcttcaagagcagagaaccagcatgcatgtagaaatgtcctttcatttctaagaaagtagctgacagttcatcatttccacccaaagaagatttcgcagactgaagagcactatcaaaactgtaatatgaaaatatcaaacagatgatacacacttactgcactgtgaataatcatggttcatttaattcaaaacaaaataaaaattttatttcaagcttcaaaaaacacat

SEQ ID NO: 252355 - DNA, 779 bp, Homo sapiens
ctgcagtgagccgagatcacgccactgcactccagcctggcaacagagagagacttggtctcaaaaaaaataaaaaaataaaaaataagaaaaggttttatgttttcaaagattaatagatatactgttacatatacacaatacagtcataaatgttatatacatgtgtttcaattaacatgttaaactgcaatcatattcttctatcataggctataaagccattgccctacatctacttattaggattttgtccaagtaacacatctttttgaatcaagtttacccatcatacgagattacatctttatcatgttcccaaaaatggcagagtaaaaagatcaaactcttcaaatttgtctacaaacaaatcatggcaatgcaggctttcgacaagagtgcactcaacatccctgtttcaccagcctcaccagtattgtgtatgcttagttattttccactgtatcaaattgactatttcatttcaactttaattccacaggtttgttcacatattgtcattacataccagagcacaccttcatttaaaacacatcaagactccgtgaaatgtcaattgctccaagtggaagacttacctgaaatgctatgagatagcacaatgcagccagctcagaaagagctcgccattgaacattattaccatgctgacccatcttcaagagcagagaaccagcatgcatgtagaaatgtcctttcatttctaagaaagtagctgacagttcatcatttccacccaaagaagatttcgcagactg

SEQ ID NO: 252356 - DNA, 303 bp, Homo sapiens
tgcttattcgaagtaacaacactgatctttttacaacttttgaatcctgtgtatatatttaattatttgtctttatatttcagttcttgattagtgattcgaatatataatatttttaaaagttggaattggaagaatctgtgatgtggagggggaaaaataatatatcacaaagtcttacgtattatgttacttggatttacgtggaataaacttactaatttcctttaaatcacatttcaggccaagtgcggtggctcacacctgtagtagtctcagcagtttgggaggccgaggctggta

SEQ ID NO: 252357 - DNA, 435 bp, Homo sapiens
tgcaatttgtggactttactctgtgatttcaacaggactgtaaaatatatttgagaaaattggggacatttgaacacggactgcgtaataggtgaaataatagaattaatgttaattttgtcaggtatgataatggaatggtgggtttgtggtttttaaaaatgctcatctgttcgatttatatactactgacttaattatggataaaacaatatgacatcaaaaaaggtgaataatagataaagcaagatggacaactggggctggacctgtgcttggtgggtccttggtgtacctggtgggtcctgagcaccaccccggtggttctaggtgtgccctgtcaaattcctgaaaactcctcttataaatgtgcaaatatttataatcagttttttttttttaataaaaagagtctaacattctatggcgacatta

SEQ ID NO: 252358 - DNA, 535 bp, Homo sapiens
cttcagacaaccaacggcctatcaagtagtgtcatttatggagaaaaaaaaatgttgaaaaatgtaaaggatgagggtgaagataatttgatagcatgaaaaatattagcctccctttcttattttaaagattgtatacttaaagtagtggccatttcactatattaaaatatttcttgcttaaattctgtgaagaagctttgatgtaaacatctttgcaattagaaattaaagccaaaaataggggagcaaatataaaggaatcggtcagagcaaaacaaaatgaaaaaaaccaaaaagtgttgaaaacataattactagttataactttaatggagatttttaaattatgaaagttgagttggccattcttacttgctaggacagaaactgctggggaaagaaactggattctcaatttcagacaccatcatatgttatagaaaatgttattcttttgttctaatggaaactttattatgatttccagggatgctaaatatgcacacatcagttcctgcagataggaacagat

SEQ ID NO: 252359 - DNA, 379 bp, Homo sapiens
acggatgtgtccgtggcaccggctgtctctgaggatgtggcctgagaaccctcgggtcaccaagccaagagctgagttggcaggagttcctacaatcacagaggctaggcctccatgtggcataaagaagagcattgtcttggcaacctaagagatgattcaatgaataaggctggtagcaagactgcttattattacctgacctcagttgattcggtgcccaagcagtgaaatataggcaattcatggaattcctttctttctttcacactaattatacaacacaaaccatacaagtctgttaccagtggtatttacaaatgaatgtcttgtagagcaaatttcacattaacatttttttctgcattgaaaaaccatc

SEQ ID NO: 252360 - DNA, 537 bp, Homo sapiens
ctgctcccctccccaagaaaaggcacgcccttgagagtcttactccaacccccaataaaaaacaccccccaataaaatatccgtgtagatttttaaccaccaaccccagctgactaccccgtttagacgatgttgaggacagaagccagactttggaatcaccttttccccctcttgtccctcactcaccttctccaaacttaccaattattaaatcctggaccaagttggcaagaggactttagatgcagtaagatttgcttattaacccagcatgcgagctgccaggctgaccctcagagcagtgccaaaagatggcagaaaggggtctcccagcccctccaccaaagctaggtgctggtgcattggaactgagtgaacagagggtctctgaagaccacttggactttctgggcagtacagcccagaaagtgatgagagcataggctctggactctggcagacctggattccagttttgtctgtgcccctccctggctacgtgaccttgaactagtcatttgaccacttggagtc

SEQ ID NO: 252361 - DNA, 424 bp, Homo sapiens
ccgagatggcaccactacactccagcctgggcaacgagcgaaactccgtctcaagaaaaaaaatcaggagagtttatgggaaaagcctcacttccgacttatcttggaaactggaagatttggtgcaaattcccttaaggccataactggctgaaactgaccatggcactggggacacggcgtggcctgcccctgccagcctgctctacgccaccacagccatgcacgagtccaactcctgcgtgggaatcggctggaatccctggagggggtctgtcttttcaccacggggagcttcagaagtaaatgccctgtccagtggggtaggatgaacggcggtgggcagggctccccctggaaacggccgtgaaaacagacggcttgttctgcaagatgctctcggtcgagagggactcaccagggg

SEQ ID NO: 252362 - DNA, 369 bp, Homo sapiens
cccagtcatagggacagagtgtgagcacctgcttccagggcggcccaatgaaggctgttttcactcaaagacacactcccatcagatgcttctgggcaggtgcatggaacagctaccaagacacagccatggggcactcactacgtggctcttcgggaaggcagtttggccccatcaagcacaattcaggaagaacaagtacattaacgacagcattgcacaagaggagaaataacctaagtgtccatcaagaggggactggttggaaaaaagaaacacagtggaattctacacaaccatttaaaagggtaaggcagatcttcatatacttgcaaatatgcccattaaatactgttatgtaaaaataaa

SEQ ID NO: 252363 - DNA, 331 bp, Homo sapiens
ctgagagtgcggcatcacgaaagccaaattaggagaaagtttcaaaaggaaagaatagccaaagcatcaaagggactagagccatcacaggaggggattgaagagtggccataggagatggtgattctgtcattagcaatctcagagctggatcactggactgtcagatggaatctgttggaatgttgtagtggctttaggagttagaaaaagctgacgaagcttggctgaaaaaggaaaggaagacatgtctttcaattacctatgaaatatttccttgccttttttttcaactttatgtacatctttattaaagtaaaaattcagaaaa

SEQ ID NO: 252364 - DNA, 527 bp, Homo sapiens
tctcctaagtttattaaatgacactctaataatgtagaatgaatgcaaatgtggaatgaatgcatttatttatttctaggtttccctctgtgtgagttgactgttgaggtttcagtcctaaaatgcagtgaactccctatcatcagctttgtggcctctgctgtcaccctgtctccctagccccaactcctgcacactgttttagtttgtgactttaacatcagatgtaatttctttcaagatcttctttttgttattttatttgtttgcttatacatatataaacaatacatacatgtgtaaataaaataaatgaagtcataaaccaaaatatgaatgtattaatgcataatgtttatttgggaatgtgcttatttctttcatttgcttagtgcattttctacatgtattattttttaaaaatcaaaatattttttaaagagagggatgtttagttttttgtttgtttgtttttggagacagggtctcactctgtcactcaggctggagtgcagtggcacaatcat

SEQ ID NO: 252365 - DNA, 364 bp, Homo sapiens
agagtcatgtttccaaaagccctgacaaatggagccagggaagtccatgaagagagggattttacgcactacctcaaagacccagaagaaaccacgccagcttgcacaaacactattcgcaaccttacacagaaaatacttttgggacatctgcctagaagccgattgtccaaacccgaactggcagcatccttgttattaatccttgtagccaagaataattatttcaagacaattatataatctttatctgtcctttaaaaacctgtcttcctttaccttcctgaatacacacagtttactatggcatgcatattgccttcacaatgccctattcccaaataaacatcattttcttttagaa

SEQ ID NO: 252366 - DNA, 422 bp, Homo sapiens
aaaaaggggctgaggttctattcatggtgagcaagtcttttttttgtttgtttcttcaagctctaacaagggtgcctactacatggcttttcagttaactccaaaataaaatgtaacaattttttttctattcttaggctttatctacaaagaaatgaattggataatcttcataaacaaaaaactggaaaatttatcaaccagaatatgcagtagagacatattttgatgagaaatgacttaagttatgttgtaactggtagctgattaagtatagttccctgcaccccttctgggaaagaattatgttctttctaaccctgccacatagttatatgttctaaatcttccttgctggtacatctatattgatatatgtatacacatgttctttataaatctattaaatatatacagataaa

SEQ ID NO: 252367 - DNA, 832 bp, Homo sapiens
atggacacgtttatttcgacttctacgacttatcattctgataagagtttttcgtctggctcatctaaaaagacaacttggaaagctgataagaaggctggtttcaggaaacaaaaggtgatacgaaagggatggatttgacctagacctcacttatattacagaacgtattgtcgctatgtcatttccatcttcgggaggccagtctttctatcggaatccaattaaggaagaaccggaactatggtttgtgcctgcctgattgccagtgaaatatttttaactgcagaggtgttggaacaggcgatggatatgatctaaaagtccaaatagtaatgaagaaaaagattgtcttttcctgtacttccttaaacagttgtcgggtatttcatgacactgaaacagacagggtaataattgatgtgttcaactgtccacctctgtatgatgatgtgaaagtgcaagcttcctcttcggattttcctaaatactatcacaactacccttttttcttctggtttaacacatctttaatacaaaataacaagctttatctacaaagaaatgaattggataatcttcataaacaaaaaactggaaaatttatcaaccagaatatgcagtagagacatattttgatgagaaatgacttaagttatgttgtaactggtagctgattaagtatagttccctgcaccccttctgggaaagaattatgttctttctaaccctgccacatagttatatgttctaaatcttccttgctggtacatctatattgatatatgtatacacatgttctttataaatctattaaatatatacagataaa

SEQ ID NO: 252368 - DNA, 796 bp, Homo sapiens
gaataggaacagctccggtctacagctcccagcgtgagcgacgcagaagacgggtgatttctgcatttccatctgaggaagaaccggaactatggtttgtgcctgcctgattgccagtgaaatatttttaactgcagaggaaagattgtactattttggagaacggcgaacagataaaaccaatggcactaaatatcagggagtagaaactccttctcagaatagatatgttggatattttgcacaagtgaaacatagctacaactggaatctccctccaagaaaaacactgtttataaaaagattagttatttattcgattcatggtgttggaacaggcgatggatatgatctaaaagtccaaatagtaatgaagaaaaagattgtcttttcctgtacttccttaaacagttgtcgggtatttcatgacactgaaacagacagggtaataattgatgtgttcaactgtccacctctgtatgatgatgtgaaagtgcaagcttcctcttcggctttatctacaaagaaatgaattggataatcttcataaacaaaaaactggaaaatttatcaaccagaatatgcagtagagacatattttgatgagaaatgacttaagttatgttgtaactggtagctgattaagtatagttccctgcaccccttctgggaaagaattatgttctttctaaccctgccacatagttatatgttctaaatcttccttgctggtacatctatattgatatatgtatacacatgttctttataaatctattaaatatatacagataaa

SEQ ID NO: 252369 - DNA, 640 bp, Homo sapiens
cagtgttgtcctgctctcagtccaggtttgggaaaatgcctgcagcttttccttgtgtcctttcctcacaaagtctccaagtctctcgttaaattagctccaggacttgggagaaacagtgcccctcctcggtccgggttgcttggatccccagtggaaaggaagaaccggaactatggtttgtgcctgcctgattgccagtgaaatatttttaactgcagaggtgttggaacaggcgatggatatgatctaaaagtccaaatagtaatgaagaaaaagattgtcttttcctgtacttccttaaacagttgtcgggtatttcatgacactgaaacagacagggtaataattgatgtgttcaactgtccacctctgtatgatgatgtgaaagtgcaagcttcctcttcggtgagtaatcaagaaacggcctctgccactgttcttatctgaacttttgaatggttttatttaaggtttcctttactacagttcccaacaagggagatgatagatgtcatcccatagagggagggggagaaaataaatcagatctataacaatttttttaaaagaacatatgtaatttgaataatttttgttcatttgttttttctaaattgtacattttctaaatttttct

SEQ ID NO: 252370 - DNA, 277 bp, Homo sapiens
cattacatgttattgtgtttataaaatacttatcacaatgcatggcacatagtgagtcttaaatgaaaagagggtgttattaagtgtctgaggcgaaggaagactattgacactaatggcaaccctaaattcttcagaaataacaataatttcttgtgtgactggctgatattttatacccaattatgatgcaagacagtagtgattatgcacaccatttaatgtgctcaaaattaattttgtttcatgtggttaaaacaaaattcacaaaagatgt

SEQ ID NO: 252371 - DNA, 310 bp, Homo sapiens
ctcgagttataaaaataatatcaaagattagggcttaaaaatgaggtcttcaaatatcagatatttttgttatcgcatacatgttggagaaactgtggtaagttaaatatcagtcccttccctttggtttcaaattctaaatttcctactttttctttctctctctcaggttaactcttgttatttgaaccgaaggaaagaaagcaaacttcaaaatattgttgcttctgatattttctgccttgtgagcaaaatagagcagatgagcaaatggtccgttaaataaagcaaatagtccatcaaactaagc

SEQ ID NO: 252372 - DNA, 537 bp, Homo sapiens
tggtgagccagccaggagtgaagacgacaggtttgctgtctcctttgcctgtgggtctggggccccagcctgggggagacccgtgactccaggcatgctatcaggacaacttcaacccgaggggagatcagctctcccgcaacctggtgccgctctctgacagcacaacagaacctaaggggctacaggatgattcaaggaacagtgtgctacaggacctcgcaagaagaccctcaccagatgcagcccctctatgttggacttcccagcctccggaagttagaaatgtgctacaaccactcaaggtctgcaaacagattcctatttagatgttgttgagagctgaatttctggaacaagagatatagattaagactgttgttacatgttgcctacatgactttcaaaagcttgattcccagtggcgctctcaacagcagtcataaacaatggtaattcaatgtatatttatattcaactgatatattaattggaatatattaaaaatacgtatatttatattcagaatatttatat

SEQ ID NO: 252373 - DNA, 484 bp, Homo sapiens
tggtgagccagccaggagtgaagacgacaggtttgctgtctcctttgcctgtgggtctggggccccagcctgggggagacccgtgactccaggcatgctatcaggacaacttcaacccgaggggagatcagctctcccgcaacctggtgccgctctctgacagcacaacagaacctaaggggctacaggatgattcaaggaacagtgtgctacaggacctcgtttcgctcttgttgcccgggctggagtgcaatggcgcggtctcggctcaccgcaacctctgcctcccaggttcaagcaattctcctgcctcagcctcccgagtagctgggactacaggcatgcagcaccactcccggctaattttgtatttttagtagagatggggtttctccatgttgaggctggtctcaaactcctgacctcaggtcatccgcccgcctcggcctcccaaagtgctgggattacaggcgtgagccaccgc

SEQ ID NO: 252374 - DNA, 802 bp, Homo sapiens
cagcctcgcagcactgctcttctgcttgctactccagcgaagggacatgcctgctggccaggacgcttagtgggcctcgtaacctggcgagtgtgtgcccgcgcgtgtccaccctgcccccggccggtgcgccccgcgcgcccaaacccggccggcgaccactgcgcgccgggcgcttccaaactgctcctgtccagaggcatccctctttcggctttctccatcccgcgtccgcttccgcacccgagagcgacaagcaaaaaagattcagtgcaactcaaggactggtttgttatactcaaaatgtaccaggaacaggaacaaaagtattttataaaataattaatttttatgggctatgagtcccaaatggttatgtaatcaaagtggaagcagaaaagcatggcttagaaaataattggtcatgtcatgtcacgcttaacacatgtgcagactctgccctccaggttgcagtgcgatggtgtgatcaatgctcatagtagcttcaaactcccaggatcaagtgatcctcctaaataaacctcctgagtagctgggactacagcttccaccatgggatgatacagcatgaaggccctcaccagatatgcaccccttgattttggacttcccagactccagaactatctctgtggttactctgtgaattggtctgtacaggcccacttgagtacagatgagccatttcagctaagcctacaagacacttccagctaaacctagcccaaattgccaacttgcagaattgtaagctaaataaatgactgtaagccgttaagtt

SEQ ID NO: 252375 - DNA, 524 bp, Homo sapiens
cagcctcgcagcactgctcttctgcttgctactccagcgaagggacatgcctgctggccaggacgcttagtgggcctcgtaacctggcgagtgtgtgcccgcgcgtgtccaccctgcccccggccggtgcgccccgcgcgcccaaacccggccggcgaccactgcgcgccgggcgcttccaaactgctcctgtccagaggcatccctctttcggctttctccatcccgcgtccgcttccgcacccgagagcgacaagcaaaaaagattcagtgcaactcaaggactgcttccaccatgggatgatacagcatgaaggccctcaccagatatgcaccccttgattttggacttcccagactccagaactatctctgtggttactctgtgaattggtctgtacaggcccacttgagtacagatgagccatttcagctaagcctacaagacacttccagctaaacctagcccaaattgccaacttgcagaattgtaagctaaataaatgactgtaagccgttaagtt

SEQ ID NO: 252376 - DNA, 385 bp, Homo sapiens
atgcttggctaatttttgtattttagtagagacggggtttcaccatgttggccacactgttctcaaactcctgacctcaagtgatctgcctgcctcagcctccgaaagtgctgagatgacagacgtgagccaccacacccagccctattctcaattttattcccagactctgccctccaggttgcagtgcgatggtgtgatcaatgctcatagtagcttcaaactcccaggatcaagtgatcctcctaaataaacctcctgagtagctgggactacagcttccaccatgggatgatacagcatgaaggccctcaccagatatgcaccccttgattttggacttcccagactccagaactgtaagaaataaatctctgttctttat

SEQ ID NO: 252377 - DNA, 460 bp, Homo sapiens
aaatgcagactctggtgcagtaggtcctggcgggaacttgaaattctgcattttgaccaaggtccaaggtgaatgtccagtgctgttgtccttggcctgcagcaggaggagcagggatctaagacttggagagcaaatgtcaagctcagaagaaagactggaagtttggggacaaaacccaaatatggctaaagaaagcctgtaggtaagctttgagttgtattttccatcgcatctgaagctgtgctggccaacatggtagtcactggccctgtgtggctatgggctagtcctaatggacatgtgctctaacatgtaaaatacacactggattttcaatacttggtaccaagaaaataatgtaaaatatctcaatactttaaaaacattattgcatgttgaaataatattttagatatattgggctaaataaaatatacccatattactgaaattaaca

SEQ ID NO: 252378 - DNA, 354 bp, Homo sapiens
tcatttttttccctccctcttccatctagctctcccctccatggcccatctcatccacctctgccatctccatgtccaagttcaggggcagcagtggtatgtgatgttggcagcagtgcccaaacatcagcaatcagtctactgctgtcccagcaccaagccaggggctgtgaagggtgaaggtgaaggctctttgggtcatctgacccttgtctccactcaaaatgagacaccagggtgttctccacccacatacattcaggattgctgtctccagtctctatttgagacatcagagatgtcatcatttccatatgcttctcctaataaagtaacatccatttaaaggcaaaa

SEQ ID NO: 252379 - DNA, 369 bp, Homo sapiens
ggacatgacataatttatttaaccagtctaatgttgatgtacattgttgttccttatttcttaccattgcagtaattttactgtagttaacatttggatttatttttcatagaatgaattctcacaagtccaatcgctgtgtcaaagcatatggccttttaaaaggctttggtagcctgttgcctaattgtcttccgaaaagattccccacatcctggtcaattcttcagcatatacacggccatctctatattaagacactttatattaagatttgtaaacctgttgactactgtcacaggccaccaccactctgggcatcttcaggtcatgctacatgttcaccagtccttccagcagtgggcagtg

SEQ ID NO: 252380 - DNA, 294 bp, Homo sapiens
acatattttactagttttcttgcttgggatccaaaagtgaatgaattttagaggcaggtggaattatgtctatataattagtggcagtaattaacttttgacacaatgcgactatttctcattctcaaagagacttaagtatgaattttcctcagaacttcttccgcaagatacatatttgtgactgtctttattttcgacaatgcctctaatggtgagcaagctggtttagatgaaacgtgctgcaatgtctttaagaggcagaataaatacacaacgacaattttaaaatca

SEQ ID NO: 252381 - DNA, 357 bp, Homo sapiens
gttttatgtattacaaaaccacataaacagtgcttcttggtctgtaggcccacctgtgcagtggacttctggatttctctgtgtgctctgaggaagggatccaagtggccattgttgacaggccattggcctgtgttgacagcttgtttctgttatgcctttgctcagtatagtcttgctggtggtagcgacaggcgggaagtgaaagaccactgagtgcctcttaaatcagttgtcattttggcagattcaatctaaaccaaggatgacttccatatgcaatggctgtgcaggatgttttggcccaagcaaataatacttaatcagcagtgtggttcatcttattactctaaggag

SEQ ID NO: 252382 - DNA, 499 bp, Homo sapiens
tcatgtacatattaggttaagtggcatgtttcttttattaatttttaggttcataacaaatttatgtgctctgttttcactccggtagctaggaaataaaaatggtttgaatctgatttggtttcccccttactcactatagtgcattggcaccacaccctgctgagctccagctttactctcccatctttttattcctgttcccaggcagaatgctgtctgcacagtgcaagttctgtcccctgcactcacacagagcatgggatgaccacaaggccaggtgctgagaatacatctcaggcttgcctttgtaactgtgctgctgagaggacatgtatttgtgttcatcaggcagaaagggaggaaggctaccacttaaggaaagcctacaatagctttctctttgtgtgtgtgataaggagcatttgggataaatacacagcaggtctttgaattacatcgtttcattcaatatcatttctttctaacaccgatgaga

SEQ ID NO: 252383 - DNA, 431 bp, Homo sapiens
gatgtaaaccttgacattctgtgcacgtaaaaatcatgtgctcaatgtgtttgtctcaactccctcagctcgtgatgccctcagggttctgtgggcatttatgcactgaagaaacaggagttcacacatccacctctggactgtgaaatgtgtattgagaaatactttgcaagagagaatttttttaagtgaacaaacaacaagtctgtgccacacacatcttccatatgccctgactcaggtcacttaatctccaggatttcatttcctcacctggaaaatatggagtttgaggtagattctcatctatcattaaatcaacactttaactaaaacgtaagctccttcagggcagagaccgtatcttcagtatcaaaaacaatgtttgacacatagctgctcaataaacatctgtccaatgaaggtttatt

SEQ ID NO: 252384 - DNA, 443 bp, Homo sapiens
gttgtacaggttatttagtataaaatgaaaaaggaaaaacaaaaagtaggtagaggtttttccatcttctgtttttgaccctttcctccttcttggaagcgtttagtattttttctccttttcttttttttttttttctttagagttcataccatttttattccttaccgatattttagtgggggttggagaagaagaattggagttaaacctatgttcagtgggccatgtttatctggaaatttgttatttttgtctttccaaataattcatcatgtgtttgtttttagttaagccttacagttacatgtcgagatttgagaaaagtcctatcaatacttcagttagcctgagtaactgagtaatagaggccgcccatatgctatgcatccagtcattgctttacatttagttttggttctctgaaatgctttggctaataa

SEQ ID NO: 252385 - DNA, 360 bp, Homo sapiens
gagagggagtctcactctgtcacccaggctggagtgcaatggtgcaatctcagctcactgcaacttcagcctcccggatccaagcgattcttgtgcctcagcctcccaagtagctgggattacagtcacttaccaccacgcctggctaatttttttgtatttttagtagagatggggtttcgtcacgttggccaggctggtcttgaactcctgacctcaggtgatccacccatcttggcctcccagagtgctgggattacaggcatgagccactgcgtccggctgtgcttttgagttctcatccaaaaaaatctttccccagatcgatgtcatgaagtatttcccttatgtttttttttc

SEQ ID NO: 252386 - DNA, 576 bp, Homo sapiens
tcctttaaataattgaactgttacaggaaacattgttaaaatcttaaggttagggcatgctttcatttttttttgtctaaagattactctgcaccctagacaaaggaaatatttaaactgttaaatttgaacaaagatacagtctgcatatgacttctctgaagccctataaaaattctttaaaattgcctattcactcaaatttactgagtgtagcaaaaatgtcaaaggcataaagtcagagaagattgaataaaataatgcagaaagacagattagtcatgcacagacccacacagcctttcagagcacacaataccgctctttattaccgttctatctttacaaagactacgttcaatacatagaagatgatacatggccagccatgtcatctgcctgtgattccagaactcatctatctgggcccttttcacaatgacattgatgagagatcgcagtgttttcagagcattgttttatttatcatatataatggctggtgaaagaaataggaattatgtcaccgatagcacataaaagagttgcatagaagattctgtgacaaagtttggt

SEQ ID NO: 252387 - DNA, 648 bp, Homo sapiens
agccatttcggctagcaattaatcagttcaagtctggatgccaattttatttatttatttttaatgtgaggcatcccatcttttccaaaccctaagaaacaatgcctaatcaagcaccaatttaccacacataatgccctacaaaaaagctgacaaaattataatcagttcattctctgactatgcttcacgcatattagcaaggaatgacatctaacaagtcacaacttagtgatgaaaacttgctggaccagagaacagctccagggaaagcggcagggagaggtggtcaaagggaaacaaggaggagaatatcggcacccggatccggctagacaagctggatggcaggaaacgggtaggtacttcccaggccaggtaggaactggacgccgggtcgaggtaggctgtgtttacaccccctcccacctcagcggccccgaccttcaggaaaccccgggggtctccaccaggctggtcgcgcccctccaatgctagtcagctggggctcaggggcaaggcgagaagaagccgttgctgctgacaggctcgcagcccagggcttcggcaggcaggtaccaccagcagaccccacccgcccctcacgcctacccctgggtcggagctcgcaggcctcacggcggccgc

SEQ ID NO: 252388 - DNA, 425 bp, Homo sapiens
actcacccatgcagacatcgcagagcgactgcaagggcttcaggagctgtggagggtggggcctaggggaatcagctctgaggtcagagcagactttcgttccatgccctgagggattctggaggttattctgcaacctgtcactcaccgtagagtgtgctgcgaagcatttggggatctgcaggccccacccccagtagtgcctcactttccttagtctgcttgtccagggctgtgggtctagggggaagcagcagtaggttcttcatcttgagccaccatgagctcctcacctccaggatcccgaggagctctgttttgatccagctggccctaaaaggctgcaaaactaattgggaaaaaaaatacagggacttttggcctccagaattgtaagagaataaatctctgttgttttaagcaaa

SEQ ID NO: 252389 - DNA, 425 bp, Homo sapiens
cgggcatgggtttggatgccatcaatgatgctatgcttctggaagtatgtatctaccacctgctgaagctctattcctggagcagccctattacctggacctaatcgagctcttcctgcagagttcctatcagactgagattgggtagaccctggacctcatcacagccccccagggcaatgtggatcttggcagattcactgaaaagaggtacaaatctatcgtcaagtacaaggcagctttctactcctaccttcctgtagctgcagccatgtacagcaggaattgatggcgacaaggagcatgctaatggcaagaagatcctgctggagatgggagagttctttcagattcaggatgattaccttgacctctttggggaccccagtgtgaccagcaaagttggcactgacatccaggacaac

SEQ ID NO: 252390 - DNA, 463 bp, Homo sapiens
ttgacttagatttttcagctttacagtgatatgaaagggatatgaattcagtagaaaccatacttcaaattttgaattttcatctttttctgggcttgtgatgtactctttcatgatgctgagcgatgtcagtgagctacagctcccagtagctcccagtcagccacgtgatcatgaggttaaaccaatactgtacagtgtattgtacagttgattgccatatgatgttgcccaaccataggctaatgtcagtgttctgagcacatttgaggtaggcttggctgaggtaaaatatttgctaggttaagtatatcgcatgcatttttgacttaatggtattttgaatttacagtgggtttatcaggatgtaacaccatcgttagttgaggaacatctgtatttcaagatacattatattttaaataggcttttggcattaccctagttttgtagccaatttagg

SEQ ID NO: 252391 - DNA, 467 bp, Homo sapiens
ttgttctttgttttctttaaaacagttcctagaatttgatgcttctggtcttccaaccagcaattaattgggaaccaccatattgtaagataaactctagactttttagcctgacattcaagggtgccttacaatcagacttaatttatcatttgtcatctttcgctcatgcaggtgtcttgctctctgactacattgagctataaatataccaaccctttctttgttttattcctttaccctagaatgctttttttttgcctaatagtatttgatttttcactttaagcccaaatccggtttttgctactcccttctcccctgtaaagccccaccagtgtctatatttctactctcatagcaacatgacttgtttagcatttgtcttattatatatgctttttatatcatattcatttgttaatatgtaacttatatacaataaaatttaccaatcaagcatacaa

SEQ ID NO: 252392 - DNA, 474 bp, Homo sapiens
atgagtttatcctctttgctagacttctgttaagataaactaaatgctgtaagaaagtttcctgtcatcacccttgttaaggttcttgctattgtaataactttctgaacagtctacccttctcttaccttgtccacactccagttcctcctccctgccactgccagattgactttcatgaagtacagttttgattgtgtcattagtccacatactacatctccgtctctgctttggtgaattagaaactcagagctgactctatcctttactgttaataattgtgcaggatcttctttaaaaatttttgtacacaacctactcctgatgtcatttgactatcttattattattttaaccattcatcttggactctttacatatttttattctattacattgtatttttgttagttgcctcaaattccttttgaaatgtggagaggtgaaaataaacagatgcagaaataaata

SEQ ID NO: 252393 - DNA, 1558 bp, Homo sapiens
gtcttacaataaaaacaaaaataaatttcctgaaccggtataaaacaacatataagccatcccagagcaacttgtgttttccaaaaaaaagaaagaaagaaacaacatcaaactagattcctttcatctatgattgacacattaaatgtttacgcatgaagagaatctggaattttacccttcattagaagttattgttaaatgttgaaaggaatcaaccactttttataactgactctgtgatcaataatgctaaaaaagagacagagaaatgatttaatcaatgactgtcactcatgactcagacataacttcgtgtatttccagaagttaaaaaatttaaatcaattctgaactaattttgtttcaagaaattcttgttgctctttaagagaatacgaggcatactggttcccaaagccaagacttgggaatcactgatttgggagtatgacttaccaccacatgctgatccatacatggtgggcccaataaatgtttcaaggcaaaggagtaatcatcccgctaaggaaaagaccagcttccctgagccctatttcacatggagcaggccaagaataaggttacgtttattataaccaaaattgactatgttttctgccatccctttaccaaaaattatatccaaattaacactacataccatataacaaatttcttcccaaaaatcacgtagctctatcaaatacttaatactgctagtaaatctcatatattcatgcttttaaatcaaataagggtactatggtctgaacactttcagaattaagccatgtatgaactgaagtcttacatacacatgcatacatctgtaaagtaatgagagctacacgtaagcaggagccaattattcacagatggtcacatttttcctcagatggtcaaataaggcttattgagactctttcaagatcaaaatgttagactgtgggaatgaaagctccaagaaatgcaaatactatgtctgaacacagctaagcaggaaaatacaattaatgcaacagaaatacttgaaagtcacaggctttgaggactttacattgcaatgttcaaactgagcttctccttagcctgttaccttactttcaattatgtctagcagtccccagtccttcagaacttaacagccactggagagagagagagagagagagagtgtgtgtgtgtgtgtgtgtgtgtgtgtgtgtatatgtgtatgagagacagagacagaggcagtgagagacagacagatgagagagggagagagggaaatgaatagccaaacacatggaaaactgtccttcttgaaattggcacactggacctttcaagtacaaagaaaaatttgaacgttgcagcttaaaattcagttaagagaattaaaaagcaagtcataaatgccacatttttcctcaataaaaagttttgactactgtgtttatctgttgtcttgagtaacttattcatgaagctctcctattcttccccaagaccattttgaagaaagaaaatacaggttgttcttggggaagataggagagtcctccgtcgaact

SEQ ID NO: 252394 - DNA, 1504 bp, Homo sapiens
gtcttacaataaaaacaaaaataaatttcctgaaccggtataaaacaacatataagccatcccagagcaacttgtgttttccaaaaaaaagaaagaaagaaacaacatcaaactagattcctttcatctatgattgacacattaaatgtttacgcatgaagagaatctggaattttacccttcattagaagttattgttaaatgttgaaaggaatcaaccactttttataactgactctgtgatcaataatgctaaaaaagagacagagaaatgatttaatcaatgactgtcactcatgactcagacataacttcgtgtatttccagaagttaaaaaatttaaatcaattctgaactaattttgtttcaagaaattcttgttgctctttaagagaatacgaggcatactggttcccaaagccaagacttgggaatcactgatttgggagtatgacttaccaccacatgctgatccatacatggtgggcccaataaatgtttcaaggcaaaggagtaatcatcccgctaaggaaaagaccagcttccctgagccctatttcacatggagcaggccaagaataaggttacgtttattataaccaaaattgactatgttttctgccatccctttaccaaaaattatatccaaattaacactacataccatataacaaatttcttcccaaaaatcacaaatcaaataagggtactatggtctgaacactttcagaattaagccatgtatgaactgaagtcttacatacacatgcatacatctgtaaagtaatgagagctacacgtaagcaggagccaattattcacagatggtcacatttttcctcagatggtcaaataaggcttattgagactctttcaagatcaaaatgttagactgtgggaatgaaagctccaagaaatgcaaatactatgtctgaacacagctaagcaggaaaatacaattaatgcaacagaaatacttgaaagtcacaggctttgaggactttacattgcaatgttcaaactgagcttctccttagcctgttaccttactttcaattatgtctagcagtccccagtccttcagaacttaacagccactggagagagagagagagagagagagtgtgtgtgtgtgtgtgtgtgtgtgtgtgtgtatatgtgtatgagagacagagacagaggcagtgagagacagacagatgagagagggagagagggaaatgaatagccaaacacatggaaaactgtccttcttgaaattggcacactggacctttcaagtacaaagaaaaatttgaacgttgcagcttaaaattcagttaagagaattaaaaagcaagtcataaatgccacatttttcctcaataaaaagttttgactactgtgtttatctgttgtcttgagtaacttattcatgaagctctcctattcttccccaagaccattttgaagaaagaaaatacaggttgttcttggggaagataggagagtcctccgtcgaact

SEQ ID NO: 252395 - DNA, 383 bp, Homo sapiens
gcggaatcatcatgccgtactctgtaacgtgtgcctcacatcctcagcaacacctggtgttgtgggtctttttaaggtttagatattctgagaggcgtgtggtgatttcatactgtggatttaattggtgtgtccctgatagctgatcatgttacacgtttccttgtgctgacgactggccatatctttctctcctaagtaaatgttcaattttttaaaaattatgttatctttctaatatgcagttggatgatttctctatatatcctggaaactagtgctttgttagacacatgcttttcagatattttatctttctctatggcttacctatttatgaatgatgtgttttaataaacataagttttacattttaaaaatgt

SEQ ID NO: 252396 - DNA, 571 bp, Homo sapiens
tttgttttttttctatatttttactttttgtagagacttggtctcactatgttgcccaagctgatcttgaactcctgggctcaggtgattctactgcctcggcctctcaaagtatatgcacatatttgtctccctgcatttttcttcacattactggtaacctgccatccacactgttcgctacttctttttttcatttattaatacacggtatattttgttgtccattgcccaaaaataacacatggatctgcttcattcttttcccttttttctggtcctgatttataatttaatggctgtgcagatgccagtccctcctttctgccgttcacaagcccactgctctgggatgagggttttctgctcaaaagcatggatgtgcgagagcctccagctagccacatatttacccgccagtgtgtctgaagcagcagcttcccctcaaacttggccgacaccaccaggactcggaagctgcaggcacgacggttgagggtcacgtcctccacctccatatgcttcgcctccgggtcccactgcagcttctcctggagttatttggtgctga

SEQ ID NO: 252397 - DNA, 415 bp, Homo sapiens
ccttatttattcctaggatcctcaatatgttcataggacctgtcatgtagaagtgcacagtatatacttatgaattgaatgaatgagtctcagggctggaaaatatcttagaagagcccaggtctatccccatcctataattaaatgcccttgaacagttttgagacccagtccatggactggtacccagctcatgagggtgtttttacctaaactgcagcaaaacaagactagtaagaacaatgctttttcattgttctaaatctattcaacttaaaggactttatgctaagattctgctcttcctgttttgggaagtattaaagtatcttctattacattgtggtgatgataagtggtatttaactgtttaatgtccttacttggaaaaataaaaataaaaccttggtgactt

SEQ ID NO: 252398 - DNA, 803 bp, Homo sapiens
acagcacacttggtctgtgtggtggtttgaggggttctgtctgtacactgtgctttggctgtgttggaggcgggcaggtgggaaggaagaaatgtattcttggggagatttgtttttagagacatgagacatggaaaatagttaagtaataatataatatgggaggcatggactatcagaggaggcaggcaggactgcccaacctcctcactgggcacgttacgctacttcctcctgacctctatagtcctttgcatttatcaagcactgtcatacgtgttatctcatgcaatgaccagggtgtcaccccctgttttgtaagtgacaaaactgtcactcagagggatgaaatgacatgctaaaggtcatctagttagtaatggtggaatcagggctggagcccagtcttctaagcctagttcctattctgctcttcatcatctgtctcaggatggtaaactgaggcctggaaaggagaaggaactcacccagcctaaagattaagggttttatgctggccacggtggctcatgcctcccaacattttgagaggctgaggtgggaggattgcttgagtccaggagtttgagcccagcctgggcaacatagtaagaccctgtctgggctcaaactcctggagcccagtctgtctatagccctagttcctatagctgtcttcgatcatctgtgctcgaggatggtgaaagggtggcttgggccggcgaagggaactcactccagtcctgacagataggggtcatatggctggccagcggtggcccatgcgttccacgatttcgaga

SEQ ID NO: 252399 - DNA, 788 bp, Homo sapiens
acagcacacttggtctgtgtggtggtttgaggggttctgtctgtacactgtgctttggctgtgttggaggcgggcaggtgggaaggaagaaatgtattcttggggagatttgtttttagagacatgagacatggaaaatagttaagtaataatataatatgggaggcatggactatcagaggaggcaggcaggactgcccaacctcctcactgggcacgttacgctacttcctcctgacctctatagtcctttgcatttatcaagcactgtcatacgtgttatctcatgcaatgaccagggtgtcaccccctgttttgtaagtgacaaaactgtcactcagagggatgaaatgacatgctaaaggtcatctagttagtaatggtggaatcagggctggagcccagtcttctaagcctagttcctattctgctcttcatcatctgtctcaggatggtaaactgaggcctggaaaggagaaggaactcacccagcctaaagattaagggttttatgctggccacggtggctcatgcctcccaacattttgagaggctgaggtgggaggattgcttgagtccaggagtttgagcccagcctgggcaacatagtaagaccctgtctttacaaaaaataaaaaaaaatagccaggtgtggtagcacacaccagtagtcacggctactcaggaggctgaggcgagaggatcacttgagcctgcgagatcgaggctgcagtgagccgcaacggaatcattgcgctccagcctaggacagagtgagactctgtctc

SEQ ID NO: 252400 - DNA, 462 bp, Homo sapiens
tgagaaataaatagaagaaatttaaaaacatattaatcacatcatacagaaaaaaatcagttaatattttgatttttaaacctctagactctatttatgttgatacacatatatagagtctgaatcaccacttgggctcgggtcttccatggtctgctctgcagataataggtcccaattttattggcagttgctaaaacaagaaggagttctattctcggggaatttggggaagtattattaatagattgaatattgtcaagtttattttcagtgtatgcatttgtttttttgttatcatctgaacaacaatgtagtcacattatacgtttgttatataatctgctttccctcactaattaatatatatataaataatatatttccttgtcaagaatatagatttacattataacttttatggaataagtatttaattgaattaataaactatactttctt

SEQ ID NO: 252401 - DNA, 404 bp, Homo sapiens
tgcagtgagctgacgagctcgtgccgattcggcacgagccagcctgggcgacagagtgagactgtctcaaaaaaaaaaaaaaaaaaaagaaaaagtcctttcagtgggaagtgacaaagcttgaaaaaaggttcactggggccaggcatggtggttcacgcctgtaatctagcactttggaaggcagacgcgggcagattgcttgagcccaggagttcgaaaccagcctggccaacatggcaaaaccccatccctactaaaaatacaaaagttaggccagcctggtggtgtgcacctgtgattccagctacttgggaggctgaggattgatgctcgggagaatgagtctgcagtgagtcgagattgcaccactgccctccagcctgggtgacagatatcctatc

SEQ ID NO: 252402 - DNA, 416 bp, Homo sapiens
acagtttttaatgctgttaagaaggaaataaaattggctgcaagggcgcttccaatctagttgaagcaaaaagggcgtaaatacatgaaaagatgcaaacatgatgtgaattacaacaatgcaaactaggattaattgccaaataaatgagatagataaacaagtgctcttaataggaaggaaatggcagggcgctgtggctcacgcctgtaatctcaacactttgggaggctgaggtgggtggatcacctgaggtcaggagttcaagaccagcctggccaacatggcaaaaccccgtctctactaaaaatacaaaaattagccaggggtggtggtgcaggcctataatccaagctactctgaaggctgaggcaggagaatcacttgaactggggaggcagaggttgcagtgaacc

SEQ ID NO: 252403 - DNA, 469 bp, Homo sapiens
ataaaatttctatgactttttagtccgcattcagtaattaatatcaaatgtttaaatattcaaaagaaagtaattgcctatcattattttttttaaaaaaacatttcatatttctttttggcctttcaaaatccaatgttttctactgaatttcctgacataataccccagcctcatagacacacccaacctgatagtcttcattctctcctgcccttgccctgttctagcaggttcacataaattaatctcgtctttcttttaaccctctcttcctctcatgtggtttaatatattacgtttacttttcttctgattaaatttgaaggaggaatttaccttatttttgtggcatatattccaggtttcactattagcaacttgttgctattcaataaatacatttaattaagtgtccttttcacccatttcaaacccatttaacccataaacatttatcaagtactta

SEQ ID NO: 252404 - DNA, 1115 bp, Homo sapiens
gagaaaaattagcctcatcaactgtccagcattcatccttaaagtagtcttgttatcctttactctgtagtggttttcctaaagtacccctgcatgaaaaacaggattagagtgctagagaagactagtgaaatttgaaaaggcagttcacttgtgatgtggacttgtcttagaaacgcaagactgtacagaagtgtgatgagggagacagctgggtgtgtgtgtccaggtagttccatgttggcgagtttggagatagaaagtggcctaaggaagtttacttcctgaatgtgaatgttggccactttggagatagaaagtggcctaaggaagtttgcttcctgaatgtgaaggcctcagtgtagagagatatcatccactgggagatcactgaaaagtaaaccaaaacatttttattaatacatgggatggtagaatgtcactccagttttgttcctaaagttcgtagctctctaagaaagtgaattttaagcaagttaatctattttaatgcatcactgctctttcggtgtttttctagtagaattaatgataggtagcttgctttattagcttactgcccagagagaacattggtgaaattgttttggcttcagctctctggactgagtttggctgcctagctcagttttcagttggtcaccaaaacctgtcattgtttttgtgtggtatggggtctgctggagtcatgtggtagtgcgtttggcccttcattgagtggtggagccaggagttgagctgagggctgtggcagaattttgaattcaagtgaattcgaatgtgaaaataacaatgtctggccgggcgtggtggctcacacctgtaatcccagcactttgagaggccgaggtgtgcggatcatgaggtcaggagtttgagaccagcctggccaacatggtgaaaccccatctctactaaaaaatacaaaaattaggcgggcgtggtggcgcacaagtgtaatcccagctacttgggaggctgaagcaggagaattgcttcaattccctgcttgaacccaggaggtggagatttcagtgagctgacatcgcaccattacactccagccttggcgacagagcgagactctgtctcag

SEQ ID NO: 252405 - DNA, 549 bp, Homo sapiens
atggggctctgttctctccttgccaagaccacgatgataacgcagttgtgatggccacaggactaggaaggaccatggatataggcagcaaagtctaaggaaattttcttagacagaagtctgaaactagcatggagaataaatggttaaggaaagagagagaaagagagacagcgagagagagcgagagtgagagagaaagcgagagcgagagagacagatcagagatgggacctccaaagccaggatgtagcaaggttaccagcagcagccctgtaagctctcccttgtaacccagcaactatgttgtgaggaagcccaggtcgcctggaaaagtccacatggacaggaacccaggaactcagctgacagccagcaccagctggcccacctgtatgcatgggccctcttggaagtagaccctccagccttcagtagaacccctccaactgattcaatgtgatacaaagatgaaccttccctgccaagccctgcccaaattgcaggtttgtgggcaaaataaattattgttgttgttgtaatctacta

SEQ ID NO: 252406 - DNA, 657 bp, Homo sapiens
aagttattgattcttttaatcaatgtattactggattgaattttctccttataacttacccattgtttgcagcgattgtgtttaagtcatccagaagaatagaatacctgaaattatggaaatacttgtttgtccctctcctcttgaagttgttttcccataatctggcaaaagtttatgtgcaactgctacaataggaaagcagtctatttgctgttatatttttccccttcagaaaaaagataaagcataaggtttacaatgaatcttgttaacaagggattatttatgagtatggattttacccagtaacagtgctaagatttacccaatacctggtttatacttgctatttaaatacaggcctgcagatctgaacacatttttaaattagtgtataattcatgtatcataaaatttactcatatattttaatctgtagatttgtatccaatacttcacccttttaaagtgtacagtttagtggtttttagtatattcataaaattgtgtaactatcatcactaattccagaagatctttttattttgccgctttattttaatatgagaatttgattcattctcctgataaaaattgagaaaaaaattaaaacccttttatagttaagcgtacataggttctgtgtgtttctaa

SEQ ID NO: 252407 - DNA, 454 bp, Homo sapiens
gtggaatttctcaatgagcgttgaggtcgacattcccatagtcagctgtatcttctataattcgttgtcgcatctaaatttcacttacagcattataactttttgttttcttgctgtgctttcctcattgctgacaaagtccctctttgaattatccatttttgtaaaatgtctgtggatttatcactggagacaaggaggcaaaacaagtatgctttactgtctgtgttgtgaagtgaatagcaggtgctcagtgaccagtcactgacagaccttgaaagaactgacgtgagtcactgatgatgatgcgcatgtgttattgtgtagaaatttgtgaattgaagagctagtagcaggtttgtgccttatgcaatcactcatacttaatatattgtggtagctaaagtttgaattgtgttgttgggggactggaactactcaaatcatggtaatg

SEQ ID NO: 252408 - DNA, 248 bp, Homo sapiens
gccttatcactagagaaaatactccgaaaccagagtgaggatggagaatgtgttaccagcattctcacttcgtttctctgtctagcatgcttctggcatgggctcctggcaaaataattctccttttcttcacctctctaacctgattgaattagaaccctcatgagagtttcactctcccaggataccaaatcaataatcattttccttgaaattcttctgctggcttttgctttttgaggcaaagc

SEQ ID NO: 252409 - DNA, 521 bp, Homo sapiens
ctagatacttgtgaaaggatattgtggaggaggagctgggggtagtaagtatgatggaaggcagacgagttttggaatcttgtctccaaaacactctcatctgttagaatgactcctaggctataggattgactatggcttagagtggattcatagttgttaatttcatcatgtgacttgtgacttatccttttcttttcataatagaatgaaaattgccatctgtctggcttcttccccatctttttgccttctttcattacaccacacacgtgtcctaattattccaaaggtgatacatttgcatgtttccctttaaactcctttccctctgtcactctgtggagggttcacatgctgcaatatttctgttccaagtaaagatcacaggttttgatcctcagtcctcagtatacacacctcttttagggatttctgggcttcttgactagctcaagctcttcagaggcatgcactttatcttggtgttcagtcttgactggtttaaacttttgatgtcc

SEQ ID NO: 252410 - DNA, 426 bp, Homo sapiens
aaaggctgcaagtttttttccacttggtttagctgtttgctgagcctccccgcccccctccccctgcgcccccgtccctgaggtgtctgctgctccaggatggccatgtccccttgtgcaggtgcacctcgcctcccctgacctcaccaagtcccgcttcacttggctcactcccggcagtctcatctcactccaggcatcccttgctgcccccttctcttacctgccatcctccttaaactcgcctcaatgtcttctgaccccatgtgatcagtggtatctcaagtgttaatcacaaaaggttataaatgttttaagagaacttcataaaagtgtgtgaatatagagtgcggaggactcgaggagggaggccggggaagggagcagggtcgtggtatagaatctagccctaaaatccaggcactc

SEQ ID NO: 252411 - DNA, 738 bp, Homo sapiens
  misc_feature (108)..(108): n is a, c, g, or t
gattcgcgtgaatggcctctccagacataagcagatcaggttctcccctgcaatctcaaagcacgccccgtgataaagagcttgtcttgtagtacccttccagtgcanctccaagatagcaccctcattgggcttagcatagcctacagcgtgagtctgtattaactgcttgaagcagttaaacagactcaggttctaaaagcttcaattagaattgatccacattgtttctgctcacatctcattggccaaagcaagtcacaaatcacacctaacttccaagggggaagggaggtaccctcccactatgtgctcaaaggaggagaaatggaatatctgtggctggccctagtgactagcaggcaggaagctccagtgaaattccctgaatgccttcctcgttaagtccaggtgacttttattaggttgtttgcaagaatagtagatgttgctccagggaatattaaaggtgccaccacacagtctgatatccacagagccctgagccacttcagtcaagatctaccccttgtgtgcttctgactcctccaccaatccagcagtctgccccaacacagacgccatggtggggcatgatggggcagggggcgctgtcagataaaaacatagacaatattatcagaactgtaagatatgagggagggaggcttgtgactaagtgctggtggacctggaattagagtgttcgtgttttactgaagcggctttattcatagg

SEQ ID NO: 252412 - DNA, 441 bp, Homo sapiens
tgctgagcaaattcaccattaccaagccaccactacaagaacggctaaaaggagctccaaatcttagaaccaaaacttggaagcacatcaaaacagaacctctttaaagcataaatcacacaggacctataaaacaaaaatataagctaaaaaagcaaaaacaaaaaaaccaaagtacactggcaacagagagcatggtgaatgcaacagtacctcacatttcaatactaacactgaatgtaaatggcctaaatgctccacttaaaagatacaaaactgcagaatggataacaactcaccaaccaactatctgctgccttcaggaggctcacctaaaacataaggactcacataaacttaaagtgaaggggtggaaaaataatttcatgcaaatgggcaccaaaagcgagcaggagtagtcattcttatatcagacaaaac

SEQ ID NO: 252413 - DNA, 448 bp, Homo sapiens
tagcctgaaggacggggccttactatggaatgtgagaacgtgaccgatgctctcttcacacctcccagattcctctagcgtttttaacacctctgagagacagaccccgtcctgctttcatggcagcacagctctgtggcatgagaccaggcggtctgctatgtaggaccttaggggctgacaggtgggcaaatctcatttatctatctttggaaaatgtggttctcatgagttaagaggaccaactaggctgatgatgtcttcttgggggacagattaaaaaccaattgtgagtttgtatataacaggtatgttagccaccatctgccctaaccacactgatgtcaagcttctcttggctacatcaccttcttcttgctgcttcttcccatattaatgggagaaaaagtttttttcattcattccatatttaacttatgattagtaa

SEQ ID NO: 252414 - DNA, 411 bp, Homo sapiens
acctacaaacctttcgccaagtacaagaacatgacctgcttcctgcatctgttgatgtgtttctttcctttcccattcctatgctgcctcccttgcatacatggccactttaagatttgttattccattgcttattctgtaggaagattcaggtttttttcataaatataggctattcagatgttctgtttttgtttgtccgttttggtaatttgagtaatgtaaaatatttgcctactttatctttgtcttcccattactttttaagattgtttcatctcataatggtaaattttgtattttatcacaataaaaagtcagaaaaatatatttaacatatctacatatctttttataatgccatttaaaactgataaacctcaaaaaaataaaaggttgttacattgtaaa

SEQ ID NO: 252415 - DNA, 552 bp, Homo sapiens
cagaatgatatacatatccaggtacaggcaggtcagagatcaccaaacagatgcaacccaaacaaaactaccccaggcatataattctatgtgatccagtttcttgaatatttcttacgatatgtcatgtaacctgttacttgggaaagttttccaagtgttacacatacatagtagtcagcaatgctatttaacaagtgtttctagatcttctcagttgtgatgaagcttatattgcctgtatcccttgtctctataacgactgtgacacaatgcttaattgcattggcatgtggcagtagcatgaaatatattttcactaacccagtgagagtttgggtgtttttgtaactgcaggattatcagccaatgctaatgtggtggatgtggggtaatattagagtcctagtggtgagaaaggtgacaatccatgttacacatgagcaacacttatgaagctgttatgtgctataacttgcttaaacatgtatctaataaacttgtagcactacaagaagtatttgaaaataaaaacaatattggcacataaaa

SEQ ID NO: 252416 - DNA, 1880 bp, Homo sapiens
ttcagtattatcaacaaatatagactattgtaagagttttttatttaatttgaatatgcatttctgaattgactactatatcctgtattcagctcatgaatcatctcttactgtgctcatgaaaactatacttgattccaagttttaaaaatacccatcattctttttgtgaagaaggacctgtgactaacagttctcacttttgtggctgtcagcatgcctgcatcagtcaatacctgcaacactgtccattgtccaggattccaatcctggatggaatgcacataaacaagcctgttagaaatggccctaaaataaagataaataggatctctatgaagcccctcctagaaaatctacttctaagaatcctaagaaaataagtaaggcaaaaatttagctattatgctgggcgtggtggcacacacctgtaatcccaacactttgggaggctgaggcgggcagatcacctgaggtcagaagttcaagaccagcctggccaacatggtgaaaccccatctctactaaaaatacaaaaattatccgggcgtggtggcacacgcctgtaatccccacactttgggaggccgaggcgggcagatcacccaaagtcagaagttcaagaccagcctgtccaacatggtgaaatcctgtctctactaaaaatacaaaaattagccgggcatggtggcatacgcctgtagtcccagctactcaggaggctgaggcagcagaattgcttgaacctgggaggcagaggttgcagtgagccaagattgtgccattgcactccagcctgggcgacaagaacgaaactgtctaaaaaaaaaaaatagctattaggtttttcgttttaccagttgaagaaacttgggtggaatcaatataaatgccccaaaataaggaactgcttaaattatagtacatccttatattccataagaaaatacttatttagatgttaaagtgtacaactgaatattgctaggaaaaaaatatatgaacaacaaacagatttaagcaaaaagtttaataacaaagggtgttgggggtaggtatttctggctgatgggattattttttcctacatcctgcttatttgtattttctttaatatcgactacttataataagaaaaaaacaagttttctgaaatacttattcaacatgagtttatcattcacttattaattcaacaaatatttgcatttgttggattaattcagacatagtccttaccctcatgtctcttaatttacgaggaaaaaaaaaaggcatgatgaacaatcttgggaattttttactcctttctttcattcttattaattacccagtcattccattttgttgaggactctggccctttgctgacagtatctgcctcccctgcattttctgccatcacctcccacttcagtgtccatatggaaaacccattgaaaaactatgaactctgactctataaaaccacttcattcagtaatccatacccaaagctacaccctctatcttctgataaccaagaaattattctacagccttaagagtccaatatattgatctctgactacaactacttatccttgcagtttttttactccattactccctaaatacctgctttcttacctagttttgatacccattcctcatttcttcaaactacaatctcatttcttcaaactacaatctcccacatgctttgtgtcttttcctatccagcctaggttctcaggtacatcaccctcttctgctaacaacctacctccctcattaattccctctcccattacctagagcatatattttgtaccatcttacttcaactcaaacttgctacttcagctctacccttacctcttttatgactcctttatcag

SEQ ID NO: 252417 - DNA, 853 bp, Homo sapiens
  misc_feature (15)..(15): n is a, c, g, or t
cagaggatccccgantgtgaataggtaggtatttctggctgatgggattattttttcctacatcctgcttatttgtattttctttaatatcgactacttataataagaaaaaaacaagttttctgaaatacttattcaacatgagtttatcattcacttattaattcaacaaatatttgcatttgttggattaattcagacatagtccttaccctcatgtctcttaatttacgaggaaaaaaaaaaggcatgatgaacaatcttgggaattttttactcctttctttcattcttattaattacccagtcattccattttgttgaggactctggccctttgctgacagtatctgcctcccctgcattttctgccatcacctcccacttcagtgtccatatggaaaacccattgaaaaactatgaactctgactctataaaaccacttcattcagtaatccatacccaaagctacaccctctatcttctgataaccaagaaattattctacagccttaagagtccaatatattgatctctgactacaactacttatccttgcagtttttttactccattactccctaaatacctgctttcttacctagttttgatacccattcctcatttcttcaaactacaatctcatttcttcaaactacaatctcccacatgctttgtgtcttttcctatccagcctaggttctcaggtacatcaccctcttctgctaacaacctacctccctcattaattccctctcccattacctagagcatatattttgtaccatcttacttcaactcaaacttgctacttcagctctacccttacctcttttatgactcctttatcag

SEQ ID NO: 252418 - DNA, 376 bp, Homo sapiens
gcaggagtattctaaaggcaaaatttcccttgtccactcttcacggagtcaggacacattactgttcttccctggcatcagtgtgtgacagtatgaatgaagtatttccaacaaggaatgctcacctgagcttcattttcggtttttattggggctccattatatggcttgattggttgtccatgtggttgatttcagtctccaaatacatgatacctggtgacccaaagctcccactctaaatagagactcttttatcaggaatatcttagattacctacctccctgaagccaggggcaaaggacagacctctctttgggagaggtcagattctttactacacactaatcatataaactattcccttatttatta

SEQ ID NO: 252419 - DNA, 309 bp, Homo sapiens
tgcccagaagaccactctgataattaactataaaaacctctttgtgcctaacctcctcatctgtaaaacatggacaataataacagctgcctcgtgggttgttgtgagggttaaataaagtgtgtatgtaaactgtgcctggcacgtggtaagggtactttttttttccccctatttctgctttcttcagcccttaggtttataaaaccaacttcttctgcatggctcactggaatacacaattctgttttatggaatgaggtgttacctgattctaaagtcacgaataaaagtcaatcaaaatcttta

SEQ ID NO: 252420 - DNA, 151 bp, Homo sapiens
gaataaatgtatttgtatgtgataaggacattagttttggaaggccagtgccagtgccagaatgctatagtttgaatgtttgtctccctttttcatcatccttgatcaactccagctgggcctcaagtaaagcacctgtcaagtaaagcac

SEQ ID NO: 252421 - DNA, 543 bp, Homo sapiens
agtggaaaaagcactgaaccctgagacttggttctagttgtgcctttgccactagctaagtagcctcaagcaagtcatttggtcttcccaggcacagctttgtttcttgtaaaacaaaggaaagaatgtccaatccactgcctttgtatagaaaaggatataggatagagttatctggaaattttggttatggtaattgttcttataattttgtatattaataatagaggttaaacatgttcaatacagagcctgaaaaacccagaaaagcattaccatctattgataaagaaccactgttacatttaggcaccaatcactagtgatgggtgccaaaactcttgccagataaccagtttcatgaactgttagtatggcagaccatgttctcataatgccaatgctcagttttaaaaaatcagaggcaatattgacatatcagtaattgtttttataatatggggatttcatgaaacataggtatgcatttattaggaaaaagtgaatttcccaacaggtgaactgaaaagttattttaactat

SEQ ID NO: 252422 - DNA, 860 bp, Homo sapiens
gttaccattctgatgttgggatgacctttctatctcagaaggaactagacgactctgtagagatggtggcggaggcgggatctatgtctggaagggccatgtaaaaaacatggacctggcgtgtttctggtccttatcacttctgagttgtccgattttatagaagaggccttaaaagatgtaagatttggccaagaactcatcgtctgcttctgctccaaaaccacattctactaaaaaaaggtccttacactgaattgtttgaaggttttttgttgttgttgttgtaaaggatgcagacttaaaaattatttttggaagacagtttgcaagctattagtagagaatgctaagaaaaagctttttggggtggatttgtttaaacaggcccctaactgatgagagaatggctgttttcatgttccttgagaaccgtcgtcttttaataagacagcatcgattctggagtcagaagactagattgggtctcaactctgacaccgggtttgtggctttgggcaagttctttaatatctctaactctcagttctaattctgagaaatgggataagtatcatattaaaatctacttcctggtgtcaggaagagtagatgaattaatgcacatttatgtacttggcattcttctttgcgcttaagcattcagaaaatagtcttacaaaaatgattacgcctgtttgatattagtgaagagttaatgagaaaagatcaaattgtgcttgagtgttaatttttttaaagcatattctgtgaataatatttctttaaaaagcattttgctaatgttgtctatgtttagctgtttaataaaaagttatatttgtatttttaaaaggaaa

SEQ ID NO: 252423 - DNA, 167 bp, Homo sapiens
tcaatcattcattcgacaagctaatcattggctatatgctgggccctgggccaggcatgaactcagaggagaaagcacagacctgtgttcaaatcttagcctcttccttactaggctgagtgaccttgaacaaattgcttaacccccctgggagcaatagtaccagc

SEQ ID NO: 252424 - DNA, 406 bp, Homo sapiens
gctgcagcttccttcgctctggtgaggtgaaccgcagtctgaggaagacttcgctcaatcgtccctttccacacccagggtactggtttaagacctgtatttccttctgccttgaggacttcgtttaacatttgtcaggcaaggctgctgcactgcagtgagaaatagacaaatccacaagtacagttgaagacttcaattgaatacaagcaaaagacatctacatcatttttacctttcttcctatgtaatgggtattttttctttgggttcttttagaattttatccttatcagtggatttaaacaaaacaattatgctttgatgtagttttcctcatatagcttttgtttggggttcactgaccatcttggatctttgggtttataggtttcatcaaatttgg

SEQ ID NO: 252425 - DNA, 363 bp, Homo sapiens
aagcagtaactaacatggcccaggatatgacagagtgaacaagaaggccgaagaattcaaaggcttcctgatcatcatatctttagggatgcaatgatttacactgactatcgccaacacttttctaagcaccttgtgtgtattaccttctttaatccttatgacaacctccagtgaggtatatattgtgatcccatattttacagatgaggaaagtaaggcacacagaggtctttctcaaaatcattcgtgcttgtaagtggtgggaccagaattcaaactggggtggtacagtttcaaagcctagtgctctgcatgattggatgctgtattgtcccctgatgagagaagttggggctgtat

SEQ ID NO: 252426 - DNA, 345 bp, Homo sapiens
gatttataagcaattgcaatgtttaacgtaaaacgtattcttgaaattgaattaagtttaaggctgggtgcagtggctcatgcctgtaatcccagcactttgggaggccaaggtgggtggatcacctgaggtcaggagttcgagactagcctggccaacatagtgaaccctcatctctactaaaaacacaaaattagccaggtgtggtggcacatgcctgtagtcagctactcgggaggctgaaacaggagaatcacttgaacccaggaggcagaggctacagtgagccgagatcgtgccactgcactccagcctgggcgagatagagcaagatgctgtctcaaa

SEQ ID NO: 252427 - DNA, 452 bp, Homo sapiens
cgacccagagctgatgttcaaattagcagatgagggcattaaaacttattattactgtattccatatgttcaaagagctacaggaaatattaaatacaatgtatttaaataaatacactgagtagaattaatgatcagttagactttgcgtaagaaaagattaatgaacttgaaggcatagcaagagaaactatccgaaatcaaacctacagagaaaaaagactaagaacaaaaatgaacacagtgaaagtgaactgaagaaaaacgtcacacaactgaatatacatgtaattggagtccccaaaggagagaagataaggtgggggcaagggcaggaggtgggaacagaaaaaattttgaaaaaataatgggcatcaaattccaaatttgatgaaaatgataaaatcacaaatccaagatacccaaggaacccttggcacaagaaacattaa

SEQ ID NO: 252428 - DNA, 440 bp, Homo sapiens
catttgtcagccaataattttatattcagcaagattatccttcgaaaaggaaagtgaaataaagacattttcagataaacaaaaactgagataatatatcgctaatgacctgccttacaaaaaatactaaacaaaatccttcaagatgggaatgaaaattactccagttgataacttgaatccacaagaagaaatgaaaaatactgaaaatggttaacatatgggtaattataaaagacttaatgagtatacattttttcttctattatttctttaaatggtatgatatgcaaaaaaactgtactttttggtttaaaatataaatagatgtagtaatgtacgatactaacagcacaaaagtgagagtagggtagggaggaaattgagctggattggaggaaagttgctatattttactggattaaattagttttagcttg

SEQ ID NO: 252429 - DNA, 435 bp, Homo sapiens
cacccctttccttgaccaggaaagggaactccctgacaccttgtgtttcctgagtgaggcaatgcctcgccctgtttcagctggcgcaaggtgcgtggcacccactgtcctgcacccactctctggcactccctagtgagatgaatccagtacctcagatggaaatgcagaaagcacctatcttctgcgtcactcacgctgggagctgtagaccggagctgttcctattcggccatcttggctcctcccagaatttctctttgcgtcttagtatctcgatgataacaaccatgcctaactcatattgtatgctaaggattaaatgagttaatatgtgttaagaagagcaatagcttacatgtagagccataaattaaactatcatttttaacagttttcaagacttaaaattacaatttggcttttccattctta

SEQ ID NO: 252430 - DNA, 430 bp, Homo sapiens
taatgtttctcccagtgctggatgctgggaagcctcaaatcaaggtactgacagattccgttgtctgggggaaggctgcatcctcagaaggggaggggatctgtcttcacatagcagcagagcagaagagagcaagcaggagatgaacagcatgcagccttgtttgtaaggccttagttccactgatgagggcagagccctcttgaacaaatcatgtcttaaagccacacctcttaataccaacacatggacaacatcagaattttggaagagacatattcaaacaatagcattctgccccagccccccaaatttatatccttcttatatacaaaatgcattctttctatcccagtagcccccaaaagtcttaactcattccaacatcaactttacagtctgagtccaaagtctaatctaaatcagatat

SEQ ID NO: 252431 - DNA, 600 bp, Homo sapiens
tcagtgctatcagggaaatacagggttttacaggaacatgtaggagtagtacctcagcatagatttgaggactaatcagagaagacttcttggaagaggcagttaggcagaacactgatgtatgtttagagttgaaaaaattgggtggaggagtggataaaagagagatgtgtgttccagataaaggaaccatacttgtgaagacttgggcgaaaagaaaaaacaaaacagaagtaaaccgtagggcccttttgaggaactgaatgaagttcactgtagctggagcagagagcaccaggtcaggaagtgatctggtgagccatgctaagaaatttgaccatgtatttagggtaatgggaagccatcaaactattttaaatatgttagtggtttaatatgattttaaaaggtcgcttgtcaaatggagaatggagtttagtgggacatgggcaggagcagaagcaaagctccacattgacctctattctgtgacgcctcgtttctgtactgtcctttcccttgttcttaaatctgtgaagatgggcagcttgtgtattagcattctcatgggtggacatggttatgagacaaagggaaaca

SEQ ID NO: 252432 - DNA, 482 bp, Homo sapiens
catactgttatattatagaaaaggctgtaacttatagaacagataactctggcttctacaacaaattacaaatattgatttttagcctttatcctttagtgttacacagaaaaatgtaaaccgtagggcccttttgaggaactgaatgaagttcactgtagctggagcagagagcaccaggtcaggaagtgatctggtgagccatgctaagaaatttgaccatgtatttagggtaatgggaagccatcaaactattttaaatatgttagtggtttaatatgattttaaaaggtcgcttgtcaaatggagaatggagtttagtgggacatgggcaggagcagaagcaaagctccacattgacctctattctgtgacgcctcgtttctgtactgtcctttcccttgttcttaaatctgtgaagatgggcagcttgtgtattagcattctcatgggtggacatggttatgagacaaagggaaaca

SEQ ID NO: 252433 - DNA, 696 bp, Homo sapiens
aatattttgtttctgatcgtgtttcatgtttaaaacttgaaataatgatcctgttccaaagtcatatagtatagtatggtggaaaaaattttggcttttgagtcattcagatctgggtccagatattagctcttatattttcactgtgtgcccttggacactttgtctaacctctctgatggttttctcatctataaaatggaactaagaaaatccttatttaggactggagaaaatacatatgtaaagcatctaatgtctgttacagtggtaacatgcaagtttttatgtctaggctaaattgagtttgttataaactgaggactatacgtgtatctcccatttacctctgttgtcagtttacattatttcttttctagcctaaggctgtaaatattttccctaggccaaaatctgacctgctggttttaaccattaagctgaaaccaagatactcattgtcacatgaaccattttgattaataacattcctttgtcctttcttttgaccctagacatcttcctgctttgtatgaaaataattgcataatttgttatgttaaagcaatataggaagcagtcgccccagactttaattttagcctcactagtaaggaaaggctcaaaatcatttccctgactgctttataaccaaggaaaattataatgccaaacaaatagagttggagaatatgt

SEQ ID NO: 252434 - DNA, 329 bp, Homo sapiens
ttagagcaagtggatcaattcctcaaaaatcgcaagctgccagagctgctggctgaaaaatcacaagaaatgttacacaagttagacaatgtgaccttcacccattatcttcatgctcctggaatctgtgatgcaaagaaccatctacagccagtcaatagcttatgttattttaatgaaccagtgtgggaacttgccccttctttctttctttcaaacccactgtaactgctgctaactggagcatatgttcagagccacctgaatctacgtcccccaggatgccgtcctcaaacgtggcccaaataaaccctccacgtgtactaaaa

SEQ ID NO: 252435 - DNA, 403 bp, Homo sapiens
aaaagatattcttattgctctagttacttaggaaataattacagggggtcagagtcagggatcctggataaaacgccaaatccatgatcctagttccagccacagatcaggaggaaatgaggctggctgaaaaatcacaagaaatgttacacaagttagacaatgtgaccttcacccattatcttcatgctcctggaatctgtgatgcaaagaaccatctacagccagtcaatagcttatgttattttaatgaaccagtgtgggaacttgccccttctttctttctttcaaacccactgtaactgctgctaactggagcatatgttcagagccacctgaatctacgtcccccaggatgccgtcctcaaacgtggcccaaataaaccctccacgtgtactaaaa

SEQ ID NO: 252436 - DNA, 386 bp, Homo sapiens
tgaagctgggagtgaagtttctcagaatgcccttctcagtacgaatccagttgagtctagagacaaggaggaagacgccattgctcccacatgtcaagggcctggctggctgaaaaatcacaagaaatgttacacaagttagacaatgtgaccttcacccattatcttcatgctcctggaatctgtgatgcaaagaaccatctacagccagtcaatagcttatgttattttaatgaaccagtgtgggaacttgccccttctttctttctttcaaacccactgtaactgctgctaactggagcatatgttcagagccacctgaatctacgtcccccaggatgccgtcctcaaacgtggcccaaataaaccctccacgtgtactaaaa

SEQ ID NO: 252437 - DNA, 426 bp, Homo sapiens
gtttacttgtctgttgtccagatagctttatattctttaagattcagctcggattcttatcctatttttgccattaactttcattatgattttggcaaagccattttgtttgcttacatttttcacttttaatgtggtgtctggcctccccctctgaccgagacaagcatggctgcagagtgcagacggggaggtggccccgggcagcagccatgaacgtggcctccccactgacgctgagccatggctcccttttttcagtaaaatataagcagtaatagagccgatctccttgagtttttgtgagaattaaagaatacattttaaagaattgaggagaatttttgggacagtgtgagcattcagtaaattttagttgtagtggccatcacaacgtggcttttaagctctcttacaaaaaaagaa

SEQ ID NO: 252438 - DNA, 466 bp, Homo sapiens
tactgtgatgtccatcatttcccaagccctttgctaaatattcctgtccttctctataagcctggggttgaatactattatcagccccattttacaagtgaggaaactgagggctacagatgttaaatgtcgtgcccaaaaccacacagctgtgagtggatagtaaagccaggattcacaccctggcctgcccgactccttcctgtgactggaatcccaactctcctggaggtcacggcctattgctccagtgcctgcatttggcctacacatatattttgtttggcctgcaagataaggggtgttttttgatttgaggtatggtttagtaaggtttggtaatttggctgcttttaaaaacactgggtccgagttgctatgtagtgactgtcagctggagccaggtagctgctgtcctctgtggactgcttggaggttcccactctgcctggcttcactcattact

SEQ ID NO: 252439 - DNA, 377 bp, Homo sapiens
ggccagggaggctattgttcacaaccccacatcctttagctctttatgtttatttgtttatgtttctgtacactgcttcatttgaaaggaaggattggatagccactatccaatccttaaatgattgtctaatgccagaattaattggagtatgaaaaaatctctctgggtgcgggttgatatgctcaaagttcatttatattatctgttgtgatgcagaagctgcgctttcactgaggaagcctgtaacagcttttggctctgggaagcttgcaatctactgaaatttctagatcttttattgcataaacagctaccaagcctgaatatttatgtgtttccaattaaaatatagtaatataaaaatgtgaaaaata

SEQ ID NO: 252440 - DNA, 528 bp, Homo sapiens
  misc_feature (29)..(29): n is a, c, g, or t
ctactgaacagaatatatccttagtacanaactgatggtgatttgcatgttgattacattttctaggttaagatcaccagtcatttctttaaggccattgatttcagatactctcatgcattgccctgtgttagcctctctgttgtttcgctcagaaaacattgattatgatctgccgtgcatatggaggacacagtgagggacaagagttggccctggtgcctgaggcactctaggcagccctccattcctgaacactgtgagccccataatggtgtggaccagcccctggaaactgtaagccatgtagcagtgctgttttttaaaagatgttttgcttttctgcttcactgaacatgaaaaacattagcagacaaacaaagaggtctgtcaaagcaagagtgtatgtttggaatagagcaaaatgggaagagcagggcttgaggaatgaatattttaaatatgaaaaaggaagagaaaaacagccaaaacaccaaaaaggttggagaataaaggtaaactattaag

SEQ ID NO: 252441 - DNA, 390 bp, Homo sapiens
taatagggcacgatgaagaaataaaaggtataaagattggtaggaaagaaagaaaactatcattattcacagatgataagttgcagacatagaaaatcctaaataataaattcttaaaattagcaagtgaattaaacaacatggtctcatatagagacaatatataaaaatcaattgcatttctagtaacaagtaattggaaaattgtttaaaatgtaaatactattcacagtttccataataaacatcaaatactcaggtataaagctatcaaaaatgttactaaaaatgacaaattggtaagagaaattaaggatcttaacaaatgtcgacatataccatatgtactatagattgaatattgatgtcaattctcccaaaatgaacaca

SEQ ID NO: 252442 - DNA, 522 bp, Homo sapiens
ctccatagtttttgttgaagatagagccaattcctttgcaaagtctatcagtcagggttcctcattaaaacagagcagtaaggtacctttttttttcaaggaattggcataaatgattttggaattttaagagttggcaatctgaaatctgtagagcaggccagcaggctggaaactcttgggtgggaactgatattccagtcctgaggcagaatatcttcaaagaaacttattgcagatattaatcacgtctaaaaaataacataagagcaacacatagattaggttttgatttaataactaggtacaatggcatatgtcaaaaaacacagttttatacaactcttctatagcatactgggaatatactaactcttccccagagtggaggtccttgggtgatgttcactcttattcttgatattctgtaacataaatactgtgaagtaatatattagattttaaggagataaagtgagaagaatacgatagtattctacacacacaaattcataacaaaat

SEQ ID NO: 252443 - DNA, 513 bp, Homo sapiens
aaggcatttgggagcctgctcctccctctgtacctccaccagccgtccctgggatgctccaggaagtgctgcgcttgacacacgcccccatccgccacctcccagagaagggaccattgtgtccgaagggttaacgagggatgtgaggaaggggccctttagccatgatgccctctgacctttcataaatcagaggggcttaggggcgagggggctgcttggcaggacttggtggggtgggggcttagaagcagctgcgcgcgacgttgacattgttcccaccattctaagtgcaacaaatccctctattgtgttcctggtttatctggttcctcttgtttatgagcagggctcctttggcagcggttccagccctgggcgggtggaaagagtgctggcacgcaccgcggggggagggggcgggagggggccgccgtcaatgcccgcattgtccccgcgctttttgtttctactgtaatgacatgttggaatagagagagagagagaaggaaa

SEQ ID NO: 252444 - DNA, 156 bp, Homo sapiens
catcaaacaggccaaaaaaaaaaataaacagcaacttcatagacaaaaaaggaaaaaaaagaaaccttttatctttggcctttttaaccatctcatacaaaccaactacttatagtacagctaagtacatacacaaaaaagttactggaatgctcg

SEQ ID NO: 252445 - DNA, 409 bp, Homo sapiens
agtcagcaggaaggtgaaactccccaccccgggcagactccttcaaacagaaggtctctcttagcccacaggggaccacaggatctaacctagcaaaggagatttcgatataaaatttcctttcctgttggtctgtcctcaaagatttcacaaagattcacataaatgcttagggaatctatgaacaaaatctcaggattgtgtaggcaaagacctacatctctaagagtgaatggtgtaaatgaagacccatatgaggaatcgaagcaaattactttcttcaaagtagcctcagtgcaactaactcacacagagaaaactttttgaagaactttatattctcaaagatgtttaagaaaatgttacttcatttcaaaaaaaataaagcacaggccatcataaaatagaa

SEQ ID NO: 252446 - DNA, 779 bp, Homo sapiens
gagactacatcaacagttcttcgcttagcgctgttagaacttggcatttccagcctcacggggcccacacacattttgtcttgtattgtgctccaagcacacatcttatcttgctcgaggagaaagggaaaccaggaaagtaatgattggcacatgggatgaggagctggaatgactggggttccaccatttaccagctatgcaactaagcaagtgacttattctttctcagcctcagtttcttatccgtaagatgggaaactacaattaacctcatatatttgttgtgaaaatctggagatgactatacaaagcacctggtacataacatggatgtattttattattgatttattatttaatttctctttgtatctgccagagaatattgcagaaaggatacattattcacctcataaatgtttgggataaaagtgaattgtggttttgcacccatttttaagataaagattgctatgaaactggtgtttcccatacattcctgagcataagaatctcctggaaaatttgctttggtgggtctggagtaggatattttaacaggcaccttagggcattctgacatctgacattgggaaaactgctgtaaactcaaatgatgcttacacccctcaatgattatgtgagagtgtctgttttgtgaaaaggatggacttatacaggtctcttaataacggacacactgctgcccaattgatttgggcaaagcaatcaccgtaaagtgtgagcatggtggagaagccacatcgccatttagg

SEQ ID NO: 252447 - DNA, 766 bp, Homo sapiens
cgccctttgtgctgaggtcctgggccggtgtgtgtgtgtgcgtgcgtgcgtgtgtgttgtagtgtgtgtttcttttgttattttctcccctaacaccgcagaaatgaaacacacatgcagctctgtcgcctcatattttcagatgtttttcacactattgtctgctccagcccgttgaaagtgcaaagtgaaaacagatgcatccaaaaaattttttttgaaagggacaatcctaggatggagactaacccctcgaatacagataagcaataaatattatatcagatttataacgtgcatcgagcagtcttgattagcaccaaggtgagctttggtgagatttttatcatttccatgtgtctggactacaagaagaaatcactgggggaagagctctataaatcagcgtccatgtcaagacaaatcaaaataatgcctctattatttcaatcaataaaccatttttattcccaacatctgatacacacagtgtgtgtccgtctgtttgtatttggaattggcagccttgccttataccaaaacaaacctttcaagacgtgtcaatgaaattaaaatttttaaaaggagaattcaatgtgaccctccttccctttcgagctactccattctcccctttttaagccgcacaccccaagtcagtaggagagctttgcaactctgcaaaggatgaaattgctttgagaatttcagagaaaaggggtggcgggtgctattagggaagagaaaccgaaagcggcgacaggca

SEQ ID NO: 252448 - DNA, 370 bp, Homo sapiens
ttttttgagacggagtctctctctgttgcccaggctggagtgaaatggtgcggtctcagctcacggcaacctccacctcctgggttcaagtgattctccttcctcagcctcctgagtagctgggattacaggcgcacaccaccacatccggctaatttttgtatttttgtagtagagacggggtttcaccatgttggccaggctggtctcgaactcctgacctcgtaatctgcccgcctcagcctcccaaagtgctgggattacaggcatcagccaccgcacctgactcatgtttctctttcttgtgagctttcatccctgcacacatgctattccctctgcctggaatgtcctgccttcttgatgtctg

SEQ ID NO: 252449 - DNA, 418 bp, Homo sapiens
tttttttttttagacagagtctcgctctgtcacccaggctggagtgcagtggcgtgatctcggctcagtgcagccttgacctcccaggctcaagcaatcctcctgcctgagcctcccaaagtgatgagattacagacatgaaccaccacagacggctgatgttctcttttggtcaaagcagttttcacgttatcctactgcattttctctaacacaaataaaacaacaaacaaacatataaaaatcctcatcagctcttcacataacttttgtgttttctgagggtgaaggcattccagagaaccttgtccctccatccactgcttatgacactaatttgcaagggttagttaacaccaagtaatgtgtattgaaaacagtaaactgacctgccagctgataaagtgaagaacattat

SEQ ID NO: 252450 - DNA, 364 bp, Homo sapiens
taatattgactggtctcttagaggtaattttacatttctcagaagctcttaagcaagacaatgatatgtgactcacttcccacaagatttaagaaggccacagccctggtaagaagtgaaaaaaaaaaaaaatgagtggtcgccttaacatgtaaaaagtgtgtaattattggttaggatagtttcagaaagtttagtggttacaggcagcaacctttgagtacataaaatcagaatttatgaagtggctgctgctatgactctaataaaacaaggaagcaatttaatagttttaagaaaatggaaaagagcacaggaaggaagaaaagataggcttgagtaaattactctgcccctgaagata

SEQ ID NO: 252451 - DNA, 1696 bp, Homo sapiens
ggcacgagcacggcagccctacactcggcctggaagaattgtttttcttctctggaaaggtgaacatttatagcatttatttcccaaatctgttaacatggcaaaatatgtcagtctcactgaagctaacgaagaactcaaggtcttaatggacgagaaccagaccagccgccccgtggccgttcacacctccaccgtgaacccgctcgggaagcagctcttgccgaaaacctttggacagtccagtgtcaacattgaccagcaagtggtaattgggtatgcctcagagaccagcagcatcaaacatccctgtggtaggaagcccaaacccacccagcactcactttgcctctcagaaccagcattcctactcctcacctccttggggcggggcagcacaacagggaaggagagaagaatggcatgggcctgtgccgtctttccatgaaggtctgggagacggtgcagaggaaagggaccacttcctgcccaggcaagtggtgggcgagctggtcgccaagttcagagctgccagcaaccacgcctcaccaaacgagtcagcttatgacgtgaaaaacataaaacggcgcacctacgatgccttaaacgtgctgatggccatgaatatcatctccagggagaaaaagaagatcaagtggattggtctgaccaccaactcggctcagaactgtcagaacttacgggtggaaagacagaagagacttgaaagaataaagcagaaacagtctgaacttcaacaacttattctacagcaaattgctttcaagaacctggtgctgagaaaccagtatgtggaggagcaggtcagccagcggccgctgcccaactcagtcatccacgtgcccttcaatcatcatcaccagtagcaagaagaccgtcatcaactgcagcatctccgacgacaaatcagaatatctgtttaagtttaacagctcctttgaaatccacgatgacacagaagtgctgatgtggatgggcatgacttttgggctagagtccgggagctgctctgccgaagaccttaaaatggccagaaatttggtcccaaaggctctggagccgtacgtgacagaaatggctcagggaacttttggaggtgtgttcacgacggcaggttccaggtctaatggcacgtggctttctgccagtgacctgaccaacattgcgattgggatgctggccacaagctccggtggatctcagtacagtggctccagggtggagaccccagcagttcgaggaggaagaggaggaggacaacaacgatgacgacctcagtgagaatgacgaggatgactgacgtcctctcgccttaagattcagcttcaggaaaacatttagggaaaagaaacttttttttttttttttaatgtgaggttttctgtttcttttttgcctactccccaagaagatattggtaagctatagaatttagatatgcacctctgataagcaaggattgtttcccgtatgattaagacgtgctgttgatgtgtgttttgataccagtgtgctgacacagaatctttatttactttttaggattttgtgttttcattttctatttttctttaaatgcagagttcattgttgccccttaacagtttttcctgagtttactgaagaaattgtacttcatccacatccatgaaaataaaatgctctccttttgtgc

SEQ ID NO: 252452 - DNA, 847 bp, Homo sapiens
actccagcctgggcgatagagcaagaagactctgtttcagaaaacaaaacaaaagaaaaaagaaaactaaagatcactatctctcattagtatagatgcaaaatcctacacagtattttagcaaattaattcaagcaatatatttaaaaggataatgcttcataatgaagtagatttcatcccagaaatatgagatttgtttcaatatttaaaaatccataaatgtaacagtttctcaaattttgcttgtttcgatgacctaggcagttttgagaattaccagttgggtattttttagaatgttctttaattggaatacatatgaaaatttttaaataattagtctggaattatgggaataggaagaagaacacagaggtaaagtgcctttttttaatcacatcatttcaagtggacatgacataaacgtcactatcactgttgatgttgacctgggtcacttggccaaggtagcaattgtcaggtttctttactgtacagttattctttttccctcttttcatattgtactcttttgaaagaaatgagtatgttcatgtccgacttaaagagcatagagttatgctcttcctcattgaggaagtagtatctacataaattctttcaaatttttctgcacaaaaatttgactcttcttcctcatttaattatttttttattttacttatgctttaagttctgggatacatgtgtagaacgtgcaggtttgttacatagctatacatgtgccatggtggtttgctgcacccatcaacccataatctacattaggtatttctcctaatgctatcccttccctagcccccgaccctctgacaggccctgg

SEQ ID NO: 252453 - DNA, 892 bp, Homo sapiens
ccattccaacactatgtgggtttttagagggaggcagagcagttgtctaaaggaagacaagcagcagcgatgtcacgcaggtaaaagagcagatgaatgtccactccaagcattaccacctttgtgcgataatacagttagcacaggcggtcattgctggagtgggatggtgggtctaggtagtaatgatcagaccttacaaggttttagaccttgagcaaggtttttaacccttctgagcttatctcctctacaaagtaattaaaacactaactacttcactgtgctatttgacaatccatggtaggaaaaatggaagagcattttgttaccctgagtaatatagcacaacagtggcagtagtagacagcaactagccttagaaccagaaaactgggaatctcctggtgtttctgagggttctgtgggagctccttgtatactatgccaagcaggtgtcagagctgtcctccctgagctgaatttgctgttatagtcctcatgcccagaatagagcctagtacaagataggtgttcgataattttttgttgaacgaatgaatagtcagctgtgtgtagagtgaatgatgtatccttgtccagatcatcttcaaatatacatgcagattcctaagtggtgacctcatggtggcagaggctgtgggagaggaggaaggcttgagcaagccccagatgtacacagggatatcaccgcccacggtatgtctgtgatggaagcaggtggtgtgacattgatgtctgaagttcccaaggttgcccatcaggtactggtggtgtggagctggctgccaggagccatgtggagcacccacgctgtctaagagtagaaagtcattccctttctacacatagaatttgaatgtcaacttga

SEQ ID NO: 252454 - DNA, 309 bp, Homo sapiens
gcgtgcaggtcagcgtgatctccgcaggtagaagcccaggcccagcacctcaggttggcctcatggtggcagaggctgtgggagaggaggaaggcttgagcaagccccagatgtacacagggatatcaccgcccacggtatgtctgtgatggaagcaggtggtgtgacattgatgtctgaagttcccaaggttgcccatcaggtactggtggtgtggagctggctgccaggagccatgtggagcacccacgctgtctaagagtagaaagtcattccctttctacacatagaatttgaatgtcaacttga

SEQ ID NO: 252455 - DNA, 768 bp, Homo sapiens
attacatttataaggtttctctccagtatgaattctctgatgttcagtaagggaagagttcaccctgaaggccttcccacattcattacattcaaagggtttctctccagtgtgaattctctgatgctgaaggaaacttgtactctgattaaaggcttttccacattcattgcatttatagggtttctctccactgtggatattctggtgtttggtaaggtgtgccctgcacacaaaggctttttcacaaatgttacatttaaaaggtttctctccagtatgtattctatgatgatgggcaaggtgtatatttcggataaaagcttttccacataagttgcattcaaaaggcttctctccagtatgaattttctgatggtacgtaagtgaggagctcactgagaaggccttgccacattccttacattcatagggtttctcgccagtgtgaattctttggtgatggataaggtgcgtactctggtgaaaggctttcccacattctctacattcatatcttttctccttaatatgaattttctgatttgcatttttttcattatgaattttctgatgtttattaagagttgaactcttagagaagacttttccacactcactacactcaaaggcatttttgctaggttgaaatccctgactttgatcactgtgaagagatgagctcatagtgctcccggattcatcacattcctgtgatggggtgttggggtgagtgagtaccactcgctgcaaactgatctcctggcc

SEQ ID NO: 252456 - DNA, 428 bp, Homo sapiens
tttctgcccagttacaaaaactatagtagaatgctgcttttcttgaaactgggccataggtcattgcaagcttctaagcaacaattctattataacttttttttttttttagctatggcattcttctggcatctaactttcctttgacaagttcttttcaagttttttatgcttcttttcttacccttatccccatagcaaaatctccttgtaaaaaattcactttttaaatcagtctgccctcttaacatctcccagttcttccattttagccattttaccatttctcctccgaaatgcccccttaagttcccaaccttcactttagctttttgggtctagtaatatcctctaatatacgacagtcattgagctacagaagtttcacaacagcttaagcttgtggatttaatgatagcagtagtaag

SEQ ID NO: 252457 - DNA, 492 bp, Homo sapiens
gaaaattttatccaggaaaattacagctagtaaatgtgaaaggaatggtaagatgagagaaatccaattttgatacttctactgaaatagtttattctaacaatgagttatctttggatattaacactattaatgaaaagtggatggctttacaaaaaagttgtcaccaccacattttgtgcctcctgaagtgataaaatacaaagtatatggcaccacctagggagtggtctttctaaaaaactgatggaggccaatgtgggaggattgcttgaggccaggagtttaagaccagcctaggcaacacaatgagaccttgactctaaaaaaaaaatttaaaaatgagccaggcatggtggcacacacctgtagttccagttacttgggaggctgaggtgggaggaccacttgagcccaggaggttcaaggctacagtgagccatgattgtgccactgcactccagcctgggcaacagagcaagaccctgtctc

SEQ ID NO: 252458 - DNA, 542 bp, Homo sapiens
ccaccacgcttgatgacaccaccgcaactggtctgtctcatatcacgaacagagaagcgaccaaaggtggatagtttgaaagctctcacacctcactaagcatccatgaaaaattgatgtcagtggccaaacgtggtgactcacacctgtaattccagcattttgggaggttgaggctggtggtttgcttgaacccaggctggtctggaactcctgggctcaagtgatcccaccactcaggctccagaagggctgagattacaggcatgagctactgctcccaaactagctgcctaattttttagtttttttgagacagagtctagtcctgtcgcccaggctggagtgaaatggcgtgatctgggttcactgcaacttctgcctccaagattcaagtgattctcatgccttagcctcccgaattgtgagaattacaggcatgcagcaccacacccagctaatttttgtatttttagtagagacagggttttgccatgttgaccaggctggtctctaactcctggcctcaagtgatcctccca

SEQ ID NO: 252459 - DNA, 460 bp, Homo sapiens
ccacctactgttcccgagtccagcctctctcctgactcagcccgcaggcgctctggcctgcttctgaactgtgtgtagatggagccatacagtgggtgccgttttgcgtctggtttcttttgctgcatattatgtttgtgaggtttgtcagtactctcacaggcagtcaagggctgttcgtacccattgctggtggcttgccattgtgtggctctgttaaaatgtattcacccatgttactgctaatggacatttggggaggttccagttcctggctatggtgaatagtgccactatgaacattctagttcctgtgtattgtgaacatatgaatgcatttctgttgggtgaatacccagggcagggatgacggggcccggctgtgtgtctgctcagctttggaagatacaggaatgttactttttaatcatttcagtaagaatgatttttcaaggtaagt

SEQ ID NO: 252460 - DNA, 333 bp, Homo sapiens
catatttgaacagtcaaaacctggcaaaactgctgtttagtgtcatattttaaaaacatatttccattatcaattattttggtattgaatgcattttgactgaaacaatagggatcaactttcgtgactgatttcaaacccattatttgtgattatactgtactcctatactgtaggagtacagtatgtaaccaaatgtaattggtagtagaatttgaccagttcctagttaggtagttaatatgttctgtttaaggaatttacatttagttatatagtagtttcttatcagatgtagattagtgggaaagttgttttgaagtaattaaacat

SEQ ID NO: 252461 - DNA, 235 bp, Homo sapiens
ctccagtgacttctcaatcccagccatggggattgggcccttctaagttttttcttcttgggtactcaccttcagccctagagcattctttagcactcacagtttctcttctcgtcgggttattctttatattaatcttttcctgtccaaattactctctatgtctcctgatcagtccttgactggaagcatcaagccttggattccagaagccttatgaacccccaggcaggat

SEQ ID NO: 252462 - DNA, 294 bp, Homo sapiens
tagagttggagagaattccctgttaaatccatcaagtgaacccagctcctttttgggaactgtgcagagcgtgtgaagaatctcaccacctcaagacatttttcgaagttactgaaatgattaaatgaatcagatgcttcagaccactccaaactgcaggtcatgagccattagtgggtcattatatcattttggttttaaaatgctggtcaggcccagcattaaaaaataaataaatagagatgcggcaagcccgtattaaacaaatcactaataaaaactggaataattcaa

SEQ ID NO: 252463 - DNA, 298 bp, Homo sapiens
  misc_feature (248)..(248): n is a, c, g, or t
  misc_feature (261)..(261): n is a, c, g, or t
  misc_feature (269)..(269): n is a, c, g, or t
tagagttggagagaattccctgttaaatccatcaagtgaacccagctcctttttgggaactgtgcagagcgtgtgaagaatctcaccacctcaagacatttttcgaagttactgaaatgattaaatgaatcagatgcttcagaccactccaaactgcaggtcatgagccattagtgggtcattatatcattttggttttaaaatgctggtcaggcccagcattaaaaaataaataaatagaaaacctngatcggccgaaanccccaacncaaacccactaaccatatataactagaac

SEQ ID NO: 252464 - DNA, 297 bp, Homo sapiens
tagagttggagagaattccctgttaaatccatcaagtgaacccagctcctttttgggaactgtgcagagcgtgtgaagaatctcaccacctcaagacatttttcgaagttactgaaatgattaaatgaatcagatgcttcagaccactccaaactgcaggtcatgagccattagtgggtcattatatcattttggttttaaaatgctggtcaggcccagcattaaaaaataaataaatagaatgagatgcggccggaccgcacaagccgactaacacgacccgctaaacgaaaaatt

SEQ ID NO: 252465 - DNA, 296 bp, Homo sapiens
tagagttggagagaattccctgttaaatccatcaagtgaacccagctcctttttgggaactgtgcagagcgtgtgaagaatctcaccacctcaagacatttttcgaagttactgaaatgattaaatgaatcagatgcttcagaccactccaaactgcaggtcatgagccattagtgggtcattatatcattttggttttaaaatgctggtcaggcccagcattaaaaaataaataaatagagagggatgcggccgaacacccacttgttatcaccaccacagcgggaaacacaaca

SEQ ID NO: 252466 - DNA, 585 bp, Homo sapiens
gctgcattgtgtccagggtttgcagatcagcacaccctgtggaaaaaacagggtagtttaaaatattactttagtcaactttgtagaaaatagacatttgtcagcagatgtgctgggtttacaaatgctgctttgaaagaatgacgcagccttaaaaaggacgctgctaacttctgcagagcagcatgcgtacgcggagagttggcattaatgagccggcactcacagctccaaagtggcaaatcagcaatgtctgtaacatttcaatgtgctcctaatttcttttcagaactgtgcagagcgtgtgaagaatctcaccacctcaagacatttttcgaagttactgaaatgattaaatgaatcagatgcttcagaccactccaaactgcaggtcatgagccattagtgggtcattatatcattttggttttaaaatgctggtcaggcccagcattaaaaaataaataaatagagaaattaccatgcatatggctttggtaaatattgtgaaatgtttagttatgtatgtattcgaaatgtaaaatgtatttctcactgtgagctactgttaaaaaaatgtttgag

SEQ ID NO: 252467 - DNA, 264 bp, Homo sapiens
tagagttggagagaattccctgttaaatccatcaagtgaacccagctcctttttgggagctgctccattaagctggcagctgcagaacctgatgtaagcctgcatgtgggacagctcagcggccaggatgtccccaatcatctgcaccggcatcttctcgcccccggtcttcttccgcacccgcaaagccctgccaagaacacactctcattttgtgtttctaagtgaatgacttaggtaaataaatgacgaatcccatggcag

SEQ ID NO: 252468 - DNA, 543 bp, Homo sapiens
tagagttggagagaattccctgttaaatccatcaagtgaacccagctcctttttggggcagagacagcatttggaggatgtgagagcttccgtcactatttgtgaattcacacatcaaaagtgatgccttgctttgactctgcgtggaggcagccctgagtctgatgcccaccatctctcatgagagacagcagataccccgagagctagccagcagcagcctcctcacctcgacgacgagctgaagaactgtgcagagcgtgtgaagaatctcaccacctcaagacatttttcgaagttactgaaatgattaaatgaatcagatgcttcagaccactccaaactgcaggtcatgagccattagtgggtcattatatcattttggttttaaaatgctggtcaggcccagcattaaaaaataaataaatagagaaattaccatgcatatggctttggtaaatattgtgaaatgtttagttatgtatgtattcgaaatgtaaaatgtatttctcactgtgagctactgttaaaaaaatgtttgag

SEQ ID NO: 252469 - DNA, 694 bp, Homo sapiens
taagactgtttgacatgtaattgatacttagtatttgaatacatgaaatcaatgaataaagtgggctttatcttgcatgcagaagagagacaccatcagaaacatatctgtggaaaatgatttggtgtaaagagggagatctgtaagaaaagaagactgcttggcttaataggaactttaacaaatgtgtgctgaatggataatagttagcatttattcagtacctactttgtgccagaggtgacccactgattggcggattaaattcggtaacttggtaccgaacatggaaggtatctgctggctaattctctattattaataggatcagaatctttagatacttaaatgctgcaattcagctttctggtaattctcaggtctcctattaaactttgggattatgctttctctcttaaggatcagagggaattgtgggtataaagtggggcgtgaaacctaattggggaggaacaatcttaggggtgaaaaaaggactttattattttgaacattacttgaccagagtcgggttaggacatgacgacatgctcacctgggacaagggactttataaaaaaaaaatctgggggccggcacattcccttggggttaaaaatgtgccgttaaaacgatgggaaaccggccacaaatatgtgaacccttttgccgggaaataaaggcccacgcttct

SEQ ID NO: 252470 - DNA, 1189 bp, Homo sapiens
aaagcttgcaaagactgcttttaacggaaagttttcatgggcaggattgagaccaagaggaaagaaacttcaagttaatggactaccttgaaattttaggcaaaacctgtacctgtgtcatgggagagactgggattatggccacacttgatctgaagttgaggtcaaacttggtgatgttgccttgaaaatagagattttcatagaccaggacgaagatagaagggaaagttacaagggacttcagcttaaatttagtctctcttatcttggcacagagggatgtatctgttaatctgaggtggatcaagttcaggcttgagagagggagtaatgcatgagactttgaaagtagtttgattgtgagtaagcaagagatggtgaaagagatgccttagatcatgggcatacttagatcttacaattttgatgatgaattcacgctagcctgagaactgaagtggaaggctacccctggttgatgatgggtagcagggatgtagaaaagtgctaaagtctttaagatcttgccctttaaaagaatcatcaggtggggcagatgattaaagatcattacttagggtttaatgcgttcagtgtgtttagatttgcgtggcagttatacccataaactcatcaagaaccagtggattttctgtatgtcatgttctgtggtttttggttagtagcattgatgaacatactctacactcaataataaacatgaagactttgctgagaggttttttcatttcagctcatagatttgcaacttatgtaaagaattgttaggcagtttaaactagaaaatttggctcagccaaatctgaggtaagattaaaataaggcatgctatcagtttgagggactgagttacttaaaaccatgaatagatagaaattcattctaatgattacacaggtgtgtgttttttattttagattatattaaaaagtccagttgttaaaatgctgggaaatatttcaactgtggccctagccctgttagctttaccaaaaaaacaagtttttttttttttttttttttttaataggagacagggtctcactctgtctctcaggctagagtgcagtggtgccatctcggctcactgcagcctctgcctcacaggttcaagcgagtctcatgcctcagcctaccgagtaattgggattacaggcacccgcca

SEQ ID NO: 252471 - DNA, 468 bp, Homo sapiens
ttgtcatgtgactggtgtggcatgctcacagcagcatggacagttgtcttgtagctaagctaggcaagctaggctcatggcatagtggacagctgtcatgtggttggtgtggcaggctcatggcagagtggacaatcatcatgtagcttgtgtttcaggatagacagctatgatagtcactccttcttctctcccgtgccctttccctctctctctgataacaacacccccatccggcttcccaggaaccagctaccctctacccagatgaccatgactaaggcccagactacctagaattccgaggggcagattgatatgggctggagtggtcagagaaagcttcgagcagacccaggaaattgagctataccttgaaaggcagacaggattgaggcagtcctgtctcacctgaggagaaggcatttcagatggtggggtcagctagaggtataattaaatgtgggc

SEQ ID NO: 252472 - DNA, 327 bp, Homo sapiens
agggcttctgctagtatgttcagggagacagatgggccgactgaaggcagacaggttggtgagtgcgttcacgggacatgctggtttccagtagtgaaagattctttctgctcctgggactcaagaacctgctcgtagttgttaactccagggtcctggggaggccacccatgccccacagggaagaaaacttcttcactcacttactgatccttgaaatgtcttttaaccagagacaagtcttgtatttcacagtcagagggagtatgcaagacccccagaagagggcgcacggccacaattccacgctggtggaaggactggaat

SEQ ID NO: 252473 - DNA, 622 bp, Homo sapiens
tcggtcccaaacgctctcacaatgaaaactaattacacactttgacatcaccatagtcaactatactcttgggaagacaacatgacagaggtggtgtgtgttgagggggtgggtatatgtatacacgatattccataagaatatgtacacctaaggtcagacatacctattggtttaccttcatcctctgttctctgaaggaaaaaaaatgtagaaaggactattaatttagttaattaaaatgaaaaaatgcagttctttgttaggaagggtctccctattttagcgttcttcctttgtaatatgaactgagagaaccagcaatatctgtgagcagcgttgaatatctcgttattttgaatattattttggcatggtcttgttatcaatacatatattaacatatctgactattatcattacgtcttttgcaaattattttttttttacttagctctagatttttcattgacatctggttatttgagagctaatcacttcatttattatgtaaatctctctattgctatttttctcttttgatggcttttagccattttattgtctctgggcctgtagacctatggaagatttgagaaagaaaaggaaactaaaaaaaaaa

SEQ ID NO: 252474 - DNA, 363 bp, Homo sapiens
cttcgggacagaaaatagcacatgcagtccagggacctggcttcctttgtaatacgctgcttgtcttgcattgaccacagcactgtgtgctgtggcaggagcactaggctggcttagaatttaaatattcactagcctgccagcctcgctttcctcccctgggctcctgggtcaggaggaagataattgctttcctgtgagcttttttgacaggacacaccctgtttgcaaatatctgtggggttagcgctcaggagtgtgaagagaggcgatcatgtgcctgctgggagctggtgcctgtgattgttgcatggtgtgtgtgtataatcccaggggaatgtccagaaaaccagtgtatgcttt

SEQ ID NO: 252475 - DNA, 242 bp, Homo sapiens
caggcatttgtgtattagccaagagttgctaatgcatttcttgatcataagtctcagagaaatgggatgaaagatcttagatttttatacactctgcttcaatgatttctcagcttttctgatctgaaaagaataaaggacaccttttagctaagcactttctgttttatttcttataatgccatgtagtggctgttactgccaacacagcagtcatttaataaaccctgaatgtctgtagc

SEQ ID NO: 252476 - DNA, 643 bp, Homo sapiens
ctgacatgcatgaaggggagatctgcccactcttacaaagacaggatgtaattcatcctattcatggtactgagtttggaaagatcttcatttaaactatggaaaatacataaaattgcaagggaaatccaaatggcactggaatcccccagcatggtgacaagcgtggcctcctatttgaggctgcccacaaagagtttggtaacaaaagatgcactggagttgatggtaggaagttgattaacactgtagacttaatgtctgtggctatttaaaatgcagagcctattgttaggtcagtggaaaccagactaaacctgttgtctctcaggtgagaagtgcataagcaatgttatttcatgaacttctattcttacagtatgtggaaaagaactgtaaatactttaaaggaaatcaacaaattcaaacaaacaaaaatcaagatttcttcaaatcagtctcagaatttctttggaagagaaattttatatgataaaaaagaatttgataaatccttgccttgcggacatagccacacatgaagaagttataatattcctgaaagacacccttgtaaaatggatataaagactggatttcattgtttacttactgttatggactgaatatttgtgttctctca

SEQ ID NO: 252477 - DNA, 448 bp, Homo sapiens
acttctcaacagcaatcatggaagccagatagcagtggaataacatcttaaaagtgcagagcaaaaataattatcagcctagaattgtgtacatagccaaactacctttcaaggttaggattgtattagttttctattgctgcataacaaacgatcacagacccagcagcttaaagcaacacatgtttattatgtaatggtttctttaggtcagaggtctggcacagcttagctgaattttctgcttcagcatcataccgaactacagtctaggtgctggctaaggttgtggtctgataagagaattgactggggaaagatctgcctccagactccctcaggttgctggcagtattcatctccttgtggtagaagaactgaggttcccatcttcttgctggcttctggccaggggcagctgtcagctgctagaggcttcccacaattc

SEQ ID NO: 252478 - DNA, 523 bp, Homo sapiens
aatcgaatacctgtcacttaggaagtaatcttataaaatctgagaaaaaaaaatccaacctgaatctgcaagcttcttgatctaccgctttttgagaattataagacagagttacatattaaaacacaccatggagatacaaaaacaaaatttagtgaggggactttagggcaggggttagcacacaatgcgtgggacacatctggcccattgcctgtttttgtatggcttttgagccaagaatagtttttacattattaaatggttgaaaaaattcagaatattttgtgaattatgaaaattgcagcgttcataaaaaggttttgttggaacacagccatgcttatttgtttatgtattgtttgtggctgctttcgtgctacaagggcagagttgagtaggtgcaggagtctgtacaatcaaaatgccaaaatatttactcactggcccttaacaacaaaaaaaattgtcaatccctaatctagaggactaatggcctggtttctttaacaaaaaaattcca

SEQ ID NO: 252479 - DNA, 866 bp, Homo sapiens
attcatgttgtattaccacaattacccactttctttataaagcggtagtaagtctttcagccaaaagaataagtccatgatgggattaagtgaaagtccaagaggtactgcatgcacctaaggtggagatgtgtttatcttttgcataagctggggatgtatttggaaggtttctgctagcccagaatttgggtggacaggctgagcccctcccaacagcaggattcacctatggggttggttttgggtagacaggctgagcctgccccatggaactgtaggggcttacgaaggcatttcgtttggggaaggagctcatccaggaggactgggatctctggttatatgtgacttctgacctctgggcatggaggtctctctccagaggcccaggcctggacacgaagggagagaggcctccattgtcccacaggggccgaaatgcagacggtgcatccccggtgccctggggaacccttctctgatcatcaggattctcttggactccggggtccttgtcctgctcaggcatccctgccctgctgtccttcagggccctcaacacgatcttctctggacacgagtctggggatagccgggtgttgtgggctccaaagggttgactccttgctcctgggccccacagagagtccttgtgctcagtgcactggctgtgctgcaagatatcctggaattcgaagcacacagtgctggcttgctgtggtacctgtgcaatcaaattgaaggcaagatcaccaggaaggaacacagggcttgcaagatcacggaaaaccttcttggagttgttttgacacaccactcatgtcaagtgtctgggtacttgtaggatggcccgccactccacc

SEQ ID NO: 252480 - DNA, 585 bp, Homo sapiens
cttccatcacaaattcaattccactcaattatgtctacatatccccattccttctactgtgtttctatgctgtgaactataagggagcagatttccaggagttccctgcatacatctaattattctccttcctacttctctcctggtctctcatattctgtttacttcataagtttgatgtgaaaggagattcagaaaatgcctctgctatatttaatgccaaccaaatagtacaactgaaaagaaaatggctgtgattagactgtagacaaactgaatgaaacaaacatcaaacttagggatatgtataaaacagccactccttgtacatttcagtatttctgttttctacactccaaaaaaaggcattgaaatagcctttaatcctaatagaactaatataatttttacggttgacttttctttggcactttcacatatcctcaagtcctaaaagaaataaaacaggctgggcgtggtggttcatgcctgtaatccgaggcaggcggatcacgaggtcaggagatcgagaccatcctgactaacacggtgaaacccggtctctactaaaaatacaaaaaatta

SEQ ID NO: 252481 - DNA, 414 bp, Homo sapiens
tctttgatcacgtcattggttaagtttcactattgtttttgccagcttacttagaagcagctgagttaccattattacattaaaaagtactaaagtatgatatgccataccttaaaacttcctcaagaatgaagtttacttctcaaaaaaaaaatagaaccaggctgggcacgatggctcacacctgtaatcccagcactcctagcactttgggaggcagaggtgggtggatcactttagttcaggaatttgaaaccagccagggcaacatagtgaaaccttgtctctacaaaaaatacaaaaattagctaggtgtggtggcatacacctgtggtcccggctactccaaaggcagaggtaggagtgccattgtactcctgcctgggtgacagagtgagatcctgtctccaaaaa

SEQ ID NO: 252482 - DNA, 363 bp, Homo sapiens
tcttacaaaagtatactatacagagaagaggggacaatctaaagctacacataccaccccagacaaatttcacaaaccatactgacccaaaaaaggcaagttgcagaataatacatacaatatgttattatctgtataatgtttaaaaacatgcaattgcagcaacatatattgtttatatacatgtacaggttaaacatccaaaatctgaaaatcttgaaatctgaaatgctccaaaatccaaaactttttgagagtcaacatgatgctcaaaggaaatgctcattggagcatctcagattttgaatttttggattaggagataattaattggcacgtataatgcaaatattccaaaatctg

SEQ ID NO: 252483 - DNA, 620 bp, Homo sapiens
gatcgcttgagcccaggagttcaagaccagacagggcaacatggcaaaaccccatctctacaaaaaaatacaaaaattcgctgggcatgggggtgcatgcctgtaatcccagctatttgggagactgaggtgggaggatcacctgagcccagggatgttgaggctgcggtgagccatgatcatgaaaccctgtctcaaaaggggggaacaaaaagagggtatctcaaggtagggtatctcagggtagggtttctgttgaccacttttcttagtatgtctttaaataaaatgttgatgccatttttaatacactaataagcaaatgaaatggcattagattctggccaggtgtggtggcttatgcctgtagtcccagcactttgggaggctgaggtgggcagatcacttgaggccaggagtttgagatcaccctggccaacatggtgaaaccccatttctattaaaaatacaaaaattaggcgcagtggtgtgcgcctgtaatcccagctactcaggagtctgaagcacaagaattgctttaacctgggaaatggaggttgcagtgagctaagatcatgccattgcactccagcctgggcgacagagtgagacctcgtctc

SEQ ID NO: 252484 - DNA, 571 bp, Homo sapiens
atgtttccttccatcttctgtgttctaatttatgctgaggtcatgaaactcagtatgagttcaaaaataccacctgagtgagctgtcaccaatttcccacaccgtgtctaaacttaaaagagcttcctctctatgtgagttttcacacagatattgctcattggttcaggatcagttctcctagggaatgttctcccaggggcatagggtttttatttttgaaaacttgggcagtacagggcaaacatgctgaatggatctgtcatctcagcctttctgccacggtgcctgcatggtgcctggctgccagtggagccatctgaccttagaaaccctcaacactttacaaaagcttaaatattaatttatacatgagatccttaataggttctgaagtaaaagcagagtgctacagtgagaaaacaccttgactgtgagttggggtccctagcaagattgtctgtaactaataaattttgtgtcattgggtaggttatttaacctgggtctttttccttatctgtaaagtgagttagaggagatgatctctaagattcctattggttgcaaa

SEQ ID NO: 252485 - DNA, 392 bp, Homo sapiens
tgcctttaggatttaaatttctcttaagtgggcagtattaaaaaggaatgctaggagttcatctacttcacttttaccctcctattaaatcctcagcatacacagaagtacacacaactctcaaccggcattttcaaagctgaatccttttgtaacgattactttccctcttgattttacttgcttaattagaatctctagaaaatctagtagcattaaaaataatcacccccccaataaaaaaaaaatcttcattaggcaaacaccacaataatttttgtcacagacaagatctatcaaaagattctttaaaattagtggacaaaagtttgaggaaaaacgttatttgtataatcccaacgtatcttccccatgaaatgtattaattacaa

SEQ ID NO: 252486 - DNA, 153 bp, Homo sapiens
aaaaaacacacatccctatgtccacaaacaccctcaccctcacttcctccctcatccacagacacctgttccccagtgatgcacatttgctcacacacctgcagctgctcacacatgcctgcatgagaggccctctccacccttcagtctccc

SEQ ID NO: 252487 - DNA, 307 bp, Homo sapiens
tatggtcatggaagtgcagcactggcatcttagggagctgtggagtgtaactcaggagtggcacgtgggtgagagtgggcagctgtgccgggtgctccaactgcctttggcagccagtggagaaggtgcgaccaaggtgctcaaattatttttagctttgttttcttttttgactttttttttttttaaaaggtaacttttatattgtcacagaacaaacagaaccaagatttaagtctcacaatttatgtagctaatttcatgttctgacagttctaccataaagcatgcagaaaagttgctgtta

SEQ ID NO: 252488 - DNA, 339 bp, Homo sapiens
caccatgccaacctcccttcctccaccatgccaacctcccttcctccaccatgccagcctccctccctccaccatgccagcacagggactccccgtaaatcatcttcatccccctttgtggaaagactgaagatctgtatatgacaaggtcaagagtgggctcacccagtgctatccaagagaaacaccgtgtcagccacctgcataactttacactgtctagtggtcaccttaaaaaaagtggaaagtaacagataaaactaattttcatattttatttcactcaatgtatccgaaatattaccatttcaacatggaatgaataattaaaattattaa

SEQ ID NO: 252489 - DNA, 552 bp, Homo sapiens
  misc_feature (106)..(106): n is a, c, g, or t
gctcgctgtatgtgggggatgtaacgataccatttcccagggacagctagcatgatcgatttaatcgcttcaatagattgggcctcgagccaagaatcggccgagncaatcttttcaacagaatagaagaaacccacagctaatgtacatcagctctgccatcactccctgccgggtcagggaagaagaaatttgatgcctagagattgatctgctttttgtttttaagttctagttctggttcgatttcagaaccagtctgcaggcaactctgcattgtctccttagagaactggacaattccactgatctggatcctttggcagcaagctgacattttattgaggctggtcagcactcctggccagagtcttgaaattgtgggtgtgtttttgctgcccattgttgagttattcatgaacagatatgaaaaccatatatatccgaattttgttaccactagatgtgatgagtttttctttttgattatttggggattcttagttctctgtcaaactcttcagattaaaacccttcttatagctaaaaaaa

SEQ ID NO: 252490 - DNA, 461 bp, Homo sapiens
cagttgagcaagtagattggcttccagactaaaccctggattgaggtacagctagaataactcacttaggttttctgtttattctttcaggaagaagaaatttgatgcctagagattgatctgctttttgtttttaagttctagttctggttcgatttcagaaccagtctgcaggcaactctgcattgtctccttagagaactggacaattccactgatctggatcctttggcagcaagctgacattttattgaggctggtcagcactcctggccagagtcttgaaattgtgggtgtgtttttgctgcccattgttgagttattcatgaacagatatgaaaaccatatatatccgaattttgttaccactagatgtgatgagtttttctttttgattatttggggattcttagttctctgtcaaactcttcagattaaaacccttcttatagctaaaaaaa

SEQ ID NO: 252491 - DNA, 426 bp, Homo sapiens
cctagtccctagaaaccactgatccattttccatccctacagtttggccatttctagaatgtcttgtgaagggaattattcaatatatagcatttctagtctgttttattcccccttagcaaaattcccttaagattcatccatgtggccgggcatggtggctcacatgtgtaatcttagcactttgggagaccaaggcaggtggatcacctgaggtcaggagttcaagaccagactggccaacaaggcaaaacctgtctctactaaaaatacaaaaattagctgggcatggtggcaggcgcctgtaatcccagctactcaggaggctgaggcaggagaattgcttgaacctggaaggcggaggttgcagtgagcagagatcatgccattcactccagcctgggtgaaagagtcagactccatctc

SEQ ID NO: 252492 - DNA, 530 bp, Homo sapiens
atcttgcatttttgtaggagctttttctatgaagtgtcaatctttgaattctacttagggcttttaaaaatgtttatctcttcttgagatatacattgagaattgagtattgagcatactcttggtaaaacaagatttggactcagtattaacaaaaatctgaaacttaataaaggtttatatcattatgtaaggtgtgaatagaaccacaggagaaactgattttaaataaacataccagaacatatgtatgtcatgttaaccaaataccttgggaggttataaatgcatttcaatagggcattcactactcaacatactgtgaaacttcttttttggcattgcaatcagaatgactttaggaactacacattatcatgtagtcaaacaagattttttacaactccaaattacattgcctgacttaacaaacttactcacttgacttggcttcaaataaattccttctgttttctcaaaacaaaagtaaaggtaatgaacaaaacaaaacaaaaaacccacaaaagaaa

SEQ ID NO: 252493 - DNA, 158 bp, Homo sapiens
gccgtagacgccacgctccgaaatcaccatcaagggacttaaaggagaagaaggaagttgtggaagaggcagaaaatggaagagacgcccctgctaacgggaatgctaatgaggaaaatggggagcaggaggctgacgatgtgaagtagatgaagaag

SEQ ID NO: 252494 - DNA, 180 bp, Homo sapiens
  misc_feature (128)..(128): n is a, c, g, or t
gccgtagacgccacgctccgaaatcaccatcaagggacttaaaggagaagaaggaagttgtggaagaggcagaaaatggaagagacgcccctgctaacgggaatgctaatgaggaaaatgcgctgcanatgacaagcagccttatgaaaagaaggctgcgaccgctgctggaaatgctga

SEQ ID NO: 252495 - DNA, 367 bp, Homo sapiens
cagatctcctccgggagtggtgggcagctactgtgaaaggcctggttcaaaaacctcacagcggttgttttcagagttgtccctcctgtgtactctcaaagccccagaatgaagcaaagcatcctcccttttcaaactggcactcttccccaaccttgaggaccactaggcactttgtttttaaagccacagttacttttatggagaagtattgttatgaaaaaagggaggcatctgaggagtggaaacagagaaatgagtgactgagatcagtgtcttattttgaccatcttttccaagtgctgcatcctcccaaacacaacatgaactcaacacttaataaagctgcagtcctacgtgaaaaaaa

SEQ ID NO: 252496 - DNA, 227 bp, Homo sapiens
ctcatctccagttgtaatccccatgtgtcagggtaggaacctggtgggacgtgattggatcatgggggtcattcccccatgctattctcattatagtagtgagttctcatgagatatagtggtttaaaagcatgtggtggtttctctcctgccaccatgtaagatgtgccttgcttcccctttgctttccaacattattgtaagtttcctaaggccttcttggccat

SEQ ID NO: 252497 - DNA, 278 bp, Homo sapiens
ggaccctggcaaagtgtcacacacagcactgaatccagacgcagggaccccagataaactgcaagacgcccagtgaacatggatgtcggagcatctaggtgggaccctggcaaagtgtcacacacagcactgaatccagactcagggaccccagataaactgcaagactcccagtgaacatgaacgtcaggtgagcaacagacaagctttcggtctacagataaaatgcaagacgcccagtgaacatgaacgtcgggtgagcaacagactagctttca

SEQ ID NO: 252498 - DNA, 339 bp, Homo sapiens
aggaaattgtgaaatactttctaatgatctttaaagatataatgaacactaatccatctggatttgtgtaggtgtggtcctggtttaagacaaagggacacaccggtgtttccctttgtaccagacagcacaaacccaattaagtgtttaatagatactttctgtgataagtccctttgaaaaacaaaacaaaacaaaatcttatatagattgcctgaaaaagtgaagtaatatcacttctcgttaaatgttaacctttaaataactaaaacagctagtttatcctctggacttaaaaccctacatcacactagctttaacatacatacaaagggtaaa

SEQ ID NO: 252499 - DNA, 234 bp, Homo sapiens
tagcattcgggtagttcaaattccacctttttataaatgagaaaaacaaagttcatacagactgttatttgttctcagttctctgatggttagtgacatagctatgataagaactcatacctcctaatgtctcaaaacatttatctgctaaattaaacttcactcccaaataataattaggtttgtgtgtaaatgattaattaaaaatcagagcatggagcttctgagctggtt

SEQ ID NO: 252500 - DNA, 182 bp, Homo sapiens
atatgtatgtatgtatgtatgtatttgaaatatatatatatttaaaacagcaagtggtggccagccaagaaaagcctcccataatatcgttttccaaaaactgaaaatatactttaacttgaagggtactagggcacacttccaaattaggcattttcttttagttaaaaatcataattggc

SEQ ID NO: 252501 - DNA, 443 bp, Homo sapiens
ctccccattaacaagtgtctttctggtgcttaactagacaccaagagttgtctgaaaaagaaaaaagctggataacaagggggattatcactatttaactgtgttttcatactgttattaatttagttcagatctagtgccatatgcttctcttcatcattccactgaactcctagtgactttcatggaagttccacacaaagaatgagggcgacatatggttctaatagtggtttgttcattcctctaagattgatgggtattttaaacacattaatcattatatttaagacaccctttaatttcttcagaaggccggatcttcactgatttataggagtccttaccacacagccatacctactttgcttttcttttaaaacttggcatcaagagaaaaatattgacatgttcctcttataataaagtaaaaatgtaacaaa

SEQ ID NO: 252502 - DNA, 863 bp, Homo sapiens
cctccacctcccaggctcaagcagtcctcccacctcagcctccctagtagttgggaccacaggcacacactaccacgcccagctaattttttgtatttatggtagagatgcggtttcaccatgttgcccaggctggtctcaaagcaatcctgagcttaaacgatctgcctgctttggcctcccaaagtgttgggattacaagcatgagccaccgtgcctggtcttaggtggtattttttataatgtgatcagagtaaggctttatggtaatatgacatgtgagcagagtcttgaaggaagtgagataatgaagccgtgtgagtacgagaagaacattctaggccaagggaataataggagcaaagattctaagctggaggaatacttacttgaagaacaaggaggtctgggtagctgggccatagtgaatgagtgggattgtagtgagagatgaggtcaaacaggtaactgggaaagtggaggaggtaaggatgaattatgttgggtcttgtgagccattgtaacaacttaaattttcactttaggtagccattaaaggattttaaacagaggaataatgagatatgatttatgtctaaaagaatctctctaaactatgttggaaatagactctaggggtacaagggcaaaaacagagacagtcatgtaataagggttactctctgtagatatcaaacatacaccagatataatattgaaataacttattggtagcttatcaaagtggcatgctgccaactaaagagcctgtgctggctactcagacagtatctttgccaagtgctacttctttttcttgattagccatttctttctttctccttacaacttgaaaaatagaa

SEQ ID NO: 252503 - DNA, 629 bp, Homo sapiens
tacaaaaaatgtggcaaaacttttaatcaatgctcatatctttttgcatgtgatagcatttatacatgagaataattgcacaaatataaaaatacaaaagccattaatttctactcacatcttaccagatatcagaatttatggttaacaaaagcattataaatgtaatttctgttgaaagaccttttagaaaatataggccattaaagcgaagaagagtattcttaagacagacaatacaaatataaagagggtgtagtacctgtacttgtatcctggatcttactgtacacattttgtactagcggaagactcagaagcagttgctcaaactttgttcaacatcagagaatttacattggagcgaaatacgacaaatgtaataaatgtggaaaaacatctgttcaaaaactgcaggttaagaaacactagagagtttatattagaagagaatttgtagatgcaataaatgtggagaaatatttaggctaaaattaagcctatgtaaacatcagaggatttactggagaaagaactaaggaactaacaccttacaagaaatcggagtattaagtgtaaaaaaatccaaagttcaacctgttagaaactttctttgttggccgggcacg

SEQ ID NO: 252504 - DNA, 439 bp, Homo sapiens
ctggtctcggggactgcagtccttctctcctggatgggttgggggtggggggctgttgagagctttcctcctccttttcttcttcctcctcctcctgtctccctaaccctggaagggggccatccactgaacttcggaaagaggtcaccctccctgaaaaggggacttggattgctgcatccagagccaccccctgtggtccctcaatctagccacactcagttgctaaagcagggagaggtttcctagtccggtgttccggccgacgcaaacggagctcaggatgacgccacatgtgtgtttgagtcaaagcgcttttaactgtggctccaagaacagcctgtacagccacttgagtttccccgtaacaaggaatgtacaatagatgagactttactggcaaaacaatttttaaaaataaagggagaagcagcaaaaa

SEQ ID NO: 252505 - DNA, 380 bp, Homo sapiens
gccactgcactccaccctgggtgacagagcaagactccatcccccccaaaaaagaaagataatactcaacatttatttgaatatttccgtaaaataagatcatttaaatgatttattcaacattttgacttgattaatctatacctgtcggccgtaagacaccactattgtcttaactgtaatattgggccaaatctaccatataaggtgattgtgaatcaggctgaaactcccaacccagtcaggttgtgccaacaggtgacatatttaacctgcacaatattttagggcatcaccataccctgttgtcattatacctgcttcttttaatcagctgaggtaccagcctagcgtttgaagacattttgagtttgaaggcc

SEQ ID NO: 252506 - DNA, 720 bp, Homo sapiens
cctgggtctcctgtggactgttttcctgcacccagtgtgcttctgcctccctccatttgaggccatgtgtcttctcatgctctcttgctctctctttttgaactgttgcttatttggaaatattttcagttatttccacacataacttctagatgtttatacctttttacagagtcaggtatcctttttctggtgtatttatttggtctggaatgtgtcaggttttgaggccacagcacagatgctttgctctcccataagtgtgggcaatatgtggagaatggctttgtgtggattggaagtggaggtgaagggggaagtatcttgttgggaagaaatagctgactgtggccttcaagtgcttcttgggtggatgcatttaataatgatcttagtgaatcagttgctgcatattgaaaacaagatggctggggccgggcgcggtggctcacacctctaatcccagcactttgggaggctgaggcaggcagatcacctgaggtgaggagttcgagagcagcctggccaagatggtgaaaccccatctctactgaaattacaaatattagctgggcatggtggtgggtggctataatcccagctactcaggaggctgaggcaggagaatcgcttgaacctgggaggtggagcttgtagtgagtcgagattgtgccactgcactacagcctgagcaacagagcgagactctgtctcaagaaa

SEQ ID NO: 252507 - DNA, 878 bp, Homo sapiens
tgattttggatgttatgtccatgtatactgccaaatatgaacataaagctcactatatacttataaaatacttctagaaaaaatatctatacagcaaggcttaaaaaatgagtttcatgctaagaattaagcctggtgaccaagttagtctttggtatgcatttgatacctgccatagataggaggtgtgcctccatcaagatggctcatcaggtaacaatgccacttggtagcagatgtttaaaaatagccagccttaattaactgctttcatatgctgtccactgtgctcagtgggtttcatggggtggtgttattatcactattatgtagatgagaaaatcaaggttcttagatgttctggaatttgttcattttcacatgattggaacattgtggtcttgtctttcaagtccatgtctaccatactccacagacccttttctgtccactttgtcacctataattctgaactccaatataaagacttcaccgtatttgaaagagaatagtgggaagtctgatgctcaattttgtgtacagaacagttgcctctgtgacattgtaactgctgaaataagaaaatccccttttgattcaggatattatttaattattgcaaatctcctggcatagatctgatactcaagttaaaaaattaggctcaggttcttacctatgattttgctttttatagtactttgaaacctacaaaacttacattcaacatttacacatacaaaattcatacagtctttcaaaactaagattgcgtaataatttgatggcttgaaattttaagtattacaatataaagagcagagactttatgtttaggattaatactttttaataaataacattatcctttgcattaa

SEQ ID NO: 252508 - DNA, 407 bp, Homo sapiens
attcgttgtacagattatctcatcatccaggtattaagcctgctacccatttgtttttttcctgatcctctccttcctcccattctccactctgtgataggccccagtgtgtgttgttcctctctatgtgtccatgtgttctcatcatttagctcccacttataagtgagagcatgtggtatttggttttccattcctgtgttagtttgctaaggataatggccctgcagaggacatgatcttgttcttttttatgtctgcaaggtactttgcttataaggacaaaggggagaatagggattggtgggcaactagtcatctactagttacctcagtaagctaagcattaaatctaagaaacagcaaaataagcctatggaaattaggaagaaggaaagaatcaaggt

SEQ ID NO: 252509 - DNA, 422 bp, Homo sapiens
ggccaatggagtgtgggagggaatgtaggccattttcccagcagcctgattcttcatgataaatcagaaaacttggtccatttacctgcggatacctcactttgttgtgaaatgtttttggttgtggtgaccagaaaccttttagtaggttaaagagaaggaaaataaaaaggctatcggggaagaaatgaggggacttgttagaacactagcttttaaaggtacccctgagatagggagatgctcttgggaggttggggaaaaagcattaagtaatattgagtcacacaaagtctcaatttagatctatttttattagtacatttctctgtgtctccatcttcaatgcgtaatgatacctagctaatatttacactgttttagttatatttacttttgtcattacctgtaggtatagcaaa

SEQ ID NO: 252510 - DNA, 582 bp, Homo sapiens
ccgccagcttccggaagaccagacagcgattctcaacagtgtggaccacgatgacccaggacatgccactttgctgtgactccaccccactctaggtgtccccggggcgaggttgctgggctcaggcagggagggccactgtgtgggggtgtgtcctcctccgtctgccaagggcggcccagacctttgtcctgcatgccccctcttttgccagagcgggtgtctccctccagatcctggccgcctgtcttcaggacggagggtgggcacaccttccacctgtgggtcgaggtcaggaagtggattggagactgggcaacacctgtctcctcccctccgccccctgcttcactaggttgatttttctcatctcttccaatgtctttggaagtgaagaggaaagcaatggcttttactgctctctgcttctgtttcagtttttcaagtcctggaagaaggctggacttaatgtccatcttccacaccccacatatatatagatatagatacagatgcatatgtctgtagtgtgtgggtttctctatgtgtgtatatatatatatatatatgtacattgaggca

SEQ ID NO: 252511 - DNA, 798 bp, Homo sapiens
ggtatagggggatcctgcaagcagaaatctgtggtgggcgggcggcaggtgagcaaggagaacgtgtctgtaaaggaagcacagggaacaggtggtggctttgtaagacagttggaacccaaggaaggcaggccatcccccaggaaagcctatgttggtgagggttatgatgggagaatgagtgaactgcagcctggcaccaccacaccctggaaggtgcagttgggaagaaagtttctgaggctgtagacatggggatcggatgctggagaaaccccctgctgctgctgattgccctggtcctgtcagccaagctgggtcacttccaaaggtgggagggcttccagcagaagctcatgagcaagaagaacatgaattcaacactcaacttcttcattcaatcctacaacaatgccagcaacgacacctacttatatcgagtccagaggctaattcgaagtcagatgcagatggagtttcgctcttgttgcccacgctggagtgcaatggcatgatcttggctcactgcaacctcctcctcccaggttcaagtgattctcctgcctcagcctcccaagtagctgagattacagaggggacaagagcaggcgtggagggctgccaggtgcctctgggggcttcacgcccagctcctcccaactgaggctcctggtcaagtgacatccagactctccagacctcagtttcttcacctgcaaagtgcctcagaataggagggaagcacttagcacagtgccaacatctggtagcacttataaaaaatctttgctgttatta

SEQ ID NO: 252512 - DNA, 361 bp, Homo sapiens
ttcgattggcgggcaacttagaatgtttcgtatcctacgctggttctgagcaggcttaataagaagctgacatcgatatctgatggcctgagaatctacttcagcactgaagtacacttactcctggccccatggacctattattgttcaacttgcaataatgggacacttccaaagagctgacaggcaatctttaattaaaatacactgaaaataacttgaggcacagtttgcacaaagaaaacaactgctctcttaagttgcccgccaatcgaatcgattggcgggcaacttagcttaggctctccttgcaaagttatttctagttaattcattatgcaaaaggtataggggtacagtc

SEQ ID NO: 252513 - DNA, 585 bp, Homo sapiens
caagagtctaaatttataggatgtatatgattaaaagtgacttttgtgaacatttaaataaatatttgtgactgaattttctatggaacatttttccttcagtggcttgcattttaatgaaggaattattttaaaattaccttattccctcccaatgttgtttaaatatctagagggtatctagggcttaaggaagattggatgtggaacaatgagtggaggcctagagaacaagggtagtttcctgcaacagttatatggatccctagcaaggttcatatttctgtctatactgctggttaatctgaatattcccataaattgtggaacataatccatggccttggttttctgtttcttgtagtaagatttatcattttatttctaccataaattagagatcattacatgattactatgaaggatctacattgctatttgttatgatcaaataaacagtatttttgcagttgactattcagggatctgttaaagcatttagaccttaggccctcatagcatatatatataagctttttggagacttggctctcactactttgagaatttggcacacagggtaat

SEQ ID NO: 252514 - DNA, 167 bp, Homo sapiens
ggtaccaggatcattttaatggtctttggcttcagatgggccatttaaactactcaacaagacctttgtctgcctctggtcagtttcctctgccattcaccccagaaggatcatggattttaactgctctgatcaagtttcttattccacccctgcactttcttctt

SEQ ID NO: 252515 - DNA, 448 bp, Homo sapiens
tgtcagccaccgcgcccagcctaagtaaattttttaaatctgggatgtccagtggggtagccacagccacatgtggctacctcactttgcactaattaaaataaaagtccattcttcactcacagtggccacattttaggtgctcaacagccacatgtggctggggactctcatattagacagtacaggctgggtgtggtggttcatgcctgtaaaaccagcaccttggtaggccaaggcaggcagatcatttgaggtcaggagttcgagaccagcctggccaacatggcgaaaacccatctctactaaaaatacaaaaattatccaggcatggtggcgcaagcctgtagtcccagttacttagggggctgaggctcaaggatggcttgagcccatgtggcggaggttgcactgcagcctcggtgacagagtgagactctgtctcaaa

SEQ ID NO: 252516 - DNA, 283 bp, Homo sapiens
tgaagaaactcagtcatttgccctgcagaattttctacactgtggatttgcctgactacaccctgtggtgctgttcctctatcttgttctggcaaggaagagccaagcaccgcatgactcttgtagaagatggactttgcagactgcaaaaggggaaaggaaaggggcgtgtgatgtttgtaggtgccttggtagaaagtccctctttgcctagaaattatttaggcatccttttataatgcttctggaagaacagaaagaaaaatctatttcctgaatgaga

SEQ ID NO: 252517 - DNA, 230 bp, Homo sapiens
gaagatggaatgccagggtgaagaatttggttttattttgtagagtatgaagagctagtgaaagttcacaggagattaacaaaataaaaattaaggatttaggaggaacagtggtaagaaagaacatgtaggaggcttttgcagtatccagtaatgagatgtaatcacttggattaggattacgccaaagaaaaacattacaaagaaaaaaaccccttcttctggtgccc

SEQ ID NO: 252518 - DNA, 360 bp, Homo sapiens
gttttgcaagacgaaaggttgtagagatggatggtagtaatggctgtacaacaatgtgaatgtactcagtgccactgaactgtacagttaagatgattaaaactgtaaattgttatatatatcgatatatatttttttgagacggagtctcggtctgtcgcccaggctggagtgcagtgacgcgatctcggctcactgcaagctccgcctcctgggttcacgccattctcctgcctcaggctctcagagtagctgggaggatcacatcagccccggagttcaaggctgcagtaagctatgatcatgctgttgcactccagtctgggtgatggagtgggatcctgtctctaaaaaaacatt

SEQ ID NO: 252519 - DNA, 427 bp, Homo sapiens
agtaactcttcagggcatgcctatgggagatttactcctgcagaacttaatcatcctagttttgctcttcacacctttggcggcttcttataagccaccatgctgtaaggaagcccaagccaccctgtggagaggcccacgtggagaaccacagccagcaacaacaatgtgtgtgagctatcttgaaagtggagttccagttgagctgccccagctgacagcatggagcacaggctttctttagatgagcaaccatggtggctgctacttcctgtggagcaagaggaacgtggactgtaagggtcatgtgcacggggtgggaagcgctggtgggtgagctggggtccccccaatgatggattgttggggagctttctttcaaggcactaataaacacacaagcggctccagttcttgaaaaatgtgt

SEQ ID NO: 252520 - DNA, 693 bp, Homo sapiens
aaattcataggaatagaattgttaatagaattgctcgaccaggtttcacatgcatttgccatgcgatggatgtggccagttttctgttcttcgaagagatgggctttatgtagccttcacaacacacaagaactgactgcccacaccctggccctgagcagggctttgtgagcaggttgagcattttcttcatgcggttaagagtgccttatattttgttttctgtgaactcagttgaaatcctttgcttctttttacttattgacttactggtctctttcttattgatttaaatatttggaaatgactgtttctggtattaattgcaaatttctttttcagcttgttattatctttcaattgactcgtggtggtgtttcattctaggcagaaggttttatttttgtgtcatcatatttcttagcattattatggcttctggattttgtcttgtgtttagatcttccctactccaatgtcataatctgggagttacacctttgctctatttggaattaattttggtgaagtatagaaccaacttcatagtttttccaggagactacctagtcaacatcattatatgaatatcctgtttcccctcatgatttgaatgtctttgtcttataatttgcagtattttgaggtctatttctatgctttctaattatttatttgccagtaacatatttt

SEQ ID NO: 252521 - DNA, 489 bp, Homo sapiens
tggttcaagcaattctcctgtctgagcctcccgagtagctgggattacaggctgtgccaccacctggctaatttttgtattcttagtagagatggggttttgccatgtttgccaggctgatgttgaactcctgggctcaagtgatctgcctgcctcagcctcccaaagtggtgggattacaggtgtgagccaccactcccagcctagcctttgtgttctcttgacctagcattcaactatatgttgaattgaaatgaatatgtaatctctgccttctagctgcttaccataggctgattgatgatcacttgtatagactccattgcctgtggaaatggaatagctttccttgtaatactgcctgagctctgctttccacccagtccgttttagcctacttgagccctggaccttgactgctgtctggatgcttgaactatgttttcctttttatttttctaatcatctagaatccagcctaactctcca

SEQ ID NO: 252522 - DNA, 397 bp, Homo sapiens
gagaccctgctgtgagccagggtcctatcctaggcactgaggattcagcagtcaacaagacagacaagatccttgctgtcctagggtttacattctagccattctagcccgggaagacacacaataaacaggatcatttcactttgtgtttttgagatggagtctcgctgtcacccaggctggcacaatctcagctcactgcaaccactgcctcccaagttcaagcccatctcctgcctcaggctcctgagtaactgggattacaggcatgcgccactatgccctgctgatttttgtatttttagtagaggaggggttttgccatgttagccaggctggtcttgaactcctgacctcaggtgatctgcctaccttggccttgtacagtgctgggatt

SEQ ID NO: 252523 - DNA, 545 bp, Homo sapiens
ctcctccaaaaatcactcaagtggcaaatgttgcaggtgggatttcagtccatgtctgtgattctcacctgccatactgctaagctaaccagttgccccatgcaagaagaacacacctcggtcgcatgtggaagcatggggaagacagtaggttgcatcattctctgctgcctggatttgacagcagaactccctttcctgtcgcccgtcactcatatccaggaatgaaagccttgattgaaaggcttgtccaacaatacagctttaacagggccatctgctcaggacacagtaagtagtgacaggaaacatctgctttggaaatgccggtgcttctgttgattgaaatgtacacacaggaaagccgtcttccagtccgggggaaattctgagctgaagagattgtggtattattgaccacatcaagaagagctggaaatgggagaactcttgggtggcagaggagcagatcccaggccagcaggggtcctcttggtaataataacaattgctgataaatattgtttcatgaaaaagcttggaag

SEQ ID NO: 252524 - DNA, 502 bp, Homo sapiens
ctgccacagaagctggcgccaacggagggagttggatccagcctgccctggagctgtaggtgggggcccaggaccacagctggagctcctggctcactgggctgcctgattgctggccccaggtgccagtgaccacgtggtctcagcatgctgagcctcaaacacctgccagttcaggcgggctggggaggcggctcctgtggcaggtgcagtagtgcgggagttgccatcagcttcccaaggagctgcatctcacaccaactacactgcatgcacctgctttctagaaagatcagggagacagccaggagcagcacccgaaggacatggaacgggagtcagttgctcgggcattgaagccaagctctatgggtcctcttcgcactgggcacattgtcacctctctgggcctcagtttcctgcaggtgaaatgaaaaggctagaccatgtttaactgtgggaccttgaggctctattaaatttttaactagaaaatgtccat

SEQ ID NO: 252525 - DNA, 414 bp, Homo sapiens
cacagtttccagtacatggaatgagcttaacaagtggtggctattataagtgcagtattttcttcattgactaccagaaggtggtaaacttcacttattcatgtttacaccatttctagtaccaatggggagaacttaaaaagttgtagaatgagtgcaatataaaaacctaatggctggctgttctctggaagcatgttctggctatgaggtagggaatccccccttccttactctggcctgccccatcaactagttatttagtcaacttgtagctaaatatggatgaaaggaaaatattcctaatatggacagagaggttaggatagacaaagtcttaggatcttttgatagtttattttaaaatcatgttctactaatatagtaggacaaatctaatgggacacagtgcaa

SEQ ID NO: 252526 - DNA, 412 bp, Homo sapiens
ggatcacctttcttctctaatctccacccaggcaaaggccagaaaagcgaccttcagaaggagccagcaccccagctcctgcctcagggcgatatgaagaccccaggaaggaaattatgctgagaaaaggagatcacacctctgtccagcctgcaccggccccttggcatgccctgaagacacaaggcctaaatcaaggtcaaagacacagccctcctggttgtgaagattccaaaggctcccagctgcatgaggagggttacccagaatgtcagatttggagcaattcagcgagaacccttcaaaattcagtgtggtatgtggaaggtaagaggcagacaggccaccaggaggtgggttttatttcgtgtgcacaaagttttaaaaaatacatgtgcaccattaaaaggga

SEQ ID NO: 252527 - DNA, 341 bp, Homo sapiens
cacacacacacacacacacacacacacacacacacacacacacacactgagaaatgcatggccaaaagtaagggtaaaaagcagatgagtgtaaggtgcccggagtaggtgttgcaagccaccactcgtttggttgtcttcctttctcacggaggtcatcttaaaaacagatgactctgaggtaatgtggcttggtgaaagtgatattccacagaccttttagcaagagttctggagctgcgaatctgcgccatgaaatctgtgggcttctcatattaaaaggaaaaaaaggtaacacaacaccactcaccaaataatgtaaaacgaacattcttgttttc

SEQ ID NO: 252528 - DNA, 250 bp, Homo sapiens
tagttccagcaatttctagccgggtgactttagagaaggctcttgattctcagaacctcagttcttccatgtcaggtgatgtcaggaggatcacctacgataatgcatacacgacacccagcactatgtctgatatgtaacagatgttcaaggaattgtcttcatcattctacacagacataacagcgacataattgcatgtcattaattttactctcagggaggcgaaaaaaacctaattaccttccgg

SEQ ID NO: 252529 - DNA, 248 bp, Homo sapiens
ctacccaattagtctgtttatttgtccacatggcattaatggcttcttagcactacatcttgtgttagacaaggatgggcaaggatggggcactggttttttgtttgtttgtttgtttgttttttgacgaagtcttgctcttgttgcccaggctggagtgcagtggcgcgacctcagagaggcttggcagggagaagggctaaatcctaagggtagtttggctacagcaggccatgtgcaaatcccga

SEQ ID NO: 252530 - DNA, 431 bp, Homo sapiens
ctctctgaggggattcaatataattcactgcccaccagaatactgaattcacaacagagaggaaaaaaaaaactgatggtgctgctttgcatctgtttaaatttttacagaaatgttaagggagttaatcttctacaagtccagtcatgtgctttcacaaagggccaagaaaggagtcccaaagctcgccatgactcaacaggaagctctttgtgtcttcctttctacaccatgtctgacaaagaagctgtcttaagttcatgggcctctgtctcttgcgtgaattctgaagtcagtgaagcaacaatgatgtcattgcttctgaagaccactgttggctgagataatgaagatctcttcacccaaaacattgccatttctgcagcatacatttcctaccctttcaaatacaaaagtattctaccgattga

SEQ ID NO: 252531 - DNA, 367 bp, Homo sapiens
aaaattttgtagtcaaattaattgcgacttgggtaagattgaatttttatttcgttgtgtttttagcatctgtaacttacttgccaaagcctttattcaaaattctttaacttaatatagcaggttactgataatctataattttcaggattgcatttctaatgagactgactttgatatatactttatagtatgttagttatttctgtaatctcataaggggagtaggaacttcgggaacaaggaaggtgtaaagaagtgtctttttcaaaaataccaattagtgaggcatgtaaatgtaaaacccttattcctttttcggtattgtattgtttctggttgctaaacattaaaacgggtgattatg

SEQ ID NO: 252532 - DNA, 519 bp, Homo sapiens
ctacttatgctatctgtggatgcctcaagcctgcccaaagctgccaccagaggggaaaatcatttttctttctcttatacctttcatatatttcatatatcatggttatatatagtctggtgtactactggcaatggatcctgcaaaatgtaggcttgtcttcacagaagggagtatatgaatacatgaaaatgatgttcattaacagataatagagcacagcctacccctttgtcaactcagcacccatatgcacttacacaaccaaacaacagtagcaacaatatcatgcttctgcctgatgtaatacaactagctcctgcaccagtatgtgttgcatttgccctttccccatatttgggagacccaaagtcccaccagtcactatacctatttctaaatgatgttcataaatcttttagttcagagagtatagtcacacttttccctgttatggtctgtaatctaaagaatgaacagtaacgttaaccaccaccaatataccttatagtagtcaaa

SEQ ID NO: 252533 - DNA, 565 bp, Homo sapiens
tagtaatccatgatccagaaaagataaatgcaaatacagtgttctctgaagcatttttattatggctaaaaagaagatgcaacttaaagtcccaacagtagaaaaagaatttgataaatttacgtatattaacatagtagaatattaagtagttctttgaattataattatgatacctatttgggaatgtgtgacaagtattaaaattagactgcgattgtaactaaatatatggcgaggtttatgttgtgttaggctcatgagaaggcaagaaattttattatttaaatgttttctccagtaatgtattggattcaagccattgagatttggggagtgtttcagtgacttatttgggcaaaacagaatatttgaaattggcattgtctcagaatctggcatttaggatcattagccatatactttgtctgaaagattgaaaagaacttaaattattattattggaatcattgtaaataatgttgttgttaaaaatgtgattataagacaatgtgggaaactttttttttttttttgagactgtccccccgcccccaccgccaaa

SEQ ID NO: 252534 - DNA, 414 bp, Homo sapiens
cactgaacatagaaataactgaggacactaccatatataacgacatatttagttttaatttagttgaaacccaatgagaaattcaatgttagtcattattagggcttttctcaaactcccaaagttgtgccaaggtcctagagtctcatattgcaacagtgcattgtgggaagctactctgatgcgctaccattaaaccatactgattattatctaatgcccttgacccaggcccacatttttccttcatatttagaggttctgttgcttttaagcccaactttacaaccttttcagtgacttcaaacttacacacacacacgtgtgaccacaataaccctgattgatctgtctgcaagtcgtttttcagcttgtgtttttcaactgcacaaaattctgaggcaaagaaatatc

SEQ ID NO: 252535 - DNA, 615 bp, Homo sapiens
cagaccattaaaatctcagaggacagtgtgcttccttgatttagtattgcagaacctcttctaaaccagtcacttacctagttaaacacccacacatcatagagcagctgatcatataacatatacggttgtgagaacagcattctctccctgccagattcagaacttggaagctggaaaacaattgcatagcagtgaaacacttaaggagtagtggtgccagcagttcactctcattaatacaaacagcttgctttagtttctccaacactcttcttcagacacccttcccttaggaggtttcagatcagcagctcctactcaagggaaacagcacctactttctgcagctgtggtctcaagatctgattcgtgacacccagaactgttgccatttctgttctaagtatgggaagtaatctcgtagtgtggtaagaaaatacttttcaagtctgtagaaaaaaaaagttgattagtaatgctactgatgtgattttgtttttgaatgtctgaagcctaacgaagaggtaaactagaatgtgaacttttgaagtcacccttttctcaggggttttagataattttaccaaaaaaatgtgactatactcttgaatt

SEQ ID NO: 252536 - DNA, 378 bp, Homo sapiens
gtatttttctaggctgagcgagtactgggaaaaaggaaatacccagacatttgagggatcactgacactgcttctgaattaatgctaattcctgaggattgcaaacaccactggatccaccaatcaaaatggggatctatgaaaatcagattcatcaagtgactcttcagtcaacaactgttcaagacgctgttaacatcacgtgtagaatgctacgtttctagaattgacatttcagcgatcgagaattactatatttgtaaacagaaatgccactactagaaacagaatgctataaatagaatgacgtcttttgttttcaaggtcaatatgtcagagcgatgcaaaaataataaaagtgagatatttcatggcaaa

SEQ ID NO: 252537 - DNA, 631 bp, Homo sapiens
gagaaggtggcaggtattataaatgtggtaaattcctcatctttcattgtccaaagccaaatcactatttaatgtttttgtattaaataacagaaacaaatacattgtttcatgttttaatgataaccatcataagggaaaatagaaagtgtgaaaggtggttattactaagggctgtgactgggtcaaggttgggagggttgaacgagaacttttacttttcattttagaatttgattttttaaaaattgtatgcagatttcactttaattttttaaaatatgccaggtgcaattgggggctaagtttgtttggggaacaaaaggaaagatggtatcactttctccaggaagtttcccatgactaccttggggtctcttttccctgtgttcccaacaggcaagcatgagacactatccaagcatttaatatactgtactgtgtctgtgtgcatagttgtatgactaacacactagactaaaatctcctggaaggctggtgtcataacgtgacatttgtatctccagcacataacagtataataactagaagagcaataagtatctgctgaatgaaaacaacacatgaatgatggtccatagtgaaaaaaatgatcacacaaattatttgc

SEQ ID NO: 252538 - DNA, 309 bp, Homo sapiens
cgtgagccactgtgcccagcctatctaataatattttaaccagttttaatgttcagtggtattaagtgcattcatatggttgtgcaaccatcaccactacccatctccagaactttctcatcttcccaaactgaaactgtgtccccaggaaacactgcctatctgctttccaagtccctggcactcaccattctgttgctatgaatgtgacaacaaatctagtctgggcaacaaaacaagaccccgtctctataaaaaataaattaaaaattagccaagcatagtagtgcacacctgtggtcccagcta

SEQ ID NO: 252539 - DNA, 542 bp, Homo sapiens
tctcatatcccagagtattcaacatcgacttacattttcattaactgatgccttgtgcagttcttcatttcgtgcacattagctttacttccaagtgctctgcaggctcctataaaccagagacctcacatatctttcttctccactccctatgttatcaaccacagattaagttttctaaaaccctgctctgatcattgatacaaatgaccttcctgtccaggcttccaattgcctatgaaattaagcacaaactccttagcacgacagttaaaactctccataatgtaattcccaaccttaattcttactacttagtgcccagattaatgcttggcatagagtgcctgctccatcaatgctccctcctgctctccctctctttgctatctctcatgcccttgccaaactggaagagagaactgagaacaaaccactgggtttgacaattatcaggtcactcatgagcaatttcagtgtcgggatggagacaaaagccagatagcaggaactgaaggagtacgtacgtcatgaaaaaaata

SEQ ID NO: 252540 - DNA, 225 bp, Homo sapiens
agtcaaaaggtttcagggtaaagagttaagaatatatttgttacccaaataaattcatccaacttgtttctttttgaaggagatggactgtagaaggctgctatatttgggtagaaagatagggtcaaacagttttcaaaatatgtttatctctcctttgtctattctgtatcagatcatttaaaggtatattgtttgtaaatattaaaactgtaacaaattata

SEQ ID NO: 252541 - DNA, 357 bp, Homo sapiens
ctgaaaccccactcaagcctcccctttcctcacgaacaggtcctctgcccccctatttagattcacatcctcctaccccagccttcttctgtctgggatcccccaaggtagaatctgagctgacacttctgggagaaaggttcttcatggtcttctctttcattaagccaaactactccttgctgtccagaaacgggaatgcttcctaagggtagttttctgggtggtggggtggggtttgccgggcctattcttgggggattcagaacatgctgtgaaactactggtggcctggcctctcacagtgggaataagtccttcctctggctacagagccacactgctccccccacctcc

SEQ ID NO: 252542 - DNA, 472 bp, Homo sapiens
tctgaagagaagagagaaatatatttgaaaaagtgttgaaaagaggctgaaaccaatgaggcaataccaaaagtgccaacttgtgcatagttggattcccagatggagggagtggaaagcgagaataagacagacaaaacataaataaataacataaacataaatgtaaaaacagcatagccaggtattcctccaaattattaaaagttgtatatttatatttcaagaatcccagcaaaactcacacagtgtaaatgtgaagaaatctatgcacaggcatatcatggtcatgattatcaaaagcagaattaaacaaaatcttatatgtgtatagagagttacacatagaggaacaaatgggccaatattttcaaagtgctgacagaaaaatactaaagacttggaattccatactcagtgaaaattaatgtcctttaacaataaaagttaaataaaaacttcttcagacaaa

SEQ ID NO: 252543 - DNA, 438 bp, Homo sapiens
tagagtccatgttacccaaagaagagagagctactaaacctcccagagagtcctaccagatctgagatctatgagaccaagtattgggtcttgttcaagactctatcctcagagtccagcacagcagatgccaatatttactaaataaatcactgaaaaaataaaagataactataaatattaaacgaaataatgtttataggagccccttaaaagctgcaaagtgttgtatacatagtcattatgctgacaattgacctctactttgagtgtctgtggttcaagaatggaatgaatttagcaagggcttatggagccaaagccttctgataagccaagactaccatttagtaagatatccccagagagattatgggctgacatgagttagaagtgatagtttcactcaggagttggatcactcaaccctattacacg

SEQ ID NO: 252544 - DNA, 322 bp, Homo sapiens
gctccacaagtgctgccaaagtgggaccccaggcagaggaggcgccgagagcgagccagggctgtgaggactgccagcacgctgtcacctctcactgtgaaattggaggaaaactcatctgttgaagtcaaggaggaaggtagaatgatcagagttttgaagaagtgttcaaataattaattgctgggagtcctaagacattacggaagtatggtacatttgttgggctgtattgaagacacaactaaggtatgggataattaattcttagtggtctaaagcttgtgttgactaaattgtttgttttccaggtagtgttcaa

SEQ ID NO: 252545 - DNA, 401 bp, Homo sapiens
tcattctctccctggagaacgcctgcggccccaaagccaggcctactgatttccagtgaggccacaaatcccctccctggttagcaattcagttttcaccgccttgggggagagggcctgcccttccttgaggggaagaacctggaaggctcggctcagtgtcttctcttggaagagaagagtgtgcatgcagaagggtgtagaaaatgctagacgtgtttcatcttcttgacaaaatgacattgtaagatgtgtgtatatgtttttaaaaatattacataggggctgaacatggtggcccactcctgtagtccagcacagggaggcggaggtaggaagattgcttgaggtcaggagttcaagaccagcctgggcaatgtaggaagacttcatgtctacaa

SEQ ID NO: 252546 - DNA, 592 bp, Homo sapiens
  misc_feature (584)..(585): n is a, c, g, or t
  misc_feature (587)..(592): n is a, c, g, or t
gtgaggggtgaaactggccccccatgggtagccgcagtctgccagggcctcccccaggatccccagccacctcccctatgcaggagcatgcagaggctggggtcaggtttggcttgccctggagcacaggaaatgccccatttacacatggaccggaggccagtgtctttcgcaccaggatcccggcccccaggctcagaacttgaatatctgggccatgctctccaggagtctctctgagaaccaggccaaagtagctgcttatggtctaggatacacctaaaataggagtgggggcggcctgagaggtgaatttccctgggctggtgcatgggctgggcttgtcctggagcctccagtgccggcactcatacagggacccctgccggggccaggagaaagccgttgctgtgtgtagcctggagagtgcgtcgtcacgtgacagatgcttgtagccacccgggacctgcgaaaagcctgcagctggtgatgctcccctcccaccaaggggtgcagagctggaggattgctcataaattgttcctgccctgtccaataaataaaatatgccttctggggcgcannannnnnn

SEQ ID NO: 252547 - DNA, 466 bp, Homo sapiens
gatatcctacatgaatgcacatgagtgagtgtgcattaaatacggtgattcccagcccagagcttttgtacccccaggggacactggcaatgtcaggacatctttttgcttgtcataactcaggtaaggggtagggtttgctagtggtttggatgctaccggtatccagtgggtaaaggccacagagtctgctggacagcttacaatgcctaggatggccaccatggcagagtcatccttctgaattgtcaacagtgctggaaggagagctggagaaccctgggctgtgtggtctgtttgcctgcagacatcagcaggacagccccatgggtgtagcaaagggaataagcacacaagcaagaagagagttttcaactaaaggacgatcaacgttaaaacttgttcagaagtatagcatctattattcaatgattagtaaagcagaaaataaagtcaaaaaaaaaaa

SEQ ID NO: 252548 - DNA, 189 bp, Homo sapiens
atatttgtaaatcattttaacttgccattgtttttgtttccctgtaattatctttcttgggttctttgccttaactttggccctaaaatagtaataattggtgagagttttgagtttggagaggataaagaaattgtcacggtgcagactcttgagataaatcaatattgttaagaaacttgaatgaga

SEQ ID NO: 252549 - DNA, 469 bp, Homo sapiens
tttctgcttttaaatgtttgcaaacaatagcagtccatgtcacatgttttattctttttagattaatgaggtggcctgttcaagttagacaggccatattaatttcagcgaatgcggtccttagcaccacaaaagcaaacaaatgattttaactcaactggacaaagagtcttggcatagtaggtgcgtaattgttggtttttggatttgactggagagtgagagttgtgattttgattctccaaaagcagactatatgagcaccaagtatattttaggtcatttagaaagtttgttgtttgaacaaatgaggataagacatccatcagtttttgacactgcaccaaatctgcttgatttcaaaaggaactaactaaacactccatcacaagagtcctgacaaagatgcacggatggctatattaacgagactgtgtcaaaatgaataataataaatggctgtcttgag

SEQ ID NO: 252550 - DNA, 598 bp, Homo sapiens
  misc_feature (4)..(4): n is a, c, g, or t
agtntgtgcttaaactattgactggtaggtctactgtatataacatctaatatatatatattataggccagctacaaggggtttaaatattgaggactgtgtcttgaaaactaagtattggagtggattttcttctgctttcatagctaacagttattgcatcatgtgggtggggtcctaatccaataggactggtgtccttatatgaagagacaccaggagcacatacacacaggagaaaggccatgtgaaaacaaggttgccatctgcaagccaaggacagagtcctcaccaaaaaacaaccctgccagcacctagattttggacttccagactccagaactgtgagaaaactaatttctgttgtttaatccacccagtccatggtattgttatggcagccctagccaactaatacaaaagggaaattcgtattttaagagggaatattgtaccatgtttattttctgaagtaagcaatctgggagagggggaaattactgacgcaatgtttttgggcagtggctatagaatgggatttagtacatgggacaggagttggctcttgataggaatttaggtagatgtgtacatgtgg

SEQ ID NO: 252551 - DNA, 291 bp, Homo sapiens
tcttaacaagcttgagtgcagagattgaagagtcaaatctgaccatgatgttgatgttggataagagaattctctgctccccacctctaagttgcccgccaatcgaaggcaacttagtgtggtagggaaatctgtatgaatgaagtggtgttgatttaaactgggatgtcttgagttgagagagagagacttaagctatatgaggctgaagctcaggggagagataggggttggagatagaagagaaacaggagacatcaacaggagatggtaagtgaacgcagtggggaa

SEQ ID NO: 252552 - DNA, 562 bp, Homo sapiens
caacatctcattttgtcacccaggttggagtgcagtggtgaggtagaccaccagaggcactagcaatcccaaattcccttgatgtctctctaaaataataattggttgcagttggccccagggaacaggtgtctaccactagacacaaacacctgaaactgatcagcagcttcccgataagatctcaggggtagggcaggttggctcaagcatgcacccgaaaaggaaaaatggcagagtttaactggtatatgaccttctaggggcatcccactggtaagggaagaatgcctcaagggagcatgtatacagccccagtgaacacactgcgcatgctcacctccccagtgctagaggccactgcacatgcaggcagcccactccaagggaacaatcgggagaagggacgcaagacccaggaagcatgccaatgaataaaaccccaagtcaaaaggtcagacggtgctcttgatctctcaagtcgtgtctttggcccttttccaagcatactttacttcccttcctgctctaaagcattttaataaacgttcactcctgctct

SEQ ID NO: 252553 - DNA, 419 bp, Homo sapiens
agcctcaaccccagacctctgtccctaaatccttgctccagataaagctgaggagcctgtgccagtgctgggttgttccttcttgggcaggccttactgggaccaagaatttaccagctgtcagaggactgtgtctcctggagctgttcaccagccagggctcagccctcagagcctcatctgggcaaggacagagctttcttcacctgacactcagagtggagaggatagaaagacaagctttgtaggacatcggcttaggagagtccatagaaagtctaatgtccccagaagcagaaacagaaggagaagatgtacctggtagcagattgtccacagggatctgatgtaaaggtgttttctcatggaagcaaattaataataaatgctgtttgtgtgaaacctccactgtgccaagc

SEQ ID NO: 252554 - DNA, 417 bp, Homo sapiens
tatgtaactcacctcaggtcgtgcaccagtcatggcagggacaggcttcacacagaatttgcagccttggcttagctcccaaacaacattgccttccctttctagtccccagggttgacattctctaaaggacactggaaagagccaggaataagaaagctgatggtgagatctctagagaaggcaaagagtcctgatcctcagcagtttccaaagcataggacacaatgaaagcttcatgactttgaaaagaacagagggctgaggatccagaaaggagacatgagtactggtgaaaagtcctctgtggatgcatctgaatgtccttctcattgaacctgtcactctccccactcaacagctggagggccactgatgtgttggagaaaagaataaataaaagagagaagctacagg

SEQ ID NO: 252555 - DNA, 453 bp, Homo sapiens
actgaagtccctagttctagatgccatcaccctcaccctacttcagaggctgtaccaaattcttagaagagaaattttgcctcaaaagcgacctgggaacctgacctcaggaagaatttcatctctgtgggaatgtggaatcggagtgatagaggtgaatgacaaggatgtggtgttccttaagctgactcctgatgagcttggcgaaatgaagccagacattttataattggtcccttttctttgtgtagtgtctaacactttttgaatacctactgcatgtcagtgccttttcccactgaggatcgtactggataactttggatctaaggtcgctttggcagtgagaagttcccgcctctgagtcaagaccacctttgagtccagaaatggtggctcacgcctgtaatcccagcactttaggaagctgaggtgggagcttggcccaggagc

SEQ ID NO: 252556 - DNA, 327 bp, Homo sapiens
tgcctcagcctcccaagtagctggaactacaggcgaacgccaccatgcccggctaatttttgtatttttagtagagatggggtttcactatgttggtcaggctggtctccaactcctgaccttgtgatccacctgcctcggcctcccagagtgctaggattacaggcatgagccattgcacccagccagccaaggcctgatgttttatagttacagagtcctctgatgagaactgatggtggaagagtgtgcttgtttgtatctttatctggttggatgcagtctttttttttttggggtactacgcttgggcagggtaccggagct

SEQ ID NO: 252557 - DNA, 305 bp, Homo sapiens
caggcccagcaggttaccgacagaggcaagtaagaatcaaatggtgtcaaggacaaccaaaaagaccagtgaatttctaagcccatcatccttgggatcccatcaaacaatcacgtgatgaagaagaggtatagatgtcttcactttcactacttgaaaagagctgttctaacagcaagggcaagtgaatgcaacaactgccataaaagggaggatactgcctaagttcgcagtaaattaagaatagttaacctggagtcctggatagctgggcagggtgaataaaagcaaaaacaaatgtacct

SEQ ID NO: 252558 - DNA, 405 bp, Homo sapiens
ctttatttacttttaattattttctcaatctaccatgaagttcaaaaactagaataatataccttttcctgaatttgattttgttttagcaaaaaccatcacaagataattaatgagctccaggctgttgaatatcagtgaaaaaccaaaaggaaagttggaaatacctgtacacctggcctaggaatatctagataacaatatttttattttatttctactaatttgctctaagattttgggcaaatttctgagccttggtttcctcatctacaataagagttggtaccttctgtcatcttattctttgatataaggtttgtgcttttggattccacgattcttcttgggctttgtgtccccgttcattggctgaacaggaaaaattaaataaacatgatattt

SEQ ID NO: 252559 - DNA, 368 bp, Homo sapiens
acgcactctcccctttatgattctactgacccatggagtttttccgtccttgccattttggctgtttttgactcactagaagttgtttttgaagccagttcctagtcatgaaactaaacatgaaatgatcgctctggtgaagcaaaagcatcaaacaaatgacctatcaggatccaagagcagccatgcagaaagcccatgggctgaagcaggtggtggcctggtgctgctgctgatcacctggactactgtgggcagctgacatcacctcctgagcatcactttcttcatctgtaaagtgaattcggaagtgtcaagtggagttgttgtgagaattaaataaaacaagccagcttttctagccaaaa

SEQ ID NO: 252560 - DNA, 460 bp, Homo sapiens
cctcggaaagaaggaaagaagctggtgtcaaaacccagagagagacactatgaagagctctccctccagcccccaacccggagctgtggccttccaaagtgacatgcagctaacccacagtgacccagcaaatggagttgagagactggacaccccagcttgactctcctctctccctccagtttcctacctggcccaccattaactgatcccaagccagagggcaacagagtccatcaagacagtctctgcaagtcaaacccgtagcacagagagcagggtggagaagcactgggaagggggtgcaaacagaagctatcccatacccacacaaggcccttgctgcactgtgagatgccccttatatggctggccattgtcccaccctctcctctgaagctatctggggagctagggttcccccactcagccactgttataaagtcatttttgtccaaag

SEQ ID NO: 252561 - DNA, 521 bp, Homo sapiens
taggcctacacagggtcaggatcatcagtgtcactgtcttccatccccacatcttacgccattggaaggtcttcagggggaagtaacacatatggagctgtcatctcctatgataacaatgacttcttcctgaatacctactgaaggacctgcttgaggctgttttccaattaactttttaaaaatttgtaagtataaggagtacactagcaaataatgatgagaggtgcagtatagtaaatacattaattgttaacataattgtttatcattatacgactggcagtgcagtaggtttgtttacaccagtatcaccataaacatgtgagtaaagtgttgccctacaatcagtgaaagcctcaactacaatgtcacaagacaattggaactttatagctctattataatcttaggggaccactgtcttatatgcagttcattgttgactgaaatgtccttacgtggcacatgactgtattatttttccctataccaactacttaagtatggctttaaaaaaa

SEQ ID NO: 252562 - DNA, 317 bp, Homo sapiens
taaaccctgtcaagctgcttacctgtgacctgcccaggtaaagaggagtatagacacagcaacagcccgtgggtgcctgggccttctacatgatgacagcagggtcagggcagggcacgggaatgaggggtgggcacagataactgaatgccccgagagcctttctttcctttagtctgccacagttggggtgggcgattaaaggaaagaaaccctgaaaagtatataagctttgacaaccaggagatttggcttcaaatcctgcttctacaacttcttagctgttggcctgtgggcaatttattccacctccctga

SEQ ID NO: 252563 - DNA, 423 bp, Homo sapiens
caattactaacagacctaacaaatgagatagacagcaagacaataatagtgcgggacttcaatactccactgacagcactagacaggtcatcaagacagcaaatcaacaaagagacaatggatataactacgccttggagcaaatggacttaacagatatgtacagaagattccaccgaacaaccacaaaatacacattctatacaacagcgcatgaaactttctccaagataggccatggaatgagcctcaataaatttaagaaaattaaaattatatcaagcactctctcagactaaagtggaataaaactggaaatcaactccaaaaaaacccttcaaaaccatgcaaatacatggaaattaaatagcctactcctgaatgagcattgggtcaaaagtgaaattaagatgaaaattaaaa

SEQ ID NO: 252564 - DNA, 650 bp, Homo sapiens
gcctgggctggccttgagctcttgcactcaagtgatctgcctgccttggcttcccacagtgctgggattgcaggcgtgaaccactgtgcatggccgggacttaggatttttaagtgactaacagggtcccagtccgggaagcccctgactagcattaaagggcagcctctggagggtgaggtcagcagggtctaagatgcaggaagcaaagtcctggctggaccagggcggacagtgtgcacccggccagcactgatgttcacagggcagcctctggagggtgaggtcagcagggtctaagatgcaggaagcaaagtcctggctggaccagggcggacagtgtgcacccggccagcactgatgttcacagggcagcctctggagggtgaggtcagcagggtctaagatgcaggaagcaaagtcctggctggaccagggcggacagtgtgcacccggccagcactgatgttcacaggggtcgctgcttcttcctcaccaaggctggatctggggtgctccttcccaatcctctggcttcttcagtgcccagagctgagtcctctcaggccacggccagtgtctgtgcttggccttcccagacggcctctggctccggattctggtgccaggtcagggcgggcccgcccaca

SEQ ID NO: 252565 - DNA, 436 bp, Homo sapiens
agagcctattctccataaggtgatgttgggccagctgatctctcttctctaaagcctgtaaaactagagactgtgaggatggagagctagttactttcttctggactgggagaggacgatagttgacagagaataaaattgttaattttggggctggacgcggtggctcacgcctgtaatcccagcactttgggaggctgaggcgggtggatcacctgaggccaaggagttcgaaaccagcctggccaacatggtgaaaccctatctctactaaaaatacaacaaattagccgggtgtggtggcgggcgcctgtaatcccagctactcctgaggctgaggcaggagaatcgcttgaacttgggaggcagaggttgcagtgagccaagatcaggccactgcactccggcctgggcaacaagagcgaaactctgtctc

SEQ ID NO: 252566 - DNA, 473 bp, Homo sapiens
gaagaaatgagaaagtgaattatggttatttgagtgccatgaacccattggtagacctttgtgaaaagaaagccaacaatcttactactataagataaaaccaggacacttaaggtaaaatactaatttgaatgaattgaaaaaggattatgtaaaagattttaaaaattcaatacaaaaagcccccatattataagtatttgaacaataaatactattttcatgtttcatttgcaagtggcaagtgacaactgcattaccttactttcatgagatggtgacagaatattccatgccaattccatgacacaagttgtagttaaaaatacacttctatggctacattgcgctagatactttatcagttttcaataaagcaaaactagcaaagtcggtatgtattcaccacatttaaaaatttggaatttgagtcctggagcttaaatattaactcatgctaagtgtaggagctg

SEQ ID NO: 252567 - DNA, 400 bp, Homo sapiens
gttctttgtgatatttcagcgacttgctttttgtatgtagtaaagagtttatatttaaataagacagtgagactaccttggggaggtcatccaaatcccagtcaggtggtgggtgagtgctggggagtctccccaagaaagcaatgagacatggatgctccatggcttgatgatggttaggattggtggcccaatttcacaggttccctggtataggttctttgtgcattccacctgcccaagaagttgtctaggcagcaaaagcatctacttaaaagctaaagtggcttgatgaggcatactcctgggacaagaagatcaaatgtagggctagatggatttgttactcctctgccttcctgtcagtaggcagcattgaaaataaactagttaaaaagta

SEQ ID NO: 252568 - DNA, 249 bp, Homo sapiens
ctcccagcctggttgtgtaatacccaaggacctgttccactttgctatttgatgactgaatccaaagaagttggaggaaacaagaaaacccaacatgatgaaggcagcaaaagcatctacttaaaagctaaagtggcttgatgaggcatactcctgggacaagaagatcaaatgtagggctagatggatttgttactcctctgccttcctgtcagtaggcagcattgaaaataaactagttaaaaagta

SEQ ID NO: 252569 - DNA, 2353 bp, Homo sapiens
gcagattctccaggcccagcatctgcctcaccgtggccccccacaagccaagcgcctgcctttcagcagcctctacacacccagctcctgccacccaatggctctttaggccaagctcatacctcacgatgatttttccaggcccaacttttgtctcatggcaaccttccctggccaagtttccacctatttcctggcagcctggacaggcccaggtcctgccacacactggcctctctacgcccagctcatgcctcacagtggcctctccaggcccagctcctgtcccgggacatcatctccaggcccaaaacttcctcaagtcggcctctccaggcccagttgctgcctcccggcattctctccaggcctagctcttcctcctggctgtatctacaagaccaactcctgcctcacaacaaccttttatggctcagctcctgcccaactactgccggcctttgtaggcccaaaacttcctcaagtcaagctctttaggcccaccttctgccttgcagtggcctgtacagacccagctctggcttgagaacagcctctgcaggccctgctcttgcctcttagctccctctccaggcccatctcttgcctcacagtggcttccgtgggccaagttcccgcctgcctcccagcagcctcaacaggcctagctcctccctcacaatggcttgtttaggtccagttgatgcctctggcaacctgtccaggcccagctcctgcctcacactggcctctctaggccgaggtcctttctcatactggcctgtttaggcccagctcattcctcttgtcatctctccaggcccagcttttgcctgttgttggcctctacctcacagtgcaccttccagtcccacctcttgcctcaccatggcctcctctgaccaggttcctgcctttcggcagcctctacaggcctagctgctgcctcccaatggcctttgtaggccacgctcatgcctcactgtggcctttccaggcctagctttcgctttttggccactccaggcccagaacttcccccagtcagcctctccaggcccagctcttcctcccagcaacctctgcaggcccaaatcatcctcaaattggcctcttctttcccagctcctgcctcctggtggcctctgaagacccaaatcgtcctccagttggtttttccaggcccagctcctgccttttggtggcctctccaggtgcaaaacttcctcccatcagcctgtccaggcccagctcatgcctcttggtggccttctcaggccctgcttttgacttggtggcctcttcaggcccagaacttgaactcaagtcagcctctccaggcccagctcctgccttcttaaggtctgtacaggcccagcctctacctcacagcggactctccacacccagctcttgcctcactgtagcctccccagtccaaaactcctgccttttggcagcttcgacaagcccagctcctgcctttcaatgacctctttaggccccgctcattccttacaacggcctttccaggcccagtttttcccttttggcggcctctccaggcccagaacttcctcaagtcggcctctttaggcccagttgctgcctcctggcatcctctgcaggccgagctcttcctccctgctgtgtctacaggcccaactcctgcctcacaacaacctccttggactcagcttctgcccagctcctggtggcctttgtaggctcaaaattttctcaaatcaagctctccaggcctactgtcagcctcgtggcagcctaaacaggcccagctcctgcctgacaatggcctctccaggcttttctcctgcctcgcagcaggctttccaggcccagctcttgcctcatggtggccttccccggccatgttcctatctgacttctggcagcctcaaccggcccagcttctgcctcacactggcctctctaggcccagctcctttttcacagtggcctcactacgcccatctcctacctcagatctgcctcccaagacccagctcctgtctcatggtggtctctcttacaccagctcctgcctcacaatggcctcgtctggcccatcttctgcctcacagtggccactcaaggcccatcttttgcctcatggtagcctcttctggttttgctcttgcctcacagttgcctcttccagatccagctttaagcctttgatggtcaacagcatcaaggagcctaaagcttccctggactctcatttgttcactttacagcagagtgccttagcaaaaactgtctcttaaccttgagagtggatttctgacaaatcgatagtaaattctgcctgtgtggtttcaaaaaaaaaaaa

SEQ ID NO: 252570 - DNA, 401 bp, Homo sapiens
tcttcaaagatgtatctacaaatacgtccatgacagtggtatttggaacatcaacaaactggaaacaacctacatggccaataacaggaggacacagaaacagagtttgataaatccaaacaaaaggatgctttcaatataatatgatgtgaaataaccccaaacatgtatgagagccttcacccgtatgtgtgtgtgcgtgtgtgtggtcattctataaatacacattgaaactatcctaatgtattagcagctattacctctggacagttgcaatcttacgcaagattttttaaaagtaatttatacttctttttaattttcatttccaagtcttctgtgataaaagtgtactgcttttagaatgtgagaaaaagcaataaaaggcattttaaattgca

SEQ ID NO: 252571 - DNA, 405 bp, Homo sapiens
attgaaagaaagtacagaattcaaactaaggtgctttgatgcaattcacctgttccatcttcttgatgaaacactagttgctctgtgtctgtcattagcgattccgcaaggcatgtggtgataagacttccagattttgaggatatgtccagtaattgtgcttgaacattgtaatgggtgtgacggctgccaggtgcctcatttggggagtaggggacaactttctggctaggtcattctttccaaagacatgtactctctgcttcctctgtgtgtagcccagcatactgggacatccatatgactaaggcttggggagtttcttgcagagtggtgtggtggcacagatcaaaatcttggtagaaaagtgagcccaggtagtcacaggcttgacccaagcctgga

SEQ ID NO: 252572 - DNA, 345 bp, Homo sapiens
agtttacagcttgggggaaaaagtagtaaaacaaaactgcctttattcacagacaacatgattgtgtgcatagaaaatcctaaaaatctacaacagagctgctaggactaatgagggttttaatgaggtcttaggaaataatatcaatatataaaattcaactataattctatatactaacaaaaaatattaggcaataaaaattttagatggtatgtacagtagtatcaacaaatattaaatgcttctagataaatttaacaaaatatgtagaagacatgtacaatgaaaacagaaatacattgctgagaaattaaagaccaaaataattggagaaaaaacaag

SEQ ID NO: 252573 - DNA, 170 bp, Homo sapiens
ttccctccactctccccctccatacgcaccccgccgccccgccacaaacccacccccttgccatctgtagggcaaccaagtgttctgatgccgccctcggagcttccgcccatggtttatgttaagagtaacatttaacttctgttgattaaaaaatcactgctatgaaa

SEQ ID NO: 252574 - DNA, 193 bp, Homo sapiens
ttttcaatgactttacaacttttgaagagcactgctgtggatacacagaagagagtgattctcaaccacaaagaaatgaaggtgacggggtctgtgatggggacttaaatgaacaagaggtttagaaacactaattcaagtctatccccttcataatacaaataaagaacctatgacccattagacctataaa

SEQ ID NO: 252575 - DNA, 413 bp, Homo sapiens
gctgcagcagacacaaccaactttcccgcggcccaaagacagttctgtgtctgtggtgtgatgaggattttattatcacaagtggctccctatgagaaagtcttagctgtatgaaggaaattccctcttctgttcagaactgtcttaaaagtaatccagattattagaaaaggaaaagaaaacatagtaatagagattattactaaaacccaccaaatcgtacactttaaaagggtgaattttatggtttgtgaattacattgcaattttttaaaattatactcagcaaatgaagaaaacttggctaaactaaccacaaagagtttaaaattccaaatatttgagtttaaaatcccaaatcccaaatattgtgggcaatccacatgattaaaattaattccttttttttcctc

SEQ ID NO: 252576 - DNA, 445 bp, Homo sapiens
  misc_feature (4)..(4): n is a, c, g, or t
  misc_feature (34)..(34): n is a, c, g, or t
  misc_feature (38)..(38): n is a, c, g, or t
  misc_feature (46)..(46): n is a, c, g, or t
  misc_feature (58)..(58): n is a, c, g, or t
  misc_feature (67)..(67): n is a, c, g, or t
  misc_feature (72)..(72): n is a, c, g, or t
actnccgcattctcagcgtcgcacactccatcancaancagctctngaacgtcgcatngcacgcgtnacgtnaagcttggcacctctcagagcggcccgctcactcactcactcactcgagaattctcggatcctcgctgccttgagggtccatcctgtgcccacacggtcttgggtaccttgtgcactggacacagatgttttacgcccagactctggaatcactgccaagttcaaatcccagctattccagggaccaggccagtctgcttggcttctctgtgcctcgatttcctcctcagtataagacaggtgataaggtaactgctcacagagttatttaacacgttttaaaactgagaatggtgtttgacacataggaagcatttatttgtcagcaagcttttcacccgtgctgcaatcctgaggaggactctgcaatgcc

SEQ ID NO: 252577 - DNA, 272 bp, Homo sapiens
gttttaaactcttcttggaaaattttcatgaaatatttcacatatcttcctttcttggtacagtggaaatataactgctttgaaaattctgcagtacgttgtgtttgatatgatgtcactaaacaatgatatttcatcactgtggaaggtacaggaatttaaattttatctccttgattatgggattaagaaggaagctgcatgcttccgtaaatatcttaatgtttaattcttaattgtagatgtagaaataaaagcatttaattatcata

SEQ ID NO: 252578 - DNA, 232 bp, Homo sapiens
taaaaatgttttccaacaattggtttgtttaaactacaatctatacacagttcacatatgacatttacttgttaggcctctttttgtccaaaacgatgcggttccatacagcagcctctggacacatgtagctgatgagcagataaaatatggctagtccaaattaaggtatgctgtaagtataaaatgcaaagtggatttccaaaacagtattcaaaaaaaaaagaatgca

SEQ ID NO: 252579 - DNA, 631 bp, Homo sapiens
ctaagccaattgttgctgagtgcttgcctgcctatctaggagttcccagtgtagggttaagaggcttaggaacaaaatgacaggaagggctccagggagccttatcctcccagctccaatcacaggctctgtcagctgtgggaagagccttgacacccagacaggaccagtgctctggggacaacagtccctgccctagtcctctgctcctcacatctctccagttgcagggaaaagggctggcatctggccacagggagcctgagccggcggccagggtccagtggaccgactctgccccctgctggctgagaagggtcctgccagctcccagccagaggtggccaccttttgggagagggggacccaccccactgaagatgtgcacccactgtgtagctgaccctgggccaggtgctggacatcagtgaggggagctgaccccctaacggctcatgaaatgtcctcaagttcactcctggcagtcgagactaagcattcattaaactaatattgttgagcatttctagtgggccagacattttatatgcattactcattaatttccacagcaggtggatgttataattcccattttatagatgaggaaaccaaggttatataacttgtt

SEQ ID NO: 252580 - DNA, 352 bp, Homo sapiens
cactaaaaaaaagacataaaatattaaactaatgtctaggaaagctttggatggtaataaattgggagggttaggccaggtgccggtggctcacgcctgtaatcccagcactctgggaggccaaggcaggtggatctcttgaggtcaggagttcaagaccagcctggccaatatggtgaaaccccatctgtactaaaaatccaaaaaaaattatcaggcatggtggcaggcgcctgtaatcccagctacttgggaggctgaggtgcgagaattacttgaacccgggaggcggaggttgcagtgagccgagacggcactccagtctggacaacagagtgagattccatcttaa

SEQ ID NO: 252581 - DNA, 789 bp, Homo sapiens
ttgtgtccccccaaaattcattcgtttgatgccctaacccctgatgtgatggcctttggagataggacctttgggaggcattataataagggttagaagaagtcctaagggaggggccctcatgatggaattggtgcccttacaagaagagacaccagagaattcatgcgtgctgtctcccttttcccacatgcatgcaccaagcaaaggcatgtgaggacacagaaagaaggcagccacctacaaaagccaagaagggagccctcaccagaaactcagctggtggcactttgaactctgatttcccagccttaaaccacccagtctagggtatttggttatggcagtcaggtggcagatgtcaacttcaacgtaagaatctgtcttgtaagaggcaaaggaggcattctttaggctgcacaggaatgggaggctgtgatgattccagcaactggaagtggggcagaaagggtaactccagacatgactacccgtacttcacagctaccaagaggctcccacacaacagctcacactcactttctacaactcagagaaaatgcctttcgtgtaatttgtaaaattggtacttctcttcttaattctgtaattctaacatggtcatatcagtcaagtttctgtcacctttcatcatctgtctccttatttctgcctttgagtagttggtttgtttcgtaactttaaatgaaatgttttccttctaaatttcaagaagccaggcagtacagtattccatcagctactttatacactactttagctgcataa

SEQ ID NO: 252582 - DNA, 382 bp, Homo sapiens
aggagatggaggccaggatgttaatgatgatacaaatgtttccatctttgggtccgaaagaacagtggtactagtaacactaagagtaaataaagcagctgggcgcggtggctcactcctgtaatcctagcactttgggaggccaagtcgagtgaatcacttgaggtcaggagttcaaaatcagcctggccatcatggtaaaaccccgtctctactaaaaatgcaaaaattagctaggcgtggtggtgcacacctgtaatcccagctactcgggaggctgaggcaggagaatcgcttgaacctgggaggcggaggttgcagtgagccgagatggtgccattgcacactagcctgggcgacagagcaagactctgtctcgaaa

SEQ ID NO: 252583 - DNA, 138 bp, Homo sapiens
gggacaaagatctgagggtgtcggacaaggtaaggttgttctccatgtaactgttcctgttccaacgcatggctggggggagggcgcagcttccaaacccacagttctccctccaccacctcccaccagatgctccta

SEQ ID NO: 252584 - DNA, 157 bp, Homo sapiens
ttgggtaggcagggaatattcttatgctggcaatagctatctgttaacactagcttgacattcacttacttaaagtatataatcactgtatagtgcttagatcaataacaaaaacagattgacaatctattaaaaataaattatttaaattgaaaaa

SEQ ID NO: 252585 - DNA, 327 bp, Homo sapiens
gcctgcctcggcctccccaagtgctgggattacaggtgtgagccaccacgcccgaccccctcttctaaggacatttgtcatcggatttagggccctcctggattattgaggatgatcctgaggcctttaacttaatggcctctgcaaagatccttttttatgttttgagacagggtcttactttgttgcccaggctagagtacaatggcatgattatgatcacttgagcccaggagaacaaggctgcattgagccattatcgtgctactgcattccagcctgcacaacagagcaagatcctgcgtcaaaacgaatgctgggtgcagt

SEQ ID NO: 252586 - DNA, 214 bp, Homo sapiens
ttcacatgcgtacatttgcacaatgtagaaaacaaagatgacacgagcctgttcacttctccacatgcctgtccatctccccctgcccctatcaacatgtcttgaaggtgtggccactggccgtttgcatcacctttctgtctacgtagcacctgtcagtgacccctgaccccagagcacctgcccttagccttgagaagcctgtattttccct

SEQ ID NO: 252587 - DNA, 418 bp, Homo sapiens
tttcgtggaataagcctgttttcaaatggggcaagatttcacatttcctttcccttcccctacccctgtgtctcctctttgtaagaaatttattccctcctcccccaggggtgaagggaaactaacatacaatggtagctttcctgtgacctcgctccctgctagagaatctgtgatccactccaacttggtgtctgtgatcccagcttggctcagtgaacctgaccaagtgggttgaccttttgatcaaatgtgcagtttacctctcatatataggtctgtgagatgcatttttatgtagcctctatcttttatgatgaatgatgttttaaatgcagtatgtgtttatcacattgccacagatcgatgatgtgggagatagtgaacaattggagacacctgagtgcctctgggggac

SEQ ID NO: 252588 - DNA, 421 bp, Homo sapiens
aggtctggggcagggtggggagcctgtattgtaacaagcacagccaggtgattctgatgggcggatgagggaatacactttgagaaacacaggcttggtggagctaaaccatgattgggtagggttggtgacagctgtatatgatggctcacctttctgatgaaaaaaaaaaaaaaagtctgcaaatactcagcacctactgtgtaccaggcactgtaatgtgcactctctggagtcacagacataaggaagttagatctatccaaggaaagggccagtagtctgacgtgaccaggaagagtggacagactgagtggtaatgtggagttgaagagtggtaggtgataaggttaaagaagaggtgggtttggacagggcgcctctaatcccagcactttgggaggctgaggtgggagaattg

SEQ ID NO: 252589 - DNA, 428 bp, Homo sapiens
agaaaccttgctctaatagaagctttctggtagcaccaaaggcctctctgtcctttgtagcacttgccttggctataattttgcatttattggtatgattatttgcttactacccatcaagtcccaggatgccatttcttggctgtgtgaccttgggcccctgggactgcctttcagaacctccatttccttcatctgcaaatgggattgtaaatatgtgataaattcagagttgaggttaagaccacaggctccagagttaagacgtacctgtgttcaagttgcatctctgctagtggtgaacttaggcaagtcacctgatgaacctcagtttcctccgctgtgaaatgggtctaataattcccttcctcattcagagggtgaatatgggaattaaaggagctcataatggtgaaaattattttatt

SEQ ID NO: 252590 - DNA, 149 bp, Homo sapiens
aaaattaccaataattgatgaccaaatccgatggacccttcttcactcacttcatgttcctcaaccactaagcagcatttgcacagttgaccctcccttcttgaaaaactctcagtcgggtgtggtgggtcatgcctgtaattccggca

SEQ ID NO: 252591 - DNA, 511 bp, Homo sapiens
ttgataagtctaaatttttcaatgtaatcaggaatttctcatgctattactaagagtcatgtattctcctgctatactcataaccttgaacagactctgtgtctgattaaattcatgtactcttttcaacaggtttgacttttgggttatctttagataaagcccatttatgggcttcccataaagagaagcaattacactgcaggaagttttctttgcctttttggtacttggcttaaaaaaatgaagattttacattttattaatagcaaaataatttctatattatattcgtaggtttttgattctttaggaaaactaaaatttaaaagggctaaggtatttatattcatataactttgtgtattgcttttaaagtcttttaattatcaatctttggttaaatgaacacattttttgttttggtgaaatgttttgaaccttttaacatctttaataaatattcttgaaataaaaaataaataaatagaagttattgtttgaggataaa

SEQ ID NO: 252592 - DNA, 870 bp, Homo sapiens
cgtcatacgcagcgccctttgtgacaccagggccctggtgctttaactagggcgttgggacctgttgcccacacagaccgccctgcagtttcagactggagggcggtggacggctactcagcggcccaactctctcgcagcccttctctccgcaaaatgtcagcctccacctcctcgcaccggcccatcaaggggatcctgaaaaacaaaagctcgtcgggttcctcggtggcgacttccggtcagcagtctggagggactattcaagatgtgaagagaaagaaatcccaaaagtgggacgaatcaagcatccttgcggcacaccgcgcaacgtacagagattacgatttaatgaaggcaaatgagcccggcacttcctacatgagtgtgcaagataatggggaagattcagtgcgcgatgtcgaaggagaagattcagtgcgtggtgtcgaaggaaaggaagccaccgatgcttccgaccacagctgtgaggtggacgagcaagagagcagtgaggcctacatgagaaaaatcctcctccacaaacaggagaaaaagcggcagttcgaaatgagaagaaggcttcactacaacgaagaattgaacatcaaattagctagacaattaatgtggaaagagctacaaagtgaagataatgaaaacgaagaaacgccacaaggcacgaacgaagagaagactgctgcggaagaatcagaggaagctcctctgaccggtggactgcaaacccagtcatgcgacccttagaagatgcctgcttcacccttgcaattgtttgtgaatatgtgacgcttagaagatatctgcttcacccttgcaattgtttgtgaaatacaaaccttgttactgtaa

SEQ ID NO: 252593 - DNA, 923 bp, Homo sapiens
cgtcatacgcagcgccctttgtgacaccagggccctggtgctttaactagggcgttgggacctgttgcccacacagaccgccctgcagtttcagactggagggcggtggacggctactcagcggcccaactctctcgcagcccttctctccgcaaaatgtcagcctccacctcctcgcaccggcccatcaaggggatcctgaaaaacaaaagctcgtcgggttcctcggtggcgacttccggtcagcagtctggagggactattcaagatgtgaagagaaagaaatcccaaaagtgggacgaatcaagcatccttgcggcacaccgcgcaacgtacagagattacgatttaatgaaggcaaatgagcccggcacttcctacatgagtgtgcaagataatggggaagattcagtgcgcgatgtcgaaggagaagattcagtgcgtggtgtcgaaggaaaggaagccaccgatgcttccgaccacagctgtgaggtggacgagcaagagagcagtgaggcctacatgagaaaaatcctcctccacaaacaggagaaaaagcggcagttcgaaatgagaagaaggcttcactacaacgaagaattgaacatcaaattagctagacaattaatgtggaaagagctacaaagtgaagataatgaaaacgaagaaacgccacaaggcacgaacgaagagaagactgctgcggaagaatcagaggaagctcctctgaccggtggactgcaaacccagtcatgcgacccttagaagatgcctgcttcacccttgcaattgtttgtgaatatgtgacgcttagaagatatctgcttcacccttgcaattgtttgtgaaatacaaaccttgttactgtaaaaaaaacacaaacaaacacaacacacaaaagagggggcgggcaacaaaaatcc

SEQ ID NO: 252594 - DNA, 339 bp, Homo sapiens
aaaggacttagaatccaagatctgggtgctagatgtgcttgaggtgttgtttcctccagatcttctcaactgacagagcagtgaaatatatgtgtgtagggaggatggggagaacaatttttttaacacatatgaatacttacctggcaggggagataccatgatcacaaaggtggtttccccagggtgaggcttatccattgcactcccgatgtgctgacccctgtgattcccccaaatgtgggagacttgactgcataatttgtggtaatgggggactgcatttacacttttccctgtaaaaatttttaaaaataaataaatacataaataataaat

SEQ ID NO: 252595 - DNA, 385 bp, Homo sapiens
cgagagaagaaagtccctatttagaagaaaatatttgctccatcagagcaaaatgcctctacatttctgcctgaaaccatctatatttctgaacagggcttgctccaccctacagtggaggagtggactccaccctgcagaaccttggtctccagcccagccgtgacctggatgccctttccctgcctctggccagcccagatgcattccttcctgcaaacccagctcaagtacgtcttctccacagcccgtggtgcaccttgcctgcctcccgtgtctcctcctcgctgaagtcctccggcatatccacactatttggggctgctttaattggtcctcactggtattttgtcttgagaaagtcctttggttgttgcatgtgttt

SEQ ID NO: 252596 - DNA, 795 bp, Homo sapiens
ccacacgaaaatgtgtttacaaatgttcatagtagcattatttataatagataaaaagcggaaactacttaaatgtcagtcaactgagagaacaaaaatctggtaactccacataatggaatattattcagccgtaaaagcaaatgaagttctgatacatactacaacatgaatggacaccaaaaatattatgccaagcgaaaaacccagatgcaaaagaaccacatattatattacttcatttatatgaaatgtctggaataggcaaactatagagatagaaagtagtgatttttcaggggctggggcaagggggagtgggaagtgactattaatagttacaggtttctttttgggatgctgaaaatgttctgaactctgaatatactgaaaaccactaagttgtatactttaaaaggggtgaattttatggtatgcaaattatatctcaagttgtttatttaaaaaatttgaaattgaaaagtttttaaaaagagcttaattggtctgagattaagctgcagttggcacttcataagtgccagttccatgtttctttcaaagcttttttaaaaaaatctttggtatttaatgtttactgtgttcagtattttgactttatttttatttttatttttgagacggagtttcgctcttgttgcccaggctggagtgcaatggcgtgatctcggctcaccacaacctctgtctctactaaaatataaaaattaggcatggacagcctctaatcgagctactcaggaggctgaggaggagaacattgaacctgggagc

SEQ ID NO: 252597 - DNA, 989 bp, Homo sapiens
aggtcaccccgactccctgccctccccagtgtggttatttgagaaaaggcagcttgggtgagggggaagggattggggctgagaggggtatagtctgcctccccacccacggctggtggaacctgagggcccccggcgccaccagagcttcgtggcttaatgggggaggcgaggagccactgcggacctgctcgggacagtgaagggcgccagtctcagccctcatctgaaacctgctccgtgaccctggactagttcctgctcctctctggacctcctggccctgctcctttctggctgagtaactttggagctgtgccctgaaaccctctgccctgctgaagaatggagaggactcccccaccagcacctccacctaggacacatgggaactgtgggacttggagcaaagttttcaagtctctgtgccttagtttcctcacctgtgctgttctaggcgctgaggatgcagccgtgcacaagacggatgaaatccctgccctcagggggccgacatttgcggagtaaataaaggaaaggccaacatgaacagctgatttggataccatcaagacacctgaaattttagcatgagccagatgccaaggaagagactccgggaggatcctgaggacccccggttgcagccatgtcgaggctgatgctgaggaggaacccaagctgtcaacgagaaacaaccgtcgaacaacagacaaccagctggagacagatcaagaagctgtcacagatgatggacgaaaacctgaggaacgcggacaagcatcagaatgagtcatggtagctatgatagtggaatcaccattgcgtgagtattccactacaagacagggctgacacaagacaaacacgtactactaattaggcctattcacaccaatcttggccgggcaatacagcctgcatgtaacaacccacagacacagtacaatgatcgtcccgatcacagattatcaatacaaactccacat

SEQ ID NO: 252598 - DNA, 941 bp, Homo sapiens
aggtcaccccgactccctgccctccccagtgtggttatttgagaaaaggcagcttgggtgagggggaagggattggggctgagaggggtatagtctgcctccccacccacggctggtggaacctgagggcccccggcgccaccagagcttcgtggcttaatgggggaggcgaggagccactgcggacctgctcgggacagtgaagggcgccagtctcagccctcatctgaaacctgctccgtgaccctggactagttcctgctcctctctggacctcctggccctgctcctttctggctgagtaactttgggaggcaggggcagtattatcatctccattttacgaggagggcaagcaatgtacccaagttcccacagctaaaaagaattctgtctgtcctcagagctgtgccctgaaaccctctgccctgctgaagaatggagaggactcccccaccagcacctccacctaggacacatgggaactgtgggacttggagcaaagttttcaagtctctgtgccttagtttcctcacctgtaagttgggggaatgatagtaactgctcttaagagctgctgtaggaattgagatcttgcatgaaaaaggataaaaccaattgatatggtttagttcttagtccccacccaaatctcatgtccagttatgatcctcagtgtaggaggagggacctcgtgggaggtgattggatcgtgggggcagtttctaatgttttagcaccatcctcctagtgctgcttgtttaaaagtgtgtagcaccccaccttcctctcctgccggccatgtgaagacgtgcttgcttccctttcaccatctgccatgattgtaagtttcctgaggtctccccagaagcagaagcctgtatagcccacagaatcatgagctgattaaacctcttttctttataaattaaaaagtctca

SEQ ID NO: 252599 - DNA, 787 bp, Homo sapiens
ctcgtgccgaattcggcacgaggaaactccatctcaaaaaaaaaaaagtataggctctggacatagttccactgtttcctacctccaggaccctgggcaatttatggactctgccaagcctcagtttccttatttgtaacatgtgaagtacagtacttaccacgactggcgcagagtaaatgctcagtaaatcactcattcacttattggacaaatactgaatgagcacctattgtttgccaggtgctgttctaggcgctgaggatgcagccgtgcacaagacggatgaaatccctgccctcagggggccgacatttgcggagtaaataaaggaaaggccaacatgaacagctgatttggataccatcaagacacctgaaattttagcatgagccagatgccaaggaagagactccgggaggatcctgaggacccccggttgcagccatgtcgaggctgatgctgaggaggaacccaagctgtcaacgagaaacaaccgtcgaacaacagacaaccagctggagacagatcaagaagctgtcacagatgatggacgaaaacctgaggaacgcggacaagcatcagaatgagtcatggtagctatgatagtggaatcaccattgcgtgagtattccactacaagacagggctgacacaagacaaacacgtactactaattaggcctattcacaccaatcttggccgggcaatacagcctgcatgtaacaacccacagacacagtacaatgatcgtcccgatcacagattatcaatacaaactccacat

SEQ ID NO: 252600 - DNA, 419 bp, Homo sapiens
ctcgtgccgaattcggcacgaggaaactccatctcaaaaaaaaaaaagtataggctctggacatagttccactgtttcctacctccaggaccctgggcaatttatggactctgccaagcctcagtttccttatttgtaaaatagggaaaacaatagtactcacatcacagggctgttgaaaggattaagtagatacacatgtgaagtacagtacttaccacgactggcgcagagtaaatgctcagtaaatcactcattcacttattggacaaatactgaatgagcacctattgtttgccaggtgctgttctaggcgctgaggatgcagccgtgcacaagacggatgaaatccctgccctcagggggccgacatttgcggagtaaataaaggaaaggtaaatatcttccacgtcagattg

SEQ ID NO: 252601 - DNA, 728 bp, Homo sapiens
ctatggccggtctggagcacttcaccatcgcattccaggacgactccccctcacaggaggccttgaccttcacaggatcgcggcacacacctgcgcagacccagcgactttggagttcccgcgtctcttccccatgtctgcagtcggagggcgcgggtgggctcctggtcgcggcccggcgctcttcgtcctcgcccttctccgcccggggcgcttgctgaccctagagtcttggacagtggcgttgggagtccccagcggcctgggaaccagatgaggctggaaggaggaagtggctgagcgaccagaccgttgctgtgtgcagagcgagagcggggcagaggcggtcgagcgctcgttttccgggcgacttggctgaggggcgagatggtcccttggagagaacagccacgggccctgggccgaggggctccaaacagcagtcgctaggctgttttggtcgtcgggctttatcagtaaacaattcgagcccatggttcgaatgattatttaattaaattcctcagtaatagatccagtgcattgtgaaaatatgcgaaataaaatttaaatgatgagataaaataaggaatcaaatacttcgttgttataacaaccaagcaattaattagcaattacataattaaatgaatgtttgtaaagaacaatgcaatggaatatatatgtattccatctatatattccatctctatattccatctatatat

SEQ ID NO: 252602 - DNA, 1006 bp, Homo sapiens
gagacggttgcccagagcaagcccatgtagcatccctggagggcctcatccctgaagataaggttgtgcttctggcaggttctcccttacagaatgaagccaccctgggtcagtgtggggtggaagccctgacaaccctggaagtggttggccgcaggctaggaggtgagtggggctacaggggccccaaactggtgtccaggggcaattcacgacacttagacttacttggtttgccctgcacggtgtgttacttttttttttcttttttctttagttcacaatgtctaaaagtcagctgattttgtgttaaaattcagtgtctggctttgcttcaaaaattgggaagatcggccggacgcggtggctcacgcctgtaatctcagcactttgggaggccgaggtgggtggatcacgaggtcaggagatcgagaccatcctggctaacatggtgaaaccctgtctctactaaaaatacaaaaaaaaaaaaaaaaaaaaaaaatttacccgggcgtgggggggggcccattttttccccagttaccccggaggttggggcgaaaattgggttaaccccggggggcaaacctttgaaatgaacgccagatatccgccccattagaacttgcgcctggggcaccaggacgaggaagatccggtttcaacaagaaaaacaacacaacagggggggaaaaaccggcgtcgacttgggcgcctgtgtggttcccccacttttagcgaggcaactttgtgcccccaaccgaaagtggggggcgcacccccttggggaagaagcctccaaaggtgttgaccaccacttcttcacacgatcctcctcttgtacgagggccacgagccacattttttcaaaacgaggggtgtcgccacggggctttcccttctacaaaaaaggggcgatccttcatttcggggccacgagtgtctccacgaaggtggccaacagtcaaacgtgtcgttgtacgccccgctgtttccagaaaagtga

SEQ ID NO: 252603 - DNA, 1166 bp, Homo sapiens
caagtcgcctacgtgcgcgcccgggagctgcacactcttgaagtgaccggcctggagacggttgcccagagcaaggtaaagataatgatgtatccctgatcatccttaccccagccactacttgcctttcctcctgtggcttccccagacaacactcttgactctccctttcctttgaaggcccatgtagcatccctggagggcctcatccctgaagataaggttgtgcttctggcaggttctcccttacagaatgaagccaccctgggtcagtgtggggtggaagccctgacaaccctggaagtggttggccgcaggctaggaggtgagtggggctacaggggccccaaactggtgtccaggggcaattcacgacacttagacttacttggtttgccctgcacggtgtgttacttttttttttcttttttctttagttcacaatgtctaaaagtcagctgattttgtgttaaaattcagtgtctggctttgcttcaaaaattgggaagatcggccggacgcggtggctcacgcctgtaatctcagcactttgggaggccgaggtgggtggatcacgaggtcaggagatcgagaccatcctggctaacatggtgaaaccctgtctctactaaaaatacaaaaaaaaaaaaaaaaaaaaaaaatttacccgggcgtgggggggggcccattttttccccagttaccccggaggttggggcgaaaattgggttaaccccggggggcaaacctttgaaatgaacgccagatatccgccccattagaacttgcgcctggggcaccaggacgaggaagatccggtttcaacaagaaaaacaacacaacagggggggaaaaaccggcgtcgacttgggcgcctgtgtggttcccccacttttagcgaggcaactttgtgcccccaaccgaaagtggggggcgcacccccttggggaagaagcctccaaaggtgttgaccaccacttcttcacacgatcctcctcttgtacgagggccacgagccacattttttcaaaacgaggggtgtcgccacggggctttcccttctacaaaaaaggggcgatccttcatttcggggccacgagtgtctccacgaaggtggccaacagtcaaacgtgtcgttgtacgccccgctgtttccagaaaagtga

SEQ ID NO: 252604 - DNA, 949 bp, Homo sapiens
caagtcgcctacgtgcgcgcccgggagctgcacactcttgaagtgaccggcctggagacggttgcccagagcaaggcccatgtagcatccctggagggcctcatccctgaagataaggttgtgcttctggcaggttctcccttacagaatgaagccaccctgggtcagtgtggggtggaagccctgacaaccctggaagtggttggccgcaggctaggagttcacaatgtctaaaagtcagctgattttgtgttaaaattcagtgtctggctttgcttcaaaaattgggaagatcggccggacgcggtggctcacgcctgtaatctcagcactttgggaggccgaggtgggtggatcacgaggtcaggagatcgagaccatcctggctaacatggtgaaaccctgtctctactaaaaatacaaaaaaaaaaaaaaaaaaaaaaaatttacccgggcgtgggggggggcccattttttccccagttaccccggaggttggggcgaaaattgggttaaccccggggggcaaacctttgaaatgaacgccagatatccgccccattagaacttgcgcctggggcaccaggacgaggaagatccggtttcaacaagaaaaacaacacaacagggggggaaaaaccggcgtcgacttgggcgcctgtgtggttcccccacttttagcgaggcaactttgtgcccccaaccgaaagtggggggcgcacccccttggggaagaagcctccaaaggtgttgaccaccacttcttcacacgatcctcctcttgtacgagggccacgagccacattttttcaaaacgaggggtgtcgccacggggctttcccttctacaaaaaaggggcgatccttcatttcggggccacgagtgtctccacgaaggtggccaacagtcaaacgtgtcgttgtacgccccgctgtttccagaaaagtga

SEQ ID NO: 252605 - DNA, 455 bp, Homo sapiens
ttggagaagtgagccgagccgtgcagcgccgcgaagggcatccccgaagaccgggaggaacgccgcggggacctgtggcttagcgcgctccgcccgggcttgtctgcccgcgggggcgcagcggctgaggcggctccgggccggagttccaatcaagcgccacccaactcccagtcgggggccgaggccagcgccgggatgccagcttcccccaaaaagatcctgcctcagggaaatgcatggagccggcggaaaagcccgcggcgcccccggcggatcgcagaccctaagggggcgggaggtggcgccccagtcccaacctcttgagccaacccagtgggtgggaagtgcccttaccctaggccttccgcaaagtgttctctccttgtattattctaattacggtatttttaatttccttaaaaaaataagaaacagaaaagcacagaaagcac

SEQ ID NO: 252606 - DNA, 477 bp, Homo sapiens
agggtagaatccagccccacaagcggcggcgatgctaatcaggccgctaagatggaaaagcatccccgaagaccgggaggaacgccgcggggacctgtggcttagcgcgctccgcccgggcttgtctgcccgcgggggcgcagcggctgaggcggctccgggccggagttccaatcaagcgccacccaactcccagtcgggggccgaggccagcgccgggatgccagcttcccccaaaaagatcctgcctcagggaaatgcatggagccggcggaaaagcccgcggcgcccccggcggatcgcagaccctaagggggcgggaggtggcgccccagtcccaacctcttgagccaacccagtgggtgggaagtgcccttaccctaggccttccgcaaagtgttctctccttgtattattctaattacggtatttttaatttccttaaaaaaataagaaacagaaaagcacagaaagcac

SEQ ID NO: 252607 - DNA, 515 bp, Homo sapiens
attgcattttactttatgtagtatgttgtaacctggtgcttcattcattagattggtgactgaggtatttagtcatggtgaggatgggaatcttcagagatacattctggatttgtggaataaagtgactagaaaggttcttccagagcaaccccttgtttaaagttataagtgtttatggtacctgctaccccttctggaaagttgtcggctttgatggtttagatgaccttaccccataaggccagcttctagcctccctttggaatatttgaggtgtgtgatgttttagtgggggcagcatttgagagacgagcaggcccgagcacccaggctggctgtcagaccgtgtgttgtgctgttgggtttgatgggatgagatatccagggttttacttcctataatgggatctgcaggctccttgtgaagttcagttagacagtagcctgtgacgtagcaagtcaagttttcgatggcccctcattttttttttatttagtgcttaaaaaaaaga

SEQ ID NO: 252608 - DNA, 497 bp, Homo sapiens
cagtatgtactacaattaattttatacagctatgattcatactgcatctttacatttgtttaaatttcttgtaccacctcaagtggcaccatatgtgtctgtgtttactaagttttgatacactttaacttcttataatttctctatattttataatactaaatgataaaatagactatatatgttttatgcattcataatatacctaattttttcttttcctttttttgatgtttcaagactacatgattcatctgcaagttttttcaaattgtcacaaatctccaaaaaaatttccaacatatttattgaaaaaactgtatgtatataagtcaacttgttcatttccaacctgtgttgttgaaaggtcagctgtatgaggttatcgtcaaagatctttaaagaaagaaatgacatcatcaatattttgaaaattagagaaagccatttctaaaggaatcctagaaatgacttcaggccagaattagaaaaaaaaa

SEQ ID NO: 252609 - DNA, 363 bp, Homo sapiens
ataggttctttatgctagaacacacagcagttctgaaaccattttaaaacttgctttatctcgagccccttaatttggaagctcttcaaaaacaaaagataaactttcttgatagaaagactcctcattgccatataacacctgaccataaaaagaaaaacaaaaaccaaagaccttgtttgtcaaagctttttaaatgttttaacctgtggcttatatagggaaacattatttttggagaggaaaaatttgaatttcttttttgttccaaaagatttttaaagcctgtcttgaagttatattctatttgtttaaagtttactatcttttgaaataaaataggctattatttgaaattatatg

SEQ ID NO: 252610 - DNA, 398 bp, Homo sapiens
gcttcccggtaagggtgtatttattatttaatgagaagaccttgaggagggggtaccaaaaataaagtagaggcaggaattccaagacggcacaatatcctgatttggtggcacaaaaatatattcgtggaaacaaatctactggaattgtcttgtttgggggcttgttttacatgtgttttatctcactatgttgtcattatgcagaggtcttctatgtctttacccttttagcagcagatcttatttttcaaattaaatctcacatggtaccctaatacataaactacatgaaatcaaggtgggaaggaaggatgccttgtcctggtaccctgcgccctcaacttcctccattctttcaggtgaagcttttatgccagctggaaaaacccattggc

SEQ ID NO: 252611 - DNA, 252 bp, Homo sapiens
ggtggcctgaacttcccagtgtggctcgaagattaaccacttcagagaataccagatcaacaccgtgttttgcatgcctgcaccttcggagaggaagctgttatttcagaagccaggcagaacaaagggagtcatctggtgcgatcctagtaattagagagaagaggcccctcaggtgactgctgagaaagctcccttaatttgaccctgtttcacacagtccaattttcaataaaaagagacacttcagca

SEQ ID NO: 252612 - DNA, 460 bp, Homo sapiens
atatgaactccagctcttcaggcctctcttcgagaacaccacctctaactcatcaggcatctgccagtcatctactaaagagctctgctttgaaaagactcctcatctactgagctaagaaatacaagtacgtataaaggcataccttggagatactgtgggttttgttccaggtcaccaaaataaaacaaacagagcaataaggaagctactggaagatatgctccaccaaaatgaagaataaaatcgagaaagaatatgacatgagatgaaacacaaaagaggagggacaggaactcccaggagaacaaggtggaggaaacccagacgagtcatgagtgtgtttgctgcctcatctacagatggaggggggccaagctcctgttcagcatcacctgtaacaagaaggcattgaagaacatgaatctttcaaaataaaatggtctagttctgcaaaaaa

SEQ ID NO: 252613 - DNA, 446 bp, Homo sapiens
atcaggaagggggcatcttcccaggacacatgatggtagtctaggcaaaggttggcaattgctaaatgtcacaaactcatcagtgggcttttagatttctatctagaggcaaccagaagccatggagacagtggctttgggttgcctctagatagaaatctaaaagcccactgatgagttaaggcatatagttaagcacagcgcttagcaaaatagggagtgctgtgtacatcattgtcattcaagatgatcgttctctccaggtctggctgatgtgaggggtgcaggtggtgtctgcttagaatttctgctgttcctgagggagtatctgcatttcccacagatatactgtctgattagaattatcctctgattcctttggtcatcaggtattcactgggcacctgctgtgggcaggactctgagcaaaggttctggagataaaa

SEQ ID NO: 252614 - DNA, 617 bp, Homo sapiens
aaaggaatataatgacagggactttaccagctgtttatgaatatacaatcagatattaaagtatattataaatgcacaacaatcttaaaggtatagtaatggcacagaaagagacaaaacagaaagaacaaaagcaaactctatctctatcgtgcaagaatgttgacatttgaaatcagtgatggaagagtagataaatggtgctgaaaataactgggtaaatattggctaaaatgatcatcccattttcatgcctttcatcacaaataattcttgatgaaaaacaaaataaactacacattcacattagtagaagaaaatggttttctttcaacattgaaactctaaaggaaaatattgataaattaaactatgtaagtttattttaaaaggcgtttttgaattaatgagaaaaataatggcttataaaatgtaatgacacaattgactaaccatatgggggagaaaatgaatctgatacctgcctcactccttatcacaaaaagcctttcaaatgcaccagaaatataataatttctatttataataaatgaagattcagtaaagattatatttttaaaaaattgttctatattgtaagactaaaggataagaag

SEQ ID NO: 252615 - DNA, 384 bp, Homo sapiens
gacggagtctcgttctgtcgcccaggctagagtgcagtggcgcaatctcggctcactgcaacctctgtctcccggcttcacgccattttcctgcctcagcctcccgagtagctgggactacaggcacccgccaccatgtccggctaatttttttatatttttagtagagacggggtttcaccttgttagccaggatggtctcgatctcctgaccttgtgatccacccgcctcgacctcccaaagtgctgggattacaggcgtgagccaccgcgcccagcaacaagtgtttcaatactctatgtattgtattattttattggtcacatttatttcaattctgagaacttggataccttatgagccccttctttctaacagtactc

SEQ ID NO: 252616 - DNA, 315 bp, Homo sapiens
gagtgcatggactgtaatttaaatagtgttttctctcacaggtggtagttaaaatcttgagaatggatttggtttcagggagagattgtagagagagtaactataggccatacccacagagaggaggttggagaaattattgaaggaggcatgtggatctcagagctaagagcaaggaaggagttctttttaaaaaagttacatatagttgtagattctcaggggcccagtgttgttattaagctaatttaacagcatttacagcaaataataagcacctacttctgggaattctggcagaaaataaataattca

SEQ ID NO: 252617 - DNA, 330 bp, Homo sapiens
tccactgcaaatctggatgtggaccatcttctatcagagacagctcaggctcaatccctaaattaatggcaagcaagacgtagacaggtgtgacttcttagagacaggctggactgctgctgctctgtccttgggtggcgccagcccttcctttattctttcccagtcttcttatccattgcctgtagcccaggaccagtgccaagcctgtagcttccgcatggtgttcctctcccttccggggatcttcatgtaggtgctgcacggagaaagaagggccctgagaagagaggctgctgtcggcacaggagccgtgagggtggcggccgc

SEQ ID NO: 252618 - DNA, 425 bp, Homo sapiens
aatctgacggctgtggcaggaaagtcaggggcaagaattgttgcacagatatgctaatatctcagttctgccactttctgtaatctcgggtggtgatctaatctgtctaaggtctattttcccatctgtaatggggaaaaaaatcatccctggagttattggcaggattaaatgaggtgatattagtaatgcaatagtcaccaccatgcccccacgaaaactaacattcattgagaccttattgtgttgggcattgtgctcaggacttcaaatgggtgacttcattacatcctcaccatcacctgcccaggtaggcatcatgtattacctgcaacttacagataaggaaaccgtcttagagaggttatgcaacttgccctgccaaaattgaacccattgtgaatatacagtagataaaaaaaaaa

SEQ ID NO: 252619 - DNA, 392 bp, Homo sapiens
gccattttgggggcgtcgcggatggtcgcgagtgaccgccggccaagatcccgggagccgtcggccagagcatcttctgggctctgctagaaaacagcctcctgcctcccgtttactccaagggaatcgccggccagggccctttctgtccttcacctacctctgcaggaaccagaatgctctttcgtcactttctgcagaaaatatctccgttgtcccccgacgtcagagcctcctgcacctcagctcgtctcccttttccctgacccgaaccagaaccctgatcttggattctcttttatcttgtggcctccgcaatcattttgcagcctgacatctttttctatgtaatatttatcaccttctagttaataacataattttaaaaatca

SEQ ID NO: 252620 - DNA, 320 bp, Homo sapiens
taagtccttattttttagagatacatactgaagtatacacagaagaaatgctaaggttaaatatcgcttcaaaatattctgggagagagatctatgtacaaagtgacatacaattggaaatccatttttgttgtaaagacattgtttttcagacttttcagatcaattagaaaaatgtcattgctttaaaatcatagctgttctgtttaagaggaattgaatttaaaaatgagagagtattaaaactcatgtggcagtatcctggtcttaatcaggtattgcagtgttcaaacaaggtatggacacatcaacatattcac

SEQ ID NO: 252621 - DNA, 332 bp, Homo sapiens
aggccctcgctgcagttgccagcaggagaaagaatgactcatgcctgtgatttgctggtcacctgtgattcccgcctccgggagaaaactccaagtagcaggtgttgacccagttgtgtgggaggaatcacccaggcccttatttccaggttgcacttacagatcggattgtgcaaccagaaaaatgccgtcagaaggaagtggggtggcttgggggactgacttactaaggatcactgttaagctctccatacaaattagctccccttctgtcttagtccactcgggctgctatagcaaaataccataaactgcatggcttacaaactgca

SEQ ID NO: 252622 - DNA, 925 bp, Homo sapiens
caactcctggacttaaggcatcttcctgcctcagcctcccaagtagctgggactgcagacacatggcaccacacccagctaatttttaaattttttatggagatagagtcttgctatgttgcccaggctggtctcgaattgctgggctcaagtgatcctcctgccttgccctcccaaagtgctgggattacaggcgtgagccaccatgcccggcctctcttcattccttatcaatacagcagccactaatttgttgcatggactaggagttggctgcactttaactttgcactatttgtgaagaaagcacttgctaagcaaattgctagacaggatcgtaaactgaatgtttaaaatttgaaaaacttcttcagaaactctaagtattttagaaatatttactaatatgtaaatactcaataccagaatcatttttctgtatttccttgaagcaactcctcaaagttgcctgctaggcaacacctggaaacagtaattccacttaatgtataactttaaagagaaaaaaaaagtctcctcattctcatacaaacattgcatgactcatgctttcccctattttaagaggcctttttagtgaatgctgttgcagtccgtggggattgatgtatgaatttgcctttcaagcagggatgcttaaattgcagttttcttcctcacagctcttattgagaccagaaattgtcctactgtttaatttcatgattgatatacctatgggctgtctctctcactaaaatgtaagcacatccaggccctgttaccagcacctagaacagtgcctggcaggtggtaggtggggatttacatggttctggaatcccctggaattgtatgtataattttgcgtgtatggtgagggggtattgcatgtgcccacaaattaaagccgaccggcattact

SEQ ID NO: 252623 - DNA, 446 bp, Homo sapiens
caaacaccacatgttctcactcataagtgggagttgaacaatgataacacatggaccagggagggaaacaacacacaccgggacccatcggggactggggggcaaggcgagggatagcattaggacagatacctaatgcatgtggggcttaaaacctagattacggttgataagtgcagcaaaccacaatagactctacagatattaaaatgattttaaagtaattaataccttataaatgtggcaacatgaatcaaatggacaattctttgaaaggcacaatctatcatggttcactcaagaagaataggtaacctaggccaagcacggtggctcatgtctgtaattccagcactttgggaggccaaggtgggcagagcacttgaggtcaggagtttgagaccagctcagccaacatggtgaaaccccatctctactaaaaatcc

SEQ ID NO: 252624 - DNA, 432 bp, Homo sapiens
tccttggggatttaggaggcggagcggcgcccccttgaggccacatggtggaggcagcgatgagacctggagtctaaaattcagactgaatcacaggaagaagctatttacacaagtcaaacatggtccaatcttggcaatttcataaggttccaatccttaagggatcaaaacctggccaactgcttccaccgagaggtgtgcctttcaatgccaggcttggagtgtccctctttatttaaaaaggagaggattccacagcagagcttctcaaactcttccacccaaatcccctcaccacagagggacaggagtcctgggcatgtagcctaaagcagccaggagaaaaaaaccttgaccttaatttttttaatgatttcacatgaatcagtggaatgtgtttatgataaaatcatctcctcctgaaataca

SEQ ID NO: 252625 - DNA, 353 bp, Homo sapiens
ggagtcctcaggccagtggcgccctgcccgttctcccgctccggccggggcaggcagcctctgcgcgactccacgtactcccagccctccttggagtgtcgcgggcctgggaggggcctacagagctgtgatgatacctgcattccaggagtcatggaggggaaaggaaggctttggaggggctgggagctggggtatctgcaggcctgtctgctgacacacgtactggctgaactggtacgtggcggggaaccacctctccagccttccgtaggggcgctcggctcttgttgctgggccccagcagctcctggccatacatcaggtcgacgcgcctccagccacaccgcccg

SEQ ID NO: 252626 - DNA, 444 bp, Homo sapiens
ctcaaaaaaaaagaaaaaaacaactttccagttcacaaaaggagtgctttcactgaatgcaagaatagattttccctcttggtgtgtaaagttctcagtcatctgaccctctctgccaagagagcccttcccgccccatttctgcccgtttgggctcctcttcctggagaggctgctccctggtgctgtcccgtgctcccagcctgtcttccttcagggtccaggccggaagcctttgggggcagtgttggggctccgcatgtgcccagtgctcagcccagtgctggggcagagatggtgctcaggaaagatcttgaaaaatgagcaggtctccagccgaggggaatcttacaccttccacctgtttcctcaggattgcaggagctcctcagacaagatctgtggcaacagtaacaataaaagcatcccatgcggaccaaactc

SEQ ID NO: 252627 - DNA, 446 bp, Homo sapiens
ccaacaaccacatccctcctctatagaagcccctgagaacacagctcctcaccatggactgtacctgggggatccacttcttggtggcagctgccacaggtgtccattcccaggttcagctgttgcagcctggggctgaggtgaagaagcctgggtcctcagtgaaggtctcctgccaggcttccagatacaccttcaccaaatactttacacggctcacatggaagagacttgcctcatctcaaatgagaccttggactgtggacttttgagttaaggctcaaatgagttaagactttggcagactcttgaacaggcatgattggttttgaaatgcgacagcaatcatgactctagaggaccacatgtgaaatgcaacaagcaggagcagaagacaagtaattcattatttcactgtagtgcattaaaatggtagactcacagaa

SEQ ID NO: 252628 - DNA, 456 bp, Homo sapiens
ctactctgcctgttgcaaggccctcccggcccaggcttgggagagaggtgtgccctacactgccgtgagccctgagtggacccagacggccagagggagcagccctcagcccagactccacagcgcagcccagcccgtccctgcagccacgatcggagtgctacttggcacacagaccacagtgaaagtggagaaactgaggcccagcagcaaaaagtgtctcgtcgaaggtcacgaaggcaggaaatagcagatgccaggagggtcatggcactcagagatgaaaggagtccctcatgcccggcactcccccgcccaccagccatcgtggccatcctgggcacgtgagcaccactgcgccagcccagcctggagcctggtactgctggccttggcaggcagacattgctggtcaggaatgcagaatcggcctttaaatacctcagcaatttcatg

SEQ ID NO: 252629 - DNA, 350 bp, Homo sapiens
gcgccatccagctcactgcaacctccacctccctgattcgagcgattttgagtggctgggattacaggcgtccgccaccacgcccggctcatttttgtatttgtagtagagacggagtttcaccatgtttcccaggctggtcccaaactgctgacctcaggtgatcttccagcctgggcaacagagtgagacgccatctcaaaaaaaaaaaggaaaaaagaaacataaaacaaaggtgggagcctagatgtttctttgtacagcttaggctaggaaataatgagcactagtgtcagacaggtaaaccaagtctgaggggcaatgcaggcaaaaacaagttcctctccccc

SEQ ID NO: 252630 - DNA, 656 bp, Homo sapiens
actttttcccttgcctgcaaggaaaatcagtcaagatttctactagatcatcgcagttttgttgacctagaggtgacacatttgcattcttgccttctacttattttttcttttcatttatattttattaatctatttataaaagcagtagcccatgtcccctgtagcacattttttctttccttctctcttcattccctccctggtattaagtactttacattgcatggaatagagacattatgatagcctttaagtaactgagtttaaggatttacaggaaaagatgattagatgagacttttcaccaggtctcgtagtgaaaagaattaaccgtagagccgaactacacgctccgtcagaaatgtgtgcctctaactaggtgctgcagctcacacctgtaatcccagcactttgggaggccaaggtgggtggatcatgaagtcaggagttcgagaccagcctcgccaagatggtgaaaccccatctctactaaaaatacaaaaattagccgagtatggtggcgggcacctgtaatcccagctactcgggaggctgaggcaggagaattgcttgaaaccggaaggcagagtttgcagtgagccaatatcgagtcactgcactccagcctgggcaaaagagcgaaactccgtctc

SEQ ID NO: 252631 - DNA, 772 bp, Homo sapiens
ccgctcagcgccttcaacgccgtgtcccggcaccccgcacccgggcacacaaaaaacgggtcgcccgcgattctcagggattgatcgcctcttcagaaaagtcctccatacattttctccccaattccattccttgggcatgccatagcatttgggaaaagtccaattgaatttctagaaaatgcatatgagaagtatggacctgtatttagttttaccatggtaggcaagacatttacttaccttctggggagtgatgctgctgcactgctttttaatagtaaaaatgaagacctgaatgcagaagatgtctacagtcgcctgacaacacctgtgtttgggaagggagttgcatacgatgtgcctaatccagttttcttggagcagaagaaaatgttaaaaagtggccttaacatagcccactttaaacagcatgtttctataattgaaaaagaaaccaaggaatactttgagagttggggagaaagtggagaaaaaaatgtgtttgaagctctttctgaagctcataattttaacagctagccattgtttgcatggaaaggaaatcagaagtcaactcaatgaaaaggtagcacagctgtatgcagatttggatggaggtttcagccatgcagcctggctcttaccaggttggctgcctttgcctagtttcagacgcagggacagagctcatcgggaaatcaaggatatttctataaggcaatccagaaacgcagacagtctccagaaaaaatttgatcacattctccaa

SEQ ID NO: 252632 - DNA, 981 bp, Homo sapiens
agtaggagacctggggcaaggccccctgtggacgaccatctgccagcttctctcgttccgtcgattgggaggagcggtggcgacctcggccttcagtgtttccgacggagtgaatggcggcggcggctgggatgctgctgctgggcttgctgcaggcgggtgggtcggtgctgggccaggcgatggagaaggtgacaggcggcaacctcttgtccatgctgctgatcgcctgcgccttcaccctcagcctggtctacctgatccgtctggccgccggccacctggtccagctgcccgcaggggtgaaaagtcctccatacattttctccccaattccattccttgggcatgccatagcatttgggaaaagtccaattgaatttctagaaaatgcatatgagaagtatggacctgtatttagttttaccatggtaggcaagacatttacttaccttctggggagtgatgctgctgcactgctttttaatagtaaaaatgaagacctgaatgcagaagatgtctacagtcgcctgacaacacctgtgtttgggaagggagttgcatacgatgtgcctaatccagttttcttggagcagaagaaaatgttaaaaagtggccttaacatagcccactttaaacagcatgtttctataattgaaaaagaaaccaaggaatactttgagagttggggagaaagtggagaaaaaaatgtgtttgaagctctttctgaagctcataattttaacagctagccattgtttgcatggaaaggaaatcagaagtcaactcaatgaaaaggtagcacagctgtatgcagatttggatggaggtttcagccatgcagcctggctcttaccaggttggctgcctttgcctagtttcagacgcagggacagagctcatcgggaaatcaaggatatttctataaggcaatccagaaacgcagacagtctccagaaaaaatttgatcacattctccaa

SEQ ID NO: 252633 - DNA, 706 bp, Homo sapiens
  misc_feature (31)..(31): n is a, c, g, or t
gcgggggggcggggacgagcggggggcgagngtcgggattgggagggaagcgcgtgaaggatctgacgactgggggcgcggcaacctcttgtccatgctgctgatcgcctgcgccttcaccctcagcctggtctacctgatccgtctggccgccggccacctggtccagctgcccgcaggggtgaaaagtcctccatacattttctccccaattccattccttgggcatgccatagcatttgggaaaagtccaattgaatttctagaaaatgcatatgagaagtatggacctgtatttagttttaccatggtaggcaagacatttacttaccttctggggagtgatgctgctgcactgctttttaatagtaaaaatgaagacctgaatgcagaagatgtctacagtcgcctgacaacacctgtgtttgggaagggagttgcatacgatgtgcctaatccagttttcttggagcagaagaaaatgttaaaaagtggccttaacatagcccactttaaacagcatgtttctataatatcagagcactcatgaaagtagcagtgatgcaattgatgagtcagcatcagctgtctaccagtgtgcttgctagtaaccagacgactatcgaatcagtatttatagatcgacgcacgctagaaatgtgcttcaatactagtatcagtgcgctgctagatatcagtctatgta

SEQ ID NO: 252634 - DNA, 808 bp, Homo sapiens
  misc_feature (31)..(31): n is a, c, g, or t
gcgggggggcggggacgagcggggggcgagngtcgggattgggagggaagcgcgtgaaggatctgacgactgggggcgcggcaacctcttgtccatgctgctgatcgcctgcgccttcaccctcagcctggtctacctgatccgtctggccgccggccacctggtccagctgcccgcaggggtgaaaagtcctccatacattttctccccaattccattccttgggcatgccatagcatttgggaaaagtccaattgaatttctagaaaatgcatatgagaagtatggacctgtatttagttttaccatggtaggcaagacatttacttaccttctggggagtgatgctgctgcactgctttttaatagtaaaaatgaagacctgaatgcagaagatgtctacagtcgcctgacaacacctgtgtttgggaagggagttgcatacgatgtgcctaatccagttttcttggagcagaagaaaatgttaaaaagtggccttaacatagcccactttaaacagcatgtttctataattgaaaaagaaaccaaggaatactttgagagttggggagaaagtggagaaaaaatgcatggaaaggaaatcagaagtcaactcaatgaaaaggtagcacagctgtatgcagatttggatggaggtttcagccatgcagcctggctcttaccaggttggctgcctttgcctagtttcagacgcagggacagagctcatcgggaaatcaaggatatttctataaggcaatccagaaacgcagacagtctccagaaaaaatttgatcacattctccaa

SEQ ID NO: 252635 - DNA, 417 bp, Homo sapiens
taattggacatattctggacagtgtccatcatttaaatttacagtgccttagtgtttatctggtcgtttatcttataccgtgttttgagtttctgttcttttctacaatagctactctcttgaggtatttgcaatttggctgttctcaagttacttctgatgcttccttttttttggtaacttttttttgaagtcttaatagctattttgtttaattgtttggtcatgaaacgaaactgggtttctctcttgaaatgaaacacgaattgaatttactatttttttctcttgtagaaaagtcctccatacattttctccccaattccattccttgggcatgccatagcatttgggaaaagtccaattgaatttctagaaaatgcatatgagaaggtaagtcttccaaataattagagg

SEQ ID NO: 252636 - DNA, 695 bp, Homo sapiens
tggttgttgtttcagcaccattttaaagaatttgaatacaaacaatccctcagcttatcaggttgacatttatgaagctgacctcatcactctttatcttttatgtctgcagtataaatagcatagacatttggtgtgaagggaggagaaaggaagtagtagttctgagaatattcatttgaacagagtgactatggaagaatgaatagcaaaaaaaggagaatttttttaaaaagatctctcactgggaaaagaaaaagttatgcatttataaagtaattaaactggttttccttgtactttattaatctgaatctaatggcacttccttacgagggttttcagatgtgcttgtagttaatggcaacattatcagaatgactacacagacagtcctactctgaggagatgactttggaagaaacccatttggaactacacaccctgctatgtctgtggagaaatggaactgcaatcctcaagagtcacacttcatattccttcctttcaagtggttgataaaaggtagtgcttcaagcacaggatttatggaatagttggcaaattaaacaacatgctttttattttgactaccatttaagtggaatctttgaactttttttttgacatgtgaatctctaatgtggtgagagagaaaaacataaaaatataaaaacattcaagcaatcgactat

SEQ ID NO: 252637 - DNA, 989 bp, Homo sapiens
ggtacccctccgattcgccggtttctctagtgtttcccgtttaaaagactgaattcgagaggtccaccagagcaggatgccgggatagtaagcgtgcacccctcataccccttaccggacaccctttttttttctttttttttttaagagagagtctcgctctgtcaccagggctggagtccggtagtgctaccttggctcactgcaacttctgcctcccaggctcaagcaatcctcccacatcactaagactaaggtacatgccaccatacctggctatttttcctagaggacaaggttttgccatgttccccacactggtctcaaggaatctggcctcccaaagtgctgggattatagccgtgagccaccgcgcccagtggagctgttttaaagaaggcttaactgactgctcaagcttcagttagatattccttcttcctgggtgctcccacaggcccaatactttgtctgtcacagcacctaacatagtgtctgtaattgcttctgttgcttgcatctcccactaagctatatagggaggtcaaatgatgagaagacagatgaagtgtggagaatagaaaagagctggtttagaaaatgagcagcattgagggcccaactgaggttggagaacaacttgtccatagacacatatagtgttgtgattcttttagcatcttggttataggtacttgaatgttgatggatgatttagggttttgcttggcagctgcaatgaaacaatgggagaggggcatcaagaacatacgcaagaatgtggctgaaatggaatgcggaatctaagctgcatggataaggaagattatcggggaacctgccccgatagtcacgtaggttcttttctattttccctaagcgtcggccggtttgagaaataaaaggacagagtacaaaagagagaaattttaaagctgggcatccgggggagacatcacatgtcggtagattctgtaatgccccacaag

SEQ ID NO: 252638 - DNA, 680 bp, Homo sapiens
caacctcaggtgatctgcctgcctcagcctcccaaagtgctgggattatagccgtgagccaccgcgcccagtggagctgttttaaagaaggcttaactgactgctcaagcttcagttagatattccttcttcctgggtgctcccacaggcccaatactttgtctgtcacagcacctaacatagtgtctgtaattgcttctgttgcttgcatctcccactaagctatatagggaggtcaaatgatgagaagacagatgaagtgtggagaatagaaaagagctggtttagaaaatgagcagcattgagggcccaactgaggttggagaacaacttgtccatagacacatatagtgttgtgattcttttagcatcttggttataggtacttgaatgttgatggatgatttagggttttgcttggcagctgcaatgaaacaatgggagaggggcatcaagaacatacgcaagaatgtggctgaaatggaatgcggaatctaagctgcatggataaggaagattatcggggaacctgccccgatagtcacgtaggttcttttctattttccctaagcgtcggccggtttgagaaataaaaggacagagtacaaaagagagaaattttaaagctgggcatccgggggagacatcacatgtcggtagattctgtaatgccccacaag

SEQ ID NO: 252639 - DNA, 477 bp, Homo sapiens
tggcttttgaataagctctatgagacctgcaagttactggacaccaaaggaaaagtgattttaaaacgtatcacattttgaatgccttccaagaagaacggtccagtagatgatggatttgtggctaagatcaaggggattaacagcttcttgggaagtctcccaggaggaaggctggcccgaggggatcagaactgctcccagtggaaagtagatgccacagtgatgtagctctgaaagagagtgcaccaggacaaggagaagttcctcttttaaaaactagacataacacatgctggttgcatgaggaagtggaaggaaaatttattgcctaacaaaatagccattctgctaggaaaacgtttgttaggcctatttgtcatgagaggtaaagtatctagtgttgcctggaatggggaaatattggcaaagaaagccacattgttttacacaataaagtaaatgtgagtcaaaaaa

SEQ ID NO: 252640 - DNA, 405 bp, Homo sapiens
cactgtataatcatggtcattcatttagaaagaaaaaagtaggcaggggaaaggggggaagaaagaaacaagcttaggtagtgatgctcaaaggagtaagttaggcatactggagcgctttaagtgaaggacaatcaatttagcagaattttaacttatttgataaatgtacagatttcttgtaaagttcaccctctactccgcagggctcctggctctgtcacccaatctgttttctttctgtcggtacacctgttgttctgtgatagtttgtttcccctcatctccctcacctctgcctgggttgagtccctttttaagaaaaagagaaaaaaaaaacccacaaaatattgttacactaatgttgtcgtgacattgaattaattaaaaagaaaagaaaagctt

SEQ ID NO: 252641 - DNA, 634 bp, Homo sapiens
gtatacacaactgaatattattcagctatgaaaacaaaggaaatcctgtcatgtgtgacaatgtggatgaacccaaagtcattatgttaagtgaaacgtcccaggcacagaaagacagatactgcatgtcactcatatgtggatctaaaactgtcacaactcacagaaacagaataggacagtggttgccaggggctgggggaatgcagactgtggcgatgctgattaaaggtgtaacttcccgtcacaaggtgaagttctgaaggtctgataaacagcatggtggctagagttaatgttatacagcatggtggccagagttaacattatacagcatggtggctacagttaaaatcatacagtacggtggctctcattaatataacttgaaatttgcgaagagagtagaccttaggtgtctgtatctccaaaaaaaaaggataattgtatgaggtgatagatgtgtattaagttgattgtgtcatcagttcacaaaataaatcatcacgctgtacaccttaaatatatacagtattgttttttgtttaattcatcaatcatacctcagtaaatctgggggaaaaaaacaaaatccataataaatttagggttgatggggtaccgagcccggaat

SEQ ID NO: 252642 - DNA, 521 bp, Homo sapiens
gtatacacaactgaatattattcagctatgaaaacaaaggaaatcctgtcatgtgtgacaatgtggatgaacccaaagtcattatgttaagtgaaacgtcccaggcacagaaagacagatactgcatgtcactcatatgtggatctaaaactgtcacaactcacagaaacagaataggacagtggttgccaggggctgggggaatgcagactgtggcgatgctgattaaaggtgtaacttcccgtcacaaggtgaagttctgaaggtctgataaacagcatggtggctagagttaatgttatacagcatggtggccagagttaacattatacagcatggtggctacagttaaaatcatacagtacggtggctctcattaatataacttgaaatttgcgaagagagtagaccttaggtgtctgtatctccaaaaaaaaaggataattgtatgaggtgatagatgtgtattaagttgattgtgtcatcagttcacaaaataaatcatcacgctgtacacctta

SEQ ID NO: 252643 - DNA, 324 bp, Homo sapiens
ggtagtgactgtgaatgactgtagcgcgtttctcttcgtagctggtgtgagtcctttccatcccagggagcagatcctcccctagtaagtagtcttctccaggaatgcttgcacacaccgtgactgtttccttaaatccctagaagtgggccgggtgtgatgacgcaagcctgtaatcccagcactgtgggaagcagtggtgggtggatcacctgaggtcaggtgaggcaggagaatcacttgaacccgggaggtagaggctgtagtgagccgggattgtgtcactgcactccagcctgggcaacaagagcaaaactctgtctc

SEQ ID NO: 252644 - DNA, 459 bp, Homo sapiens
gatatcacagcaatagtatgcatcttagtctagtttgggctgctataacaaaatatgtgggacagggtaatttatgaagaacagaaatttatttctcatagttctggaggctgggcagtttagaatcaaggctccagcatttgttgtctggtgagggctgctgtctgcttctaagatggtgctttgttgctgtgtcctaacatggccaaaggcagaaaagcaaaaagggcctagctagttccctccagcccttatataaggcctctcatgccattaatgagggttctgctctcatgacataatcacctcttaaaagccctgtctcttaatactgttaccttgaggattaagttttaacatgaattttgggagcacattcaaccatagcagtgtgagagggaaggttaaatgtcttagttaatgttgatttctgtaacaaataaaatctttaaaataata

SEQ ID NO: 252645 - DNA, 396 bp, Homo sapiens
caaaaagaataacaatactagtatgtattggagaaaccaattctatatactgttttttaaagagatgatcttgctctgtcacccaggcatggaaggctggagtgcagggacatgatcatagctcacttcaacttccaattcttgggctcaagcgatcctcccgcctctgtgttctgagagcagctgagaccacaggtgtgtgtcaccacctcacgtggcttaaaaaaaattttttttttaaatgacggtggtcttgctttgttgactatctcaaactcctggcttcaagcaatcctcctacctcggccttccaaagtgctgtgattacaggcttgagccactgtgcccggcccctaattctgtatttctttagtacaaatctgaagagaaaggcca

SEQ ID NO: 252646 - DNA, 395 bp, Homo sapiens
gcgtggccttctgggaactgtagtttccagctggcagaacggagcgccctgggcggagtcacgttgggggcgcccaggccacgccaacgcgggcgcagggctgagtatgcgggaagccacgcagcgactgggcgtactcctaagcttctggaaaggcattctcacgccctgctcctcctaccctcctccaaagttgtacaggagcagtttcctccaattctataactttactataaaacagattagaaattggcacaattgttcttaaatccgtcaccacctttctagtactgtattagtgcctttgtttcaggtaccctacatgaactgttttaagtatggtattttcatatgtcaaacttaaagagtaataaaatcaaacaaatccaaaagca

SEQ ID NO: 252647 - DNA, 1360 bp, Homo sapiens
  misc_feature (18)..(18): n is a, c, g, or t
gtgagccacagcaccagnaccaggggctatttttgtgacccacataggtggcccattcagcctcaaggggaaatccagggtaggaagcagcagctctgctggaactgggctcagcagtcccatttgggatgtaagcctctattgcctctaagatgacccttttcctgtgggttgactgactctgagggcgatttcggaaatgttttcagcagaaatgaaggataagcatcgcacatgtccagcaatgtctttgagaatgcagtcatttgcacgtgagttctcatctttgttttctgaaacagacgtttcttttagtaagtcacaatacatgctaattttcatttctagaatggtcactggcagttctcacttttaactataagaagtcacgtggaacttagtgatttttaacaaatactaaattcatcctcactttatgttgatcttccagcaacgtttatatatttagtaattttaaaaattcctatttgatacaattaaattttatataatgtgttttgcttgaataaaatgttacatttatactttgagaactctgaccaaatctttcatacagatacaggtaaagaaatatttttctaggttgtcggagctgcgtacctcccgctgcttctccttgtggtccagcaccacctgctggtcagtggcagaactgtcctgacttcgtgaacatggaactgctaagagggaaaactgcatctcagcattttcattttttctgaatattaagtgaaaagcaagttctatttgtaagaaatagcttttgctgaggagttgtgaattcctgcacctgtgtttgatgttatttgtatgcaatggattgctggccctttgttcctaagcaagagaagaccaaagatgcttccccatgacctctccggtgaggatccgcaccccccggacttgctctctgatgaagggcatgtcgttcagtgccccagcagtcagaagcagtttttgtggaactaaaactaataatgttaccctcacaaaggaaatgttcttttactaagtaagttattgctgattcttgaatgtctgttatataactgggtcggctatcaagaaggaaggttatatttcttatcacattttaagttgttaagcaaatgtgagtttttttttaagaaatgaggctttcactgagatttgtgtgctattcataattttaggaattactgcttagaacagctgcttgggtgtatttttctacacaggtctgtacttctgccactttctccttttaaaaaaacaaaactatgcatattatgtattaaagttttcttggttttatatatcagagaataaaaacttttttgacttttgagtaaaaaaaatg

SEQ ID NO: 252648 - DNA, 499 bp, Homo sapiens
agaaggttggtgctgtcactctcagttgttcctcatttctacataactggtcaatgcttctacttactgtgggagttggaatgtcttggaaacacaggcgggtcctgagtgtgtgaggagtaggggctcatggtcttagtcctctgtgtaagtaaatgtttggggcaatcacagagcaggcatttgtaggaacctcctttggccactgggaccagattccctgagagcctcattagggacaagaagaacataattgtcccacctaattttggcccctttggaccaaacaacgacgacattcaatattatctaacgtttagataaaactcttggaccaaaacttgtagatattagaaatgaagccatcctgatacagataaatcgcagacaagattccttggaaccacaaacctcctcaccttgtgatctgctcctgtgcccacaggtgtggaaattctgtcatgaaatcctttgcagtatcacttcctttgttgagaaa

SEQ ID NO: 252649 - DNA, 279 bp, Homo sapiens
ctacacttatcactgaattcaacaccattatcttagtcactagccggtaagacaagtgctttgaaggaatataacagctatttataaagaatatgaaaaacttctagggtaagatagtgtgtcaaggcagatcacaaaatcttttaaaataaaaacaaagaattacaacttcgacttatttttcttaaataccagttagcaaaaaagagcaaaagacttcagaaatctatgatgtgttccaacttccaagcagtgtcacccacctaatcagaccgagag

SEQ ID NO: 252650 - DNA, 557 bp, Homo sapiens
ttcagaggccacggacaataaatacacgagtgtattcagccagagaatgaggttcctaagaggcctggcttcctgggtgttcctcagaagtccccaactcctagtgacagtggaggaggagcgtgtcccccttcggtcaccctgtccgttccttatgctctgctgataaatgccgcttgtactgcactgagccctatccctccatcgtgccttgtgtcgaattccacattagttactcaaagacacctggccttaaacttggcgtttttatctccttctgatcccaataaatggaagaggcttggggaggcggcagcctggtaggtacctgccacttggggcatttcttctcaggacacatttttagactctgtcttcatggagaaaggggctagaacccaccaggaaggggaggcagatgatggaaggtcaccacctgcttggccctgaccccgccactgccagtgggtggagggtggtgcccacttcctcatctttggctgtagtaacgagggtctcactgcagcatgcggtcctggggaggtggggagagggga

SEQ ID NO: 252651 - DNA, 446 bp, Homo sapiens
aatccgcaggtgctgggcgcccggtgccggtcgcagtttcaaaagcgcctggaggtgacatccaggagcaccaccgcgccgcctgcagggagacccatggcgaggcgcgccccctaaggcggccaaggaaaaagcagaaggacgggaaggtgccccagagctcgatctcaggccgcaagcaccgaccaagttcctggtctccgggaggtcttttttttttttatttcttccatatttcatcattattattattaacttttcaagatggattaaagacttaaatgttagacctaaaaccataaaaccctagaagaaaacctaggcaataccactcaggacataggcatgggcaaggacttcatgtctaaaacaccaaaagcaatggcaacaaaagccaaaattgacaaatgggatctaattaaactaaagagcttctgcacagcaaa

SEQ ID NO: 252652 - DNA, 340 bp, Homo sapiens
tgagatttgagaggagggaaccactatttcccattaggattgtctagagatgctttattggaagtgacatgtttgagccaggccatggattggtgcagtttgaagaagaaacttttatcgagagattgaagggggatttaaaaaaaaacaggagtagagtatttttattttgttttcaataccttaactaatacttcgacatttcattagtattttttcctatgtggggaggagaccacagtttcctctttccagtgtttgaaatggcaataacagtaacacatggtcatgtacatgtagttttgaagtttaaaaaaaaataataaattctcacatcaaa

SEQ ID NO: 252653 - DNA, 1708 bp, Homo sapiens
ggagcgcggcctggagactaacagctgctcggaagaggagctcagcagcccgggtcgcggaggaggagggggcggccggcttctgctgcagcccccaggccctgaattacctccggtgcccttcccgctgcaggacttggtccctctggggcgcctgagtagaggggagcagcagcagcagcagcagcagcaacctcccccgcccccgcctcctcccgggcccctccggccactcgcgggtccttctcggaagggctccttcaaaatccgcctcagtcgcctctttcgcaccaagagctgcaacggtggctccggcggtggggatgggaccggcaagaggccttctggagagctggctgcttcagctgcgagcctgacagacatgggaggctctgcgggccgggagctggacgcggggaggaaacccaagttgacaagaactcaaagtgccttttctccggtctccttcagccccctgttcacaggtgaaactgtgtcgcttgtggatgtggacatttctcagcggggcctgacctctccacaccctccaactccccctcctcctccgagaagaagcctcagcctcctagatgatatcagtgggacgctgcctacatctgtccttgtggctccgatggggtcttccttgcagtctttccccctacctccgcctcctccaccccatgccccagatgcatttccccggattgctcccatccgagcagctgaatccctgcacagccaacccccacagcacctccagtgtcccctctaccggcctgactcgagcagctttgcagccagccttcgagagttggagaagtgtggttggtattgggggccaatgaattgggaagatgcagagatgaagctgaaagggaaaccagatggttctttcctggtacgagacagttctgatcctcgttacatcctgagcctcagtttccgatcacagggtatcacccaccacactagaatggagcactacagaggaaccttcagcctgtggtgtcatcccaagtttgaggaccgctgtcaatctgttgtagagtttattaaaagagccattatgcactccaagaatggaaagtttctctatttcttaagatccagggttccaggactgccaccaactcctgtccagctgctctatccagtgtcccgattcagcaatgtcaaatccctccagcacctttgcagattccggatacgacagctcgtcaggatagatcacatcccagatctcccactgcctaaacctctgatctcttatatccgaaagttctactactatgatcctcaggaagaggtatacctgtctctaaaggaagcgcagctcatttccaaacagaagcaagaggtggaaccctccacgtagcgaggggctccctgctggtcaccaccaagggcatttggttgccaagctccagctttgaagaaccaaattaagctaccatgaaaagaagaggaaaagtgagggaacaggaaggttgggattctctgtgcagagactttggttccccacgcagccctggggcttggaagaagcacatgaccgtactctgcgtggggctccacctcacacccacccctgggcatcttaggactggaggggctccttggaaaactggaagaagtctcaacactgtttctttttcagaagttttgtttttgatatttatattacttggtatggaaaactcacctt

SEQ ID NO: 252654 - DNA, 292 bp, Homo sapiens
cagcacgtcctgggcagagcatctgacccacccctcttgccctcggcacccctgtgtcccaaggagaggagcttgtctagatgagtcacctcagggctctctactgccaggcctcatgctggttcctttgagctccaaatagttcaggcctgtaagcaccaaggaatgcttcccaggcaggagctgtggtggtgaggagggccactcctcattgacagagcagctctactgtgtgaaggagagatacacagaatcctaattctagagaaggtaaactccagggcaggcatga

SEQ ID NO: 252655 - DNA, 265 bp, Homo sapiens
ttttttttttttaaaggttctgctctactgaatctatccgataatatttctccaaagaacttttatgctagtgctcattttttcccttttgggggatgatggaaagggggcagttaccctcccttgttatcacaagtaaaatgcaaaaatcagcccacagatggttgcagagaaaaaggtcctctcaaaccccaaaggcccaagtgtaaactgatattaatagatctgctcagtttgtaggcagtttaacaatagctatccagac

SEQ ID NO: 252656 - DNA, 502 bp, Homo sapiens
tcttctactatatactacatgagttttaagtcaatgagatgtcctagagttttaaaggacactaatatgtgaaactgatggtcacatatattactgttattaactataacaactatgccacaaaactagcaaggccaatttaatagtatgtgttatacttataaacttagtgttttttgacacagagttccacttctcaccatttattatagagaaacagtcaccatacttatgcatagggtgacattacagagctattcattacaacactgtttgtaacagcaaaaaactggaaacaccctaaatctccaacagtaaggaatagctaaacaaactacacagcagttaagaaaaaggagttactggggcacatgttctcaggatttcctggggctgtgtcgcaggccattaaaaagaaaaagaaaaaagaaaaatgagttacttctgtatgtagagacatggttaatatattgttgaatggaaacaagcaacttgtaaaaaa

SEQ ID NO: 252657 - DNA, 412 bp, Homo sapiens
acaaatattgacctcgcgtctaatccactcgtcctccagtgccagctcattcctgagaagcccagcctggcagccgcagatcccatttaatcccagccccacaatgtcaccagctcgcagcttgggagctgggctcatccaggccctggcaggtggggccagagctgggctctgacctctgtacccacacttaccaccatgtaaagtgctgggaagaggggtggggagtcacggcaagttgagggtccaggcttgccccagctcgccagatgctcgccctggctgccctgacctagcagctaatctctgcggggcactgcggctacatggtgactccagcacggggacatttatcagaaatggaactgatggattaaagtggaaccaagcgaattgatttttctccctgggc

SEQ ID NO: 252658 - DNA, 1108 bp, Homo sapiens
ggccttttttgggggaaatggccgatttgcctgcctcagctgctcgggaggctgagggaggcgaatcgcttgaacccgggaggcagaggtttcagtgagtcaaaatcgcaccattgcactccagcccgggcaacagggcgagactctgtctcaaaaaaacaaaaaaacctcaaataggctaagcagatccattcccataatagtggattctaaaaccgtccttaaataggcaaataactgactttttcaaaactttttttaggtgttgggttcacccttgaaagaactgtcctctaacaactggttttgtcagttaaagcccttgagaattgacatagctatatacctggttgagcaggtgataaaacttgtaactaatgttgtgtcctgaaaacctacacagggaggtactgttttcccttagtgtctacctggctgcttggccttgtgactactgattccattagagcagtggttctcaaagtatgtgctccaaagcctagaagcatcagcatcagcatcagcatcacctaggaatttgttagaaatgcaaattctcgagccccaacccagacctactgaatcaaaaacgtgggggatgaggccctgctttctatgttttaacaagctctccaggagattttggtgcatgtcaaatttgaaagccactgcagtaaaggatactgctaccttccatagtttatggactgagctacctatctggctcctcctctgtgaataaccacacacacaaattttgcccaaggcacacaatatataaagcaaaactgttagtaatgtactttttaattattccttaacaaaatagaataaccaaaccaaatgcttcaaagtaatagcaacaagagagaagaaatgcgatggcccgagtaaaaaatctatcttctctcctttttttgtgggacaaaattcccgttgcaactggtttgtggttcgcccgctcatgacctgcccagtgggagggtgctcccacctcaggggattgggtggccacccgtttgttttggaacggtccggccggtaactgactgtttcgcaccaggaaaggagggctttcttacacttggagaatttttcgcttataaac

SEQ ID NO: 252659 - DNA, 1109 bp, Homo sapiens
tttttgagacggcgtctcgctctgttgcccaggccggactgcggactgcagtggcgcaatctcggctcactgcaagctccgcctcccgggttcacgccattctcccgcctcagcctccccagcagctgggactacagggcgagactctgtctcaaaaaaacaaaaaaacctcaaataggctaagcagatccattcccataatagtggattctaaaaccgtccttaaataggcaaataactgactttttcaaaactttttttaggtgttgggttcacccttgaaagaactgtcctctaacaactggttttgtcagttaaagcccttgagaattgacatagctatatacctggttgagcaggtgataaaacttgtaactaatgttgtgtcctgaaaacctacacagggaggtactgttttcccttagtgtctacctggctgcttggccttgtgactactgattccattagagcagtggttctcaaagtatgtgctccaaagcctagaagcatcagcatcagcatcagcatcacctaggaatttgttagaaatgcaaattctcgagccccaacccagacctactgaatcaaaaacgtgggggatgaggccctgctttctatgttttaacaagctctccaggagattttggtgcatgtcaaatttgaaagccactgcagtaaaggatactgctaccttccatagtttatggactgagctacctatctggctcctcctctgtgaataaccacacacacaaattttgcccaaggcacacaatatataaagcaaaactgttagtaatgtactttttaattattccttaacaaaatagaataaccaaaccaaatgcttcaaagtaatagcaacaagagagaagaaatgcgatggcccgagtaaaaaatctatcttctctcctttttttgtgggacaaaattcccgttgcaactggtttgtggttcgcccgctcatgacctgcccagtgggagggtgctcccacctcaggggattgggtggccacccgtttgttttggaacggtccggccggtaactgactgtttcgcaccaggaaaggagggctttcttacacttggagaatttttcgcttataaac

SEQ ID NO: 252660 - DNA, 575 bp, Homo sapiens
aatttgttagaaatgcaaattctcgagccccaacccagacctactgaatcaaaaacgtgggggatgaggccctgctttctatgttttaacaagctctccaggagattttggtgcatgtcaaatttgaaagccactgcagtaaaggatactgctaccttccatagtttatggactgagctacctatctggctcctcctctgtgaataaccacacacacaaattttgcccaaggcacacaatatataaagcaaaactgttagtaatgtactttttaattattccttaacaaaatagaataaccaaaccaaatgcttcaaagtaatagcaacaagagagaagaagagtgggaatgaccagagctaacaaaacactctattcctttctctcttttttttttttttggagacagaatctcaccctgtagcccagcctggagtgcagtggtgcgatcccggctcactgcaacctctgcctcacaggtttgaagcaatttgcctgcctcagcctctcgagtagctgggattgcaggtgtgcgccaccatacccagctaatttttgtatttttagtagagatg

SEQ ID NO: 252661 - DNA, 707 bp, Homo sapiens
catgtatatttcagtaaacttgttttaatatgtgagacaaaggtgggtttcttcacgtattaattttagcataaagatttaaaaactatttgatgaatgttttcattgtctgcatatgacaccaagttttcaattgggcaatttattagatttttattttccccttaggacctgtattctattatatgagctggataggtgttgagagtgagaagtgttgacactggagtctgggatgaaaaagtgagaaaggaaaggagtgacatagcacgagtatatatatatatttgaaatatacctccaaaaagttagaataaattcaagaaaataaatttgcactggggtggaaaggaataatacttatataagagaagttggtggggaaggtcaagagtgaacttttattgttttccgcgctctgattcagccatcatcgctttctgcatctcctctcccctttccctcacttcccacctatctctcccttcatctcctacccctctctttccaccctttcctatgctcctctccatcgccctcgccctcatctgctctttttacacccatccttcccctttccttctcccctcttctcttctctcctttaatctccctcattgcccctcctatttcctcctctctcgcgccttcatcatttctccgccttttccgttcttctcttagcctctcttccctcactctcctcc

SEQ ID NO: 252662 - DNA, 2393 bp, Homo sapiens
  misc_feature (224)..(224): n is a, c, g, or t
  misc_feature (1859)..(1859): n is a, c, g, or t
agaacatcgtgtttgagttgggaagggatttgtgtgtgtccttccagataggtcgatatcgcccattgtggatgtttagcaaaaacgagtggatcgttatcatatggaaaacgttcaaatcttttgtgggagggctgagctacctgggaacgtgaaattatttgcataatgtttggcgaggccatgagtaattctactattatgaagaggagtaattaggagtngttaacggttactgagagccgcttcatgctaaggactttgacatgcattttctcattccgtcctcagaacaaccgttgctactttacgggtgcagaaactgaggtttgtagaaaattgcccaagttcacttaggcagagagcactgccctgattccgaaccaggcaggcccacagagagcaagagctcttacccactgtagccttcccagcaatcagtttcttagaaaatgtgtgttttcgccgaacgcggtggctcacgcctgtaatcccagctctttgggaggccgaggcgggtggttcgtttgaggccaggagttcgagaccagccttgccaatatggtgaaaccccgtctctactgaaatacaaaagattagccggccttggtggtgcacgcctgtcgtcccagttgcttgggcggctgaggcacgagaatcgcttgaacctgggaggcggaggttgcagtgagccgagatcgcgccactgcattccagcctgggtgacggaataagactctgtctcaaaaaagaaaaagaaaaaaaaagcgtgttttcatattagctgtgctgtttaatgaaaagattgcaaattcgttgcatgggctccctagaagtgcttagtttggtttacagtattggccttcaaaatgtattgtaaaaatttgaattgattaccaacattttaaacattgagggattgcatgaaaaacccagattccagcatctcttggaaaaccagaatctctgacaacgtgggatccattttccaaaagtgcaaactaggtttgaagtgtggtcgaagccacaccctttagaggaacctagggtgctcctgttcaccacactccccgctgtttgcttttcccatttacattatctggcctcagtaggcatttgaggttgtttatttatcttaaatcattcagtcaacacaaaccagcaagtatttatttatggcttggtcctgctgaaggtatggacaacaatataagcatggaacaaaactgctcttgagtttaaacaacatagtttcgaggctgatgttggctgtttttgaatggggtatatacaaacgagtaaaagtggacagaatttaggaatcatcacaagacgcaggaagcacactggagatgctgccttgaaatctattatccccaagtggtaattcaaaaccactccaggctcattttgacttacctaatacataaggaacaccgttaactttttggttgcataaattattaaatttctgtcgttcaaatacgcaccctgaaatgcagagaatatactcaacaaccaccaaaaaaaaaaaaaaaaaagtgaatcacaacattgtttacctataaaaggtatgttaatcccatcctctaacattttcattagaaaagaattggtcatgtgactcacactggctacaaaccttaggcaactctgttttttagggaattgcaaattcagcttgcaaggaggaaaagagcggaaagaagtcgggcgaggtgggttttggacatgggtcagattcagctggtttatagaggacttttaaagatttaggatttgagatggtccataaactctttggcagatctaacattctctaaagagaattggccaggcatagtggctcacgcctgtantctcagcactgtgggaggtggaggctgggggatcgcttgagtccaggagttgatgaccaacctgggtaacatggtgaaaccctgtctctgcagataatacaagtataagctgtagtgtcagctactcaggaggctgaggtgggaggattgcttgagccaaggaggaggaggttgcagtgagctatgatcgagccactccactctagcttgagcgacaaagggagaaccctgtctcaaaaaaaaaaaaaaaagctagaagcagagtgaatagcttcttttaactgtatatcctctggaaaagggaggtatcatttaatgttgggcttgcaacaaatataaacatggagatatttgaccaaacgaaataattaataaaaatgtatcatgaagcgttagaattccctactatttttttttaagtaggactggtgaaaatgacattttaaaaaactattagataatcctttctcgtgaaacaagttcaaaaatgacagtgcacatctgatcatttcgatgtcagtgtttaaaaaaaaa

SEQ ID NO: 252663 - DNA, 358 bp, Homo sapiens
gatggccaggctcccacgccctactggccgctacccgaccaccaatgaggcagaggcctgaggccagtcggtgctggagccctacttccaaggtccacagaccgcttcaggccacagagccgaagaaaactgggcatgtgaaggcccaggaggcggggtccctatgtctgccattcttggcaggtgcatttcacgctgggagcaagtcaggaaaggtgatgcctctcaccgccaagaaggctcccagcagagaccagagccaccggcacagatccccaacccctgaaaccacctccctctggaggaccaggacgccctcctagttggtagaagcacagtaagctctctgtccttatga

SEQ ID NO: 252664 - DNA, 411 bp, Homo sapiens
gtttggccttgagcaactgggtgatcagggtggagcagttcagggagccatcacaagagacagaaaacgcggtagtcatctggtgtctaaatggcatttaagccttgagggtgggtgagaggaaggaagggtagatagagcagaggttgaaggactgagccctggggcatgccatatgaggctgccggcggacagaggtgcacagctagtgagaaaaaaacaaggcctttttgtagtcctgaagcctcaaggaagtgtttcaatggtgcttgatcatatcaatttcaaataggctgttttcatccccaacttctgctcagccaataactcaaactgataaatgccctctgctatcctggattttccaaattctgttttggggttttggaataaacactggtccaaatcctc

SEQ ID NO: 252665 - DNA, 450 bp, Homo sapiens
cagtattaagagcatggggtcagaggcaagatagatctgagtttaaatcccagctacactgccttcaagagtgtgaagtttaacctcccagagctgcaggttccttatctgtaatgtggaaataaaatggcacgcacctcagagccttgttagataaaagacaaggcagtaggaagtcttgatacggtgcctcgatgggttatcagtagctcatcctcatatttctagttacgtctgtgctggaggatgcctttgtctgctgcttttcctcccaccatctatccttgcagagtttctaagcacaaccctcttcgcccgtggggccccagtcaggtcatccagatgggtctggtggggttggagagggtgtgtgtgttgtgggtgcacacctgcctgctgcttttggaagccgatcgaactccttgcttcccttaacctgctgcttgctca

SEQ ID NO: 252666 - DNA, 108 bp, Homo sapiens
ctcagtttccttcttctgcaaaatgtgcggcctgatcctgtgggcaggtctttgggccagaaaatttttcattaaagtaattttttaaaaagttttataaaataataa

SEQ ID NO: 252667 - DNA, 438 bp, Homo sapiens
cataaataagttgcaaatcaagtcctgcaagccagagctctgggaaatggctgcattctctgaaatgccatttctgccccagccctccagagcaaatttcaggtttgccaggccacccatcccatataaatccttcagatataggccttatgttatcatcttcctatcttgactgagactctttaaaggggattcctttcaaatccaaattacatattcttaaacatttttgatacttattagtatagtaacatacctacacacacacacatagattttcagtgacaaataccatgttagtacttatagatagtgaaatacactttgatctagagggctttattttctaggccaccaattgtgtctcctgttacaatttcccagagtatctggcataatgtctgtaatagtaaatgttcaataaatgtttgttaatat

SEQ ID NO: 252668 - DNA, 632 bp, Homo sapiens
cgccagacgtgagccgatcattaagcgcaagacagctggccaggatgtccgagtccagcccagaaagccgggaagagctggagagcgaggacagttacaatggccgggggcagggagaactgtccagcgaggatattgtggaatcatcatcgcccaggaagagagagaacacagtccaggccaaaaagacaggggcaaagccctcacaagccaggaaggtaaacaagagaaaatctcccccaggatcaaaccccaacctcagttgaggccagggtggtcagggtgcagaataaatgccatcgagcctgtggctggccctctgctgctgttctctccctccaacctggctgtttcttgcggggcaaggggtgggctcagggctgcaggggtttctcaaaggcaatccagctttcacaaaggaagcccatgggaaggcaggtgggagggaaaggaaggggcacagccctatttcttcctacctgctaggacaaggtggaagagtgtatctggggtgggaaggagggcttcccctctctgctgcgagagactggtctgtgtgaaatccacttctgggacaggcagtactgtctgcagcgatacccccaataaacggaactttttaacccaaaaaa

SEQ ID NO: 252669 - DNA, 437 bp, Homo sapiens
  misc_feature (284)..(284): n is a, c, g, or t
aagggcaaaagctcgcttgatcttgattttcagtacgaatacagaccgtgaaagcggggcctcacgatccttctgaccttttgggttttaagcaggaggtgtcagaaaagttaccacagggataactggcttgtggcggccaagcgttcatagcgacgtcgctttttgatccttcgagactgcctggattacaaggatccttgtaatccaagcagtcgtccctcaggataactggcgctctcgcagacgcgacgcacgcccgccacgcagttttatccggtaangcgaatgattagaggtcttggccgaacgagtctcacctattctcaaactttaaatgggtaagaagccgactgcttggatacaagagtgaggtgaatcgcatccggtgctgcgcggttgtcgccatcacaccagagcgcggcggcagccgcgac

SEQ ID NO: 252670 - DNA, 363 bp, Homo sapiens
  misc_feature (305)..(305): n is a, c, g, or t
aagggcaaaagctcgcttgatcttgattttcagtacgaatacagaccgtgaaagcggggcctcacgatccttctgaccttttgggttttaagcaggaggtgtcagaaaagttaccacagggataactggcttgtggcggccaagcgttcatagcgacgtcgctttttgatccttcgaggaggagccctgagctgggaggcagcaaaggctgacctatcagagcctcccggaggccaccgtgctgggtaccaggactcacctctgacaagcaggagaaggtaagggcccggtcagctcctaagtgnggcccacgcgcgtgcacacagcttccctggtaataaagagctggcatctttcttaaaa

SEQ ID NO: 252671 - DNA, 540 bp, Homo sapiens
caggaaactgagatggctcatcagtacttacttttcagctccaggagttgtaataattacattttggagattttcagataaagtagcaatatgttacagtagtcataccaggtgccctgcctttaaatcagggttgcagtgtttcatagttgtgtgaccttgggccagttagttttctcctctgtaaaatgtggttaataatagggctgggagggggattaaatgcaaaacacttactgtgactcatactaaactttcagtgaacactgaatattagtaaagttatttttactgggaagatcataaatatattacaaaaaaggtttgagtctctttctgtgggatatatgatgcaacacaacaagccgtggattgggtgttgctttgtaaggaaaatcaattacatatgtcttaagtacttcaatctctcaacatctttgttgattccatctgagcttagttactctactacgtatagtgtatgatgttacgggtctagaataactagattagggtaaaaaataagtataggaaaaaaaa

SEQ ID NO: 252672 - DNA, 361 bp, Homo sapiens
  misc_feature (327)..(327): n is a, c, g, or t
caggaaactgagatggctcatcagtacttacttttcagctccaggagttgtaataattacattttggagattttcagataaagtagcaatatgttacagtagtcataccaggtgccctgcctttaaatcagggttgcagtgtttcatagttgtgtgaccttgggccagttagttttctcctctgtaaaatgtggttaataatagggctgggagggggattaaatgcaaaacacttactgtgactcatactaaactttcagtgaacactgaatattagtaaagttatttttactgggaagatcataaatatattacaaaaaaggtttnttctgtgggatatgtcgcacgcggccgtcgaatt

SEQ ID NO: 252673 - DNA, 415 bp, Homo sapiens
cttttgtctggctgccttgaaactacagtgatagcacagttgagtaattccaacagaaaatgtctggtcttcaaaatgtaaaatattatatttaatactgaccctttaaagaaaaaaatttgctgacctccctttcctaacctttaagagactggtagtgtctgctctacacctatacccagcaatatgaatttttatagaaaacaaattttagtaaacctaattttaaagcatatatatctagaaattaaataaaatttacaaagacatataaggtcatagattataaattttttaagtaaattaccttctttatccttaatgagaaaggtacaaacctattggagcaaaacatttttaagccgttagtgtgtacattatggtgcctttctcagttatttgcagaatcataccc

SEQ ID NO: 252674 - DNA, 447 bp, Homo sapiens
gtgaatacttctgggaaaaatagaaaatacatgggaatatgtcagttttaacagagcctgctaaatattttaggggatttaatgtttattaaaacccatagtgatataagcttttctttttttttctcaacagctggtgagaccagcaccaagatattgatgcagtttatagtaggtctcttagaatcaagtcagtagtagactaggcattgtaactctcaagtcttaaatactcatcagctggtcagtccattgggtctggcaaaattaatgtgtatttaacccttgagaactcatgcttgggtgtaacaactagtggaaacaattgtagaaccccagagatataaaagtggcatacaaatgctttctaataatgatgggcacagtttatttgctttctgattttgggcattttgcctttgtgaaatttcctctcatttggtgcct

SEQ ID NO: 252675 - DNA, 179 bp, Homo sapiens
tcgttattcagtacagtaacgtgctatacaggtttgttgcctaggtgtgtagttggctatactaaatttgggtaagtacacaactttttgttgtttcacacgagaacgaaatcacctactgatgcatttctcagaatatattgctgtcattaaactatgcatgtctgtatttacagtgt

SEQ ID NO: 252676 - DNA, 369 bp, Homo sapiens
gcctcccaaagtgctgggattacaggcgtgagccaccgcgcctggctagtatatggtatttttcttttatgtttatatgatgatgagaaatttgaaattattgtttgtttgtctttagtttttattcttgttaatggagaaaccaaactccgtgaaatattttaaagaggcttcttctgagccaatatgagtgaccaccatcttgggatggtggccagttgtgcctaaactccgaaagggaaggggtattatgagttttttctgatccctcttcccatcatagcctgaaactcagtttttgaggtttctctggggtccccttggcccagaagggagtctgttctgtcagtggggttgttaccagttgtg

SEQ ID NO: 252677 - DNA, 357 bp, Homo sapiens
gtgggagatcccatcctcagctaacctggactcccaccaggagtgaagctttcctctggacatgctggaggcctaggtgtgagctgccacagccatgcgggtgcttctgggaagagggaggagagctggtgtccagccccatgccagccccacaggggctgagagcagaacagttgagagccagccaggcccgctgggctcgggaggccttggaagccccactctgcccccagagcatgcctggtgcttcctttcacaagttgccatcagcataatggaccagtgtgatgccatgtgagatggcaagaaataaagtccctgtgaaataaattatatggatgcagttcgctcaggaaa

SEQ ID NO: 252678 - DNA, 712 bp, Homo sapiens
gcaacttgactctgagagcctgctgtctccactgaatttgattatgtgctatcaggagaatccatctactgcctgcagctgtcgagctcctctcctggacatcctaaactcaaatggcagggaaaaaaaaacactgccatctattctgacctctgaagtcaccatgcccattaactgaggatgaagaagacagaaggaatactgaatgtctgaagagagagaaaacgttataaaattatcctttcaaaagatggaagaataaattcacttggcaaatgtgatatggactcacctgaggtttgaagtcatccaaaaagaaaccaaaaatcatggttttgagattttgtccaaattccttcattatctcagcactgcactaggatactaatgagttttcgggaacagaaaacccaatggaatattaaaattggaaagaagagctccttgagttaatttcactgaagtgcatcacaacacactgcactgttgtaagaatgaatattcaaataggaatccagtcatgggaaaattaattaaggaaaatgttattgctaatatttctttttatgaatatacatatgcggagacacacaaccatctattggctccacactgacaataataaaagccaaacatttatgagagtcaaatgttcaagatctcttgctgagttggtgttaaaagattttaaataaaaaaattatgattccag

SEQ ID NO: 252679 - DNA, 494 bp, Homo sapiens
catcctcctccattaaaactggacagactaagggccactttcctaatggatgggtcttcttggttcatctcatgctcccaacagagctccctcccggggatgggaacgcgccatgccaggagagccctcttgatccagcctccagccaaagccagtccccctgccaaacaggccctagagttacactggagggtgacaggcctaacctggaaatttcttgctgaaaattgtcagtttcccacacaagtacagcctggcagttaattcaaattcaaaccagaagactgctgcttcagtctcgactgcttgaaaattaggttgtgtagagctttcatttgctggaaattgtgcagccagacattgtgcagattgacccagtagctacagcaagtacacacatagggcgccaagcaaggacaagtgtgcacatgtgcgcacgcacacacacacacagcagaaaatctagaaataaactattttaatgtcagctgtca

SEQ ID NO: 252680 - DNA, 802 bp, Homo sapiens
aggaatagtgagggatatgatggtgggttggataatgtgatctggtttatgtgattcgatctggtgtgtttttgttatatggtgatttttatttgggccgtgcggcccaaataggccgttaacgacgattccaaggggagcggtcgagtgcttatcgatggcaaatattgattgggttctagttagtaacagtccccatgggaagcaggaaataccaaaaattgggtgctttttgaaattctgaaagatgtggcaatcaaaatgagcccaattagcattttaccttccagaataaacaatattttcttaaattgataaatgaacaaatgaatgaataagtagataattatataagtttcaaagaactagaagggaggttcctaatagaggttaaatcatcagtattaaaaactgaaagaacaggcagtcatttggctttcataaggttaaatagttttagttcatttataaatgtctgcattagctcttcacaattaactcttcatagtatcaagagttaatgtcttgtcttccatttttgtactaaaatattaaaccagaatggcaaaaatgtctactaaaagaataaataagaataaacaataataataaagttcagcatgatttggtatatagcttatggtaaatgagaacgcattatgacttatttctaagagtagacatacagacaaaataaacagaataagtagacaaaaagtaacatcacacatacgcacagattttcaactctactaataataacatttagtatttagataagtatatctcacagttcattttc

SEQ ID NO: 252681 - DNA, 556 bp, Homo sapiens
gttcagattccttaattcaacatggcaaatattgattgggttctagttagtaacagtccccatgggaagcaggaaataccaaaaattgggtgctttttgaaattctgaaagatgtggcaatcaaaatgagcccaattagcattttaccttccagaataaacaatattttcttaaattgataaatgaacaaatgaatgaataagtagataattatataagtttcaaagaactagaagggaggttcctaatagaggttaaatcatcagtattaaaaactgaaagaacaggcagtcatttggctttcataaggttaaatagttttagttcatttataaatgtctgcattagctcttcacaattaactcttcatagtatcaagagttaatgtcttgtcttccatttttgtactaaaatattaaaccagaatggcaaaaatgtctactaaaagaataaataagaataaacaataataataaagttcagcatgatttggtatatagcttatggtaaatgagaacgcattatgacttatttctaagagtagacatacagacaa

SEQ ID NO: 252682 - DNA, 414 bp, Homo sapiens
tacaaacagtacccaaaacggaacaggctgctatagcactaggaatgttcaggcaatgcaactgtcaagtctgactacacatcagaaacacctgggaatagttttaaaactatcaatgcccaggccccatccccaagcaattaaattaaaatctctcgggaaaggcccgggcaatgggaggaattaaaaacttccctgggggttccaatacgcagctacacttgagaatgaccacggtaaagacaggcaatccttggagatactatgggttcagttccagaccaccacaataaagccagtatcacaagaaggcaagtctcaccaactttttggtttcccagtgcatacaaaaattaggtttacacgatactgtactatattaagcaagcaaataacattatttctaaaaaaaaa

SEQ ID NO: 252683 - DNA, 236 bp, Homo sapiens
tctttctctttctttcctttccttctttttctttctttcttcttttttctttccttccctctttctctctctccttccttccttatttccttcttttagagatggatatctggataagtgggtgaagattaagtcactatcaattatttgtacaaaccctatacttttagagaataaagggaatactttttttttgagatggagtcttgctctgtcacccaggctggagtgcagtg

SEQ ID NO: 252684 - DNA, 364 bp, Homo sapiens
cagaccgggcccagatgagtttgcgctgaatctgaagtcggtaggtccctggacatttctattatggaagccaagaagaacctcccctccaccctctgaagccagtgtggatcgggtttctggcacttgcagtgtctgcacggtctcctctccttccttctccattgccctttctcacccgcctgggcccgccaccctgaactaccgggacacatgctgttcctgcctccaggcgtgcacttcttcctgcagcctcctcccctactaactccttcttgaacttgatagctccattgtcactttcgagtcttccctaaaccactcccttcccaaataaaactgtttcatgtatttttctttcatt

SEQ ID NO: 252685 - DNA, 484 bp, Homo sapiens
gacgagtttgaggacctcgagtggtccgaggaggtccagaagctgcaggagcagcagctgcgcagcgacctcctggaccagtaccgttccctgctggtggagcggaaccgctcccagcgctacaacctatacctgcagcacaagatcttcgaggcgctgcgcagaaagaagggcctggaggccgctgaggtggctgaccggggcgcagaggccgaggcccccgagaaagagcaagcgtacctgcgccatctgggcatgctggaggagctgaagaagcagcaggcagacgacctgcagtggtaccaccaggagctgggccagttgaagcggcagtgccaggagaagctcaccagggtggagaaggagtggcgacgcttccaggcactcaagaagcaggtggtgatgcaggccatgggcagctgtcggatgaggggcgggcgccaggctgctctgcgagaggtggagcagatccaggcgttggagg

SEQ ID NO: 252686 - DNA, 408 bp, Homo sapiens
ttatatgcatttttcagataagaaaataaccactgacaccaataactgtctacatcccatctgagagagattaacatgcccaccatcacaggactagcatgcaataggatgaagatttgaatctgagcagtctaatccaagagcaccgatcgtaatcaccatgcaaccaaggccttagaccatgtacctcctccctgtattgtggcccctgtttgaaaccacagctccagtgtggcaaccatttagaccaccaatggctgttgtgccactgagatgatcagtacttctaggcttgccaccaacaataccctttttcacgttgttttcagttttgtatcccacattttgaaagattcttatcctgatcaacatgtaataagtcataaataaattccatttattctatta

SEQ ID NO: 252687 - DNA, 475 bp, Homo sapiens
gatcccccgggctgcaggattcggcacgaagcgacacttcgaatattctactaaatgagagttctgagtatagaaaataaaactaaagttggtagaaaaattatttgtatataatgttaagaggagtaaaagattttttgtagaataataactatattcagattatactttgtttcttgaaaaaattacagattttttgaaaagcaaatgatgtaactcaactcattattttctgctgtttcttcattcttattcacttgtgaaagcttgtgatcatttgttgctgcatcagaggtatgagagattcttcttcattagatgggcattatttatgatcttttctatggatgagtaagaatattaaaatgtaagatgcatggtgaaaatctaagtggagaggttctttgtggttaacttatactattgagtgatgcacaaggtaggtgttaagagtaatattcttttgcattatgag

SEQ ID NO: 252688 - DNA, 124 bp, Homo sapiens
cccagcctacagcctcccctctgcctcgttggtgcagacagcatgcaaggagacatatgtaggttccatgcactgtccagatgtcacacctggacctaagaatccctggacacactgcagggac

SEQ ID NO: 252689 - DNA, 1140 bp, Homo sapiens
cccaagtcacatattttccagggaagaccagaacttgaattcaagcagcttgtctctgaaggatgcactcagaccctgagggcctgcagtgcagatctccaggctcccagcccagccccctaggcttccttcaggaagataaccatgagtctgtccagtgaaaacagacccatgtctatctcttccctgcagacgggcttgatccctgccaactgcagagaagctgcagagcctgagcagagcctgatgtttaccagctctaagagctaagggttccagctgggacagcaaatcctcagcaatcctgggaaacagggagtgatgccagggcacagggtctcctccaggttatgaagagcagacacatgtggttggaacttcttcatccgggatgggcgtcctgcacgcacgttgagtggctctcaggaaaacatttccttgagaaagcagaggcagggaggcaatctctgaagggcaggctgtttttttccatgttctcatcgggaaggagagaagaaaaagcagtcagcacttcctctctgcagcccttcctctgggggcttctcatcccccttcacagcagcagagccccatggtgcagtttgctgtgcttgcctaatatcagtcagcgaagtagagtttgatgagttcagtcaacaaaaagtagccgataagggcttctgggcacccctccgagaatgcctgaggagccttttcaaggatggactggtatggcaaaaggacggagatttgggaagccttggcacttgttctcaaatatccaaagggctgtcttgaggcaggctagttctatgtggactccatggggtggaggagggatggcagggactagtctaaggaaatacgcagaaaggcacagaagcttaggttccaggctatgcagtctgacaggcctgcgttgcaattccagccacactatttataagctgtgtgacaattagcaatttgcttaacacttgtgtacctccattgtactgtaaaatgccagtggtaccatattcaaaggtttattgtgaggactgaagatggtgatttatataaagcacttagatagtgcctaggacttttgctaataataacattattgtgtaaagtccacttgtcttgagaacctatgag

SEQ ID NO: 252690 - DNA, 1100 bp, Homo sapiens
  misc_feature (1100)..(1100): n is a, c, g, or t
cccaagtcacatattttccagggaagaccagaacttgaattcaagcagcttgtctctgaaggatgcactcagaccctgagggcctgcagtgcagatctccaggctcccagcccagccccctaggcttccttcaggaagataaccatgagtctgtccagtgaaaacagacccatgtctatctcttccctgcagacgggcttgatccctgccaactgcagagaagctgcagagcctgagcagagcctgatgtttaccagctctaagagctaagggttccagctgggacagcaaatcctcagcaatcctgggaaacagggagtgatgccagggcacagggtctcctccaggttatgaagagcagacacatgtggttggaacttcttcatccgggatgggcgtcctgcacgcacgttgagtggctctcaggaaaacatttccttgagaaagcagaggcagggaggcaatctctgaagggcaggctgtttttttccatgttctcatcgggaaggagagaagaaaaagcagtcagcacttcctctctgcagcccttcctctgggggcttctcatcccccttcacagcagcagagccccatggtgcagtttgctgtgcttgcctaatatcagtcagcgaagtagagtttgatgagttcagtcaacaaaaagtagccgataagggcttctgggcacccctccgagaatgcctgaggagccttttcaaggatggactggtatggcaaaaggacggaaaagaggtagaagaagtattgaaagaaccgtggcctttgtcctggcctagagaagatttgggaagccttggcacttgttctcaaatatccaaagggctgtcttgaggcaggctagttctatgtggactccatggggtggaggagggatggcagggactagtctaaggaaatacgcagaaaggcacagaagcttaggttccaggctatgcagtctgacaggcctgcgttgcaattccagccacactatttataagctgtgtgacaattagcaatttgcttaacacttgtgtacctccatggcctgttttaagcccttagataggcctaagacttttgctaacacaaccatcacn

SEQ ID NO: 252691 - DNA, 440 bp, Homo sapiens
caagcgcccagagctgcagacgccagtatttggaatgtggccagttcctgctgaatccaagacctgagggccaggagcacgggcttggcagcagctgcttcaagttggatcattgacactgcagagccacgtttcacaaccaaggaactaaactcagggcagacttggattccaaaacaagacgtgcaaaaagggcaatttcaggaggaagatgagcccaaaagggagatctttcaggcctcatggcatttgtgcctctcttcacaaaaataatttttttcctgctctatgtaaaccttgtactaagtgctgcagatacagtgctgaccaagacagaatctgccctgccctcctggagttccagtggggatgcctgccttaaaccatcacgaaagcaaataagcaattccaaataataatgaatgataagtaaaagtgag

SEQ ID NO: 252692 - DNA, 496 bp, Homo sapiens
gggcaattacgaaggggtaagaatggtataatacataaaactgctgtgacaaaattaaaagttaaagattaaacgttattttgagtgtacaacagctgtattaactacttaactgtagctgagtttatcatcagcctgaggatttagaagattagaccaagatcaggacattagaagtggttttcataatggatttataagttgacttagcataaccaggtgagtcttttggatgggtctttccattggaacataaatgggaattcctttttcaacaggttttttttgtgtgtttgtttctatagaattcttttttatataatgtaaaaaataccgttagtcatcgtcatgggattttagcccagatgcatatgctaaacaaactcacataagatctaaggaaattaataaacaaaaaagagtaaatttagcattgactattaaatatatcaagagattgtctcttttaatgtagtatgataccacagcataggta

SEQ ID NO: 252693 - DNA, 554 bp, Homo sapiens
tctctgctgcctgatcaaaatacagtgaatttgaatctttctaaacacagttgtcccttggtatccatgggggatttgttccaggacccctgcagagactaaaatttacagatgctcaagtcccttatataaaatggcatagtatttgcatatgacctacacacatcttcccatattctttaaaccattcttagattacttataatacctaatataatgtaaatgctatgtaaatagttgttatattgtatagtttagggaataatgacaagaaaaaaggcctgtacatgttcagtatagatgcaaccatcttttttttccccaagtattttcaattcacatttggttgaatctgtgattgcagaacccatggatgcagactagccaagtgtaaatctttcttgtagcctaaaagaaatgttgtttttatttccgtctcacctgggtatatgatactatatcatacctattaataaccacaactatcaactgcatatgttttattcttatatttttattcttaataaaaattcttattttccagttgatttaga

SEQ ID NO: 252694 - DNA, 122 bp, Homo sapiens
gggacctggggggcagccttggggtatcttactctccagcagacccggaggacccatcccacactgcacatccggaagagctttttcttctcatctcccactcccacacaccccacccccac

SEQ ID NO: 252695 - DNA, 365 bp, Homo sapiens
tgtcttagtctgttttcttctgctataacagaatacctgagactgggtgatttataaggaacagagatttatttcttacaattttagaggctgggaagtctaagatcaagaggtccacatccgatgagggcaatcatcctgcatcatcctatggcagaaggcagaaggacaagagagtgagagagaccaaaacagccaaacttatctttttataaggcaccttctccctccatgacaaatccactcccatgaacatgtcattattccacttatgagggcagaactctcatgtcttaatcacctctgaaaggttccaccttttaatactgttacaatagcaattaaatttcaatgtgagggttttt

SEQ ID NO: 252696 - DNA, 456 bp, Homo sapiens
aaaaaagaacagaagaatttattgccagaagacctgcactgtaagacatgctaaaggaagttctttaggctgcagggaaatgatactacatgaaagcttggatctgcagaaaggaatccaaggcacttaaaattgtaaatgtctagatatacatactagactataaattttttattcttactaatttcttcacaaaccatatgactgcttaaagcaaaaattataacattgtcttgaactcatcagagatttgaggtcatagggcaaccaactaacctgaaatctaagaaatgacaggtacttccaaggaaaagatcattgaggtacaaaggagagcagagagctgcatattaagaaagggcagcattaggggaatggaaattatgcttctgggaaaagaggaaccaggaaaggaaactgagaagcattaattttagatgggagaaaaaatagaga

SEQ ID NO: 252697 - DNA, 326 bp, Homo sapiens
aaaagaaccagatttagaagagcattagatatctctgtcacatctgaggaacaaattagccatcagagcaaaggtccaggcatcccatctcggcaaacaaagcatgattaaccctagagctgctgattctgagctcaccctaacttgattccctccactggccccaagctggcagctgtagctttgcaaacatgataatgcttctcttgttagaactgaatttagaattggcagcaacagaaacctgcaagctgcagttcatttgtgtatccatgcttaatttaattcttattgaatgaaatgcaccctcattttattcttgctgg

SEQ ID NO: 252698 - DNA, 508 bp, Homo sapiens
gtggcagcaactaaatcaagtagctatgctaaactgaaaatatgagaaaaatatattaagtaaaattaataggccaggcagtggttcacacctgtaaaattttttaaagtatcatttacaatgacataaaaaaatagagattaatatgaaaacagatgtgcaaaccagttgacatggtttagctctgtgtccacacccaagtctcatgtccagttgtggttcctagtgttggaggaggggcctggtgggaggtgactgaatcatggggacagacttctcccttgctgttctcatgacagagttcttaagacagctggttatttgaaaagtgtgtggcacttcccccttcactcctgttctttctgtctctctcctgctggccttgtgaggatgtgcctgcttccccttcaccttccaccatgattgttaagtcttctgaggcctccccagaagcagaagtctgtacggggcccacagaaccatgagctgattaagcctcttctcttta

SEQ ID NO: 252699 - DNA, 405 bp, Homo sapiens
tgggctccagacagaaacaccgtacccctgcaccagcctctgcctcagctcttcacagtcagcacaccctccgcttcctgtcagggtgttctctgctgagtctggttatgggatccctttctgtgcagagccatgctcccgtgtcactgtgtgtcaccttcaagctgtccccgtgtgtatgcctgtgtgagaatatgtgtgtgtgggtttgccatcgaaggaaaacctttattttggctgctaacatttggaaacatttagagaacaaacaatatcttttaaaaaacatcaaaggttcaaaaaaacaagacaagaaacaaactgttgtaaaatttcaactcctctaaatttgtcttaaattgaacttagaactaatctaataaaaatagtatgaagtttcaaagg

SEQ ID NO: 252700 - DNA, 464 bp, Homo sapiens
atgaaatagcagacaatcaagaatatgacaaaaaatttcatctattgaattggaaatggctcgcaaattgtgtgatacatagaatatgatccacattttagaaaatgtattttatgtgtacatactgaaaaaaactaaggaaaataaaccaaaaatattaggagtggttatctctgggtgaagagagagaaattatttttactttatttttgaactagattgttggaaagtaggttttactcttgatgaatagataatagtagtatatgatgattacatcaatatttgttaattttcattttgattcttgaaaagttttaaaatgagtttattaaaatccaaaccaatgacggtcattgataaaaccttaagctttaaagtcagagaatatatatttaagcttagccctatgtgagttacctaaaatttttaattaattaaattcaaatttatgaaactttata

SEQ ID NO: 252701 - DNA, 355 bp, Homo sapiens
agtttccactccagtgaactaattcaaatgtatccagcatctagatatatgtataaatgtaattaaaacatattgagcatctagagcatctctcccaagataattaccacctgatagtaatggctataaaagctaaaagtggaatcagtctacatgtttcgcaataggaatcaattgaagcatacatcaaaatgcagacagtagtattggtgagtattaatgttatagatgctttttatccttcatattttcatatctgtactttttcctgtattttacaatgtatttgtacgttgtacaaataattgctgatcatgtaaaaatatagaaatatagaaattttgttgccatactt

SEQ ID NO: 252702 - DNA, 376 bp, Homo sapiens
atctaagaggatattctttttccaattgcttcctcaggatatctccagttacaactcattggacagaactaggtcacatgcccagctctagcagccaggacagtcatgaaagcaaggatttatcaaggagaataagattggtttctatgaccaaaaccaatgataatgaatcctctgcaactgggaactttggagtcaaaacaaggagttttgttggtatgcaaaattggagaacacctattaactaagcaaaccatagtgtttgccagtataacaatgttttggattttaaaaatccaacaacattataaagccaaacacaaaaatatttagcacaaattgttcagttttggaaagtggtattagaaaattgaaa

SEQ ID NO: 252703 - DNA, 458 bp, Homo sapiens
gtctcaaaataagagagcatgttctaacaatcagaactgttcagcaatgggggctatgttcagagataggacatttccagtcacaggcaattcataagcagagactgacaaagcatagagctgttgtcaaggagaggctggctctgcagaggccccggcttactgacctcaacagtcccttccatctctaagattccttgactctagagcctctttgggaattttccatacaactctgcccttcgaaaccgatgtatttatataaatcctatagatttaaattcagatgtctacagtagcttttcttttcacttaaaataaatgaaatcatccatttactcactctaatgaagtgactgaatcatgtgttttcatctgcagcctataaagtcattaaaaatgcattaaatatgatttgagtgattggtataaaaatagaggcatgatcagtagatttt

SEQ ID NO: 252704 - DNA, 265 bp, Homo sapiens
ctttggacttgctggagccagaggtgggggcaagtctccttctttcatctagccagcagtaatgatgcctgccctggggatctcaggctgctgaaaagcataagactcaaccactttcccttagggagacagcctacaccaaaggggtcagactccacgagagatctgaataatgacaaagactgtaaaaagaaatccagttagataccactggaattcctttatagactgcatattactttcaaatatatactactgcacttgt

SEQ ID NO: 252705 - DNA, 584 bp, Homo sapiens
ttttcctttataagttacccagtcttgggtatgtttttatcagcagcatgaaaacggactaataccatgccttcatgcactgtaagaataggcactatttgtagagagctgccctgtgccagatatagctggtgcctccacactgtatctcattgaattcaattttgagaacaatgttatgaagtaggtattgttatccttagagataacatacagagaagttaatcaggttggctgaggtcatatgactaatgcggagatgtaactcgggtttgctgactctgaagcttcttttgtctatataatttccaaagtttggttttccgtaccattctaataaacccagaagacacttaccagtgctgcttccttcaaactggactccttgcctatatgagttaccttcttacctgcctttagttgtggtgtgggcagtgggtgctgtgttaatcccaagggaacagttgatatcaaccaagaatcactaaatgatgatgcacaggctgagtgcaagttgcttgtctgccattttgctcagaggttaattcctcagggtaattgggaattattgcatgttaccttag

SEQ ID NO: 252706 - DNA, 165 bp, Homo sapiens
ccatgaatgtttttatatacaggaaattcgagtcatttgtcactctgttatggattcataaatctgtatttttagaatgtaagtaaaggcaaacacagtttgcattcatctatctcaagccaagaattttctctaatgtgaaacagtcccttctgtcgtcttctc

SEQ ID NO: 252707 - DNA, 944 bp, Homo sapiens
aatcgggatttttttgtttggggggttttagccgggggagggactgcgaagacagctctgcatcaaaacagtacgtgagaaaaaagcataggacgctctcgcagccgtagttgttggtgacaagaaactgtgcttctaatctaagcaaaaaatatctccacatgccaactatacttttccaagatgtaccatggactactcaaactaacacagccttatttatgtatttaggttggaagtgggcaaaagtgtatcttgtctatgtttctatgtttctacgttgggatgacaccatcatccacccagccagacagttatcaaccttcccactttcttaacctcttacatccgattagaccctatgtcctctagttctcagtcttgagaccagcacccagctggctacatcagaattgccggtggtgatgttttagaagattccaaattcctggactccatccccggagttcatcccctagttttctagtgaggggcctagaacctgcgttttttaagtgtcatgttcatcgccattactgctactttagttcaggtcttcttggtcagctttttcctaaaacgttttcagttttgtttgcctctgattgactctgaattgctgccaaaatgatgttttattattccagtatcatcatccaactctctgatattaatgataccttttttaaagtttttcttcccttgcagtatctatttccctcaagtttcctttttttttcttctgttgattttgtgctctatctttcacattagaggctttcctaggatgtctggtggtccttatctgctcatatgtaagtgggggtatatttaaaagttgattggaagctgttgagcccatgggacgtttgttgaaaatcaagtgggagaggaggggtatggaggctgcggtatgtctcagaatttagtacaattttcactta

SEQ ID NO: 252708 - DNA, 416 bp, Homo sapiens
agggtgttttgactccatgcttataactacaacattaaaaacaccaataatggctgaatttttatcaagaaagtattttcttaattaatgcttactcaatcatttttactccaagataaatgttcaatacagagcagttaaacaatttctacctttttccatcttctattttatcaaaatcattttatggagatgaattcttttgcatttggaattttacaatgatggcttataatttattgacaataatttatttaggtcaaattttagcttctgccactgaattttccatcgtagttttatttctactaagtcaaattttcctggtttaaatttgattgatttgaattttattgggataatttgattcccctgtgaatgtttgctcattaacacattctttgtgtaggttaaat

SEQ ID NO: 252709 - DNA, 419 bp, Homo sapiens
ttgcatgactgcagttaagaatgcatctttattttgatggttgggctcctgatcgggaccattatagagctactcactagtttgtgcctcttcttgactttagtaggactgtgaagttcaagttgattcctgatttgctttcataggatctttctttccattctgggcctcagagtcaaaccacttaatcattcatgtttaactcatggtgagacctgtctcttgtttgttgtagtcacttaagttcctgttacatgtctagacttcatggggtgtccaactcagttaccacaaatgtctgtattacattttcaatgatagcacaatcttctttccttatgcatgtttttatctttacacaagtctttaaagcctttgttatttaatgcatatttctctatttgtttactcagacactt

SEQ ID NO: 252710 - DNA, 1796 bp, Homo sapiens
atggcctcatcgaccactcggggccccagggtttctgacttattttctgggctgccgccggcggtcacaactcccgccaaccagagcgcagaggcctcggcgggcaacgggtcggtggctggcgcggacgctccagccgtcacgcccttccagagcctgcagctggtgcatcagctgaaggggctgatcgtgctgctctacagcgtcgtggtggtcgtggggctggtgggcaactgcctgctggtgctggtgatcgcgcgggtgcgccggctgcacaacgtgacgaacttcctcatcggcaacctggccttgtccgacgtgctcatgtgcaccgcctgcgtgccgctcacgctggcctatgccttcgagccacgcggctgggtgttcggcggcggcctgtgccacctggtcttcttcctgcagccggtcaccgtctatgtgtcggtgttcacgctcaccaccatcgcagtggaccgctacgtcgtgctggtgcacccgctgaggcggcgcatctcgctgcgcctcagcgcctacgctgtgctggccatctgggcgctgtccgcggtgctggcgctgcccgccgccgtgcacacctatcacgtggagctcaagccgcacgacgtgcgcctctgcgaggagttctggggctcccaggagcgccagcgccagctctacgcctgggggctgctgctggtcacctacctgctccctctgctggtcatcctcctgtcttacgtccgggtgtcagtgaagctccgcaaccgcgtggtgccgggctgcgtgacccagagccaggccgactgggaccgcgctcggcgccggcgcaccttctgcttgctggtggtggtcgtggtggtgttcgccgtctgctggctgccgctgcacgtcttcaacctgctgcgggacctcgacccccacgccatcgacccttacgcctttgggctggtgcagctgctctgccactggctcgccatgagttcggcctgctacaaccccttcatctacgcctggctgcacgacagcttccgcgaggagctgcgcaaactgttggtcgcttggccccgcaagatagccccccatggccagaatatgaccgtcagcgtggtcatctgatgccacttagccaggccctggtcaaggagctccacttcaactggcctcctagggcaccactcgaggtcaatctggtgcttattctcagcaccagagctagctaagccaacatagggcaacatttccagcccagccctcttgtccggctgtctgtcttgtccttgtgtgtttgtaaaatgttaagcgggctttggtgagagtcttgctctttgcttgggggaagccaaagagagggaagaggatttcttatttcttctttatgcccttgaaggacaaacaaaactttttctccacgttcaggaaagtatttcagaaccacgattgccttcctggcgtcccctcctcctgctcgttggtgaaatgaacaatatgaatgggatttaaaaggaatgcattgggcttggtaaagattttcagtttgcctttagaaaaaggacccagctgagagtaccatgatattgcttagtccatttgaacccttgcattcctagaatttcaggtaaatatgtattaaaactctacatctaggatttcagcatttcctgagtaagacctttatatgccaaaagggtttcgttttaaaaccacttgagtttatagtacaaaaacacctacaagctccctttagaaaggtcttgctattgtttctcccctttcctccccaactactatttaaaaatgat

SEQ ID NO: 252711 - DNA, 256 bp, Homo sapiens
ctcccaccctcaggacctcaaggctggttggaggctccaccctcatcaaaccagtgccacccgcctcactggcatcagggtctggtctagggcaaccggctcttgacacagcgcccgcggacattttctattttccaggttctggggccctccactacccctgattcctgcctctcccccaaatccaggcacttggatccccaatcttctgaatcctggacagcccacccccagatcaatactcctggatctttca

SEQ ID NO: 252712 - DNA, 724 bp, Homo sapiens
tgacacagcgagactcaatctctaaaaaaaaaaaaaaaaccccaaaaagcaaaaaacaggaacttgtgagctagttgcttggaaacttgaaatcaaccatgatgagactgtttacaccacaggaattggcagaagctctaaaccagggcttttttctgagagaactgattcccagcacacccctgctgcccagcactcctctaaagggcgggaatgtcacagaagcttcttcagccccctttcagagttgccgtgtgtatttcctaagaagggtacaacttcacactggttgctgaacttgttcaagatattacatctctgccaagggccgtgtcattcatcctggcccttgtctgctgtactcgtgtcccccaagttggcagatgggtctgttctccttagtaggtggtctgcaaggggtagagttgatggtatctttgtaacagggaaatctcgtttcccactctgattctgtgcaatggaatcaaaaccactattagttaccctgacctcctgaatcctgctggggtctcaggcttccccttggaaggggaaggagtgattgtggcttcaggccaatgactcctgagaaagtgattgcaggcctgactgtcagtgcagggggcttgcagccagcattcccagaacctcagtctcttctctgccattgttcactgttacttggcagtcttccaagtgacgactgaaaacactgaaaaaaaaa

SEQ ID NO: 252713 - DNA, 246 bp, Homo sapiens
ccaggaagagtgtcccaggccacccacccagaggcccagagattcttactttctgaaagtcaccttaggagtattttgagctgcccaattaattgggtaaatagattttctcattgtcacagagatgtgggttgagaattgtttgctacctcccctttcactgagagcactgtgaatttttattagttattgccaattagttttttatttatcatttgatactgacatttggattctgttctccca

SEQ ID NO: 252714 - DNA, 304 bp, Homo sapiens
tttaacccctgaaagccagtgatctgtttttctactgtataattttgtcattttgagaagttatatagatggaatccaacatgttacatagatggaacataacatgtaaactttgagatgtgttcttcttactcagcatactcacctggagatccattcaacttgtgtgtatcagtagttaatttctttgtattggtcagcattccattatttggaatttatacagtatgtttatccattcacctgttgaaggacattgtttccaatgcttattactaataaagctgttatgaacattcatgta

SEQ ID NO: 252715 - DNA, 334 bp, Homo sapiens
ggaatccctttcgtttgataggagagctgggtgacgagaccctttatgagatccttacaaataacattcctgaatgtgcaccatactgggggaaatggacaaaaacactcgattaatagtgaccaagtgacacagcatcagaaagatgggcagtgacctctcacgaaggctatgggagtcattttatgttttttaggttacccagtcctcaccaaatagagtgacaatccacatatttggtttacttagcatgagtggaagcaaattttgtattgagagaaacttattaaaatgaaataaatctcatagttctataatcttgaattcattacct

SEQ ID NO: 252716 - DNA, 292 bp, Homo sapiens
ttataaaaaaaaaaaaaaagaaagataaaaaaaaatcctgggctcaagccttagtttcctaagtggcttagactacaggtgcctgccaccatgccagactaatttttaaatttttgtaggaatgtaaaatggggccttgctatgttgcccagggtggtctcaaactcctagccgcaagcagtgtttctgccttagactctcaagttgctgagactacaggcatgagccactgtgcctaggttgtcttttttcatgcagcaagaccccatctcataaaaaagaaaaaatgtta

SEQ ID NO: 252717 - DNA, 317 bp, Homo sapiens
cggcagcccctctgcagcgcggtgcgagttcctggaaaggctgcgtttgcgctccccggccctgccctcgaggcggggacaacccgcggcttcagcccggcgtccccctcctgctcggtcctcaaccccggctgcggccggcggaagcgcccgggcctgggagggagagggaggcacctccctgccggctcaaccccctgggcaaggggccgggagggcgcggctgggacgtgcccgggcccacgaaggcctccgccccacccctgcgcgccgcctgcaggggagaccgggcagggcgccccccgcctcccaggccg

SEQ ID NO: 252718 - DNA, 336 bp, Homo sapiens
gataaaatctcagggagaagttttggattctgttgtttttattttctgccatttgtgccgatttgagcggtaactgacctcatgaaacatggaagtattatttatgtacaaggaactgacccctgagaaattgaaggtcagcactaaaataaaaatgtagggggaaatgcaactaataaaatgtaggaaaaaaaatgtgaacagaaaatataataaacctacatggtggtgcttacgtagataaaactgaaagaggattgtaaatagaactgtaagaatggatttgtctaccatttattatattttgttaaaaataaagaaattcaatttacaata

SEQ ID NO: 252719 - DNA, 439 bp, Homo sapiens
caaataattcagattaaaatttcagtataaaagacttttgtttcttagagaaagttaaaataatcccatcatgctcaacaaatgcagcatttctattgttcacacaaatttctgatcaccatggcagacgtttctgcttacctactcaacgtctatttcccattcagtttttgtaatataacctgattttcagtgaggctgtacgtagccagctgcaaattgcatttcctaacctcctttgcaggtagaagtggccatgtgatcattctggccaatgaaacaaaagtggaagtttctgggagagacttcaaggaaaactctttaaaagagactcaattccattggagccaaaataatgcagcttcacatctccttaatggacagaagactacactgtttttgctgcacccagagataaaattattggttttggagtaaa

SEQ ID NO: 252720 - DNA, 183 bp, Homo sapiens
aatgaatatacattgtagtttatttaaaaagacattcatgtgcatatacccatttgatgctctcaataacccagtaaaataaagattattatcccccatataaaaatgaagaaagtaggccaggcgcagtggctcaagcctgtaattccagcattttgggaggctgaggagggcagatcacct

SEQ ID NO: 252721 - DNA, 3307 bp, Homo sapiens
agaaaattctgataagactattggagatggtgatattttcactcatttgaattctcatacagaagtgactgcttgtgaatgtaaccaatgtgggaaacctctgcatcataagcaagctctcattcaacaacagaaaattcatactagagagagcctctatttgttttctgactacgtaaatgttttctccccgaagtcacatgcctttgcacatgagagtatttgtgctgaagaaaagcagcatgaatgccatgaatgtgaggcagtcttcactcagaagtcccagcttgatggcagtcagagggtttatgcaggaatatgcactgaatatgagaaggatttttccctcaagtcaaaccgtcagaaaactccttatgaggggaattactataaatgcagtgactatggaagagcctttatccagaagtcagatctgttcagatgccagagaattcattctggagaaaaaccttatgagtacagtgaatgtgagaaaaacctccctcagaattcaaaccttaatatacataaaaaaattcatactggagggaaacactttgaatgtactgaatgtggaaaagctttcacaaggaaatcaacactaagtatgcatcagaaaatccatacaggagaaaaaccttatgtatgtactgaatgtgggaaggcctttatccggaagtcacattttatcacacatgaaagaattcatactggagaaaaaccctatgaatgcagtgactgtgggaaatcctttattaaaaaatcacaactccatgtgcatcagcgaattcacacaggagagaatccctttatatgttcagaatgtgggaaggtcttcactcacaagacaaatctcattatacaccagaaaattcatacaggagaaagaccctatatatgtactgtgtgtggtaaggcctttactgacaggtcaaatctcattaagcaccaaaaaattcatactggagagaaaccttataaatgcagcgactgtggaaaatcattcacctggaagtctcggctcaggatacatcagaagtgtcatactggagagagacattatgaatgcagtgaatgtgggaaagcattcattcagaagtcaacattaagtatgcaccagagaattcatagaggggaaaaaccatatgtttgcactgaatgtggtaaggccttcttccacaaatcccattttattacacatgagagaattcatactggagagaaaccctatgaatgcagtatttgtgggaaatccttcactaagaaatcacagctccacgtacatcagcagattcacacaggagagaaaccctataggtgtgctgaatgtggaaaggcttttactgacagatcaaatctctttacacaccagaaaattcacactggagagaaaccttataaatgtagtgactgtgggaaagccttcactaggaagtcaggtctccatatacatcagcaatcccatactggagaaaggcattatgagtgcagtgaatgtgggaaagcctttgcaagaaaatcaacactaattatgcatcagagaattcatacaggagagaaaccctatatttgtaatgaatgtgggaaatccttcatccagaagtcacacttaaatagacacaggagaattcatactggagagaaaccctatgaatgcagtgactgtggcaagtctttcattaagaaatcacaactccatgagcatcatcgaattcacacaggagagaaaccatatatatgtgctgagtgtggaaaggccttcaccatcagatcaaatcttattaaacaccagaaaattcatactaaacagaaaccctataagtgcagtgacttggggaaagccttaaactggaagccacaactcagtatgcctcagaaatctgacaatggggaagtagagtgctccatgccacaattatggtgtggggactcagaaggtgaccaaggccaactttcttctatctagttagaattatgaacatctggatcatatagctgatgtgtagttacacatatggggagacacttttgagagtgtttaagcaatgtatagtggccatctttggttacttgatattggtgttgtcaagctcctgcaaataatagtaaatgtgcaaggagatgattggcagtctttcttgtttcactttttgggcaaacagttttataaattcatggctgttgagtttttcatgttctgggtaccacaactattcaatattgacccgcaaaaattcataatgagtagtatgatgagataattttacattgtctaagcagcctaaggacactgagatcaaggcaaagagagggcaatttaggtctataatgaaagtgaatcagcagtttttgtgaaaacactaaagacagaaagaaaggactctactttttttaaaattttctttgggaagtcaccattatttattgttatatctgttggcgtatgctggggcagcagttagccaagaggtctgaaattgctctttgcctatttctcaaaagtctatattattaccttagaactggccctacgatcatggaacttagatacagggacccaggtctagatagcagcactttagatcctcagctttcaccacagaaacctgcacttttttgatgttgttgttaccaactcctgtttgaaaaataggacaaattaagaaaatggatatcaaatcctaaaattttttcccactaattttgttagtacattctctacatgttcgttacttgctagattaccatgagacacaagcatcttgaattttagtttgtgtccttagaagataaaatgtagttgaacatttggaagacttctccttttatctcctcacaatctctacaaactaatcttaattaattttgtttttcaaattctctgtatttgaatagacttttttgtcttttcttctatcaaatactgaaagaactgtgttgtaattttacaaataattgtgaatttgtctcctttagagctactaatttttgctttatatattttgtctttgattttacatacaatttagaattgttgtaatcttcctggttaattgacacattatcattattagatgtttctttttatctctagtaattttttgccttaaatgtactatgtcagatactaatatacatatggattaaaagctaatgtaaattagtactaacatttctggacaaggggagaagttataacattataatttcatttatttgtctcttatatggtattaattttgtatatttggattctgtacatggtgaacatagccaatcattatttgagtcaatatccatttaaatt

SEQ ID NO: 252722 - DNA, 504 bp, Homo sapiens
aaatcattgaaatgacttacaggcatacttgactacaagtaatagaggtgtggaaatgttttaactcatttgcaaatacttgaagtacaaaatttactcagaattctcattaatgggtatttatttatttttaattttattattattatacttgttttagggtacatgtgcacaacgtgcaggtttgttacatatgtatacatgtgccatgttggtgtgctgcacccattaatgggtatttataatgttgctttcaatcatttaaacacaataaataatacatatctgtcaacagaggactggttataaatttatagcacatccgcatgctggaacccaaggcaaccattacagccagcagcaaacttaaaaagatgaggcacactgggtgtggtgatgcacgtctgtgtatcaggtactagagaggctgaggtggagaatccttgagcccaggagttcaagtccagcctgggcaacatagcaagaccctgactcaaaaaaaca

SEQ ID NO: 252723 - DNA, 467 bp, Homo sapiens
taagattagtgttacttgcttctcttcaaagtatatatatatagttatctcaagtttgcctggctattttagtgatttactttaggatataggaagtcatctatacaggaagatacataagaaaatctaaattatagttttggtttagcatagaatagaattggagaaatttggcttgaagaattgttctattcagaaggcctgccatgaacaacaacagggatttatttgattgagtattggcagatgtagtcagtgcttccctgataggattaatgattccagtagatatcatagtttaccttaagaatgcaaacgcttagatggtgttaaaccagttctgccttctttctagcattttttgttagttaaaaagtacccctctagtagatgattatgacttaccagtacactataattttggcacagatcttcaaatcttgaattctgtctgccttcagactgca

SEQ ID NO: 252724 - DNA, 410 bp, Homo sapiens
tcttagagaacttgagcaagcaatttccccttttatagacttatttgtgtcacctacaatgccaagaggatggttctgacttcatagggttgttgagattactcaatgagattacaaacagcaaaggttcagcctgcgcctgggtgttagaattctgttccaagaaccaaacatctcacacactacttgatataacaaggtggtcatgtttacagagctacgggcactgtttcctaatatcactgtcaccaagttgctccatccatgttttcatcaagtgtttgtggatcacatcttatgtccaaaccatgggtgagtgacagcagttagagtgcggatagaaaggaagggacgagaagtagacggtagacaattttaactaaataaatgtttactaaactcatatcata

SEQ ID NO: 252725 - DNA, 630 bp, Homo sapiens
gctggcgtatgtctgcgtaccgatgctcaggcattagcaactggattggtcgtgcggaactgctccagttttccatgttttaaaatgataatccaaaaactacagcactgagcccaataacttgagggcccgcaattccttccgctacaacggactgattcaccgcaagactgtgggcgtggagccggcagccgacggcaaaggtgtcgtggtggtcattaagcggagatccggccagcggaagcctgccacctcctatgtgcggaccaccatcaacaagaatgctcgcgccacgctcagcagcatcagacacatggcacgcgacatcgccacgatgtgcgtgccatgtgtgccatgttggccaggctggtctcgaactcctgacctcgtgatcagcccacctcggcctcctgctctttcccgcacatgctcctctccttcctcccaggggcaccaggcacaagtgtcccctgcccagaggactccaagacaaaggacgctcaccttatgccataaagcagcacctcagctgcttctccaagccattagccatgccacggccctctgtccgggctgagggattcgttgacaaaggcctgagacgtggggacatggcacgcgacatcgcca

SEQ ID NO: 252726 - DNA, 405 bp, Homo sapiens
ggattttgctgctataaacaaaacctcagcctttaaacccactgctccaacgcttcgtattggctagctgctgcatggcagggatggtggggccctcctgccctccggtctaggtggtggattccccctacccctcctgccctctcctactgagtgtcctgtgtccactggtgtgtttccacaggccggctttcagaggctaagttgcactccagagcagaaaagcagcaagccgcttctcccttctcccttctgaggaaagtgttcttggagctatgccaggtctcagtagagcaaacagattttcaccctttagaggtgtgatgtgtgctgtaattaatggtatgaaagccaatagatatttgtaaacaagttggacaaagtgacaaacctagcctaaatttg

SEQ ID NO: 252727 - DNA, 423 bp, Homo sapiens
cacagctgtgcatctcccatgggtgccctggatatgcgggtccttgtgttcttttgactctgactcatgactctggggctccgtagttgacttttgggaaatgctgctttggagagttttctcctgagcccccacagccaggggcactaattgcttattggtgatttgccctgaggtgccatatcccagcacctggggcggcacagggccttgacatctgcgacagcactgctgctcacaggccctgcttgccatccctccagttctaggccccaagcgcctggtaagtgagcagccaagctggtgtagactaggatggaatctccccacccaataatctgaagcttcagaagtcacagttccacgtgtaggtatgtcgccaacagaaacgggtgtatatctgctgcaagatgcaaactagaa

SEQ ID NO: 252728 - DNA, 435 bp, Homo sapiens
acctgagccccaggatcccccctggatggttacttgcagcctctccttgcattccagactaatgtcttgctactgtcgttacctgggtgatagcatcccagaagctccattccagccgtgatctgaggtctcagctccccaggacactctgctggctcaaatcccttgtctcttcatgtaaggcccagcctcctgtacctccctcccaagaaagcctgtgaattgggaagctttgttctctggctcagcctaggccatgaatgctgcccctccactccagtaagttatgccttatgctaactcctgtggtctgctgagctcctttgggagaagcagagagcttgctggggcacttgagccactgggaataagtggccctagatgtcattggtccaattgcctcactccactgaggaggaaactgaggccagaaag

SEQ ID NO: 252729 - DNA, 461 bp, Homo sapiens
aattcaggaaatgccactccaaaatatgccaatttggtatatgggttaattctagccaaaggcacttgaaaaacaacaaatgtaaggagaagctttctctgaactccccctatctgcctaaagacagatcctctaaaaggagctcagttgtcatcaatcccctccctgggaatttcatcaaccggggaagattaactctatcacaggagaagaggctagaagttgacaccacacctagacaaacttcttcaaaaactattatctcttcttctgaggacccaataatctttcccaaaaattatttctcccctaaattgcctatatctcacctcctctcccctgtgaagtagagatgtaaactcctgaatctcactggttgtttaggtgtatgctttcttttctgtactgccctcatgcacataataaaattgtatatcttttctcatgttaatctgcctgtt

SEQ ID NO: 252730 - DNA, 737 bp, Homo sapiens
gaaatagatatggcgaccgagggggatgtggagctggagttggagactgagaccagtggaccagagcggcctccggagaagccacggaaacatgacagcggtgcggcggacttggagcgggtcaccgactatgcagaggagaaggagatccagagttccaatctggagacggccatgtctgtgattggagacagaaggtcccgggagcagaaagccaaacaggagcgggagaaagaactggcaaaagtcactatcaagaaggaagatctggagctaataatgactgagatggagatatctcgagcagcagcagaacgcagtttgcgggaacacatgggcaacgtggtagaggcgcttattgccctaaccaactgatgcgtgctttctcaaatatacctactggattaattgacgaacacaaagggaaagaggagaggcacccgatatatgttctctaggccttttagaaaacatggagttgttccttggccacatatatgcgaatctataagaaaggtgatatgtagacatcaagggaatgggtactgttcaaaaaggaatgcccacaagtgttaccatggcaaaactggaagagtctaacattgttacccaagcatgctgtggcattgtggttaaccaaacaagttaggcaagattctgcccagagaattatgggcgtattgagacattagcactctaagagcggataagctcctggacgtgtggagggactgttc

SEQ ID NO: 252731 - DNA, 642 bp, Homo sapiens
gaaatagatatggcgaccgagggggatgtggagctggagttggagactgagaccagtggaccagagcggcctccggagaagccacggaaacatgacagcggtgcggcggacttggagcgggtcaccgactatgcagaggagaaggagatccagagttccaatctggagacggccatgtctgtgattggagacagaaggtcccgggagcagaaagccaaacaggagcgggagaaagaactggcaaaagtcactatcaagaaggaagatctggagctaataatgactgagatggagatatctcgagcagcagcagaacgcagtttgcgggaacacatgggcaacgtggtagaggcgcttattgccctaaccaactgatgcgtgctttctcaaatatacctactggattaatttatggcaataaaatttttttttgtctttaaaaaaaaaataatttatatattggtatataagaaaaagctctaaaccctgtagggggcccctgtagacaaaaaaaaaaaaaaacctggagggggggcccggtacccaatatgccctaaggggaggggtttcaaaataactggccggcgttttacaacgtgggactgggaaaccctgggcgtacccaacttaaaggctttggac

SEQ ID NO: 252732 - DNA, 436 bp, Homo sapiens
gaaatagatatggcgaccgagggggatgtggagctggagttggagactgagaccagtggaccagagcggcctccggagaagccacggaaacatgacagcggtgcggcggacttggagcgggtcaccgactatgcagaggagaaggagatccagagttccaatctggagacggccatgtctgtgattggagacagaaggtcccgggagcagaaagccaaacaggagcgggagaaagaactggcaaaagtcactatcaagaaggaagatctggagctaatagaaataaaatgggactcatagagggtgaaagagaagttggagtcagaggggattcagagatcaaagagaagttggggtcagaggtaggagctggggctcaggtggggggttaaaggtgaggcaaggtcagcggtgaagtgcaccccgtcgggtggag

SEQ ID NO: 252733 - DNA, 365 bp, Homo sapiens
gaaatagatatggcgaccgagggggatgtggagctggagttggagactgagaccagtggaccagagcggcctccggagaagccacggaaacatgacagcggtgcggcggacttggagcgggtcaccgactatgcagaggagaaggagatccagagttccaatctggagacggccatgtctgtgattggagacagaaggtcccgggagcagaaagccaaacaggagcgggagaaagaactggcaaaagtcactatcaagaaggaagatctggagctaataatgactgagccaattaggagggcactggcccccaacaggcatcaccccgctaaatcccctagaagtcccactcctaaacacatccg

SEQ ID NO: 252734 - DNA, 434 bp, Homo sapiens
cctgaacttgttcttcaacctgcaggagcttattgtctgttaaattgcagagattacctatgttacaggcttaaattatagatgtgaagatggtaaagggagacactattttaatcaaaagcttcctgggtacaaagctaatgagaggaaaaattacacattttatcaagctctttttcaagtaaagaatagctttcttttttcatctggcttcttgcctgaccttctccccttcccctaaatggtgagaggaaggagagcttgcagatagattttccatatcgtaggggatttttatatctgggaagcacagcatttcatatttataggagggtgtatattgccaaatgggatatttggcattacgagtcatttccagctgagagagtaaggatgcagcctggaggggaaaatagagacaaaagaggtagagg

SEQ ID NO: 252735 - DNA, 514 bp, Homo sapiens
aagtttaatttatcaaaatatatgcacacaaacacagactttacatgataccgcttgtagttgagagaaatgtaagcaaacataaagatgcagtaatagctacataagatttactatagtacatactgtactactgtaataattttgtagttacctcctgttgctttatggtaagctaaggtgttttgagtgtccacttaaaatgctgtgtgatgcaaccatctctgcgacagttcagctctccagtaaattgtgaattgcagtgaaaggtgatctcgcagttcttgcatatttttcatcatgtttagtgcaatactgtaaaccttgaataacaccaggggacccataatgtgctactggtgatgctggacatgctcccaagaagtagagaaaagtcatgacattacaagaaaccattgctcagtatgtaccaaagatacatgttacaactgtggctgcagttattcaccatttctggataaatgaatttaacataagaaccatggttaaaaaa

SEQ ID NO: 252736 - DNA, 482 bp, Homo sapiens
gttttgagaaatgaatgctaaatactatacattattccggtcatgtgtttgcattggaatagtgtagtggtgtctaagccaaatttacttgagaacaaatgtctatcttattggatgtaatgatgtaaagcatattaatcatactttaagtttactcagtgttttatcatggattagccatctactaattttgtcataaactttgaattgtggcaaataaggttagagcaatacatatatgtcaatatggaaagcaatctgtttattctttctgcatatacaacagtaatatagtaatacctgttatgatcattgtaaaatccctaaaggtttgatagtgatgtgtactttgcctgaggttaatgagtctcaaaacttatgtttaaatatttattaggaacagaacattcatatagcatttggaaagtatttgaaggatagcagtaagtccctcacatttcttccacaaatagacttataag

SEQ ID NO: 252737 - DNA, 172 bp, Homo sapiens
atggttacacaccattaaggacaacagctgatccatacatttgctgacaggtgtacctgcgtttccctctgaggacatcactgaaatcatggaaccctgacattcactgactggacccatgggtgggctataggttgccaggccagaattacttctctgctggaggcacact

SEQ ID NO: 252738 - DNA, 460 bp, Homo sapiens
caggggagtatatcagggaagagagaatttaacagggagagcagaggaggcgcagagatgggtgaagaggcagaaatagatggagattgaggacgattgaaagattggggagaaggagcaataagaggttaaataagttgcgaggatggagcagaagagatggaagagaaggaatagagggaagaagggggataaacagcagaagagaagaggggtacaaaatgaagagcagaatcccagggagaaagaaaagaaaacaagagctagagagagaagggggagaatgagagatatgtacagaattagggagggaagcgcagtaatgaagaaaggggggctaggcacagtggctcacgcctgtagtctccacactttaggagactgaagcaagagaattgcttgagtctaggagttcgagaccagcctgggcaacatagtgagacccctatctctgccaaaa

SEQ ID NO: 252739 - DNA, 155 bp, Homo sapiens
ccccttgcagacagctgtccctcagtcaccaattgtccacagggggattcgcattcgctaagggcacagccatctccagagatgagagatcagcaggggctctgcaaaaggagcagcagcccttcagccttgagagagaggatttcatggtaaat

SEQ ID NO: 252740 - DNA, 507 bp, Homo sapiens
attccgcgttccccgggagcaaatgatgctaggaaaacagggtgcgggctcttatttggccggagtggagtgaccaggtcagcgccgcagctgctaaccaccaccaaccacagttttgaaagttcctgggctttttccggcctgagggccgacgctgtttgcaaaatcacaagcactccttagagcggggttaggaatctagagtttccaaatccctggaacctttagcatctcgccaagcctccctcatcaaaggagggaagtgaaatcagagccccactccggctgttttagaagttttcccgaatccgtgatccctttacaaagcccgggccctggcctgcggggcggggcgcgcgaacggcgagctattccaccagagatccctccacgacctccagcggcatccgcgaccctgcagcttgctctccagccacggcgagcacgggccgggggagaggcgagcgggaagggcgaacggcgacccccgcgctgccccgcggccgc

SEQ ID NO: 252741 - DNA, 216 bp, Homo sapiens
ttattttttgtagagatgaggtctatgttgcccctgctggtctcgaacccctggcctcaggcagtcctcccgcttcaacctccaaaacgctgggattacaagcataagccactgtacctggcctgtttttttgtttgcttttttaaatattagcagatacggaaacgagctgaacaggtcagctctacgggaataaatggtccccctttgaggaca

SEQ ID NO: 252742 - DNA, 448 bp, Homo sapiens
agtaaaattgggagatgattcatgtagattaactatatttttgtatcactttctagaatacagtactatgttgtttaaaagagtaagtaggtaaaggagtggtataattactttggatatttctgcgtcagccacagttaccatgaataaatgatctgtctttataaaggagatggaagtgaattcaagatattgagatgttagatttgactgggttgtcctttgactagaagatcaccagataaagaaaatgtaaacttcctaaaccagataagatgatattgttaaaaaatttttttggcccagcactttgggaggctgaaatgggaagattgcttgaacccaggagtttgaagctgcagtaagctatgatctaccatgcactccagcctgggcaacagagtgagaccctgactaaaaaaaaaaagtcgacgcggccgcgaattta

SEQ ID NO: 252743 - DNA, 371 bp, Homo sapiens
gatgccatttataagatgcatctttattttacatgctgctatgaaagaaaaaactctgccaattgtaattctaagttgccgctgatggtaatggtgcatttagattccagagatgataaaaatatttaaaatgagtgtcttagaaccaaagaaatacaatatgcattgttgagttcgttgaataatgagtttgtaacattttatccagaatattttcaaaattatccattgttccatagaaattaactttgttgtaaattaataaatgtgtcaataatcatatgtgagtaacacatgcaacacgactctatagatatgcagagtttagaaatgcagaattgaaacatttatccattccagccacctcaccc

SEQ ID NO: 252744 - DNA, 250 bp, Homo sapiens
cttagcatggcccttgggttttattgtggttgcaacagaaagccatgggagagtttgtttccaaaagatgacactgactgctgggtggagatggcattagaaagggtcaagactgaaaggagggtgccccgttgtgttgctatttcagtggtctgggatggatggcagaatgcagagggaaggaagtgggtgtatctaaacaagaagatggagaattgacaggagctgctactggactaactggaaagca

SEQ ID NO: 252745 - DNA, 613 bp, Homo sapiens
caccaacagtggctaactgttacacgacagtcaaagtattcgagagaactgcctggagacagagagcgagggtccacagacacattagcaccatactgataggtcatgcagcaggatgttccctcccgagttcgagtgtaaatcaaagcatgaaatgatacagtgcaagggaatctacacccggagcttctacagagacaagttggcgatggctgactccttcttcttcaagaggtagatgatgttggccacccacgcttaggttcccatcacactgatgactccgggtttggcgagcacaggagcgcaaaccttttcacattctttctgtgatccaaatttgttttcgtttccaccacaacctccataccagaatcttgcacagcttttggtgtttggatcatagtaccattttaatatgaaatccctgcaacttcctcctcttaggtttaagctatcctcccgcctcagcctccagagtagctggggctacaggtgtgcaccaccacacctggctaattttttgtatatttggtagagacggggtttcaccttattgcccaggccatcatgtatcttaagaaaaaaaaatacaaagtacagagaaacattt

SEQ ID NO: 252746 - DNA, 585 bp, Homo sapiens
caatcaagcaacatcagttaatactgagaatacatgtattttccacccatcagtctaactccatgtaatcttttccttagaaataaaagcaccagtaagagtttacaggagtgttagctgcaacagtgtttcaattttcaatgttagtagtggcaaaaaacgtggaaacaaagggaatgcctgttaataggggtattgttatgtaaattatggccgaggcattttatggaatgttgtgaagtgattaaatggtaggagttaaatctactggtgattagaaaggatttccaagtacattctgaaaggatttctatcatgtgtctttttttttttttttttcctgagacaggatcttgctctgttacccaaattggagtgtactggtgctgtcttggctcactgcaacttcctcctcttaggtttaagctatcctcccgcctcagcctccagagtagctggggctacaggtgtgcaccaccacacctggctaattttttgtatatttggtagagacggggtttcaccttattgcccaggccatcatgtatcttaagaaaaaaaaatacaaagtacagagaaacattt

SEQ ID NO: 252747 - DNA, 560 bp, Homo sapiens
cagtcccaggaccggggtgaggcacagcacagaaggaggcgtctcgcagggtcgcacaaggccccctcaggagatgcctccctagacctttcatcccgggtgcctgccgggcctcccatgtgccacatgtgccacgctgttaaataacagccacatgtgaatgagacaaagacacacgactgccactcagtttccagtcagggcagggtaagctggcttatctcagctgagctggtggccttgtaaccagaagcacagaaagctgacattgtaggagtcctgtgcagccttagaatggggaaacgaaccatgttcttggaagtttttgaactcctggagctgctcaacacagaacctccctactgccacttcctcagccttaagcgtggggaccctacagggaaatctcatctgtgtggcccaatgtcttgttttatttttatttttggagacggagcctcactctgtcgcccaggctggagtgcagtggtgtgatctcggcttactgcaacctctgcctgtgggttcaagcgattctcctgcctcagcctgccaaatag

SEQ ID NO: 252748 - DNA, 613 bp, Homo sapiens
tggaggaggattttggttgagaaattgggaggaggaggaagtagcaactaagactgagacgaatggccagttaggaaactcaagaatatgaaacactagagaacaataaagtgtttcaagaagaacttatgggcaactgagtctattacagttgataggtcaagtaggaggagaactgagaagtatccataggatttgacagcattcaggtcatggggaatgaggagctatttttgtggagtggtaggcacaaaaacctgacatggtggttgtaagaggaatcaaggagaaggagaagccatgattattaggggtatttgagttcaagacatattgaggctgggcatggtggctcacacctgtaatcccagcattttgggaggccaaggagggcagatcactcgagcccaggagttgagtctaacctaagcaacgtggcgaaatctggtctctacagaaagtacaaaaattagccaggcgtgtaatgtagtcccagctacttgggaggctgaggtgggaggattgtttgagcccaggaggtcgagcaagcatgcagtgagccatgatcttgccactgcactccagcctagaagataaagtgagaccctgtatt

SEQ ID NO: 252749 - DNA, 223 bp, Homo sapiens
ggtactgtccccacatgagtgattttacaagttgcatgagttagcatctatatgctgttgtgagtcccctatgccttctctctggtagctctctccgagctttggtgaacctcttgtttaattgtctgttagctccatgaggatatgccacactcttttgttttgttttaggaacagagtcttgctctgtcacccagactggagtacagtggcacgatctcag

SEQ ID NO: 252750 - DNA, 467 bp, Homo sapiens
aggagactgagtttctactccccgaggacccataaggccggtttcttttcctctctctgttgtgatggctttcatttgtttcaaaaatgctttcttgtagacaggatggatattatctgtaagttaggcggttcaatctaccctctaggggcagtcaattgcctaaccagacattcacatttcagctctggtcagcgagcacttaatcagaaagtccaccctctggaggcagctattacaagtgcttcgtctctctttatcgcccatcagcaccagcggtttggctaattgacataatgaaatgttagaaatagattctcattggtgagattaacagcattcaagataatgcggattggctgggatatgtcagacactctcctagcttgcatgaacaggatattgagaatgtagcaagccttggtacctatagccataggaaataaaaccatacctttgatcttaaa

SEQ ID NO: 252751 - DNA, 485 bp, Homo sapiens
agtctctccgtagagagaatacgataactgaagagggctttatatgctgagatgaaatttagtttgttcaaatccgtaatgaattgccatcgggaaaggaattttctagagagatcttagtcatctaatttgcggctggcctacttgacctttttcttctttactcctgaatcttgtttataaaaaatgcaatgtaataaaatataatttatattgtatgtaatataaattatttatacctctgtgaatatatatgataaacaaatgaatatatacaatgtaatgttatattacatcatgggtcattttcttcctaaactataatcatttttacagttttaaaccaaaaaggtagtgaaaataagcgagcccatattaaatttctaggaagtatccctaaattgtttcctcagtcttttgacttatttcacatggaatcctaacatacgtggttgtctgtttttccctgcagcccgggggatcca

SEQ ID NO: 252752 - DNA, 245 bp, Homo sapiens
ccaaatcctgcgctcattcatggcaccctgcactgcatacccagagagcatatgtgaaatgtaaaagctctgggttgtggttattttttccctttttactcagtagttcaaaaagcagaggtttttctgtaattcaaaagcacccatccacatctcgaggaaggaacaggtcacccaggctatttcttttatacagtgtcattattctctacctagcacctgacaaataccactcttgtgacgtc

SEQ ID NO: 252753 - DNA, 387 bp, Homo sapiens
attctatgtcattttcatgtaattatgattctagtaaagagaatgtagctaaaattattatgtatatctgacatggcttctatttttaatgaggagttttacttaattcacatttgttgtaatgatcgaaatatttaatcatgtataacctgcttgtttatttttcttcttcttttgtattaagcttattttattagggtattttttcttcattctttctttagtaattctgcattccatttttctcacatcgtgtttgtttaaatacagtatgtaaacttacaatttccaattctatgttgacattaagtatgtcctaaaattgctctttctgaattagattctcagtaatttttcattttctttctacttccctgccccttcctg

SEQ ID NO: 252754 - DNA, 121 bp, Homo sapiens
tttcttttacccattgtgtgtttttgataactttgtcaaaaatcagttggctgtaaatgcctaggtttatttctggactctttattctatttcatttttctatgtgattgtttttatgcca

SEQ ID NO: 252755 - DNA, 323 bp, Homo sapiens
ggttcaaattaagcactaggctgtagaggtaccaattctttgtttccggaggcaggatgctttcttggcatagatatacaccctgaggaaggatgtggctagcaataattgtcctctcctcttttaatttaaacttttaattttagaatagtttggatttccagaaaagttgcaaagatagtacagagtttttgcgtactccttacgccgtgtctccgttgttaacatcctgtatcattcttgtacatttgtcacaactaaggagtcaatattggcacattgctgttaactaaactgtatactttattcttatttaactagat

SEQ ID NO: 252756 - DNA, 351 bp, Homo sapiens
caactttgtgaagaaatgcccacaaggatcactgaagagtggggctgagtcaaacattagctaaccacttactatgtgccattcactttatagtcgttatctcagccatgttacccaggctgatctcggactcctagtctcaaagtgatgggcctcccaaagtactgggattacaaggcgtgacccacccagcctattatctcatttttaacgtcacaacaacacttcagaggaagatgttgtgattcagcttttatttctttatttatttttgagacggagtttcgctcttattgcccgggaggcggagcttgcagtgagccgagatcgcgccactgcactccagcctgg

SEQ ID NO: 252757 - DNA, 187 bp, Homo sapiens
tacaggcgtgagccaccatgcctggtcaaacataaacttactttcttacctcttctgctgaactctatttgcttcttttctcaacttctgctgaactctattttgcttctttttcctggataaagctcttctttatccagaagacttttagcaacaaagttacccaatgcccttccctagtctctcc

SEQ ID NO: 252758 - DNA, 464 bp, Homo sapiens
atattttctcccattccgtgggttatctcttcactttgtggattgtttcctttgctgtgcaaaagctttttaacttgatgtgataccattttgctttggttgcctgtgcaaccaaatgggatattactcaagaaatgtaattacttttacatttatttaatgtagaggattactcaaaaaatctttgcccacttcaatgtcctgaagcttttccccaatgttttctttcagtagtttcatagtttgaggtcttagatttaagtctgtaatccattttgatttgatttttgtatatggtgagggataggggtctagtttcattcttccactaactccccacccatcttacacccattctttccctacctcacccaccattctctccccctctctctctatctcactaccatcagaccacttctcactcattctcactcccaccactctctccacctcctcccccg

SEQ ID NO: 252759 - DNA, 410 bp, Homo sapiens
ccctccatttcctatatttactcttccagcagacagggacatggaaaaatccgtgacctagcactgacccagcagataagactaaccaccataagtacagtttttgaaagaaaatgaagtagttaaggctaaagctttaacatggagtcaagcgtttgtaagagcattgcactcacacctgctaaaggtcaagccacaggatgttgctgtagacctggataacaatggactgaagtcaagttagcaggtctaatctgtgccaagtcccaaatttgaaaagagggaaggtttcttggaatctaggtcttcagttgggccaggttgggtccaaaaacaatgatcactgagtactaagaaagccaaaggcagcagaacatagaggagtagaaacaccaagaaaaggctcaaat

SEQ ID NO: 252760 - DNA, 396 bp, Homo sapiens
ccttgctctgcgttgcaagggaaggggtgtgtacaggctgctgcagaggctgctacaaaacctgaagcgccacagcccgcttagctccgtgaagagaggagtaagcacaaaggttctggagccatctcaagatggagacgggcctggagccctgtagttttcttgcctatagggaagggtgtgggcacagtgcaaatgcccaaggcacaaagagaaaccattcccacgtgggcttttgctgtgtgcctttttcaaacaatgcaaagacgaaagaagattttaagaaattaacacagctccagtgttcctcagttgaagaaggaacatttaggaaaagggataattcatggactaaaagacctttctcccctagagggacgaagctaaaacatagca

SEQ ID NO: 252761 - DNA, 6850 bp, Homo sapiens
  misc_feature (731)..(731): n is a, c, g, or t
  misc_feature (1350)..(1350): n is a, c, g, or t
  misc_feature (2925)..(2925): n is a, c, g, or t
  misc_feature (3166)..(3166): n is a, c, g, or t
  misc_feature (3229)..(3229): n is a, c, g, or t
  misc_feature (3231)..(3231): n is a, c, g, or t
  misc_feature (3433)..(3433): n is a, c, g, or t
  misc_feature (3646)..(3646): n is a, c, g, or t
  misc_feature (3695)..(3697): n is a, c, g, or t
  misc_feature (3787)..(3787): n is a, c, g, or t
  misc_feature (3861)..(3861): n is a, c, g, or t
  misc_feature (4019)..(4019): n is a, c, g, or t
  misc_feature (4117)..(4117): n is a, c, g, or t
  misc_feature (4177)..(4177): n is a, c, g, or t
  misc_feature (4211)..(4212): n is a, c, g, or t
aacatatatcctgtccttagatgttatttagcctcagagtgaactgtgtgatacacacacaaacacacacaagtatatatgaagtttacactcttttgttagtctcttgtgtagtgaatttatttttgtacacctgctacccttctcttttgtttgtttttgttttttgagacagtcttgctttgtcacccaggctggattgcagtgatgcaaccttggcccactgcagccttgaccccctaggctcaagtgatcctcccgccttagtcccccaagtagctgggaccacaggcaagtgccaccatgcccagctaatttttttgtagagatggggttttgccgtgttgcccaggctgtctgagatcaagtgatccaccagcctcagcctcccaaagtgctaggattagaggcgtgagccacactgcacccggctccctgtacccttcttaatacgaacttaaagtgttcgtaatgagccaaccgttgtaaggtttttggacttcttataaaaagccagattcaaatacagttgtttagacaaaaatgtcttagtatggaaatatgcatgagcatattttcctgccagatttgtggttagaaaagaagcaaattttcctcctagagtggaaggaagaaaaaaacaataaagaaaagaagcaagctattcaagaagaaggtagtatagtggtagctttttgttgagaccagtcaccagcctggaactttctttngtaagtaattagattcattgaataaaatgttcaaccgagcttggtgcaatctcatagttacaaaacactcttgccaaagaaagttgcagtcttaatatccgtaatcgaatcatttcctgttcgggcttgcaggtggggaacaatctgaaactgcagtcctataagattagttataaagaaaacgccttggtgggagaagccttgatgataatattgaatagacagcctaacaagtgtggggatgaagaaggtacaccaggatcctgggactaaccagatttaaaggcgtaagtcgggatctgcaagcccactcccttggggtgatctgaataaagctactctagggcattcaggtatgtgctgaacacactcgggcagtgggccaggcagatggctcattcctgcaccgaccttcgaaggcctgccaggttgaaaagctaccactggggaggcatggctgtgctctagcaagaacaagaacatgcatttcatgtagcatttggtccttcccagttgagggagatgccttaggactacgttaatctctgagtccacttagggcttgggatgtattctcacagcccttgctcctcctccatcttagagtttatttttaccntcattgcaacctcctctaagtgattcttccagacccatagttagcctttgagattccgcagttctcctccctactcttccccaccatgtcttcattgagacccacatttttaggtttgactaaaccttccatctaggaataggtaggaggctaagcaatttaggccgcattcatgtatcctgtcatttgcttcactgcatcttcttggctgtggtaaaggaaatttaggtgtgatacactccttaggcttccctgccctgcccccctttccttttgcccttttgattttttttaatctgatactcaggctctcctcccgccttcacacaccattggagtctcctaagctatttctgtcagtttaatgatccccagctgttgccacagttcaggctgttttcatgcccaggagaagcatcgaagaggcagaggaaaaggggtcttgtttgttgtctgtcccacagtgtgtaaaacaaatcaaattcatttttctgaaactactagtgagattccttagggatggatgttaatactgggatgatttgaaaatcaggaggaggaaaagtacatggtagtatcagggacatttttaaaataagcattctgctgataggtgtggcactctgcatcactcagaattatgctagaaaattgaggtatgtggtatggaggaattatttgatcactttgcattcttttagattttttttttttttttgagacggagtctcactatgttgccaggctggagtgcagtggcgcaatctcctctcactgcaacctcctactcccagatgcaagcgattctcctgcctcagcctcctgagtagctgggatttacaggcacgtgccaccatgcccagctaatctttgtatttttagtagagacggggtttcaccatgttggccaggatggtctcgatctcctgacctcgtgatccgcctgcgtcggcctcctaaagtgctgggattacaggtgtgagccaccgcacccgcctctacttttagattttgagctggaatttcccttctactcatgtatgttgaaggagtatctaaattaaaagaattctgtaataggaaatatatggaaattgtttctgaagtatccagaaaaggcatttatttaagttctgctttaacttaatgcaggtttgtttcgtaaaattttgtgcaaaacctgcagtagtgaaatgttccatttgcaaattcaaccacacagacttcaggaaatacaaagttgcggtacttataacatgaactcttctacagttacacctacctttgcttttgaaaagtctttactaaacctgggggatgtggagtgggaaaatcctacagtagttaaatgggctcctaatgtattataatgatctggcttctcctttatgtgtttgatcttgagaattttaacccattccaacaagtttagctgatttgtagcttttacgctcagacactacatgaagtttaattttatggatttctttcttccacagagaagacaaattttgctgcagactttatcaaattttatttttaaatttttatctttttgagtcaaatagctaaaantttacatcatttaggactgaagagtgagaatttactgttttttttttctttatccatagaaaacttgatacataaacatttgaataagcttcagattgtttgtctatctaattatctatctatctataacccaacccatatggtctaatttttaatcacctttctattccctactgcttcccatagaaaagggccaggtgtagtgcctcatgcccaatcccagcaaagcctgtaatcccancattttgggaggttgaggtgagcggatcacttgagtccaggagtttgagaccagcctgagcancntggtgaaacaccatctctacaaaaacaaacccccaaaaagcaaaaattggtcaagcatgctactgtgcgtctgtagtcccgattactcaggaggctgaggtgggaggactgattgagtccgggaggtcaaggctgcagtgagccatgatcgcaccactgtactccatcctggcgacagaatgagacctatctttttattttnattttaattttttttttttattgagacagtctcactctgtcacccaggctggagtgcagtggcactatctcggctcactgccagctctgcctcctgggttcatgccattctcctgcctcagcctcccgagtagctgggactacaggcgccccccaccacacccggctacttttttgtatttttagtagagatggggtttcaccatgttagccnggttggtcttgatctcctgacctcgtgatccactcgcctcggcctcccnnngtgctgggattacaggcgtgagccattgcgcctggctgagaccctatcttaaaaaaaaaaaaaaaaaattactttaggtctgtcatagtngctcacgcctgtgattccagcactttgggagactgaagcaggaggattgcttgagaccaggagtttgaaaccancctgggcaatatagtgagaccccatctctacaaaaaaatttttttaaaattagccagacgtggtggagagcgcctgcagtcctagctatttgggaggctgaggtggaagaatcacttgagcccagaagtttgagattacagtgagctgtgatcctgcnccactgcattccagcctcggcaagagagtgagatcctgtctctgtgttttgtttttttgagacgggctcactcttgttcaggctggagtgccgtggcncagtggtggctcactgcagtctgggtcaacaggcatacactacaggcacacacaaccagntgttgtctccctgtgttgcccaggttggtctccnnctccagctctcaagtaatcctcccaccttgacccccacaaagtgctgggattataggcacaacccactgtccctggcctaatttaattttaaggaaaacaattttttgtcacttttggtttgctctagaatgactaccctattccaagttttgaatctgtacaacaaagttgggtgcagaatgtcagcatcagtgataccagcagggattagcaaatgagattcaaggctgcccatattttctcagtgaatgggcagaactaatgcaataaggaaaatgctgttcttggtgcctttaactttggaagggagtgttcagatggccctacctaaaagtgctaaaggaagcacattcctagtttatctccaccctgttcaggcatctggtgcaagtgcatgctatgcccagatcttacatgatggagttggttgcacattgctttatagatcctcaggaaagagactgatgacattgaagtaattggcactttgagatctgtttgccaccattagaataggaggtcacctcaaggggggagatgagcagctacccaaaatgaagtggtgagcttcagatttttgaggatgtggggaataatatttatttatagttattaatatttttattatgactgtggcataaatgtgatatagtagaaaaagcacaagctttgatatcaggccaacctgtgtttgaactctggctctacctgttaccacttgtgcagcttcttcatctatgagatagtacatatctcaaatagccattgagatgaaatgagtcaccgtagtagtacttctacccagtgacaacacaatgtaagagctaaacacattagagtcctcatttctttttttttttttttgagatgggagtcttgctgtgtcacccaggctggagtgcagtggtgcgatctcggctcactgcacgctctgcctcccgggttccagcgactctcctgcctcagcctcccgagtagctgggactacaggtgcccaccaccacgcccagccaactttttgtatttttagtagagacggggtttcaccgtgttagccaggatggtctcgatctcctgaccttgtgatctgcctgtcttggcctcccaaagtgctgggattacaggcgtgagccaccgcgcctggtcagagtcctcatttcttctattttagttttcttttcaaggcaagccttttctcagtgcctttgcacttgcaatttcttatgtctggaatactctccagatcatttttatggtttgtcatattatttaggtttctgtccaagagtcatcggtctcttcaaaagggccttctctgtgtaccctatctaaaattatcaccacccctgtcactctctgttctcttgttccactatatttttcttcacataatgtactccctgaaattataatacgtacaccttatttattatgttttccctgctagagcatatgttctatgagggcagggacctcatctgtccatgttgttgttttattgcctataaatattgaccttatctgttcatgttgttttatcacctgtaagtatcacctatacatattagttcaataaatgaatgaacgagccaactgacaatcttcctagtgcccgaaaagaacctgtggccgaatgcaggaaggaagttgtaccaggaagcaaatgctctctgcttttgtggagtggatgttcccacactgagagccagataggcagtagtcctgtgacgtcctcttacatccttttagacttcttcctgtctctctgtctgggaagagcccctttgacctttatttagtatttgttgttattttttgagacagggtctcaccctgttgcccaggctagactgcagtggcataatcatggctcactgcagcctcaacccctcagcttccggagcagctaggactacaggcaaggactactacacctggctaatttttttaaaaaattattttttgtagaaacgggggtctccctgtgttgctcagaaaagtcttgaactctggccgggcatgttggctcatgcctgtaatcccagatactcgggaggctgaggaaggagaatcgcttgaacccgggaggcggaggttgcagtgagcggagatcgcgccactgcactccagcctggtgacagagcaagattctgtctcaaaaaaaaaaaaaaaaaaaaaaaagtcttgaactcctgggcgtgatcctcccaccttggcctcccaaagtgcagggattacaggtgcgaaccatcatgcccagcctgaataacctttagatgtgaccaccgttatcctgttaaaatctcgattccttttggaattagaacataagcattgttttcagtctccagagttctactgtgtcatatactctacatgttccatactattcactgaaatcacctggattttcccctagttagtaagtatgtagatcacttttttccatccatatcagcatgtcatgctgataacactatcaatatagtgtcattttaaaacagaggagtgggggtgcagtgtttcatcatgactgtaatcccaggaatttgggaggccaaggtaggaggataactggaggccaggaattcaaggccagcctgggcaacaatgcaggaccccatcttgacaaaacat

SEQ ID NO: 252762 - DNA, 399 bp, Homo sapiens
gtttggcttaagccttataatctaaaaaatatcagccaggctattctatcttctaagacctggctgaatcatgagccagttctaaatctaaagagagtgagagagggaagaaatctggcacaaacttacagtctctttaattacatgtaaaatgcatgtgactgtattacctattggcttagccccatggagggtttagaaaaatgtgtagtctttgtggaagctatccaattatccttctcccaaaaagatgttttaaatgtggaatagtattacattcccctgcccctttatgagtccttcataacttactaaagctgaccaattgttatttatgtaacctggctcattcattgtcaactaagaacctaattatatgcaatttattgtaaaaaaagc

SEQ ID NO: 252763 - DNA, 725 bp, Homo sapiens
gaaggaaactgacattcacagtacccagctggtatagttgaacctagaattgaccagactgtcccctccaaagcctggattcttattccaggagggccatcaggaaagctgacaaacacaaagccattttccaagagcccttgggactgaacaggtcaagggtcctctgaagattgtctggattcaggatgcaagggtgggagtggagcatgtgcccacaatccacagtgtgttctgtggctagatccttgccaaatgcaaccacctcccttcggctgaattctgtaaggataaaagagtccaccccaaaaagcatggccggaaagtcaggggagggctccaagccttcctggtcaaacgatccatcagccagaaaaacccatgtatgacctcaacaactaaggattactgtttcattgtatttcagaatgtgtagtttcataagatctgggtctgatttctggtgttagtttctgagtccacatgtgtggaacagactccaacccttaccacatagaataggaactttggtctatttggggaggtgtaggcattacattgggctaaaggttatgacagggtttgctatcatgacttaaggtgatcctcactgaatttgttattccaccatcattatctcactgtttcagagcaactgatacattttttattttgacattttactgtaaaaatgacttttctctatgtcttcttccacagcatga

SEQ ID NO: 252764 - DNA, 449 bp, Homo sapiens
tttaggtccagtggatcagaatacagggaaaaaactaatgagaatccctcaatggatccttcacccaccaaacaagatttcttcagaaaccgacttgctcttgcaaatgaccttgaccaaggaacagctgtgtaaaacatacttaaagttgtattgtcaagtggtaagatgaggataaaaagcttgtatatatctgtgtaggaatatatatatatatctatatctatatatatatatatatcgatgtataaatccctgaggaaaactaatataaatacttacatatgaaactaaacatacaagacattgaagagatgaagattagtttctggttaagatctggctttttgaacctcaacactggggaaaagggaaatgaagacttttcacatcattacagaaaaacacaataaatttggaggaaaataaatgtttgtaagaatgaaaac

SEQ ID NO: 252765 - DNA, 535 bp, Homo sapiens
tgcactgaacccctgccctttcattcttgggcctgtgctaatttctgtgcattcccaactgtgatttttcaccaatttaggggaacctcctctgccagggcctgcttctccccagcagtgcttgcaggggcctgggctggctggcatccctgggtcgatgggtgctcctctccctgcaggctggccactcagtactccttgtccctggcctcgcagcccacccgggaagccacagtgaccagccaccaggtgtgccatcgtggaggaagtccaggttggagaggtggtcttctgtgagcaggtccatctctccacacactgaggcccctttctgcctgtgacagccccacctcgagggtcagggcacagccatcagctccagctcccagcatgctactgccacgccccgagtgtccgtctgggcactggtccatgacctgttgtctttctgtatctactttctgcagcccctcactgaggaggcctcctgggtttgtccagtgcctgctattaaagctttgctccaagttcaaag

SEQ ID NO: 252766 - DNA, 489 bp, Homo sapiens
ctgttctgacaataatcacagatgaaatgacttgctgtgccatccagtaaaatgctagttcagctcacaagtgactctcttctttgtttcttaaatgcttgacccagaattttgcatgtagtcatcaagacatcgccccacagctgagctgtgtcatggaacagccagcccatctaaaaggctgcctactcatcagcctgctcagcctgtgtgggctgggaatgtggtgccatgcaggggaggcattccccccgttgcatggtaccacataccctttgggaaagagctctgtgcctgccccataaacactctgtggcaccattcctccctcctgactctgcctgtcttctgccatcctttgatgtgtaaattggaaaactgtcatcacctattgatctcaaaaatgtcatcctatgtgaaaagttagtgcactctggaagaacaaactggttattaaccataattcagttattattaaaccactatctt

SEQ ID NO: 252767 - DNA, 493 bp, Homo sapiens
gcagcatcagcctgcatttctgttgatttctcatttatgtcctttccaaacatttagtagtttttattttaattgtttgtatttgatagcttgagcccaggctctatattgtcttacaagaaattggggtgatggataatttctcaaatgcagattgttctttaaagattaactctaaattcacttaacttggattgcccccaagtcagaacagtcattcgctaagtctttcagattgatgaatgattggtcccagtaccaaaaatgtcaaatcaaagcttagaattgaattttcaaagattgttcatggatttacatatattgtatttcttatacaatatatcacatttcttactctgtatattcatattgataaatgggtggaaagtctttgaccctgactgcatttatgttaaatgtttgtctagaatatggatttggtttcatttgtattgtaacacaattaactgaatgattaacatgaaaaaaaaaa

SEQ ID NO: 252768 - DNA, 856 bp, Homo sapiens
gagatgggggtcttgctatgttgcctaggccagacttgaactcctgggctcaaatgatccttctgcttcagtctcctgagtagctgggactacaggtgagcaccaccatgcctgtcttttttagaaaaacaaatttaaggttgaagccagaaaagccagattttcagcctgccagctacgcgtttgcaattttggtctatacaatttgagtagagactggagcagcaatcctgtctgaactcctacagtgcttatagcctgtgtcgcatcattagctcttagctactctttgtcttgctattcattagtttgtaaatcatttttcctaattagatgggacatagaacaggtgagaaatcatgtcttaaactttgtgtaccttaaaggtgcacaataggttttcagtatatactaggataaagactaattgattggctgattactcagaactatcactttctcctttgattttggaggagcaggtctggggaattcattattttacctcaccatttcagttttcccctctttacaaagagctcgggattcatcaatctccattaaacttcaaaatgaaatagtccacataagtcagagatgcaaaacccactgtattaattaggaacttttctaattgcaagtaataggaaacccaaattcaaactgccttgggtaagacataatttactgattcctatagctaaaacctgcagaggtcaggatgatgtcaggcatgactgaattcaggagctcaggcaatgtcattggaacttgatctgtctttccctccgtggcttggctctacttttcctcccattagcttcactctcagtagttccccttctgtcgtcttctc

SEQ ID NO: 252769 - DNA, 497 bp, Homo sapiens
aaggaacaaactacttttatatccaacaatgtggaggactatcaaaatattttgctggatgaaagaaatcatgaaacaaacattctgtataatccatttatatgcaggtttagaatgggcaaaactaacacttacactaatacaaatagttctagcatcaagggtggtataaattggccaggaaggagcttgattgataaaattcctctgtgtcttgagtgaatgtatatatatgtatatatttgtcaaaacttactgaaccattcagtcaatatttgagcattttactctatagcagtatcttgatcttttaaatgaaaaataacttggaggacatttcagtcatataatttttatagcactgtatttgactaacactattcattaaccatttcagtacattcagggctcttttcaatttttaagaggaattttaattttttaaaaaatttttgtgtgtacatggtgtatatatttatagaatctgcaaaatgtgc

SEQ ID NO: 252770 - DNA, 247 bp, Homo sapiens
gtgtaattgggacagccaccaccttaaatacttgtccttcctttttgctggaaacatttgtattattctcttagctattttgaaatatacaataggttattctaaactataatcaccctagtgatctatgaaacactacgtcttatttcttctattggattaaatgatttaatacctgcaatgctcttagcattgtgcctggcacatgataaataaatattagctgtcgttattccgacccaaaaca

SEQ ID NO: 252771 - DNA, 373 bp, Homo sapiens
gaatttaaggcaatcattccctttgtccaaactatcttctttgactaggctgcacagaaggatttccaacccccagaacttgaattcccccaggtgtatttgtcttcctggttggtactttcagaatcattttaatgtaagctgctttcttgacatttgcattccagcacgtggcacagtgccatggctggtacatcgtcaagtcttcaataaatatttgtgaaatgaagggatgaacttgcagaaagacacaggctgttctcttggatgaactcatcagagttaaatgtttcatctttgaagataacgcgggggttatcaggcacatcagaatatacctgcattaacactattgccagcatgagcaattcga

SEQ ID NO: 252772 - DNA, 441 bp, Homo sapiens
ccaatcttctctgcatagcatgatgcatgaacaatgaactgtcctgggttttaaaccttaagagtttttcaatcaaaatagtgtgactacttctctttatggtccaggcttaaatagcttgagactagctctgatagttttagcatgaaacaagggacaccttttggaccaatccatttgagttgggaattgtaggagaccatcatagatttggtggacccaaaaccagtctggggtcaggaataagaaaatgtaatagcatggcaaatattaatggaaccatatggtttgggtggtggaaacggacaagtgtaactcccagaaggaggaaattgttgctttcagaagggaagggtgttagacagataaatgactatatgactatatgactatataccacagcaagccatagctaaatagtagcgtatgtaattttttttt

SEQ ID NO: 252773 - DNA, 283 bp, Homo sapiens
gtcccctgtaatacaaaacaaaacaaaaaaaaaccctaatctctgtggccctgatttgctcctttcaccttggtggtgagaaaaatgtgagcagagggcaaagtcggccttttgctcctgcactttactttcctggcccacttcctcttaggtgcatgtgcctgcatgacctgggctctcctacaatttgatcacccaatctgatttccactgttagtgacttcataaacaattgtcccagagacttttttttcattctaagtgggctcatggaaagcagata

SEQ ID NO: 252774 - DNA, 350 bp, Homo sapiens
ctgaagatcagggagattagtaccatgatcaagagcacacaggtaatgcataaggcagcagggattggaatgtgacttagtttagtgctcatttcactgggtcacaggcgtatatagatgaaataagagccttggcttcttggagctggtcagactctttctggattgttttgttcagtgatgggtggtaaattggagaatgttgagagaggcgtgactgggatgtatccctgtgcagtacagatagaggtgaaagattttaaaatggatatctctttgagaggtaattcattggtgtcagctggtttcaataaaggtgctatctaaagaaaaaggtgctatctacagaa

SEQ ID NO: 252775 - DNA, 1291 bp, Homo sapiens
gcttcacgtggcgggcaccctggtgcccagagagagaaccagagctgtccgtcctgcagatggacacaggggagccacagcacggctcgcgctggtgcccagagagagaaagagtgaagctgctgaccctgaaggcaaggcagagtctgccatgcagctgcagatgtcggggtgacaggagccgcagagccggagcaaacggctgagataagagcggacagcgtgagagaagctgcccatgaaagcgctggtgtgaaaaagctgttaatgaaagcggctgctgaataaaaccatattcacctgcctagagctccccaagcgttctttccgctcatccacccactcccctcggaccgcagcatgggctggacctggaccccaggatctgaaaaatgtatttgttgaagaaatacaatttttgtcctgtagaacctgcaatttgctaattgcatttatgtggtatctttgaaaaaaaaaaaaaaaaaaaaaaaaaaaaaaaaaacaaaaaaaaaaaaaaaaaaaaaaaaaaaaacaaaaaaacagaaaaacacagaactaacaagacaaaacaagagaccacaacaacgcggacaaacatacacaccgagagcggggcagatgatgagataatcaaagaggatcataatcgggcaacaacgccggccacaccgcgggaatactcagggaaagagaaacagttacaacatcgcagggctgtcgaactcatctgctccccagctccctaacagagccattcgacagccaccacggccccacccgccacacatgcgacaccaagacgaacaaagggcacacaaaagagacgctgagactcagtcaacaacagcccacaagacactacggcacacacagcccatagcaattacgcgcagagcaatcatcaacacaaaagaacatataaagaaaccagcgcatgagccaagcaccacgcaggtagacgaggcatacgagcgcacgcaagcgccgcgcacgcagacctatatgagcctcatgaccccctcgcgcccacccgtcggcagtcgcgcgttatccaggctcagggtctagcgcctgcacaccgaagccgcgggacgatgaatggcagagaccaggggagggcggcagagagaagtcgaaggaccaacgcgcagggcgacacccggccctagacggagaggaacggcggacaataggtgcgaagccgcagcgacagaggcatgcggacgttggtacgcgctggacgaacgatagcgcgaataaagcgtaaggagaccggccgaccagcacgaga

SEQ ID NO: 252776 - DNA, 501 bp, Homo sapiens
gcttcacgtggcgggcaccctggtgcccagagagagaaccagagctgtccgtcctgcagatggacacaggggagccacagcacggctcgcgctggtgcccagagagagaaagagtgaagctgctgaccctgaaggcaaggcagagtctgccatgcagctgcagatgtcggggtgacaggagccgcagagccggagcaaacggctgagataagagcggacagcgtgagagaagctgcccatgaaagcgctggtgtgaaaaagctgttaatgaaagcggctgctgaataaaaccatattcacctgcctagagctccccaagcgttctttccgctcatccacccactcccctcggaccgcagcatgggctggacctggaccccaggatctgaaaaatgtatttgttgaagaaatacaatttttgtcctgtagaacctgcaatttgctaattgcatttatgtggtatctttgaacatgtctctgtcctctgtatttctggtagtt

SEQ ID NO: 252777 - DNA, 498 bp, Homo sapiens
ttccatctgtgagtttgatcaaagcaactttatctgcgaaattttgaagaatcagcttcatctccacttggcagcatgtggtaaatgaaggtatttctggaaatcccatcttcccagaattcagctaggatccagaagtgatgctgttacgtgacgtcttcaacctccctccctctgcccatctcagggacctctccagaagccagtcccaagagtggcattggttagcatatctcaaatacagtgggagaagcctcttagctcagctccagttatttctctattgtagaaaaccaagagagagatgaataaggaatgaaaacatactccacatggactcaataaatcttgggtgaaatgatgctgtctgacaaggtaaataaaaaatgcagcactcaagcaccagcactggggatgagatgaggacacaccaattaccagcacttctgcctgctttgctttgttgacaataaatatcaagttatgtcatcaaaaaaa

SEQ ID NO: 252778 - DNA, 523 bp, Homo sapiens
aacagactaatgatacatgtgacaacatggatgaatttcagtcattttgagtaaaagatgccagacatgaaagagtattatgtaccatatggttgtattcatataaaattctagaaatgcaaactaatagtgaagtaacaaaattcagattagcagttgcctgaagctaggccagagacagggatggccagcaaaggggcacaaggaatcttttagagttgataaaaatgttctgtatttttattgtgttggtggtttcatgggtgcacacactgtcaaaatgaacactgaatagatacaattattgtatgtaaataatatcttgctaaagttgattttttaaaatacagaagatagatccatatctgaatatagttcatgtttaaagatcagatcattttattaattgaaatcatttcaagttatagagaagtatataccaatattttatttcttgtaattgcttcattgcaactttaaaatacatcatcactcttagaccatcatagtaagtacaggaaaa

SEQ ID NO: 252779 - DNA, 498 bp, Homo sapiens
tgccattttcaaaggaaaagaatgcagacacctcttaaaagagcaggtagttagaatgcaacactggaagaatgtgagtttgagactagaaagaaaaattgaggtagcattcatatggcaacttcatatgacttgatgtgagtaaaagagatttctgctggaggatggggaagtggtctgcatgagacaaaagctaaaattataactttggggaacttttggaggctgaggtcagagaaatctaaggagtttctagtgcagagtcctagaaataaaaggtgaagagatttttggtgcctgatccctcgtgtaagaaacataaaagtcttcactacatcctaacagatgtgagattcaactgttctccttagtgtgttctctctgcaattccagaccccatgaaataaatctctgaagcttgcttgtctcccaaacactgtgtaaacccactgaaaacttaagtaatggagtaaacagctttctgtggcttcctgcttt

SEQ ID NO: 252780 - DNA, 409 bp, Homo sapiens
tgcttaagccacccagtcggtggtattttgttatggcaggcatggcaaactaatacaccaaacgctggtgcatggaaaatatcactgtcagtacagtgtctcagcagaagaggactggaaagggacacgagtgtgtcctacccaccctctgcttcctaaaggtcactctacaggccccggttaaaaatggacattttgagtttatcccaactcctgtcaaaaaccaactcacagggtgtgttgtatctactcttagggtttttgtgcagtggcgcgatctcggctcgctgcggcctccgcctcccgggttcaggagaatcgcttgggcccgggaggcgaaggttgcagtgggctaggatcgcaccactgcactccagcctgggcaacagagtgacattctgactcaaaa

SEQ ID NO: 252781 - DNA, 761 bp, Homo sapiens
ctggaaagtatttgatattgggtttcttagacatgtgactgttacaaggcatccatatttagcacagtaaaaatatcaaaaattttttgagactttgaataggatatttcattttgagtaatgcttttttataaatgcttgaattctagttaatcatatgaacttgtttattgaaattaatgtttcaatagtagtttttactttaggtgataaaggtattgtccactttaggaaataccctctttgtgtgttggtaaaagtatatgtcattttgttatctttttcttattcttttagatgtgattgtcatttctttactccagaatttgaggagactataaactattctgtactctgaatggtttagcaactcagtgtattcagtaagtctcaatttattgtaggtttctaataggaaaaaaaaactccatgttcttaaatgaacgtattactgttttagattgctaatagcaataaaaactgctactttagaagttaatgtgcttaaaagttggaatatacttactagtaatctggccaggaaaataattagccaacattaaataaacacattggtgcctgatttaggctaaagttgcctctatgggaagtatcttgatttaaaatcactgcttaaaattcagagtctgcttttgtgacattaaatttggggcgcatacagttggccctccatatccctgggttctgcatttgagggtatgaccaaccacagatagaaaatattctgaaaaataaaaaat

SEQ ID NO: 252782 - DNA, 529 bp, Homo sapiens
acaccaacttctctcaaatctgaggagctattgtacaaacttgaataagtcagttactccttctttgccttagggactaggaaaaacaaaacaaaacaaaacataggcaggactgttagcataaaccagaccagggacctgaaaagattaatattttccatggtcagatgaaagatggtacataaatgcaaaatggctcactgtacattattacatttcaattacacgtgaattagttatagagtgacattttgactgtttcctctgggtaattctcataactccacctgtctgacatttccttcctctctcaggtccatatagaacaggtcccactttgtaggagagaggccaccctgcagaatttcaaaacacacaccaggggaggccattgctgaggcacatgcgggaagtttcaaacactcacagatatcaagaggttaatcgcccccagggcttgatcattgaagaactacccactgaagaacagagaaagttcttcataaaaaaaagaaaaagttggcggccg

SEQ ID NO: 252783 - DNA, 368 bp, Homo sapiens
tgggattcctagccagtcctcaatactgtcccacctccccgctttacttttctcacccaggaaaccaggataacaacagaatctactcccagcagtgttgtgaggatttggagcattgcgtcagggaaagcccgttgctgagtgcctggcacgtggggaagagtgggtggaagaacatgcttcctctcatcactgtgcccccatctgagagctttcaggacatcaagaattcaagaggggatgaagtccacgctgctaacaccatcacattgtatttgaaaacacaatctttagaggaaaaaaataacttcagatggatatatgattatgtaagaaatcaggctggccgtggtggctcatgcatgtaa

SEQ ID NO: 252784 - DNA, 477 bp, Homo sapiens
catcaactgccttttgctcctcacctactagggagcaaagctagagggcatcttagagatgtgaggtggactagtttgtaaataaaatagcattaaaaatatatccaacctagagaatgaagactatggaccctccatcgttggttgagggactttgagagtttttgagagttgtgtttttcaagcttaatatagctttcctttctagcctgttccttcaagtgacacaaacaccctttttttttgagaaatatttagcttggtctaggctactgacagtacctagaaagaaaaagaaaaagaattattcttgcttattattttataaaacctttactagacttggagactgctgcagcgacagtccagttagtggactggaagaccaatcaatgaataatgattgactgtttacaaatgagcctagcacggtgcttgacccatggtgggtgtttaataaatgttagctgactcaga

SEQ ID NO: 252785 - DNA, 232 bp, Homo sapiens
gtggaggccattttgaggaaaggagcctatttttcaataacagaggcatctaagtaaattgaagctttatgagaactagatgcatattgttgcccattgtacccacctgataatacgcaagacagtgatgctacaatattctttagtgacctcttgttttctcatcccataaagaaaatccaagaccgaaatctcagaattgggagagtaaaagttcaaaagaaaggaaaag

SEQ ID NO: 252786 - DNA, 271 bp, Homo sapiens
gtaatttaatactatactccaatattataaagtgtggctatgaagcatatataaccaactcaatataaaaagcctggctaggtgtggtggctcatgcccataatcctagtactctgggaggctgaggtgggaggactgccggaggccaggagctggagaccagcctgggcaacagagcaagagatctctcccccactctcaccctacaaaaaaaaagcctaaggccttttcacccagtgcattttctttgtttaccactaaacgtcagcta

SEQ ID NO: 252787 - DNA, 366 bp, Homo sapiens
ccttgagtgagaatagatgagagaaaatgtggagctcctgacatagtagcagaggaaaaatgatcactaccacagtgtgctactctgatgcttcaaaaagatcaagacataatgctaaagcctgatcaaaaggcccctattacttgcctgacgctattcttggagcaacaagtacttagtgccaggcatcttgaaacatcagtgtgcagttatctaatcatattgatattctgatggtgagtaacatgttatataatctttctgtgcctttcttgatggggtcagattctataccacacaagtcacagaattccaaaaagctattgtgagaataaagctaaaggcaacaaaaggatgaatcactag

SEQ ID NO: 252788 - DNA, 658 bp, Homo sapiens
tgctgggattacaggccaccatgcccaccctaaaatctctttttctaaaagactttccctctcactttttccctctcctctctttgctccctccctacatacatagtacacacacagttttttgtgttactgtatattaggaatttttattcacgtattaggaaataaattacagacatcaggatacctcactccataatttcttaagcatgtatcacctgagaacagtggtgttttccacaataccattattaagttcactatcacattcaaaatattttacagtgatataataatattataaacagtccatatttaaatttcttcagttatctcaacatgctttacaacttacccccacaatcctggattccttcaaggaacatgtgttgcatttaattgttgtatgtttgtagtctcttttaacctagagcagttctcttctgttttttttgtttttcatgtcattaatatttttgaagtgtccaggccgattgttttgaagaatgttgtacaatttgaatttgtcatgattagattcaagtcaaatatacttggcaagaatactacccaggtgatgttgtgtgcacataatgtgactttatctcattattgataatgttaactttgatcacttggttaaattgatgtctgcttg

SEQ ID NO: 252789 - DNA, 397 bp, Homo sapiens
acccctcagacaccgagttgtagaaggaagggctttattcagctgggatcatccgcagactcatgtctccaaaaaccgagctccccgactgagtaattcctgtccctcttaagggcttacaactctaagggggtctgcgtgagagggtcgtgatccattgaggaagcagagggtactgactgggggccgcatgcagcggtaattagatcagaacaaaacaggacagggattttcacagtgcttttcgatacaatgtctgtaatctatagacaacataaccgagtaggtcaggggtatatctttaactaccaggcccagggtgtgacaccgggctgtctgcctatggatttcatttctgccttttagtttttactaaaagcggtgcgcccaaaaaaaa

SEQ ID NO: 252790 - DNA, 491 bp, Homo sapiens
actcaggatgctgagacaggaggattatttgagcccaggagtttgagaccagcctgggcaacatagcaagatcctgccttttaaataaaaaaatatagccaggcatgatggcatgcacctgtagttttatctacttcagaatgaggcaggaggatcatccaggagtttgcggctacagtgagctatgactgaatcactgccctccaggctgggcaacagagcaagaccctatctctttaaaaaattttaaaaaagaaattaaatctcagtgatattaagggatttaataaaggccattaattaataagtgtttgaactgaaccagaacttgaagcccagactccaaattcagttttctttcaattattcttttcatgaagatttttgggagtaagtatacttagcactctacataagacccgaatattacatttcagattctttaagccattatatttgacatgagatataggaagcctgaaaaataaaca

SEQ ID NO: 252791 - DNA, 1182 bp, Homo sapiens
ttgatatattgcattcttgagcattaggcttctaggtgatttgttaaactcatagcaggttttagtacacagtgctgtttatgacagaaaaaattttatcctacctctgaaataattgtactttctgtgattcagataaaaactttatagaaactccctaatgaaaatattgaagcattaaccagaaaatgagtcagctttttgtttccaaaatgatgcaacaggaaaacctttaactacttataatcccgtatagtcaccatcaccacgaagtattgaaaatctgttttctcttttactaagtgtctgcacggtcacttatgtatacccaaagccagaaagatatttttatctcagggaaattccagaaatggaaacatttttgtgtaatattgattcatttctgtctcaccaaagatgtgttttccacgtagcaaagaacatcagccccacgttatagggaacaagcgagtcccaaatcgtaccatctgctgagcactgagaaaggatatggacaagtcagtcagcattcacaattaagagaaaaacatctgtgctttggaaaatgttcttcaaggatagagaattgtgccctatgtccaccaaatttgcatgagatctttataagattagacagccagtggataaggccccttatctttcttcatggatggctgaggaaattctccgccttccctgacatcagctgcataactgtatttctgcctcgtggaaataaagtagatgatcaggcacttgcggtttgttcttaatacaagaaagacaatttgatttttaaaagttttgatttgtagaataatgtaagacaatatgtttctttctactttggtttttccattcaaaagcttacagatgaattcattcgtttaaaactgccaggctgagtgcggtggctcatgcctgtaatcccaacacttcgggagactgaggtgggcggatcacctgaggtccagagttcaagaccagcctgaccaacatggtgaaaccccatctctactaaaaatacaaaattagccgggtgcagtgccacatgcctgtaatcccagctacttgggaggctgaggcaggagaaccacttgaacccaggaggcagaggttgcagtgagccaagattacaccactgcactccagcctgggcaacaagagtgagactttgtctca

SEQ ID NO: 252792 - DNA, 615 bp, Homo sapiens
agtaattaccataaataagtacttaagtgaattggaacgtttgtatttcgtatcataaagtttgtggtaagttattttgtttaattaatatcccatgtgcaaaatgagttatctctggcaaatccaaacgcacattgtgtgtgtgtgtgtgtgtgtgtgtgtgtgtgtgaagcagtttgtacttttgaaacttgtaaaaggtttttgcctttccctcccttcattgatttactgtactataacagtaaagtccagtctgtagttaattagattttatactggtctttggaaacgctcttgatttcttttcatcattgctttccactcttatgtccacttatatcaccagctgagattaattgaggaagaggccagtctaaattaatcaggaattctaattacacaatagaattagtgacttcatttatttagcgcattttattgaagccttcttgcctgtgtagcaccatgcgaggcatagtggagggaggtggtgggtgcatcagctcttaagaaccaccagctggaatttggttatgtagcagtacttctttaaagatacccctggagtcagattggatctcactaactgttaccagtgatgaggtgtttcct

SEQ ID NO: 252793 - DNA, 1891 bp, Homo sapiens
actcttcgtcatcacctctcctattcgcctggacaagctcatgtttgcaggagcaccatgtcttgctcgtctcgcgcctcctcctccagggctggaggcagcagctcagccagggtgtctgctggtggaagcagcttcagcagtggaagcagatgtggtctggggggcagctcggcccagggcttccgaggaggagccagcagctgcagcctgagtggggggtctagcgatgcttttgggggcagctttggagggggctttggtagctgctcagtagggggtggttttgggggagcttcaggctctgggacaggatttggtgggggttctagctttggcggggtctctggatttggcaggggttctggattctgtgggagttctagattcagcagtggtgctactggaggcttctacagctatggtggtggtatgggaggtggtgttggcgatggggggcttttctctggaggggaaaagcaaaccatgcagaacctcaatgaccgcttggccaattacctagacaaggtcagagccctggaggaggctaacactgatctggagaacaaaatcaaggagtggtatgacaaatatgggcctgggtctggagacggtggatcgggaagagattatagcaaatactattcaataattgaagatctcagaaaccagatcattgctgccactgttgaaaatgctgggatcattttgcacattgacaatgccagattggctgctgatgacttcagactgaagtatgagaacgagctgtgtctccggcagagcgtggaggctgacatcaatggcctgcggaaagtcctggatgacctgactatgacccgctctgacctggagatgcagattgagagtttcaccgaggagctagcctacctgaggaagaaccacgaggaggaaatgaagaatatgcaaggaagctctggaggggaggtgaccgtagaaatgaatgctgcgccagggaccgacctgaccaaattactgaatgacatgagggcgcagtacgaggagctggctgagcaaaaccgccgagaggctgaggagcggttcaacaagcagagcgcatcactacaagcacaaatctccactgatgctggggcagccacttctgccaagaatgagataacagaactaaaacgtaccctgcaagccctggaaattgagcttcagtcccaactggccatgaaaagctccctggagggaaccctggctgacacagaagctggctacgtggctcagctgtcagaaattcaaacgcagatcagtgccctggaggaggagatctgccagatctggggtgagactaaatgccagaacgcagagtacaagcaattgctggacatcaagacacgcctggaggtggagatcgagacctaccgccgcctgctcgatggagagggaggtggttctagttttgcagaatttggtggtagaaactcaggatctgtaaacatgggatccagggatctggtatctggtgactcaagatctggaagctgttctggtcaaggacgagattcaagcaagactagagtgactaagactatcgtagaggagttggtggatggcaaggttgtctcgtctcaagtcagcagtatttctgaggtgaaagttaaataaggaacttccagatcaacaaaagtgtctttcaaagaaaaaaaaatcaagaaggacacaagcgaagaaatggcatcaatctaggcatctttctggataatttcaggaaaagcttcagtccagaaatggatgactagccaacttttctgcatcttcttatttcctcattagaatgctcttgaaatagctgaattaacaactttgctttaattgtttctatgcttcaataaatttacttttgcaagttaaaaaaaaaaaa

SEQ ID NO: 252794 - DNA, 511 bp, Homo sapiens
tgtaatttaaaagtgaagacatactttgcttgtcatactaaaagagtccgctattttttacataatcttacccagacagaacacgttgaatgcatgtgattgaatttctcttgctctgtgtttctgtgagagtttccagactgacattgcaatcccatgattttcagattcaagcaagactagagtgactaagactatcgtagaggagttggtggatggcaaggttgtctcgtctcaagtcagcagtatttctgaggtgaaagttaaataaggaacttccagatcaacaaaagtgtctttcaaagaaaaaaaaatcaagaaggacacaagcgaagaaatggcatcaatctaggcatctttctggataatttcaggaaaagcttcagtccagaaatggatgactagccaacttttctgcatcttcttatttcctcattagaatgctcttgaaatagctgaattaacaactttgctttaattgtttctatgcttcaataaatttacttttgca

SEQ ID NO: 252795 - DNA, 2675 bp, Homo sapiens
  misc_feature (808)..(808): n is a, c, g, or t
agacgggcgggcgcacagccggcgcggaggccccacagccccgccgggacccgaggccaagcgaggggctgccagtgtcccgggacccaccgcgtccgccccagccccgggtccccgcgcccaccccatggcgacggacgcggcgctacgccggcttctgaggctgcaccgcacggagatcgcggtggccgtggacagcgccttcccactgctgcacgcgctggctgaccacgacgtggtccccgaggacaagtttcaggagacgcttcatctgaaggaaaaggagggctgcccccaggccttccacgccctcctgtcctggctgctgacccaggactccacagccatcctggacttctggagggtgctgttcaaggactacaacctggagcgctatggccggctgcagcccatcctggacagcttccccaaagatgtggacctcagccagccccggaaggggaggaagcccccggccgtccccaaggctttggtaccgccacccagactccccaccaagaggaaggcctcagaagaggctcgagctgccgcgccagcagccctgactccaaggggcaccgccagcccaggctctcaactgaaggccaagccccccaagaagccggagagcagcgcagagcagcagcgccttccactcgggaacgggattcagaccatgtcagcttcagtccagagagctgtggccatgtcctccggggacgtcccgggagcccgaggggccgtggaggggatcctcatccagcaggtgtttgagtcaggcggctccaagaagtgcatccaggttggnggggagttctacactcccagcaagttcgaagactccggcagtgggaagaacaaggcccgcagcagcagtggcccgaagcctctggttcgagccaagggagcccagggcgctgcccccggtggaggtgaggctaggctgggccagcagggcagcgttcccgcccctctggccctccccagtgacccccagctccaccagaagaatgaggacgagtgtgccgtgtgtcgggacggcggggagctcatctgctgtgacggctgccctcgggccttccacctggcctgcctgtcccctccgctccgggagatccccagtgggacctggaggtgctccagctgcctgcaggcaacagtccaggaggtgcagccccgggcagaggagccccggccccaggagccacccgtggagaccccgctccccccggggcttaggtcggcgggagaggaggtaagaggtccacctggggaacccctagccggcatggacacgactcttgtctacaagcacctgccggctccgccttctgcagccccgctgccagggctggactcctcggccctgcaccccctactgtgtgtgggtcctgagggtcagcagaacctggctcctggtgcgcgttgcggggtgtgcggagatggtacggacgtgctgcggtgtactcactgcgccgctgccttccactggcgctgccacttcccagccggcacctcccggcccgggacgggcctgcgctgcagatcctgctcaggagacgtgaccccagcccctgtggagggggtgctggcccccagccccgcccgcctggcccctgggcctgccaaggatgacactgccagtcacgagcccgctctgcacagggatgacctggagtcccttctgagcgagcacaccttcgatggcatcctgcagtgggccatccagagcatggcccgtccggcggcccccttcccctcctgaccccagatggccgggacatgcagctctgatgagagagtgctgagaaggacacctccttcctcagtcctggaagccggccggctgggatcaagaaggggacagcgccacctcttgtcagtgctcggctgtaaacagctctgtgtttctggggacaccagccatcatgtgcctggaaattaaaccctgccccacttctctactctggaagtccccgggagcctctccttgcctggtgacctactaaaaatataaaaattagctgggtgtggtggtgggtgcctgtaatcccagctacatgggagcctgaggcatgagaatcacttgaactcgggaggtggaggttgcagtgagctgagattgcgccactgcactccagtctggtcggcaagagtgagactccgtctcaaaaacaaaacaaaaaaaccacataacataaatttatcatctcgaccacttttcagttcagtggcattcacatctcatgtaaccattgccaccaccatctgcagagctgttccagcttcctgaatggaaactctggccccatgaaacactcactccccattcccctcccaacccctggcaccctccactctactttctgtctctatgacttctccagggacctcatggaagtggaatcacacagtatctgtccttttgtgtctgtcttattttactcagcatggtggccccaaggttcatccatgttgtagcatgtgccgaaatctgcttccttttttaaggctgagtaatattccagcacatggatggactgcattgtgttcatctatgctttcctcagcagacacctgggtgcttccaccttttggctgttgtgagtaatgctgctatgaatatgtgtgtgcaaatatctgtgtgagtctttgagtaaaatcgctggatcaca

SEQ ID NO: 252796 - DNA, 2193 bp, Homo sapiens
agagaaagtgaggtcttctcaggctcttaagagcatggcgtttggtccaggctgtacccgctgctctcagctgggcccgtgggtgggccgggcgcccctgctatagccaggaggtcaaggatccactgggaatgccatgctcatctttcgtccccagcatggtttcttaatggggtagaagcaggtcgggagagacctccctgggcctggccccactgccctgtgaggaagggttcatgtggttggtgtacagttccggggcccctggaacgcagcagcctgcaagaaaccgggttttcttcccaatagggatggccccggggggtgtctgttggagaccagatggatggggaacaggtggtcagggcagaatttcaggccctggcagcatgggagcagggcagagactggggagttcaggtacccagagatgctgctgggggagctgttttgggaaggaggtggctctcaggagggtgctgcaccccagcccagtctgcatgggcgtctcttgcctgtgccagaagaatgaggacgagtgtgccgtgtgtcgggacggcggggagctcatctgctgtgacggctgccctcgggccttccacctggcctgcctgtcccctccgctccgggagatccccagtgggacctggaggtgctccagctgcctgcaggcaacagtccaggaggtgcagccccgggcagaggagccccggccccaggagccacccgtggagaccccgctccccccggggcttaggtcggcgggagaggaggtaagaggtccacctggggaacccctagccggcatggacacgactcttgtctacaagcacctgccggctccgccttctgcagccccgctgccagggctggactcctcggccctgcaccccctactgtgtgtgggtcctgagggtcagcagaacctggctcctggtgcgcgttgcggggtgtgcggagatggtacggacgtgctgcggtgtactcactgcgccgctgccttccactggcgctgccacttcccagccggcacctcccggcccgggacgggcctgcgctgcagatcctgctcaggagacgtgaccccagcccctgtggagggggtgctggcccccagccccgcccgcctggcccctgggcctgccaaggatgacactgccagtcacgagcccgctctgcacagggatgacctggagtcccttctgagcgagcacaccttcgatggcatcctgcagtgggccatccagagcatggcccgtccggcggcccccttcccctcctgaccccagatggccgggacatgcagctctgatgagagagtgctgagaaggacacctccttcctcagtcctggaagccggccggctgggatcaagaaggggacagcgccacctcttgtcagtgctcggctgtaaacagctctgtgtttctggggacaccagccatcatgtgcctggaaattaaaccctgccccacttctctactctggaagtccccgggagcctctccttgcctggtgacctactaaaaatataaaaattagctgggtgtggtggtgggtgcctgtaatcccagctacatgggagcctgaggcatgagaatcacttgaactcgggaggtggaggttgcagtgagctgagattgcgccactgcactccagtctggtcggcaagagtgagactccgtctcaaaaacaaaacaaaaaaaccacataacataaatttatcatctcgaccacttttcagttcagtggcattcacatctcatgtaaccattgccaccaccatctgcagagctgttccagcttcctgaatggaaactctggccccatgaaacactcactccccattcccctcccaacccctggcaccctccactctactttctgtctctatgacttctccagggacctcatggaagtggaatcacacagtatctgtccttttgtgtctgtcttattttactcagcatggtggccccaaggttcatccatgttgtagcatgtgccgaaatctgcttccttttttaaggctgagtaatattccagcacatggatggactgcattgtgttcatctatgctttcctcagcagacacctgggtgcttccaccttttggctgttgtgagtaatgctgctatgaatatgtgtgtgcaaatatctgtgtgagtctttgagtaaaatcgctggatcaca

SEQ ID NO: 252797 - DNA, 2111 bp, Homo sapiens
agagaaagtgaggtcttctcaggctcttaagagcatggcgtttggtccaggctgtacccgctgctctcagctgggcccgtgggtgggccgggcgcccctgctatagccaggaggtcaaggatccactgggaatgccatgctcatctttcgtccccagcatggtttcttaatggggtagaagcaggtcgggagagacctccctgggcctggccccactgccctgtgaggaagggttcatgtggttggtgtacagttccggggcccctggaacgcagcagcctgcaagaaaccgggttttcttcccaatagggatggccccggggggtgtctgttggagaccagatggatggggaacaggtggtcagggcagaatttcaggccctggcagcatgggagcagggcagagactggggagttcaggtacccagagatgctgctgggggagctgttttgggaaggaggtggctctcaggagggtgctgcaccccagcccagtctgcatgggcgtctcttgcctgtgccagaagaatgaggacgagtgtgccgtgtgtcgggacggcggggagctcatctgctgtgacggctgccctcgggccttccacctggcctgcctgtcccctccgctccgggagatccccagtgggacctggaggtgctccagctgcctgcaggcaacagtccaggaggtgcagccccgggcagaggagccccggccccaggagccacccgtggagaccccgctccccccggggcttaggtcggcgggagaggagccccgctgccagggctggactcctcggccctgcaccccctactgtgtgtgggtcctgagggtcagcagaacctggctcctggtgcgcgttgcggggtgtgcggagatggtacggacgtgctgcggtgtactcactgcgccgctgccttccactggcgctgccacttcccagccggcacctcccggcccgggacgggcctgcgctgcagatcctgctcaggagacgtgaccccagcccctgtggagggggtgctggcccccagccccgcccgcctggcccctgggcctgccaaggatgacactgccagtcacgagcccgctctgcacagggatgacctggagtcccttctgagcgagcacaccttcgatggcatcctgcagtgggccatccagagcatggcccgtccggcggcccccttcccctcctgaccccagatggccgggacatgcagctctgatgagagagtgctgagaaggacacctccttcctcagtcctggaagccggccggctgggatcaagaaggggacagcgccacctcttgtcagtgctcggctgtaaacagctctgtgtttctggggacaccagccatcatgtgcctggaaattaaaccctgccccacttctctactctggaagtccccgggagcctctccttgcctggtgacctactaaaaatataaaaattagctgggtgtggtggtgggtgcctgtaatcccagctacatgggagcctgaggcatgagaatcacttgaactcgggaggtggaggttgcagtgagctgagattgcgccactgcactccagtctggtcggcaagagtgagactccgtctcaaaaacaaaacaaaaaaaccacataacataaatttatcatctcgaccacttttcagttcagtggcattcacatctcatgtaaccattgccaccaccatctgcagagctgttccagcttcctgaatggaaactctggccccatgaaacactcactccccattcccctcccaacccctggcaccctccactctactttctgtctctatgacttctccagggacctcatggaagtggaatcacacagtatctgtccttttgtgtctgtcttattttactcagcatggtggccccaaggttcatccatgttgtagcatgtgccgaaatctgcttccttttttaaggctgagtaatattccagcacatggatggactgcattgtgttcatctatgctttcctcagcagacacctgggtgcttccaccttttggctgttgtgagtaatgctgctatgaatatgtgtgtgcaaatatctgtgtgagtctttgagtaaaatcgctggatcaca

SEQ ID NO: 252798 - DNA, 321 bp, Homo sapiens
actctcctaagtgtatgatctgactgcctctcccgaccctttcccaatttaatctgcccaggtggagtccatattcgccccatggtgcactcctgcagggcttcctcccatgcctgcccttgatcacattctagaattcaccaggagcccagcaggaagatctgcctggcctcacagatggctaccttttgaaatattttgggccagacacagtggctcacacctgttatcccagcactgtgtgaggcagagatgggaggatcacatgaggctaggagttagagaccagcttgggcaacaagacttgtctctaccaaaaaa

SEQ ID NO: 252799 - DNA, 453 bp, Homo sapiens
tgacgttttgtacaccctttgtgacatgaaaagtcacacccccctagtatattacgaataatatcaaaggcagttgatgcacacggtgtacacatcctgttacattaggcttaatctttttctgtgatttatgaataatatcacagaaggtgtacacacatggtgtacactccaggtgacattaggagcaacatccccccaatatattagaaataatattaccagggttgcatacacatggtgtactctccctgtgacagtagcagcaacattcagctggaatattacgaataacatcagagggggtgtacacacataacgtacgcaacttgtaaaattaggagtagcatctccctacgatgttatgaataatatcacagaatgtgtacacacatggtgcataccccatgtgatgttaggagttacatccttctagtatgttaggaataatac

SEQ ID NO: 252800 - DNA, 822 bp, Homo sapiens
ggagatgaggcgggaggacttggggacagctgtggggacacggcccagatgttctggtcccagcagaagtgactggcggggaccaggatgctggagggtcagctcgaggccagggagcccaaggagggcacccacccagaggacccgtgcccgggagctggggctgccatggagaagacacctgcagcagccgaggtccccagggaggacagcaatgccggggagatgccgtcattacagcagcagatcaccagcctccaccaagagctcgggagacagcagtcgctgtgggctgatattcacagaaaactccagagtcatatggatgccttgaggaagcagaaccgggagctccgagaagagctgagaggcctgcagcggcagcagtgggaagccgggaagaaacccgcagcgtccccacacgcggggcgagaatcacacactctggcattggaacctgcttttggaaaaatttcacctctgtcagctgatgaagagacaacgcccaaatacgctggccgcaagagtcagagtgccactctcctgggacaaagatggtcatctaaccacttagctcctccaaagccaatgagtttaaagacagaaagaattaactcggggaaaacaccaccacaggaagatagagagaaaagtcctcccgggagacgtcaagacagaagtccagcacccactggaaggccgactcccggtgcagaaagacgggaggtgtctgaagacggaaagattatgcatccatcttcccgaagtctgcaaaactccggtggcagaaaatcaccagtgcaggcttcccaggccgccacg

SEQ ID NO: 252801 - DNA, 624 bp, Homo sapiens
ggagatgaggcgggaggacttggggacagctgtggggacacggcccagatgttctggtcccagcagaagtgactggcggggaccaggatgctggagggtcagctcgaggccagggagcccaaggagggcacccacccagaggacccgtgcccgggagctggggctgccatggagaagacacctgcagcagccgaggtccccagggaggacagcaatgccggggagatgccggtgagctgatctctgtggggatagagttagtcccaccaggcgggaccctgattcctgtccctgaggcctgtcattggacttccctcgccagacccctgtaggaatgcgccaccctgggacgctgatgctaaacttcctctcagaggggcacgtggctcttttcccctctgcaaccttctctctttgttgatgggaggcaggacacagagttaaagaaaatattaacattccagcttttctcttctaatccaggagaaggcaccagactttaaaaacttcattaaagaaaatcaggttgacatgcctcacatcatcccagcaaccaccttcctcactggaccctgttggacagtgcttgctctcatgaaagtgccatgggtctctgtggccagg

SEQ ID NO: 252802 - DNA, 962 bp, Homo sapiens
ggagatgaggcgggaggacttggggacagctgtggggacacggcccagatgttctggtcccagcagaagtgactggcggggaccaggatgctggagggtcagctcgaggccagggagcccaaggagggcacccacccagaggacccgtgcccgggagctggggctgccatggagaagacacctgcagcagccgaggtccccagggaggacagcaatgccggggagatgccgtcattacagcagcagatcaccagcctccaccaagagctcgggagacagcagtcgctgtgggctgatattcacagaaaactccagagtcatatggatgccttgaggaagcagaaccgggagctccgagaagagctgagaggcctgcagcggcagcagtgggaagccgggaagaaacccgcagcgtccccacacgcggggcgagaatcacacactctggcattggaacctgcttttggaaaaatttcacctctgtcagctgatgaagagacaacgcccaaatacgctggccgcaagagtcagagtgccactctcctgggacaaagatggtcatctaaccacttagctcctccaaagccaatgagtttaaagacagaaagaattaactcggggaaaacaccaccacaggaagatagagagaaaagtcctcccgggagacgtcaagacagaagtccagcacccactggaaggccgactcccggtgcagaaagacgggaggtgtctgaagacggaaaggtgacctcggaaacctgggtcactctacactggcagcatggaaaattcagattcagatgaagttccacttaggtctcataagagtactcaatttgttattcgaaatagacctagtaatttattaacctaattatgtttctatagataaaactttgaatttctgcagacatgtctttaatgctataaaagcaaataaattgaattgggttttaaaaagc

SEQ ID NO: 252803 - DNA, 490 bp, Homo sapiens
ctttcttaatttaaggctaaccctcaatttgccaagtctcatttactcctcataattcagaagcaaacacctctactgagtttctgtactttttaagttaatatagtcatttgcataggttaagtaaaaatctgttttccttttactaagatataattggaaatattaatcataaatccaagattatacctacagtgtcatattgagaatgcttctcatttagtcaaggtacaccaagctcacacttaggaaatacgtttgcatagagagccaatgctcggagaaaacgctcagcgaaactggccacgttacctgttacatatttctagcttcatcagtaaggaatacccgtcctgacagaccaaagatcttagcagattttacacatcacaagcaaagtagaattccccaatgttaagggaaaaactttcttgggcttggtttcctggtcttggtataaaaaattaaataatacatacttatacaaatt

SEQ ID NO: 252804 - DNA, 354 bp, Homo sapiens
atagtaactacaaccagtcttccatcattccatggaaattgcatgtatgccacgttgccttctcagtttccaagggaccaattaatgaacaggctactcacattttcagcatcctactcctgacacactcccacccttctttctatttatctgtgattcatagagatttgcctatgactggattcctgaggagaaaaaagtctggattacagatggcattccttgttatggaaggcccttccttctgaaagtctatttctatcatgttctttccctgtgctgtcaaagggtcacccctttgtacaaaggagaagagaaatccatcaagtaaataaaatttcatttacctttgta

SEQ ID NO: 252805 - DNA, 476 bp, Homo sapiens
tctgaaatacttaatcacagacctaaaatgtagatctatgggtaattttaaatgttgcctgtcaaggcttaatagggacttgacaacagctaggatggaaattatttcaacacttaaatatgcttactttgtgccggacgctgttctaagtcttttacaaatatttacttgatatttgtattttgtgtactattttgatttctgcaacattattaggcttcatactcttctgtgggaactgggttcaaatggttccagatgaaaatacaaatagtcctgtgattagttttgttctacatcttatgacagatacttcatgaaaggaaatatgaaaaggccacatcttgctttgaaataagtgagatggagcctctccctctttttactgttaatgttcatagttttaaaaatcctagaattttgctgcttttcaaaatgttaagttggaaagcaagaataaaatgacccttttttca

SEQ ID NO: 252806 - DNA, 374 bp, Homo sapiens
tgagcaaagggttccagactggttattatcaagtatttgtagtgaaagtcactatgcaagaagtgaaagaatgataggattttgggaaagaatcataactactgtttcacaaggtttagtagcaagaagacaagacaaattgaaccttgggagactgccagcatgaggaaaggctttgtcaggagacagagaaatgaaggcacgtttgtgggcagagcaaatgtaagaagaaaggcagaaatatggacaatgattaattaatgaaataagttttaaagaacagaaaaaaagggttaatatcgaagtccagatagtgagttaagcactaaaataggaaggcaatatgtctgtttttatcttttctttgagacagt

SEQ ID NO: 252807 - DNA, 610 bp, Homo sapiens
gaagagaagactttctagtggatcccagtagtgaaggttctaagctaaaactgggcagcatttgggcacttcaggatgtctgtatcctgagctagacgcatgttaagaatgtattatgcctttcacgtttatcttgtgtgatgtgttagaatgatacaaaagacataaaactaggtccccccacccccattgaggaggaagaggttgacatcagtcatacttgcagtcaccctaatgcccaactcagtgtctgcattcaagaagttctagtatagtagtgaggatagtaaggatacttagcccacggtcatcagaaagggacaaatattctggggcttgtaggacgagaaaggggatcagagataacagtcacttggtcagatgataccgtatattttaaaatgcttcttgctgtaaacttgtgtgctatagctgtgtctaagccttaaacatcctagatggttttttcttaattgtgtcattattcatagtttttttgtgctaaggactggtcattgtttactgccaaggagagggtccttgaaagagaaagggaaagtactgcccaaaccttcatatgtggcattagaaggacttggccttttgtcat

SEQ ID NO: 252808 - DNA, 393 bp, Homo sapiens
aagaaagggctggaaagtgagacaaagaaagacccttggttaaaacaactcccccaggtggccccattgcctgccctgagaggcacccacagttccctgcaggtgggggaagaggccaagcaggagtgggcaggacaggcagggatagctgctttcccttccccaaatgcagccggccggagtgaccaacccatgaatcttgctacttaaactctgaccttctttggtagccatgaagcatatgccactctttgggtgccttttcctttattgtgagaacatggttggagtggaagggaaacacctggaccttgattgctatgattgactctgcctttagctggggacctgagtactgaacgtgccccagaggttgtctcagaaaagagaaag

SEQ ID NO: 252809 - DNA, 504 bp, Homo sapiens
aaaaaagaaattaaatgaaagttaaaaatttagtctctcagtgtattgatttgctagggcagccatgacagtctcacagatggagaggcttgaaaacagacatttatgctgccataattctggaagccagaagtctgagatgaaggtgtgagtagggctgggtcctcctgaggctgacggggatctgcccaggcctctcccagttcctgctggtggccggcgtccttgatgttccttggcttggagaagcgtcagccgcatctctgcctccatctccacaaggcgccctccctgggtctgtatccaaactcccccaactccttcaaccttttttattttaagagatgaggggccgggcgccgtggctcacgcctgtaatcccactactctggaggctgagtcaggagaatggcgtgaacccgggaggcagaacttgcagtgagcggagatcaggccactgcactccaccctgggcgacagagagagactccgtctcaaaaaaaa

SEQ ID NO: 252810 - DNA, 639 bp, Homo sapiens
aaaaaagaaattaaatgaaagttaaaaatttagtctctcagtgtattgatttgctagggcagccatgacagtctcacagatggagaggcttgaaaacagacatttatgctgccataattctggaagccagaagtctgagatgaaggtgtgagtagggctgggtcctcctgaggctgacggggatctgcccaggcctctcccagttcctgctggtggccggcgtccttgatgttccttggcttggagaagcgtcagccgcatctctgcctccatctccacaaggcgccctccctgggtctgtatccaaactcccccaactccttcaaccttttttattttaagagatgaggggccgggcgccgtggctcacgcctgtaatcccagcactttgggaggccgaggtgggcggatcacgaggtcaggagatagagaccatcctggctaacacggtgaagccccatctttactaaaaatacaaagaattagccaggcgtggtggcgggtgcctgtagtcccagctactctggaggctgagtcaggagaatggcgtgaacccgggaggcagaacttgcagtgagcggagatcaggccactgcactccaccctgggcgacagagagagactccgtctcaaaaaaaa

SEQ ID NO: 252811 - DNA, 240 bp, Homo sapiens
tacattggcagctgcctcgtctaaatcaacacattccatgtgcatcttctatccttgggtttaatgttgctaaatgagtaactctagcatttgtacaagaccccctaagactctggcagcagtcgaccaagcccagggacataattgaatctggagattcctgaggccttgttttgaaaaagacttgaaatacacataggaagaaaggcccaaaaataaatgttcacttgtctctgcaaa

SEQ ID NO: 252812 - DNA, 193 bp, Homo sapiens
tcacttcaagacccaagccggctatcacactctgatagaaagtagacatcccttgttttcttgatcaccttgtacttgtatgaaaagaaattaattctgtcattaatgtatgacactaatcatacatcaatactgtatgtattgctttcattcaagagtaaatattcattcaataaattttgtattgagtata

SEQ ID NO: 252813 - DNA, 683 bp, Homo sapiens
tcctgtttgtctgaaatttggaatatgaaccacttttgctttttgagaaaatttaagctattatccagtaactcgtctggatctgcactgcagtagcagtgttgtggcttcagtagccatctgcttcgagatggaaagtctttggtacccatggcagtggaggagatagggaatggctttaattatgtctgccatcacacagctatgtgaatttgatctacaactttaaacagaaaagagaaatttacagccaatctacagtctatattaataggatgtagccaatcaatgacatttccaaactaatgggctataattaccttaaataatgcaaaaatatttatgcaataaagaaaaattaagtcactgtattaaaactttctaaatttatacagcattctttcacataatttgtcatcatttaccaccaagatgcttggacggagccactgacagataacttggctcactcaaactggttcagctccactcagggcagacagtttagggaagtgagaaaatgcaggggtctttgcctgttcccaaatccctactgatatcctcacaactggaagttggaaggcaaggaagcaaaaccttcccctgaagacagagagagggctgagtgaagactaaccttttagggaagatggaaattcaagtgtaaattaattttaaaaata

SEQ ID NO: 252814 - DNA, 176 bp, Homo sapiens
gacgagtggtgaccaccccttccagcaggcaggttcccagccccagccaagcagtgtttctccaggagccggacagcctctctgtctccatggcagccttcctatctgctggcctcggcatacttgcaccctcagagacctaccccctacctacaaccagctctggctgggagccc

SEQ ID NO: 252815 - DNA, 480 bp, Homo sapiens
  misc_feature (152)..(152): n is a, c, g, or t
aaaacttcctcgagtcagcctctccaggcccagctcctcctgcctcccagtggcctctttcggcccagcccagctcatggctctcggcagtcttcccaggccccgcttttgacttttggtggcctcttcaggcccagaacttgacctccagntcgccttggcaggcccgcctcctgcctctcgaaggcctacacgggcccagcctcggcttcacagtggactctccacgcccagctagtctcgcctcactgcagcctccccagtccaaagctcctcgtttcggccacttcggcaggccagctcctgctggccagtgcctctttaggcccagctcattcctcacaagcctttccaggccccgtttttcccttctggcagcctcttggcctctaatttttttatctttcgtgtataaatcccaaaatatggaattttggaatatttccaccattatataaatattttggtaggtaatttatt

SEQ ID NO: 252816 - DNA, 211 bp, Homo sapiens
catgattccctctgttgtagctgggtacaaaataagccattgccccaaagagactgttctttcttgatggaaaaaaaagttattgagaaaataattggggaaaacaaatgtgtttcatgaaaaagaaaactgtttaaggtgatttcctttaagcctaagtgtttatggaattagattagtaatgtctcaaaataaattaagttttaagttt

SEQ ID NO: 252817 - DNA, 221 bp, Homo sapiens
gcacattttgtttttcaggtaaatactttttaaaatggaagaaaaaatagaaatgctaggcctgtcatttaaatcctgaaaattacagaaaacttagcacccagctgccagtgtgctatgaggactaactcacatcatgtaatatttcctgaacagtgctctgtaacagacttctgaacacatagtacgtgctcaataaagattgtattaactcatgtgta

SEQ ID NO: 252818 - DNA, 1236 bp, Homo sapiens
agccctgcgcagcctccttccgtctgtaactcacctaaagacccaagacctgcgacatccgtagaccgcgcccgctatgcacagctaaagagcactcacccctcgcgcaccagtcccggcccggcagccgctgccccgggctcgactgggcgctgctaccgccatcagcaagagcaggagcagccgggttgccccagcgctggctgccgccatctcggcttcttcccaccagcgaagggacggctgtgagccaagagccgcggagcacgccgggaggaacaggccgcatcctgacgcccgtgcgcctgcgctgggccccggcacctgcgcactggcacccgtccgcacctggggcctgacgtcagcaggatggggccgcccctttggcctgatctccaggagccgccccctccagggacgtcatcacaaatcaggagcccgctcttgtgtgacgtcataaagcccgctccgcatcatgacgtcacagtgcgcgtagtcccgccccctcgctttctccctctgctcctccgtccgctcccgtcggacggggacattgcaatgaggcgggatcgcggccctaagccggccctgggtggagctggcgaggtggaaccaggtgggatggcagcctctcccacgggccgtcccagacggctccaacgctacctccagagcggcgaattcgaccagtttcgggacttccccatctttgagagcaacttcgtacaggtgactcggttgggagaagttgccaacgaggtcaccatgggggtggcagcctccagtccagccctggagctcccggacctattgcttctggccggccctgccaaggagaacggacacctgcaactcttcgggctgttccccttgaagttcgtccagctctttgtccacgacaaaagccggtgtcagctcgaggtcaagttgaacaccagccgcaccttctacttgcagctgcgggccccactcaagacccgagaccgagagttcggccagtgggtgcggctgctctaccgcctgcgcttcctctctgcttctgctgtgcccttcacgcaggagtaagagccccaaggcgtggaagccagacttgaccccaagacctctgaactctggggactctgagtcttccagcatccttcaaggtcaccgaatgaccagagatcaaagtaccttgcctcagggccgggcagatgagatattaaagttaataaaggtcagtccattaagaaccaa

SEQ ID NO: 252819 - DNA, 1284 bp, Homo sapiens
agccctgcgcagcctccttccgtctgtaactcacctaaagacccaagacctgcgacatccgtagaccgcgcccgctatgcacagctaaagagcactcacccctcgcgcaccagtcccggcccggcagccgctgccccgggctcgactgggcgctgctaccgccatcagcaagagcaggagcagccgggttgccccagcgctggctgccgccatctcggcttcttcccaccagcgaagggacggctgtgagccaagagccgcggagcacgccgggaggaacaggccgcatcctgacgcccgtgcgcctgcgctgggccccggcacctgcgcactggcacccgtccgcacctggggcctgacgtcagcaggatggggccgcccctttggcctgatctccaggagccgccccctccagggacgtcatcacaaatcaggagcccgctcttgtgtgacgtcataaagcccgctccgcatcatgacgtcacagtgcgcgtagtcccgccccctcgctttctccctctgctcctccgtccgctcccgtcggacggggacattgcaatgaggcgggatcgcggccctaagccggccctgggtggagctggcgaggtggaaccaggtgggatggcagcctctcccacgggccgtcccagacggctccaacgctacctccagagcggcgaattcgaccagtttcgggacttccccatctttgagagcaacttcgtacagttctgccccgacatctatcctgccccgacctctgacctctggccccaggtgactcggttgggagaagttgccaacgaggtcaccatgggggtggcagcctccagtccagccctggagctcccggacctattgcttctggccggccctgccaaggagaacggacacctgcaactcttcgggctgttccccttgaagttcgtccagctctttgtccacgacaaaagccggtgtcagctcgaggtcaagttgaacaccagccgcaccttctacttgcagctgcgggccccactcaagacccgagaccgagagttcggccagtgggtgcggctgctctaccgcctgcgcttcctctctgcttctgctgtgcccttcacgcaggagtaagagccccaaggcgtggaagccagacttgaccccaagacctctgaactctggggactctgagtcttccagcatccttcaaggtcaccgaatgaccagagatcaaagtaccttgcctcagggccgggcagatgagatattaaagttaataaaggtcagtccattaagaaccaa

SEQ ID NO: 252820 - DNA, 1421 bp, Homo sapiens
agccctgcgcagcctccttccgtctgtaactcacctaaagacccaagacctgcgacatccgtagaccgcgcccgctatgcacagctaaagagcactcacccctcgcgcaccagtcccggcccggcagccgctgccccgggctcgactgggcgctgctaccgccatcagcaagagcaggagcagccgggttgccccagcgctggctgccgccatctcggcttcttcccaccagcgaagggacggctgtgagccaagagccgcggagcacgccgggaggaacaggccgcatcctgacgcccgtgcgcctgcgctgggccccggcacctgcgcactggcacccgtccgcacctggggcctgacgtcagcaggatggggccgcccctttggcctgatctccaggagccgccccctccagggacgtcatcacaaatcaggagcccgctcttgtgtgacgtcataaagcccgctccgcatcatgacgtcacagtgcgcgtagtcccgccccctcgctttctccctctgctcctccgtccgctcccgtcggacggggacattgcaatgaggcgggatcgcggccctaagccggccctgggtggagctggcgaggtggaaccaggtgggatggcagcctctcccacgggccgtcccagacggctccaacgctacctccagagcggcgaattcgaccagtttcgggacttccccatctttgagagcaacttcgtacagttctgccccgacatctatcctgccccgacctctgacctctggccccaggtgactcggttgggagaagttgccaacgaggtcaccatgggggtggcagcctccagtccagccctggagctcccggacctattgcttctggccggccctgccaaggagaacggacacctgcaactcttcgggctgttccccttgaagttcgtccagctctttgtccacgacaaaagccggtgtcagctcgaggtcaagttgaacaccagccgcaccttctacttgcagctgcgggccccactcaagacccgagaccgagagttcggccagtgggtgcggctgctctaccgcctgcgcttcctctctgcttctgctgtgcccttcacgcaggagtaagagccccaaggcgtggaagccagacttgaccccaagacctctgaactcagagtccccagagttcggccagtgggtgcggctgctctaccgcctgcgcttcctctctgcttctgctgtgcccttcacgccaggagtaagagccccaaggcgtggaagccagacttgaccccaagacctctgaactctggggactctgagtcttccagcatccttcaaggtcaccgaatgaccagagatcaaagtaccttgcctcagggccgggcagatgagatattaaagttaataaaggtcagtccattaagaaccaa

SEQ ID NO: 252821 - DNA, 1187 bp, Homo sapiens
agccctgcgcagcctccttccgtctgtaactcacctaaagacccaagacctgcgacatccgtagaccgcgcccgctatgcacagctaaagagcactcacccctcgcgcaccagtcccggcccggcagccgctgccccgggctcgactgggcgctgctaccgccatcagcaagagcaggagcagccgggttgccccagcgctggctgccgccatctcggcttcttcccaccagcgaagggacggctgtgagccaagagccgcggagcacgccgggaggaacaggccgcatcctgacgcccgtgcgcctgcgctgggccccggcacctgcgcactggcacccgtccgcacctggggcctgacgtcagcaggatggggccgcccctttggcctgatctccaggagccgccccctccagggacgtcatcacaaatcaggagcccgctcttgtgtgacgtcataaagcccgctccgcatcatgacgtcacagtgcgcgtagtcccgccccctcgctttctccctctgctcctccgtccgctcccgtcggacggggacattgcaatgaggcgggatcgcggccctaagccggccctgggtggagctggcgaggtggaaccaggtgggatggcagcctctcccacgggccgtcccagacggctccaacgctacctccagagcggcgaattcgaccagtttcgggacttccccatctttgagagcaacttcgtacagttctgccccgacatctatcctgccccgacctctgacctctggccccaggtgactcggttgggagaagttgccaacgaggtcaccatgggggtggcagcctccagtccagccctggagctcccggacctattgcttctggccggccctgccaaggagaacggacacctgcaactcttcggctgcgggccccactcaagacccgagaccgagagttcggccagtgggtgcggctgctctaccgcctgcgcttcctctctgcttctgctgtgcccttcacgcaggagtaagagccccaaggcgtggaagccagacttgaccccaagacctctgaactctggggactctgagtcttccagcatccttcaaggtcaccgaatgaccagagatcaaagtaccttgcctcagggccgggcagatgagatattaaagttaataaaggtcagtccattaagaaccaa

SEQ ID NO: 252822 - DNA, 1465 bp, Homo sapiens
  misc_feature (1290)..(1290): n is a, c, g, or t
agccctgcgcagcctccttccgtctgtaactcacctaaagacccaagacctgcgacatccgtagaccgcgcccgctatgcacagctaaagagcactcacccctcgcgcaccagtcccggcccggcagccgctgccccgggctcgactgggcgctgctaccgccatcagcaagagcaggagcagccgggttgccccagcgctggctgccgccatctcggcttcttcccaccagcgaagggacggctgtgagccaagagccgcggagcacgccgggaggaacaggccgcatcctgacgcccgtgcgcctgcgctgggccccggcacctgcgcactggcacccgtccgcacctggggcctgacgtcagcaggatggggccgcccctttggcctgatctccaggagccgccccctccagggacgtcatcacaaatcaggagcccgctcttgtgtgacgtcataaagcccgctccgcatcatgacgtcacagtgcgcgtagtcccgccccctcgctttctccctctgctcctccgtccgctcccgtcggacggggacattgcaatgaggcgggatcgcggccctaagccggccctgggtggagctggcgaggtggaaccaggtgggatggcagcctctcccacgggccgtcccagacggctccaacgctacctccagagcggcgaattcgaccagtttcgggacttccccatctttgagagcaacttcgtacagttctgccccgacatctatcctgccccgacctctgacctctggccccaggtgactcggttgggagaagttgccaacgaggtcaccatgggggtggcagcctccagtccagccctggagctcccggacctattgcttctggccggccctgccaaggagaacggacacctgcaactcttcgggctgttccccttgaagttcgtccagctctttgtccacgacaaaagccggtgtcagctcgaggtcaagttgaacaccagccgcaccttctacttgcagctgcgggccccactcaagacccgagaccgagagttcggccagtgggtgcggctgctctaccgcctgcgcttcctctctgcttctgctgtgcccttcacgcaggagtaagagccccaaggcgtggaagccagacttgaccccaagacctctgaactctggggactctgagtcttccagcatccttcaaggtcaccgaatgaccagagatcaaagtaccttgcctcagggccgggcagatgagatattaaagttaataaaggtcagtccattaagaaccaaaaaaanaaaaaaaagaaaaaaaaagtgggggctttttaaagtgggggggggaaaaagggggtattggaagtgggcatgggtcaatagggggtttcgggacccagggtttttggtcacaggggggcaattgggggggctcgcaatagggggcggataaatgcgaagagcaggttacctgttc

SEQ ID NO: 252823 - DNA, 1139 bp, Homo sapiens
agccctgcgcagcctccttccgtctgtaactcacctaaagacccaagacctgcgacatccgtagaccgcgcccgctatgcacagctaaagagcactcacccctcgcgcaccagtcccggcccggcagccgctgccccgggctcgactgggcgctgctaccgccatcagcaagagcaggagcagccgggttgccccagcgctggctgccgccatctcggcttcttcccaccagcgaagggacggctgtgagccaagagccgcggagcacgccgggaggaacaggccgcatcctgacgcccgtgcgcctgcgctgggccccggcacctgcgcactggcacccgtccgcacctggggcctgacgtcagcaggatggggccgcccctttggcctgatctccaggagccgccccctccagggacgtcatcacaaatcaggagcccgctcttgtgtgacgtcataaagcccgctccgcatcatgacgtcacagtgcgcgtagtcccgccccctcgctttctccctctgctcctccgtccgctcccgtcggacggggacattgcaatgaggcgggatcgcggccctaagccggccctgggtggagctggcgaggtggaaccaggtgggatggcagcctctcccacgggccgtcccagacggctccaacgctacctccagagcggcgaattcgaccagtttcgggacttccccatctttgagagcaacttcgtacaggtgactcggttgggagaagttgccaacgaggtcaccatgggggtggcagcctccagtccagccctggagctcccggacctattgcttctggccggccctgccaaggagaacggacacctgcaactcttcggctgcgggccccactcaagacccgagaccgagagttcggccagtgggtgcggctgctctaccgcctgcgcttcctctctgcttctgctgtgcccttcacgcaggagtaagagccccaaggcgtggaagccagacttgaccccaagacctctgaactctggggactctgagtcttccagcatccttcaaggtcaccgaatgaccagagatcaaagtaccttgcctcagggccgggcagatgagatattaaagttaataaaggtcagtccattaagaaccaa

SEQ ID NO: 252824 - DNA, 639 bp, Homo sapiens
gcccttacacacttccaacttttgctttgtgctgctttatttctcttctctgttttctgccaaccagaaaactgttttcctactgttggacaagctgttcaacagtgtcttcagatcttagctagttttgttgatattttctgttctttctccagagagagagagagagactgggtgagactgagacatcctactacttgtgtgtttaaggctaatctggctgctaaaggcagctggaagctgcttggtcttcagctcctcttgcatgtcagtaaaagcaagacacagctggtctcaataaacagactatccacaagtgatgtttgcaaagttaaggttgggaggtggaagctccatctcctgaccatccaaagactggtggatgcctaaatccaacatattaatacaatgagtgctacagagataaccaaaggtacaatgctagaacagttacttttggttatcagaggcctgcacttgatcaagttctaggcacacagtactgacatttaaatttaaatgctatatgtaaacttcccatctgttcagctgccttccttgtaaaataaaaataaaacttgtcttaatcttctcagaaaaattcactgctacatagctaccttcaatgtaagaaagtag

SEQ ID NO: 252825 - DNA, 418 bp, Homo sapiens
cctggtgggggctggtgctgcagtttcgtcagcccttggctccgggctctgcaggcggaatcccgagcctgcgtgagggccgccctggcctcggcgtgtgtcctgggaaggggcgttggaagcctctctgcttgtcttggctgcctctgctcgctcagctctgcccccactggggccgccagcctctgcactcccccttggaggagccaggcagggtttgggtcggagctggggtagaggaaggctccaggcggcttgccgcaggatctccctgctgtagccagcccttggggcgctcagcagggtgggggaccatcagtcagggtgggggaccctcagtcaggataggggggctcctgttctttccactgccaccgcactccagtctgggcgacagagcaagactctgtcccccgca

SEQ ID NO: 252826 - DNA, 2319 bp, Homo sapiens
agaaaagaacactataattagaacactaacattggaagtaaaaacgttgtttataagtaattacttgtaaaattttaagtgaaatgtttttcttcaggcatgtcttcaggcttttgaaaagttcacaaataagaaaacctgtcctctctgtagaaagaaccagtatcaaacccgagtgatacacgatggggcccgcctgttcagaatcaagtgtgtgaccaggtgaggacgccaggcccgtttggcgctaagcagacacagatcaggctatgacaactaacttgttttttgaatagtgggattttatctctcttcttggccaccataatttccccagggccttgtacagcacagggcttataacaactactgaagtattggttgacatagagtcatcataaattagtcattttcaaatatctgtgttttagaatccaagcctactggagaggatgtgttgttagaaagtggtacagaaacctgaggaaaacagtacctcccacagatgccaagttaagaaaaaaattctttgaaaaaaaggtaggtaaagatcattatgttctccagatatggtctccgtgcgggtggttcacttggggtcaggaaggctaacagaggtggtaaaactttgagacttacttcactttgagggctttttaaaaatgggtgagatgctgctaaaaatcctgtttaactttagttggctttccaacctagatgttcaaatacttctagactttcttttctagttaaatcataaaattaggttaaatcaaagcaacttctgtttggccattttgtgctaattgtttaaataaacttatctcttcagacacaagactggaaaccagcttaatttttcccatctcctgggctatatgtaaatgaagacatctgctgcacatctcatagtaatgaaaatagaagctgcctataaaaataaagcccccacatgctaccattgtattgagtacctcgtggggtcatcacaatgagctttagagctaacttccatgtctacccttcctcttaaccactatttatgctttagttttacttttgggggacttatttaacaatttcccattccttgtccccatatgaaaaggacagtcctaccccatcagcctgtggcttcaggcaaacagcagcagctccgaggctgtcatatgaaagccatcacttcttcctggcagtgttggcctgagaagagctgtagcatttataatggcccagcacacagtaggtgctggaaattctgtatttattatcactattaactcctttcctagaatatggagatgagttactgtgtgttctgttcctgagagcagtgtctctgatcttcagagatcattcgtctcgggtgttcattctcaatttggtaaaggaccgccatgcacgattgcgtcatccttcctttacattctttccagttttttatcttcagtcgttgacagtcagttgtgttctctgggctactcttagtaatttctaatatgtcatagtaggttgtctcttaaatcagaagtgattttttgtcacctcttatacaattttaattacagatttgatagtcattttaccttatatatataaatatttttcatgtgcacacatcattttataagaactcttgaagataaaggcccactgaaagtgttggtggtctcagcccattgaactggacgagaactggcccaggttgctggaaacaagtgaagcaaccattacaatgtgccttgtgttatcttgtaaagtagccagtgaaggttaagtttcagcgttcagtgctcaggtgttcaaatgctgcagccttcagcttcatggaaaaaggaaacgaaaaataacaaaaagcaagtgaccaagagcagtcggggcagggagacctgatcaaacaagttcctcagtttctaattcagtgtctcccacagagagatggaactttacaaggcagattcatagctctgtcccactggacgttgggtccgctgccctgtggccatcccacctccccacaaatactgttttttgttttatccttggttcatcccaactgctgcctcctcgtcctgagccctcatcgctcggaacgccccgctctgatccccgtgtctgcttttctgagcacactcttgcccgcccccgcatgtcctgcccgttcctactggttccctctgccttgcttaaaatgtgccagtttttcaaagcctagctgaagctttcttccaatttctttggtcttctctaaacctctattgtatgtttaaacaacaccatctaagagatcaagaagaacagaagtatgaatgctattct

SEQ ID NO: 252827 - DNA, 2306 bp, Homo sapiens
accctggaacgggaacgaccacagccaccgcagggaaacaaccggggcccaggcccagcagaagaatagaaggaaggtgataggatgtgatgatagaatttgtgatagccaagcaacaacttttcctaattcggcatgttaaaaaataagggtcactcatctaagaaagataacttggcagtcaatgcagttgctttacaagatcacattttacatgatcttcaacttcgaaatctttcagttgcagatcattctaagacacaagtacaaaagaaagagaacaaatctctaaaaagagatacaaaggcaataatagatactggacttaaaaaaactacacagtgccccaaactagaagactcagaaaaagaatatgttcttgatcccaaaccgccgccgttgactttggcacagaagttgggcctcattgggcctccaccacctccactgtcatcagatgaatgggagaaggtgaaacagcgctctctcctgcaaggggactccgtgcaaccatgccccatctgtaaagaagaattcgagcttcgtcctcaggtgctgctttcatgctcccatgtgttccacaaagcatgtcttcaggcttttgaaaagttcacaaataagaaaacctgtcctctctgtagaaagaaccagtatcaaacccgagtgatacacgatggggcccgcctgttcagaatcaagtgtgtgaccagaatccaagcctactggagaggatgtgttgttagaaagtggtacagaaacctgaggaaaacagtacctcccacagatgccaagttaagaaaaaaattctttgaaaaaaagacacaagactggaaaccagcttaatttttcccatctcctgggctatatgtaaatgaagacatctgctgcacatctcatagtaatgaaaatagaagctgcctataaaaataaagcccccacatgctaccattgtattgagtacctcgtggggtcatcacaatgagctttagagctaacttccatgtctacccttcctcttaaccactatttatgctttagttttacttttgggggacttatttaacaatttcccattccttgtccccatatgaaaaggacagtcctaccccatcagcctgtggcttcaggcaaacagcagcagctccgaggctgtcatatgaaagccatcacttcttcctggcagtgttggcctgagaagagctgtagcatttataatggcccagcacacagtaggtgctggaaattctgtatttattatcactattaactcctttcctagaatatggagatgagttactgtgtgttctgttcctgagagcagtgtctctgatcttcagagatcattcgtctcgggtgttcattctcaatttggtaaaggaccgccatgcacgattgcgtcatccttcctttacattctttccagttttttatcttcagtcgttgacagtcagttgtgttctctgggctactcttagtaatttctaatatgtcatagtaggttgtctcttaaatcagaagtgattttttgtcacctcttatacaattttaattacagatttgatagtcattttaccttatatatataaatatttttcatgtgcacacatcattttataagaactcttgaagataaaggcccactgaaagtgttggtggtctcagcccattgaactggacgagaactggcccaggttgctggaaacaagtgaagcaaccattacaatgtgccttgtgttatcttgtaaagtagccagtgaaggttaagtttcagcgttcagtgctcaggtgttcaaatgctgcagccttcagcttcatggaaaaaggaaacgaaaaataacaaaaagcaagtgaccaagagcagtcggggcagggagacctgatcaaacaagttcctcagtttctaattcagtgtctcccacagagagatggaactttacaaggcagattcatagctctgtcccactggacgttgggtccgctgccctgtggccatcccacctccccacaaatactgttttttgttttatccttggttcatcccaactgctgcctcctcgtcctgagccctcatcgctcggaacgccccgctctgatccccgtgtctgcttttctgagcacactcttgcccgcccccgcatgtcctgcccgttcctactggttccctctgccttgcttaaaatgtgccagtttttcaaagcctagctgaagctttcttccaatttctttggtcttctctaaacctctattgtatgtttaaacaacaccatctaagagatcaagaagaacagaagtatgaatgctattct

SEQ ID NO: 252828 - DNA, 1748 bp, Homo sapiens
cagcttctattgtgaaataaacacagaagttgggcctcattgggcctccaccacctccactgtcatcagatgaatgggagaagaaagaaccagtatcaaacccgagtgatacacgatggggcccgcctgttcagaatcaagtgtgtgaccagaatccaagcctactggagaggatgtgttgttagaaagtggtacagaaacctgaggaaaacagtacctcccacagatgccaagttaagaaaaaaattctttgaaaaaaagacacaagactggaaaccagcttaatttttcccatctcctgggctatatgtaaatgaagacatctgctgcacatctcatagtaatgaaaatagaagctgcctataaaaataaagcccccacatgctaccattgtattgagtacctcgtggggtcatcacaatgagctttagagctaacttccatgtctacccttcctcttaaccactatttatgctttagttttacttttgggggacttatttaacaatttcccattccttgtccccatatgaaaaggacagtcctaccccatcagcctgtggcttcaggcaaacagcagcagctccgaggctgtcatatgaaagccatcacttcttcctggcagtgttggcctgagaagagctgtagcatttataatggcccagcacacagtaggtgctggaaattctgtatttattatcactattaactcctttcctagaatatggagatgagttactgtgtgttctgttcctgagagcagtgtctctgatcttcagagatcattcgtctcgggtgttcattctcaatttggtaaaggaccgccatgcacgattgcgtcatccttcctttacattctttccagttttttatcttcagtcgttgacagtcagttgtgttctctgggctactcttagtaatttctaatatgtcatagtaggttgtctcttaaatcagaagtgattttttgtcacctcttatacaattttaattacagatttgatagtcattttaccttatatatataaatatttttcatgtgcacacatcattttataagaactcttgaagataaaggcccactgaaagtgttggtggtctcagcccattgaactggacgagaactggcccaggttgctggaaacaagtgaagcaaccattacaatgtgccttgtgttatcttgtaaagtagccagtgaaggttaagtttcagcgttcagtgctcaggtgttcaaatgctgcagccttcagcttcatggaaaaaggaaacgaaaaataacaaaaagcaagtgaccaagagcagtcggggcagggagacctgatcaaacaagttcctcagtttctaattcagtgtctcccacagagagatggaactttacaaggcagattcatagctctgtcccactggacgttgggtccgctgccctgtggccatcccacctccccacaaatactgttttttgttttatccttggttcatcccaactgctgcctcctcgtcctgagccctcatcgctcggaacgccccgctctgatccccgtgtctgcttttctgagcacactcttgcccgcccccgcatgtcctgcccgttcctactggttccctctgccttgcttaaaatgtgccagtttttcaaagcctagctgaagctttcttccaatttctttggtcttctctaaacctctattgtatgtttaaacaacaccatctaagagatcaagaagaacagaagtatgaatgctattct

SEQ ID NO: 252829 - DNA, 2105 bp, Homo sapiens
atgcgcagtatggggcggggcggggcagggctggtgagcaagcccgcggggagcgagcgcggaggcgggcgttgctacggcaacggtgggcggccaggagttgcctgagggaaaaggggcagacgtccctgggttccggtgttcgcggaggagtcgaggcacggagaggcttcgggggagggacggaaagaagggtggcccgccaggcgggcggggtccatggattcggggtgagggccgtccgcggcctcgctttcgcctcctccgagccgggccggcgatggccgcagctgtgaggcgaggtcgggtcccgtagcggcgcgcagcctccttgggggactcggggtcctgtatattttgaatacatctgtcttcataaaatacaccatgtccaaaatctaaaagggccaattccaaattattccaccagctttgaagggaattgaagcaagaataacaagacagaagaatagaaggaaggtgataggatgtgatgatagaatttgtgatagccaagcaacaacttttcctaattcggcatgttaaaaaataagggtcactcatctaagaaagataacttggcagtcaatgcagttgctttacaagatcacattttacatgatcttcaacttcgaaatctttcagttgcagatcattctaagacacaagtacaaaagaaagagaacaaatctctaaaaagagatacaaaggcaataatagatactggacttaaaaaaactacacagtgccccaaactagaagactcagaaaaagaatatgttcttgatcccaaaccgccgccgttgactttggcacagaagttgggcctcattgggcctccaccacctccactgtcatcagatgaatgggagaaggtgaaacagcgctctctcctgcaaggggactccgtgcaaccatgccccatctgtaaagaagaattcgagcttcgtcctcaggtgctgctttcatgctcccatgtgttccacaaagcatgtcttcaggcttttgaaaagttcacaaataagaaaacctgtcctctctgtagaaagaaccagtatcaaacccgagtgatacacgatggggcccgcctgttcagaatcaagtgtgtgaccagaatccaagcctactggagaggatgtgttgttagaaagtggtacagaaacctgaggaaaacagtacctcccacagatgccaagttaagaaaaaaattctttgaaaaaaagttcacagaaatcagccaccgcatcctgtgctcatacaacaccaacattgaagagctctttgcagaaatcgatcagtgcttggccataaatcgaagtgttcttcagcagttggaagaaaaatgtggccatgagatcacagaagaggaatgggagaaaatccaagtgcaggctctgcgccgggagacccacgagtgctccatctgcctggcccctctctccgctgctggcggtcagcgcgtgggtgcaggcaggcgttccagagagatggccctcctgtcctgctcacatgtgttccaccatgcgtgtctgctggcactagaggagttctccgtgggagacaggcctcctttccatgcctgtcctctctgccgctcctgctaccagaagaagattcttgaatgttgaattcatagtcaaggaaagttaggtaattctgaggaaaaaagtttaccatcattttggatgaactgcatgagttctgggttaagtactacaatgtaatctgtttcccagggaaataagctattggtagttgtaggaaatcttagtatattttaaaagctgacatcccacctaattttaatctttggtctctaaaaagtaaatttcaaatttatgagtttaatcacttcaaatatgaatagcaaaaaatgagagcttgcttacttctaaaaattgaggttaagatatagctagtgtctgaacgacactccttaaagtaagttccaaatgtaaaacactccttaagttccaaatgttttccgctaatagtctgtcctaaagcctttgccattcctaatactcgttttgtaataattgctgtatttctgtgtaataaaatataaaaataaaatattcagtggtattcaacatcaaaaaaaa

SEQ ID NO: 252830 - DNA, 1733 bp, Homo sapiens
agcctcgtcaccgcgcgcttcctgcatgagtggaacctcagaaaacggtcagcggggttcagaaggcaggagataacaccaagaccctaccagaagaatagaaggaaggtgataggatgtgatgatagaatttgtgatagccaagcaacaacttttcctaattcggcatgttaaaaaataagggtcactcatctaagaaagataacttggcagtcaatgcagttgctttacaagatcacattttacatgatcttcaacttcgaaatctttcagttgcagatcattctaagacacaagtacaaaagaaagagaacaaatctctaaaaagagatacaaaggcaataatagatactggacttaaaaaaactacacagtgccccaaactagaagactcagaaaaagaatatgttcttgatcccaaaccgccgccgttgactttggcacagaagttgggcctcattgggcctccaccacctccactgtcatcagatgaatgggagaaggtgaaacagcgctctctcctgcaaggggactccgtgcaaccatgccccatctgtaaagaagaattcgagcttcgtcctcaggtgctgctttcatgctcccatgtgttccacaaagcatgtcttcaggcttttgaaaagttcacaaataagaaaacctgtcctctctgtagaaagaaccagtatcaaacccgagtgatacacgatggggcccgcctgttcagaatcaagtgtgtgaccagaatccaagcctactggagaggatgtgttgttagaaagtggtacagaaacctgaggaaaacagtacctcccacagatgccaagttaagaaaaaaattctttgaaaaaaagttcacagaaatcagccaccgcatcctgtgctcatacaacaccaacattgaagagctctttgcagaaatcgatcagtgcttggccataaatcgaagtgttcttcagcagttggaagaaaaatgtggccatgagatcacagaagaggaatgggagaaaatccaagtgcaggctctgcgccgggagacccacgagtgctccatctgcctggcccctctctccgctgctggcggtcagcgcgtgggtgcaggcaggcgttccagagagatggccctcctgtcctgctcacatgtgttccaccatgcgtgtctgctggcactagaggagttctccgtgggagacaggcctcctttccatgcctgtcctctctgccgctcctgctaccagaagaagattcttgaatgttgaattcatagtcaaggaaagttaggtaattctgaggaaaaaagtttaccatcattttggatgaactgcatgagttctgggttaagtactacaatgtaatctgtttcccagggaaataagctattggtagttgtaggaaatcttagtatattttaaaagctgacatcccacctaattttaatctttggtctctaaaaagtaaatttcaaatttatgagtttaatcacttcaaatatgaatagcaaaaaatgagagcttgcttacttctaaaaattgaggttaagatatagctagtgtctgaacgacactccttaaagtaagttccaaatgtaaaacactccttaagttccaaatgttttccgctaatagtctgtcctaaagcctttgccattcctaatactcgttttgtaataattgctgtatttctgtgtaataaaatataaaaataaaatattcagtggtattcaacatcaaaaaaaa

SEQ ID NO: 252831 - DNA, 1945 bp, Homo sapiens
atgcgcagtatggggcggggcggggcagggctggtgagcaagcccgcggggagcgagcgcggaggcgggcgttgctacggcaacggtgggcggccaggagttgcctgagggaaaaggggcagacgtccctgggttccggtgttcgcggaggagtcgaggcacggagaggcttcgggggagggacggaaagaagggtggcccgccaggcgggcggggtccatggattcggggtgagggccgtccgcggcctcgctttcgcctcctccgagccgggccggcgatggccgcagctgtgaggcgagcagaagaatagaaggaaggtgataggatgtgatgatagaatttgtgatagccaagcaacaacttttcctaattcggcatgttaaaaaataagggtcactcatctaagaaagataacttggcagtcaatgcagttgctttacaagatcacattttacatgatcttcaacttcgaaatctttcagttgcagatcattctaagacacaagtacaaaagaaagagaacaaatctctaaaaagagatacaaaggcaataatagatactggacttaaaaaaactacacagtgccccaaactagaagactcagaaaaagaatatgttcttgatcccaaaccgccgccgttgactttggcacagaagttgggcctcattgggcctccaccacctccactgtcatcagatgaatgggagaaggtgaaacagcgctctctcctgcaaggggactccgtgcaaccatgccccatctgtaaagaagaattcgagcttcgtcctcaggtgctgctttcatgctcccatgtgttccacaaagcatgtcttcaggcttttgaaaagttcacaaataagaaaacctgtcctctctgtagaaagaaccagtatcaaacccgagtgatacacgatggggcccgcctgttcagaatcaagtgtgtgaccagaatccaagcctactggagaggatgtgttgttagaaagtggtacagaaacctgaggaaaacagtacctcccacagatgccaagttaagaaaaaaattctttgaaaaaaagttcacagaaatcagccaccgcatcctgtgctcatacaacaccaacattgaagagctctttgcagaaatcgatcagtgcttggccataaatcgaagtgttcttcagcagttggaagaaaaatgtggccatgagatcacagaagaggaatgggagaaaatccaagtgcaggctctgcgccgggagacccacgagtgctccatctgcctggcccctctctccgctgctggcggtcagcgcgtgggtgcaggcaggcgttccagagagatggccctcctgtcctgctcacatgtgttccaccatgcgtgtctgctggcactagaggagttctccgtgggagacaggcctcctttccatgcctgtcctctctgccgctcctgctaccagaagaagattcttgaatgttgaattcatagtcaaggaaagttaggtaattctgaggaaaaaagtttaccatcattttggatgaactgcatgagttctgggttaagtactacaatgtaatctgtttcccagggaaataagctattggtagttgtaggaaatcttagtatattttaaaagctgacatcccacctaattttaatctttggtctctaaaaagtaaatttcaaatttatgagtttaatcacttcaaatatgaatagcaaaaaatgagagcttgcttacttctaaaaattgaggttaagatatagctagtgtctgaacgacactccttaaagtaagttccaaatgtaaaacactccttaagttccaaatgttttccgctaatagtctgtcctaaagcctttgccattcctaatactcgttttgtaataattgctgtatttctgtgtaataaaatataaaaataaaatattcagtggtattcaacatcaaaaaaaa

SEQ ID NO: 252832 - DNA, 1422 bp, Homo sapiens
agaaaagaacactataattagaacactaacattggaagtaaaaacgttgtttataagtaattacttgtaaaattttaagtgaaatgtttttcttcaggcatgtcttcaggcttttgaaaagttcacaaataagaaaacctgtcctctctgtagaaagaaccagtatcaaacccgagtgatacacgatggggcccgcctgttcagaatcaagtgtgtgaccaggtgaggacgccaggcccgtttggcgctaagcagacacagatcaggctatgacaactaacttgttttttgaatagtgggattttatctctcttcttggccaccataatttccccagggccttgtacagcacagggcttataacaactactgaagtattggttgacatagagtcatcataaattagtcattttcaaatatctgtgttttagaatccaagcctactggagaggatgtgttgttagaaagtggtacagaaacctgaggaaaacagtacctcccacagatgccaagttaagaaaaaaattctttgaaaaaaagttcacagaaatcagccaccgcatcctgtgctcatacaacaccaacattgaagagctctttgcagaaatcgatcagtgcttggccataaatcgaagtgttcttcagcagttggaagaaaaatgtggccatgagatcacagaagaggaatgggagaaaatccaagtgcaggctctgcgccgggagacccacgagtgctccatctgcctggcccctctctccgctgctggcggtcagcgcgtgggtgcaggcaggcgttccagagagatggccctcctgtcctgctcacatgtgttccaccatgcgtgtctgctggcactagaggagttctccgtgggagacaggcctcctttccatgcctgtcctctctgccgctcctgctaccagaagaagattcttgaatgttgaattcatagtcaaggaaagttaggtaattctgaggaaaaaagtttaccatcattttggatgaactgcatgagttctgggttaagtactacaatgtaatctgtttcccagggaaataagctattggtagttgtaggaaatcttagtatattttaaaagctgacatcccacctaattttaatctttggtctctaaaaagtaaatttcaaatttatgagtttaatcacttcaaatatgaatagcaaaaaatgagagcttgcttacttctaaaaattgaggttaagatatagctagtgtctgaacgacactccttaaagtaagttccaaatgtaaaacactccttaagttccaaatgttttccgctaatagtctgtcctaaagcctttgccattcctaatactcgttttgtaataattgctgtatttctgtgtaataaaatataaaaataaaatattcagtggtattcaacatcaaaaaaaa

SEQ ID NO: 252833 - DNA, 1413 bp, Homo sapiens
atgcgcagtatggggcggggcggggcagggctggtgagcaagcccgcggggagcgagcgcggaggcgggcgttgctacggcaacggtgggcggccaggagttgcctgagggaaaaggggcagacgtccctgggttccggtgttcgcggaggagtcgaggcacggagaggcttcgggggagggacggaaagaagggtggcccgccaggcgggcggggtccatggattcggggtgagggccgtccgcggcctcgctttcgcctcctccgagccgggccggcgatggccgcagctgtgaggcgaggtcgggtcccgtagcggcgcgcagcctccttgggggactcggggtcctgtatattttgaatacatctgtcttcataaaatacaccatgtccaaaatctaaaagggccaattccaaattattccaccagctttgaagggaattgaagcaagaataacaagacagaagaatagaaggaaggtgataggatgtgatgatagaatttgtgatagccaagcaacaacttttcctaattcggcatgttaaaaaataagggtcactcatctaagaaagataacttggcagtcaatgcagttgctttacaagatcacattttacatgatcttcaacttcgaaatctttcagttgcagatcattctaagacacaagtacaaaagaaagagaacaaatctctaaaaagagatacaaaggcaataatagatactggacttaaaaaaactacacagtgccccaaactagaagactcagaaaaagaatatgttcttgatcccaaaccgccgccgttgactttggcacagaagttgggcctcattgggcctccaccacctccactgtcatcagatgaatgggagaaggtgaaacagcgctctctcctgcaaggggactccgtgcaaccatgccccatctgtaaagaagaattcgagcttcgtcctcaggtttagcatacgagggtgagctagagagctcctgggctgtttcctagggacgaggcccagagctggagcctaagattccaagcttcctttttccagtttcatcctcctgtgtgagcctcacacacttccattttgttttccattaattaaagtgtgtgaagagctaaacaccctcattaaatagttttgtttgtttactaactggtattctcaagtactaaagtttgtacaaaaggaatgtttctgttcaacaggccccatgcggctgtgcagacaactggggggcttcccaggagcagctgtgtcccagcgcgggaaggatgaaagcagagggactcttaagtggttttgtgatttgagtcagaaaagaaaaaaaaaactgtgcttgaatgtctccaaagaatttgtgagagaatctttaagaaaagtaaaatcttttaatgatttttattcatga

SEQ ID NO: 252834 - DNA, 2552 bp, Homo sapiens
atgcgcagtatggggcggggcggggcagggctggtgagcaagcccgcggggagcgagcgcggaggcgggcgttgctacggcaacggtgggcggccaggagttgcctgagggaaaaggggcagacgtccctgggttccggtgttcgcggaggagtcgaggcacggagaggcttcgggggagggacggaaagaagggtggcccgccaggcgggcggggtccatggattcggggtgagggccgtccgcggcctcgctttcgcctcctccgagccgggccggcgatggccgcagctgtgaggcgaggtcgggtcccgtagcggcgcgcagcctccttgggggactcggggtcctgtatattttgaatacatctgtcttcataaaatacaccatgtccaaaatctaaaagggccaattccaaattattccaccagctttgaagggaattgaagcaagaataacaagacagaagaatagaaggaaggtgataggatgtgatgatagaatttgtgatagccaagcaacaacttttcctaattcggcatgttaaaaaataagggtcactcatctaagaaagataacttggcagtcaatgcagttgctttacaagatcacattttacatgatcttcaacttcgaaatctttcagttgcagatcattctaagacacaagtacaaaagaaagagaacaaatctctaaaaagagatacaaaggcaataatagatactggacttaaaaaaactacacagtgccccaaactagaagactcagaaaaagaatatgttcttgatcccaaaccgccgccgttgactttggcacagaagttgggcctcattgggcctccaccacctccactgtcatcagatgaatgggagaaggtgaaacagcgctctctcctgcaaggggactccgtgcaaccatgccccatctgtaaagaagaattcgagcttcgtcctcagaatccaagcctactggagaggatgtgttgttagaaagtggtacagaaacctgaggaaaacagtacctcccacagatgccaagttaagaaaaaaattctttgaaaaaaagacacaagactggaaaccagcttaatttttcccatctcctgggctatatgtaaatgaagacatctgctgcacatctcatagtaatgaaaatagaagctgcctataaaaataaagcccccacatgctaccattgtattgagtacctcgtggggtcatcacaatgagctttagagctaacttccatgtctacccttcctcttaaccactatttatgctttagttttacttttgggggacttatttaacaatttcccattccttgtccccatatgaaaaggacagtcctaccccatcagcctgtggcttcaggcaaacagcagcagctccgaggctgtcatatgaaagccatcacttcttcctggcagtgttggcctgagaagagctgtagcatttataatggcccagcacacagtaggtgctggaaattctgtatttattatcactattaactcctttcctagaatatggagatgagttactgtgtgttctgttcctgagagcagtgtctctgatcttcagagatcattcgtctcgggtgttcattctcaatttggtaaaggaccgccatgcacgattgcgtcatccttcctttacattctttccagttttttatcttcagtcgttgacagtcagttgtgttctctgggctactcttagtaatttctaatatgtcatagtaggttgtctcttaaatcagaagtgattttttgtcacctcttatacaattttaattacagatttgatagtcattttaccttatatatataaatatttttcatgtgcacacatcattttataagaactcttgaagataaaggcccactgaaagtgttggtggtctcagcccattgaactggacgagaactggcccaggttgctggaaacaagtgaagcaaccattacaatgtgccttgtgttatcttgtaaagtagccagtgaaggttaagtttcagcgttcagtgctcaggtgttcaaatgctgcagccttcagcttcatggaaaaaggaaacgaaaaataacaaaaagcaagtgaccaagagcagtcggggcagggagacctgatcaaacaagttcctcagtttctaattcagtgtctcccacagagagatggaactttacaaggcagattcatagctctgtcccactggacgttgggtccgctgccctgtggccatcccacctccccacaaatactgttttttgttttatccttggttcatcccaactgctgcctcctcgtcctgagccctcatcgctcggaacgccccgctctgatccccgtgtctgcttttctgagcacactcttgcccgcccccgcatgtcctgcccgttcctactggttccctctgccttgcttaaaatgtgccagtttttcaaagcctagctgaagctttcttccaatttctttggtcttctctaaacctctattgtatgtttaaacaacaccatctaagagatcaagaagaacagaagtatgaatgctattct

SEQ ID NO: 252835 - DNA, 499 bp, Homo sapiens
aagaagattcttgaatgttgaattcatagtcaaggaaagttaggtaattctgaggaaaaaagtttaccatcattttggatgaactgcatgagttctgggttaagtactacaatgtaatctgtttcccagggaaataagctattggtagttgtaggaaatcttagtatattttaaaagctgacatcccacctaattttaatctttggtctctaaaaagtaaatttcaaatttatgagtttaatcacttcaaatatgaatagcaaaaaatgagagcttgcttacttctaaaaattgaggttaagatatagctagtgtctgaacgacactccttaaagtaagttccaaatgtaaaacactccttaagttccaaatgttttccgctaatagtctgtcctaaagcctttgccattcctaatactcgttttgtaataattgctgtatttctgtgtaataaaatataaaaataaaatattcagtggtattcaacatcaaaaaaaag

SEQ ID NO: 252836 - DNA, 1801 bp, Homo sapiens
atgcgcagtatggggcggggcggggcagggctggtgagcaagcccgcggggagcgagcgcggaggcgggcgttgctacggcaacggtgggcggccaggagttgcctgagggaaaaggggcagacgtccctgggttccggtgttcgcggaggagtcgagcagaagaatagaaggaaggtgataggatgtgatgatagaatttgtgatagccaagcaacaacttttcctaattcggcatgttaaaaaataagggtcactcatctaagaaagataacttggcagtcaatgcagttgctttacaagatcacattttacatgatcttcaacttcgaaatctttcagttgcagatcattctaagacacaagtacaaaagaaagagaacaaatctctaaaaagagatacaaaggcaataatagatactggacttaaaaaaactacacagtgccccaaactagaagactcagaaaaagaatatgttcttgatcccaaaccgccgccgttgactttggcacagaagttgggcctcattgggcctccaccacctccactgtcatcagatgaatgggagaaggtgaaacagcgctctctcctgcaaggggactccgtgcaaccatgccccatctgtaaagaagaattcgagcttcgtcctcaggtgctgctttcatgctcccatgtgttccacaaagcatgtcttcaggcttttgaaaagttcacaaataagaaaacctgtcctctctgtagaaagaaccagtatcaaacccgagtgatacacgatggggcccgcctgttcagaatcaagtgtgtgaccagaatccaagcctactggagaggatgtgttgttagaaagtggtacagaaacctgaggaaaacagtacctcccacagatgccaagttaagaaaaaaattctttgaaaaaaagttcacagaaatcagccaccgcatcctgtgctcatacaacaccaacattgaagagctctttgcagaaatcgatcagtgcttggccataaatcgaagtgttcttcagcagttggaagaaaaatgtggccatgagatcacagaagaggaatgggagaaaatccaagtgcaggctctgcgccgggagacccacgagtgctccatctgcctggcccctctctccgctgctggcggtcagcgcgtgggtgcaggcaggcgttccagagagatggccctcctgtcctgctcacatgtgttccaccatgcgtgtctgctggcactagaggagttctccgtgggagacaggcctcctttccatgcctgtcctctctgccgctcctgctaccagaagaagattcttgaatgttgaattcatagtcaaggaaagttaggtaattctgaggaaaaaagtttaccatcattttggatgaactgcatgagttctgggttaagtactacaatgtaatctgtttcccagggaaataagctattggtagttgtaggaaatcttagtatattttaaaagctgacatcccacctaattttaatctttggtctctaaaaagtaaatttcaaatttatgagtttaatcacttcaaatatgaatagcaaaaaatgagagcttgcttacttctaaaaattgaggttaagatatagctagtgtctgaacgacactccttaaagtaagttccaaatgtaaaacactccttaagttccaaatgttttccgctaatagtctgtcctaaagcctttgccattcctaatactcgttttgtaataattgctgtatttctgtgtaataaaatataaaaataaaatattcagtggtattcaacatcaaaaaaaa

SEQ ID NO: 252837 - DNA, 1253 bp, Homo sapiens
atgcgcagtatggggcggggcggggcagggctggtgagcaagcccgcggggagcgagcgcggaggcgggcgttgctacggcaacggtgggcggccaggagttgcctgagggaaaaggggcagacgtccctgggttccggtgttcgcggaggagtcgaggcacggagaggcttcgggggagggacggaaagaagggtggcccgccaggcgggcggggtccatggattcggggtgagggccgtccgcggcctcgctttcgcctcctccgagccgggccggcgatggccgcagctgtgaggcgagcagaagaatagaaggaaggtgataggatgtgatgatagaatttgtgatagccaagcaacaacttttcctaattcggcatgttaaaaaataagggtcactcatctaagaaagataacttggcagtcaatgcagttgctttacaagatcacattttacatgatcttcaacttcgaaatctttcagttgcagatcattctaagacacaagtacaaaagaaagagaacaaatctctaaaaagagatacaaaggcaataatagatactggacttaaaaaaactacacagtgccccaaactagaagactcagaaaaagaatatgttcttgatcccaaaccgccgccgttgactttggcacagaagttgggcctcattgggcctccaccacctccactgtcatcagatgaatgggagaaggtgaaacagcgctctctcctgcaaggggactccgtgcaaccatgccccatctgtaaagaagaattcgagcttcgtcctcaggtttagcatacgagggtgagctagagagctcctgggctgtttcctagggacgaggcccagagctggagcctaagattccaagcttcctttttccagtttcatcctcctgtgtgagcctcacacacttccattttgttttccattaattaaagtgtgtgaagagctaaacaccctcattaaatagttttgtttgtttactaactggtattctcaagtactaaagtttgtacaaaaggaatgtttctgttcaacaggccccatgcggctgtgcagacaactggggggcttcccaggagcagctgtgtcccagcgcgggaaggatgaaagcagagggactcttaagtggttttgtgatttgagtcagaaaagaaaaaaaaaactgtgcttgaatgtctccaaagaatttgtgagagaatctttaagaaaagtaaaatcttttaatgatttttattcatga

SEQ ID NO: 252838 - DNA, 2049 bp, Homo sapiens
atgcgcagtatggggcggggcggggcagggctggtgagcaagcccgcggggagcgagcgcggaggcgggcgttgctacggcaacggtgggcggccaggagttgcctgagggaaaaggggcagacgtccctgggttccggtgttcgcggaggagtcgaggcacggagaggcttcgggggagggacggaaagaagggtggcccgccaggcgggcggggtccatggattcggggtgagggccgtccgcggcctcgctttcgcctcctccgagccgggccggcgatggccgcagctgtgaggcgaggtcgggtcccgtagcggcgcgcagcctccttgggggactcggggtcctgtatattttgaatacatctgtcttcataaaatacaccatgtccaaaatctaaaagggccaattccaaattattccaccagctttgaagggaattgaagcaagaataacaagacagaagaatagaaggaaggtgataggatgtgatgatagaatttgtgatagccaagcaacaacttttcctaattcggcatgttaaaaaataagggtcactcatctaagaaagataacttggcagtcaatgcagttgctttacaagatcacattttacatgatcttcaacttcgaaatctttcagttgcagatcattctaagacacaagtacaaaagaaagagaacaaatctctaaaaagagatacaaaggcaataatagatactggacttaaaaaaactacacagtgccccaaactagaagactcagaaaaagaatatgttcttgatcccaaaccgccgccgttgactttggcacagaagttgggcctcattgggcctccaccacctccactgtcatcagatgaatgggagaaggtgaaacagcgctctctcctgcaaggggactccgtgcaaccatgccccatctgtaaagaagaattcgagcttcgtcctcaggtgctgctttcatgctcccatgtgttccacaaaaaagaaccagtatcaaacccgagtgatacacgatggggcccgcctgttcagaatcaagtgtgtgaccagaatccaagcctactggagaggatgtgttgttagaaagtggtacagaaacctgaggaaaacagtacctcccacagatgccaagttaagaaaaaaattctttgaaaaaaagttcacagaaatcagccaccgcatcctgtgctcatacaacaccaacattgaagagctctttgcagaaatcgatcagtgcttggccataaatcgaagtgttcttcagcagttggaagaaaaatgtggccatgagatcacagaagaggaatgggagaaaatccaagtgcaggctctgcgccgggagacccacgagtgctccatctgcctggcccctctctccgctgctggcggtcagcgcgtgggtgcaggcaggcgttccagagagatggccctcctgtcctgctcacatgtgttccaccatgcgtgtctgctggcactagaggagttctccgtgggagacaggcctcctttccatgcctgtcctctctgccgctcctgctaccagaagaagattcttgaatgttgaattcatagtcaaggaaagttaggtaattctgaggaaaaaagtttaccatcattttggatgaactgcatgagttctgggttaagtactacaatgtaatctgtttcccagggaaataagctattggtagttgtaggaaatcttagtatattttaaaagctgacatcccacctaattttaatctttggtctctaaaaagtaaatttcaaatttatgagtttaatcacttcaaatatgaatagcaaaaaatgagagcttgcttacttctaaaaattgaggttaagatatagctagtgtctgaacgacactccttaaagtaagttccaaatgtaaaacactccttaagttccaaatgttttccgctaatagtctgtcctaaagcctttgccattcctaatactcgttttgtaataattgctgtatttctgtgtaataaaatataaaaataaaatattcagtggtattcaacatcaaaaaaaa

SEQ ID NO: 252839 - DNA, 2698 bp, Homo sapiens
atgcgcagtatggggcggggcggggcagggctggtgagcaagcccgcggggagcgagcgcggaggcgggcgttgctacggcaacggtgggcggccaggagttgcctgagggaaaaggggcagacgtccctgggttccggtgttcgcggaggagtcgagcagaagaatagaaggaaggtgataggatgtgatgatagaatttgtgatagccaagcaacaacttttcctaattcggcatgttaaaaaataagggtcactcatctaagaaagataacttggcagtcaatgcagttgctttacaagatcacattttacatgatcttcaacttcgaaatctttcagttgcagatcattctaagacacaagtacaaaagaaagagaacaaatctctaaaaagagatacaaaggcaataatagatactggacttaaaaaaactacacagtgccccaaactagaagactcagaaaaagaatatgttcttgatcccaaaccgccgccgttgactttggcacagaagttgggcctcattgggcctccaccacctccactgtcatcagatgaatgggagaaggtgaaacagcgctctctcctgcaaggggactccgtgcaaccatgccccatctgtaaagaagaattcgagcttcgtcctcaggtgctgctttcatgctcccatgtgttccacaaagcatgtcttcaggcttttgaaaagttcacaaataagaaaacctgtcctctctgtagaaagaaccagtatcaaacccgagtgatacacgatggggcccgcctgttcagaatcaagtgtgtgaccagaatccaagcctactggagaggatgtgttgttagaaagtggtacagaaacctgaggaaaacagtacctcccacagatgccaagttaagaaaaaaattctttgaaaaaaaggtaggtaaagatcattatgttctccagatatggtctccgtgcgggtggttcacttggggtcaggaaggctaacagaggtggtaaaactttgagacttacttcactttgagggctttttaaaaatgggtgagatgctgctaaaaatcctgtttaactttagttggctttccaacctagatgttcaaatacttctagactttcttttctagttaaatcataaaattaggttaaatcaaagcaacttctgtttggccattttgtgctaattgtttaaataaacttatctcttcagacacaagactggaaaccagcttaatttttcccatctcctgggctatatgtaaatgaagacatctgctgcacatctcatagtaatgaaaatagaagctgcctataaaaataaagcccccacatgctaccattgtattgagtacctcgtggggtcatcacaatgagctttagagctaacttccatgtctacccttcctcttaaccactatttatgctttagttttacttttgggggacttatttaacaatttcccattccttgtccccatatgaaaaggacagtcctaccccatcagcctgtggcttcaggcaaacagcagcagctccgaggctgtcatatgaaagccatcacttcttcctggcagtgttggcctgagaagagctgtagcatttataatggcccagcacacagtaggtgctggaaattctgtatttattatcactattaactcctttcctagaatatggagatgagttactgtgtgttctgttcctgagagcagtgtctctgatcttcagagatcattcgtctcgggtgttcattctcaatttggtaaaggaccgccatgcacgattgcgtcatccttcctttacattctttccagttttttatcttcagtcgttgacagtcagttgtgttctctgggctactcttagtaatttctaatatgtcatagtaggttgtctcttaaatcagaagtgattttttgtcacctcttatacaattttaattacagatttgatagtcattttaccttatatatataaatatttttcatgtgcacacatcattttataagaactcttgaagataaaggcccactgaaagtgttggtggtctcagcccattgaactggacgagaactggcccaggttgctggaaacaagtgaagcaaccattacaatgtgccttgtgttatcttgtaaagtagccagtgaaggttaagtttcagcgttcagtgctcaggtgttcaaatgctgcagccttcagcttcatggaaaaaggaaacgaaaaataacaaaaagcaagtgaccaagagcagtcggggcagggagacctgatcaaacaagttcctcagtttctaattcagtgtctcccacagagagatggaactttacaaggcagattcatagctctgtcccactggacgttgggtccgctgccctgtggccatcccacctccccacaaatactgttttttgttttatccttggttcatcccaactgctgcctcctcgtcctgagccctcatcgctcggaacgccccgctctgatccccgtgtctgcttttctgagcacactcttgcccgcccccgcatgtcctgcccgttcctactggttccctctgccttgcttaaaatgtgccagtttttcaaagcctagctgaagctttcttccaatttctttggtcttctctaaacctctattgtatgtttaaacaacaccatctaagagatcaagaagaacagaagtatgaatgctattct

SEQ ID NO: 252840 - DNA, 3211 bp, Homo sapiens
atgcgcagtatggggcggggcggggcagggctggtgagcaagcccgcggggagcgagcgcggaggcgggcgttgctacggcaacggtgggcggccaggagttgcctgagggaaaaggggcagacgtccctgggttccggtgttcgcggaggagtcgaggcacggagaggcttcgggggagggacggaaagaagggtggcccgccaggcgggcggggtccatggattcggggtgagggccgtccgcggcctcgctttcgcctcctccgagccgggccggcgatggccgcagctgtgaggcgaggtcgggtcccgtagcggcgcgcagcctccttgggggactcggggtcctgtatattttgaatacatctgtcttcataaaatacaccatgtccaaaatctaaaagggccaattccaaattattccaccagctttgaagggaattgaagcaagaataacaagacagaagaatagaaggaaggtgataggatgtgatgatagaatttgtgatagccaagcaacaacttttcctaattcggcatgttaaaaaataagggtcactcatctaagaaagataacttggcagtcaatgcagttgctttacaagatcacattttacatgatcttcaacttcgaaatctttcagttgcagatcattctaagacacaagtacaaaagaaagagaacaaatctctaaaaagagatacaaaggcaataatagatactggacttaaaaaaactacacagtgccccaaactagaagactcagaaaaagaatatgttcttgatcccaaaccgccgccgttgactttggcacagaagttgggcctcattgggcctccaccacctccactgtcatcagatgaatgggagaaggtgaaacagcgctctctcctgcaaggggactccgtgcaaccatgccccatctgtaaagaagaattcgagcttcgtcctcaggtgctgctttcatgctcccatgtgttccacaaagcatgtcttcaggcttttgaaaagttcacaaataagaaaacctgtcctctctgtagaaagaaccagtatcaaacccgagtgatacacgatggggcccgcctgttcagaatcaagtgtgtgaccaggtgaggacgccaggcccgtttggcgctaagcagacacagatcaggctatgacaactaacttgttttttgaatagtgggattttatctctcttcttggccaccataatttccccagggccttgtacagcacagggcttataacaactactgaagtattggttgacatagagtcatcataaattagtcattttcaaatatctgtgttttagaatccaagcctactggagaggatgtgttgttagaaagtggtacagaaacctgaggaaaacagtacctcccacagatgccaagttaagaaaaaaattctttgaaaaaaaggtaggtaaagatcattatgttctccagatatggtctccgtgcgggtggttcacttggggtcaggaaggctaacagaggtggtaaaactttgagacttacttcactttgagggctttttaaaaatgggtgagatgctgctaaaaatcctgtttaactttagttggctttccaacctagatgttcaaatacttctagactttcttttctagttaaatcataaaattaggttaaatcaaagcaacttctgtttggccattttgtgctaattgtttaaataaacttatctcttcagacacaagactggaaaccagcttaatttttcccatctcctgggctatatgtaaatgaagacatctgctgcacatctcatagtaatgaaaatagaagctgcctataaaaataaagcccccacatgctaccattgtattgagtacctcgtggggtcatcacaatgagctttagagctaacttccatgtctacccttcctcttaaccactatttatgctttagttttacttttgggggacttatttaacaatttcccattccttgtccccatatgaaaaggacagtcctaccccatcagcctgtggcttcaggcaaacagcagcagctccgaggctgtcatatgaaagccatcacttcttcctggcagtgttggcctgagaagagctgtagcatttataatggcccagcacacagtaggtgctggaaattctgtatttattatcactattaactcctttcctagaatatggagatgagttactgtgtgttctgttcctgagagcagtgtctctgatcttcagagatcattcgtctcgggtgttcattctcaatttggtaaaggaccgccatgcacgattgcgtcatccttcctttacattctttccagttttttatcttcagtcgttgacagtcagttgtgttctctgggctactcttagtaatttctaatatgtcatagtaggttgtctcttaaatcagaagtgattttttgtcacctcttatacaattttaattacagatttgatagtcattttaccttatatatataaatatttttcatgtgcacacatcattttataagaactcttgaagataaaggcccactgaaagtgttggtggtctcagcccattgaactggacgagaactggcccaggttgctggaaacaagtgaagcaaccattacaatgtgccttgtgttatcttgtaaagtagccagtgaaggttaagtttcagcgttcagtgctcaggtgttcaaatgctgcagccttcagcttcatggaaaaaggaaacgaaaaataacaaaaagcaagtgaccaagagcagtcggggcagggagacctgatcaaacaagttcctcagtttctaattcagtgtctcccacagagagatggaactttacaaggcagattcatagctctgtcccactggacgttgggtccgctgccctgtggccatcccacctccccacaaatactgttttttgttttatccttggttcatcccaactgctgcctcctcgtcctgagccctcatcgctcggaacgccccgctctgatccccgtgtctgcttttctgagcacactcttgcccgcccccgcatgtcctgcccgttcctactggttccctctgccttgcttaaaatgtgccagtttttcaaagcctagctgaagctttcttccaatttctttggtcttctctaaacctctattgtatgtttaaacaacaccatctaagagatcaagaagaacagaagtatgaatgctattct

SEQ ID NO: 252841 - DNA, 1520 bp, Homo sapiens
atgcgcagtatggggcggggcggggcagggctggtgagcaagcccgcggggagcgagcgcggaggcgggcgttgctacggcaacggtgggcggccaggagttgcctgagggaaaaggggcagacgtccctgggttccggtgttcgcggaggagtcgaggcacggagaggcttcgggggagggacggaaagaagggtggcccgccaggcgggcggggtccatggattcggggtgagggccgtccgcggcctcgctttcgcctcctccgagccgggccggcgatggccgcagctgtgaggcgaggtcgggtcccgtagcggcgcgcagcctccttgggggactcggggtcctgtatattttgaatacatctgtcttcataaaatacaccatgtccaaaatctaaaagggccaattccaaattattccaccagctttgaagggaattgaagcaagaataacaagacagaagaatagaaggaaggtgataggatgtgatgatagaatttgtgatagccaagcaacaacttttcctaattcggcatgttaaaaaataagggtcactcatctaagaaagataacttggcagtcaatgcagttgctttacaagatcacattttacatgatcttcaacttcgaaatctttcagttgcagatcattctaagacacaagtacaaaagaaagagaacaaatctctaaaaagagatacaaaggcaataatagatactggacttaaaaaaactacacagtgccccaaactagaagactcagaaaaagaatatgttcttgatcccaaaccgccgccgttgactttgggataccattcataggatgtacagccaactttaaaccagtatgacctcatcttaactacatctgcaaagaccctatttccaaataaggtcaacatccagaggttccagcacagaagttgggcctcattgggcctccaccacctccactgtcatcagatgaatgggagaaggtgaaacagcgctctctcctgcaaggggactccgtgcaaccatgccccatctgtaaagaagaattcgagcttcgtcctcaggtttagcatacgagggtgagctagagagctcctgggctgtttcctagggacgaggcccagagctggagcctaagattccaagcttcctttttccagtttcatcctcctgtgtgagcctcacacacttccattttgttttccattaattaaagtgtgtgaagagctaaacaccctcattaaatagttttgtttgtttactaactggtattctcaagtactaaagtttgtacaaaaggaatgtttctgttcaacaggccccatgcggctgtgcagacaactggggggcttcccaggagcagctgtgtcccagcgcgggaaggatgaaagcagagggactcttaagtggttttgtgatttgagtcagaaaagaaaaaaaaaactgtgcttgaatgtctccaaagaatttgtgagagaatctttaagaaaagtaaaatcttttaatgatttttattcatga

SEQ ID NO: 252842 - DNA, 418 bp, Homo sapiens
agagacgaggaaggttaccaaaatagatggtcaggctcgagagcgcttccctgcaacctccaccgagctcaggtgtgagcttacccgcccccgcctcctcctcagttcacagaaatcagccaccgcatcctgtgctcatacaacaccaacattgaagagctctttgcagaaatcgatcagtgcttggccataaatcgaagtgttcttcagcagttggaagaaaaatgtggccatgagatcacagaagaggaatgggagaaaatccaagtgcaggtaggtttggctggcagcctggcaaccagcagactcagctgcagctgcagaggctgtggggagtggcatgtggggggaggtcgaggactcactttggggagcctaggagtgtcaggcccggggtgcagccgtggaggctgtgggg

SEQ ID NO: 252843 - DNA, 5757 bp, Homo sapiens
  misc_feature (1595)..(1595): n is a, c, g, or t
atcaccctctggacaagagaacgggcgagcgggagctaggagggaagagtggagaggaccggcgaggcgcgccagccggagccacctccttcccggccgccccctccccactccccctacacacacacgctcgctcgctcgccggcgcgcgcacaccccccgcgccggacccgcacctcggcgggcgccacacactcggcagcccgagccgcggtagccgcagcgggatggaggcggcgcgcacggagcgccccgcaggcaggccgggggcgccgcttgtccggacggggctcctactcttgtcgacgtgggtcctggccggcgccgagatcacttgggacgcgacaggcggtcccggacgcccggcggccccggcttcgcggccaccggcgttgtctccactctcgccgcgggcagtggccagccagtggccggaggagctggcgtcggcgcggagagccgccgtgctggggcgccgggccggaccagagctgctgccccagcagggcggcggcagaggcggtgagatgcaggtggaagccggagggacatcaccggcaggcgagcggcggggccggggcatcccagctcctgccaagcttggcggcgcgaggaggagtcgccgggcgcagcccccaatcacccaggaacgcggggacgcctgggccactgctccggccgatggttccagaggaagccgtccccttgctaagggttcccgggaggaggtgaaggcgccgcgggctggggggtcggcggctgaagacctccggctgcccagcacctccttcgcgctgaccggggactcggcccacaaccaagccatggtgcactggtcgggacacaacagcagcgtcatacttatcctgacgaagctgtatgacttcaacctgggcagcgtgactgagagttcactatggaggtcgacagattatggcaccacctatgaaaagctgaatgacaaagtgggtttgaagactgtcctcagttacctctatgtcaatccaaccaacaaaaggaagattatgcttctcagtgatcctgagatggagagcagcatattgatcagctcagacgaaggggcgacctatcagaagtatcggctcaccttctatatccagagcctgctctttcatcccaagcaagaggactgggtgctggcctacagtttggatcaaaagctctacagctccatggactttggaagacggtggcaactcatgcatgaacgcatcacacccaacaggttttattggtcggtggccggattggataaggaggcggacctggtgcacatggaggtgcggaccacggatggatatgctcactacctcacctgcaggatccaggaatgtgccgagacaactagaagtgggccttttgcccgctccattgacatcagttccctggttgtccaggatgaatatatcttcattcaggtaacaactagtggaagagccagctactacgtgtcttatcgaagagaggcctttgctcagataaagctgcctaagtactcgttgccaaaggacatgcacatcatcagtacagacgagaaccaagtatttgctgcggtccaagaatggaaccagaangacacgtacaacctctacatctcagacacgcgtgggatttacttcactctggccatggagaacatcaagagcagcagaggtctaatggggaacatcattattgaattgtatgaggtagcaggtatcaaagggatatttctggcaaacaagaaggtggacgaccaggtgaagacatacatcacttacaacaaaggcagggattggcgcctgctgcaagctccggatgtggacctgagaggaagcccagtgcactgcctgctgcccttctgttccttacatctgcacctgcaactctctgaaaatccatattcctcaggaagaatctctagcaaggagacagccccaggacttgtggtggctacaggcaacattggcccggagctctcatatactgatattggtgtgttcatctcctccgatgggggcaacacatggagacagatctttgatgaagagtacaatgtctggttcctagactggggtggtgccctcgtggccatgaaacacacacctctgccagtcaggcatttgtgggtgagttttgatgagggccactcttgggacaagtatggtttcacttcggttcctctctttgttgacggggctctggtggaggcaggaatggagacccacatcatgacagtttttggccacttcagcctccgctccgaatggcaattggtgaaagtggactacaaatctatcttcagccggcattgcaccaaggaggactatcagacctggcacctgctcaatcagggagagccttgtgtcatgggagaaaggaaaatattcaagaaacgtaagccaggagctcagtgtgccctgggccgagaccactcaggatcagtggtctcagaaccctgtgtctgtgccaattgggacttcgagtgtgactatgggtatgagagacatggggagagccagtgtgtcccagctttctggtacaatccagcatccccatcaaaggactgcagccttggtcaaagctaccttaacagcactgggtatcggcggattgtgtccaacaactgcacagatgggctaagggagaagtacaccgccaaggcccagatgtgccctggaaaagcccctcggggcctccatgtggtgacgaccgatgggcggctggtggcagagcaggggcacaatgcaactttcatcatcctcatggaggagggtgatctacaaaggacaaacatccagcttgactttggggatgggattgctgtgtcctacgcaaacttcagccccatcgaggacggcatcaagcacgtgtataagagtgcggggatcttccaggtgacagcctatgcagagaacaaccttggctcagacacagctgtcctcttcctgcatgtggtttgtcctgtggagcatgttcatctccgagttccatttgttgccataagaaataaggaggtcaacatcagtgcagtcgtgtggcccagtcaactggggacccttacctatttctggtggttcggcaatagcacaaagcctctcatcactttggacagcagcatttccttcacattccttgcagaaggaaccgacaccatcacagtccaggtggctgctgggaatgccctcatccaggacacaaaagagattgcagttcatgaatatttccagtcccagcttttatcattctctcctaatctggattaccacaatcctgacattcctgagtggagaaaagatattggcaatgtcatcaagcgagctctggttaaagtaaccagtgtcccagaggaccagatcctcattgccgtgtttcctggtctccccacttcagcagagcttttcattcttccacccaagaacctgacagagaggaggaaaggcaatgaaggggacctggaacaaattgtagaaacactgtttaatgctctcaaccaaaatttggtccagtttgagctgaagccgggggtacaagtcattgtgtatgtcacacagctgacgttagctccattggtggactccagtgctgggcacagcagctcagccatgcttatgctattatcagtggtatttgttggcctggctgtgtttttgatctacaagtttaaaaggaaaatcccttggattaacatctatgctcaagtccaacacgacaaggagcaggagatgattgggtcagtgagccaaagtgaaaacgcccccaaaatcacactcagtgactttacggagcctgaggagctgctggacaaagagctggacacgcgggtcataggaggcattgccactattgcaaacagcgaaagcacaaaggagatccccaactgcactagtgtttaataccagcaagccacgtggtcaaccacctttctgactttttatttttgatgattactattactattattatggaaaaattaaaatgtcttttttaccttttgtttaccaagggccccttcataaatagcaggcaaatgcctagctttgggagaaaagggcattcttagctgattgaaatgagacaaagggaataaatggctgtatttgtgctaagagcaaaggatgcatcttcccacagcctcctcgctttactctgccattggtagcttaaagactttctttttccttgtggtctcccttttttcaaaattgaagttgggttggctctttgtgaacctctcatccccacagcagaatcaccaacactctccgcttcccccagcacacacacatacaacacagatcatttcccagttagatccgcaggaagtaggttggtgggggtggatgtagctgcagaaagcatgcacaactttgtgaaagaggccctgccttgtgcatgtccatagtgaggctacagatggcttattgtatataattacaatgtaaatagctttttatttcctaagaaataatttaatgtttagtaaaaaagaaaacagaaaaaagaaagatgcgtgtgttggcttacgcactggccctcagagctgaccaacccgccaggcctgctcaatgcattgggtttggatgctctcctgttgtctgtcacacttaactcttgcatctccttgtccatgccatagctggtttctacttatgtatataaaggggggtggggggaggggcttctctggggcaattgataaaggaaggactctagtgacatcatagaacatggcagtcgtttttgttccaagaatgatatgaaaggtgaagaagaggcccactagaggcttcatactgagacccagatgggggaaaacagcttcctctctaaaaggaaaaacttgatatttatcagtctgagaaaatatttttttctaaagaaggcagtcagtggatcttaaaatgacaatctgtttttaaattggattctatgaaaatgcataatgcttatggtgaattctcaggctattctgagctcagaaaagtcccctgggcactaggtaaagcccagtgaatgtctcttggcatgggaggagttaaagaggttggaagggaagaggcatttgtggaattatgagttcatgcaaaactctccaggccaagtaggggtctagcctttaatgatattagtcaaaggcaattttagcaaagctgtgctatttgcttgtcagatgtacacaacttccttaaagtcaaatgtctgccttcagttcccttaaggtagttcttgcctctggggtgagtggctttcaaagccttttagcttttccagcacctcagccccttcacacatttacacataccaatttttttcaatagggtcacgttaagccatgctgtaagcattgtttttattttcaggcttagcctgagcacacttatttttgaaaatgatataatgtatatatatgggaggaaaggccacattttgtacctgttaatttttgtgggatgttgttcccattcttctttgtgagacagagagaatgtgatatagagaaatctggctggctacagtgtagatcagtattaggaatatttctaaagatcctgcttttttgtttcaagggttaaatggggcagacaattgcaatacttgtactaaacactggaatacaaatgcatgactcatatctatatatacagtatatgtacatatactgttcttggttttattgttccacttgaatatttctactgtaaaaaaaagacagtggttttgaaattgttgaaaataaatgtatttttgtacatc

SEQ ID NO: 252844 - DNA, 515 bp, Homo sapiens
ggagaaggagcagaatgacatgcaaaatccaggatgcccagtcttatccttatttctagaatttaataatttataatgtgtttcaagtatactaatactcttcctagatactggaagaataatcacagttttaagaaacggtataacgtttgtttgtttgtttgtttttcttttccaagttaggatgacagtctgagagtttcaggaaaggaaataaagttgatatcccacacaagactgaatgagtattgttacttcttcttgtagcctctcatcactttggacagcagcatttccttcacattccttgcagaaggaaccgacaccatcacagtccaggtggctgctgggaatgccctcatccaggacacaaaagagattgcagttcatggtaagccctgaaaattgttctgtgatgctccttcccgctcagttaatctcctgtgtccactctccctacaatcattgagtgtggtggaaattcctcaggccctgtggaaaagtacataggtcaa

SEQ ID NO: 252845 - DNA, 276 bp, Homo sapiens
tcatttctttcttttaacagcttgattcttggatttaaacaactttatttttagggaaatacaaccccctcaggttctttatgactcagtccctacaccatgtggccactgtttcctgggtgccacacctctgaatagattaacatgaaagaatgctgtgcgctatttagattactagggagtagaatattgaatacattgcttaaattttttaatctaaaatttaatcagaaatttactttgggagtagacaaaggaaatctttgaaagtgttaa

SEQ ID NO: 252846 - DNA, 366 bp, Homo sapiens
acatgttcaggctgcctgctgaagctaggaagtccagaatgagatttatcaactctcaaggccacggaagaccctagagattgttgtctaacctcattttctacgtgtggagaccgaatcagggctgtgtagagaaaccagtgcgcgttttgatgccactcattctgggttttcaggtctgctcatctgtttactagaaatgagtggttctggatgaagtttcctgactttactgaacttcagtttagtttcctcatctgtaaaatgcaggctgtgctacttaaatgggggctttttgtggatattgaaaataatggatggaataaataagtgccttgcacatagtaggcacagaatacacaatca

SEQ ID NO: 252847 - DNA, 787 bp, Homo sapiens
ctgtcacgtacgtgctccacaaggcatagtcatgctgttggctcagaggaaacatcttaaagcagcaatgtgtaatgcattaaatggcctgattatgtcttaagggaagactcacctatagatttcacttaatggttagaaatgattcaggaaacctgaggaaattgcctacaaagaggcaaatataacgagagactctgggcatctttcatatgatatgaggagtattaaatgaggaaaaaagaaaaacctaacacttaagagcaggtactgggtaatgttttacatatctttgttagagtaaatatcttggaagcttaatttagaatcaatacactctttggactttgatttagaaagattcagaaatgtcaaacccctttcccatataacttttataaagttatataaaagtttacattaaacctttaagttagtattctgtacattttgtcttaagtgacattttggtgaattttcaagaggtagacattgggagactattccctgaggtattaatggaagaatgctccttgagagttgaagtcccatgatatttgaatagaagacatctctcaaagtaatttttattaaaacaggctgagaaacgcatacccaatcatacttaggcaacaatgccctaataaaatcagaaacttttatccagaatggtttgtcaggtgcaaaaggcagatcagagtactaaaagccatcatgaaatagcctggaaaagtcctataaaggaggactacagccctcagatgaatgtatcatccatctaagggga

SEQ ID NO: 252848 - DNA, 228 bp, Homo sapiens
  misc_feature (71)..(71): n is a, c, g, or t
  misc_feature (157)..(157): n is a, c, g, or t
atcatattctaaaatcctgtaacctaaaacagagcaggctaagtttccaggccagccagcataattctgtnttatccataatatgtattatgccttgatgtttgatactcttccctctggaaacacacagaactagcagaaggaagaaaaaggtttnttccacgttgccgagcagtagggcaaaatagatctcgggatttcgggatctctcctatttgccaaattctt

SEQ ID NO: 252849 - DNA, 787 bp, Homo sapiens
gcacacagcttagcacaaagcaggcctcagatgcacgctggacaaatgtgctggtatcctctgcatccttatggccagcatgatccatccagaaacccagtggaactgagccgcgagctggattccagctcacagaacacaccaagaactctggtgaaacatcaagaactctggggggtccccccagaaaaatctggggggcactgcagagcttctgacacggctctgggggaaatcccacacggatgggcagctgcctgcatctggcactgtggaggtgggcgggcagccatggaggatggggagactcatctttctagacttctcctggggaccgcatttcctccagcctccaggtccagaccaaaatagaatgaggtaaattcagcccctttcctgcagcacactcaaggaataaacaagcaccacaaatacagtcttcgggctgggtcatctttccaacctcatttttttttttttttaagagaaccacaggctgttttaagattccaaacccagagacagaaaaagtgcagcaaagcagggcgacaaggggaaagaaacttgacagtgctttgcagacagaaacaagtgacgcaatttccaaattcaagattctcaaaaacagaggctgggttggaacatctagagaaggccagagcgggctgttctaagacttattctcacggtagcatcctgaagccgggggggtccaggaagggggcaggctgaggacatcagcttgcacttggtaggccctcaccaggtcccagaagctgtgccggtg

SEQ ID NO: 252850 - DNA, 433 bp, Homo sapiens
caaagaatcccttcataatataagaataaaaactccaaatattcttctacagtctcatgaataaacaagcaccacaaatacagtcttcgggctgggtcatctttccaacctcatttttttttttttttaagagaaccacaggctgttttaagattccaaacccagagacagaaaaagtgcagcaaagcagggcgacaaggggaaagaaacttgacagtgctttgcagacagaaacaagtgacgcaatttccaaattcaagattctcaaaaacagaggctgggttggaacatctagagaaggccagagcgggctgttctaagacttattctcacggtagcatcctgaagccgggggggtccaggaagggggcaggctgaggacatcagcttgcacttggtaggccctcaccaggtcccagaagctgtgccggtg

SEQ ID NO: 252851 - DNA, 411 bp, Homo sapiens
cattttaattttaaaaccctccactttgagggaacttctaaaaatgaaacttttgtatcaaatccaattttcctaattcaagatctcaggattatataggacattcaaagtcttatagaagtgggcgtggtggctcgtgcctgtaatcccagcactttgggatgctgaggcgggaggatggcttgagctcaggaatttgagaccaccctgggcaacaaagtgagacccctgtttctacaaaaaatagaaaaaattagctgggcatggtagcatgcacctgtagttccagctactcgggaggctgaggctggaggataacttgagcccaggaggtggaagctgcagtgagctgttattgcgccactgcactccagcctgggtgacggagtgagaccctgtctcaaaaaaaaa

SEQ ID NO: 252852 - DNA, 229 bp, Homo sapiens
gggataatttagaaacttgctagtgtcttaagatcaattactcaccaatgagagtggcattgaactgtgaatgttcctcctagattttccatgaagactaatggttttgtcttgtcttgaatttgttttaattacaatttgtatacatcctgttccaccctgaaatttttattttccaaatggtttttcatttaaagagactaaataaaggttctgactgagttgtact

SEQ ID NO: 252853 - DNA, 445 bp, Homo sapiens
tagaagaaaaagaaaattgacagaattatcagccaagtttcaggtagttctgcctgacacatcttttgaagcagtgaaagtcatacagtgaatgatcacactggcctcatttgcaacaatggctgctttaaatcaaatgagcaggacaggttaggaatattgcattagctcacccctttctgcagagatagactcactctcagggtaaagttgcccagagctcaaaggatgcactgtttcatgcaagagctgccttacaggatctgagaaagagaagccgggctctgagccttcatcttcagcccactccactacaactgtgattggagcctttcaaggctttgtttcaggttgagtttggggagcagttggccagatctgttccttgatgaatgtcttcactttaatctgcaatgcaaagccatacgcttcaaagaaaggcaag

SEQ ID NO: 252854 - DNA, 794 bp, Homo sapiens
acatgggatttcagccttggtttggttatccaaggagcagtgctgagtttcttgccaatgggacatgggatgctggtgatttccaggaagtgtcctcacaatgagtgaagctaccacttactgtttattgtgatgaaatgctagccaaggcatatgccatgcgagttaacggatgctatgcttcaccactgtggcaataaagatgactctgaagaatggcatgggacggaacctttcaaatgcacctgagcaggggtctccaccacagggccacagagctggtggtgagcagcaaagtgaggggaaaattcgtttgtatttatagcccctccccatcgctcgcataaccacctgagcgtcatgtcctgacaggtccagctactgccttccagtgacctctttaggctcatctcatgcttcaccgtgcctcgccaaaccaagctgtgcgtttcagcagcctctgcaagcagaggccgagctctgcgtcctgatcatcctgatggcctctttaggcccagctcatttctcacaacggccaccttaggcccagcttttcccttttggtggcctctccaggccgagaaattcctcaagtcggcctcccccaccgcagttgctgcctcccggcctcttctccagtcccagtcctctctcgcagctgtgtctacaggcccagctcctgcctccaaagagcctcttttgactcggctcctacccagctcctggcagcctttgtaggcctgaaatctcttccagtccagcactccatacccagtctcgcatacaccggcctt

SEQ ID NO: 252855 - DNA, 380 bp, Homo sapiens
acagcattggaccgtgacacatttatccaaacgaaggaaaaattccactcatgtcagccagcccacattttatgacaattggaagagtagatgttacggacgccaggttaaatccatctacacttcgagttgtcttttacaggctactgctgacagccagaatgaaaccaggaggacacttagtctaataaaccaggtttccccctccgggttactgacctaaaaggcaagttaggccctaacatggacataagcaaatcccagggttccttactggccctcctcctgccacccccatcaatggctatgggtgagggaacatttgaatttcaggggtaaagtcctcaaaaagcaatcatgttatggctttccaacgtgga

SEQ ID NO: 252856 - DNA, 338 bp, Homo sapiens
ccactcactttttttttctccttgatactaaaggcatcaaaagacactcactattggtcaggtgcagtggctcatgcctggaatcccagtactttgggaggccgaggcaggcagattgctcaagcccaggagttcgagacagcctaggaaacacaggaagaccttgtctctaccaaaaattaaaaaaattagcctgttgcagtggcatgcacctatagtcccaggtacttgggaggctgaagcaggaggatcacttgagcccaggaggttgaggctgcagtgagccatgattgcaccactggacaccagcctgggtgacagagtgagatcctgtatca

SEQ ID NO: 252857 - DNA, 454 bp, Homo sapiens
agcatgaaaataattttaataatatattttattttaacctaatatatttgaaatattatcattttaacatataatcaacataaacaatattaattagaccttttataagctttttttgtactaagtgttcacaatgttgtgggtatttcatatttatagcacatctaaattcaggtggacatatttcaagtgatcaagatccacatatggctaatggctatgatattagacagtgcaagtataaactataggatcttgtggaacaggaatggcatctcatgatagtatgtttccattttaatcactggaaaaccagttccacaaagcaaatagtttcatggttaagtaaatttgagaaatgttgcacattatcttctgaatagagatttataatagatgacccatatatcaaaatcaccgagaagtcttgcaataaagaagtctgttaaacatt

SEQ ID NO: 252858 - DNA, 2322 bp, Homo sapiens
  misc_feature (2314)..(2314): n is a, c, g, or t
  misc_feature (2316)..(2316): n is a, c, g, or t
  misc_feature (2318)..(2322): n is a, c, g, or t
attctgaggggaagtgtagctcccaggttggttccaagtcttcttccaattaggatcttatccaggacgcttcattgcatttggtcttcatttctccttagtctcctccaggctgacatttcctcaatctttattggtcttccacagccctgacacttttggagataccagtcagcatttccaagttcgttctgtgagactgtagtgtcaggacaaagcaacaacaaaatgtgctctactctaaagaagtgtgggacatacagaactgaagttgcagaatgccatgaccatggtagcacttttcaaggaagaaagaaaggtgggagttctttccgggataattttgacaagaggagctgtcattatgaacatggtgggtatgagcgcccgccttcacactgccaggagaatgatggaagcgtggagatgagggatgtccacaaggaccaacaactaagacacactccttatagcatccgatgcgaaagaagaatgaaatggcatagtgaagacgaaatccgtattaccacgtggagaaatagaaaacctccggagagaaaaatgagtcagaacacacaggatggatacacaaggaactggtttaaggtcacaattccttacgggataaagtatgacaaggcatggctaatgaattcaatccagagccattgcagtgaccgcttcactccggttgatttccactacgtccgaaatcgggcatgcttctttgtccaggatgctagcgctgcctccgcattgaaggatgtcagttataagatttatgatgatgagaaccaaaagatatgtatatttgtcaatcattctactgcgccctactctgtgaagaataagttgaagccaggccaaatggagatgctaaagctgaccatgaacaaacggtacaatgtctcccagcaagctcttgatctccagaatctccgctttgacccagacttgatgggccgtgacattgatataatcctgaatcgaagaaactgcatggctgccaccctgaagatcattgaaagaaatttccctgagctgttgtctttgaacttgtgcaacaacaagctgtaccagctggatggcctttctgacattacagagaaggctcccaaagtcaagaccctgaatctctccaaaaataagctggagtcggcgtgggagttgggcaaggtgaaagggctgaagctcgaagagctatggctagaagggaacccgttgtgcagcaccttctcggaccagtccgcctatgtaagtgccatccgggattgtttccccaagttgttacgcctggacggccgagagttatccgcaccagtgattgttgacattgacagctctgagacaatgaaaccctgcaaggaaaactttactggatctgagaccctaaagcatttagtcctgcaattcctgcagcagtattactcgatctatgactctggagatcgacagggtctcctcggtgcttaccacgatgaggcctgcttctccttggctattcccttcgaccccaaggactcagccccgagcagcttgtgcaagtactttgaggatagcaggaatatgaaaacactcaaggacccctacctgaagggggaactgctgaggcgcacaaaacgtgacattgtggactccctcagtgcgttgcccaaaactcagcatgacctcagctccatcctggtggacgtgtggtgccagacggaaaggatgctctgcttttctgtcaatggggttttcaaggaagtggaaggacagtctcagggttctgttctcgccttcacccggaccttcattgctacccctggcagcagttccagtctgtgcatcgtgaatgacgagctgtttgtgagggatgccagcccccaagagactcagagtgccttctccatcccagtgtccacactctcctccagctctgagccctccctctcccaggagcagcaggaaatggtgcaggctttctctgcccagtctgggatgaaactggagtggtctcagaagtgccttcaggacaatgagtggaactacactagagctggccaggccttcactatgctccagaccgagggcaagatccccgcggaggccttcaagcaaatctcctaaaaggagccctccgatgtcttctttgtcttcgttcacatcctctttgtttcctcttttcaccagcctaaggcctggctgaccaggaagccaacgttaacttgcaggccacgtgacataaccacccaaagagccagttgctctgtgtattcgccccactcatgatcaccattttattttcataataaagagtgacgttacacgttananannnnn

SEQ ID NO: 252859 - DNA, 440 bp, Homo sapiens
ctagtaaatgagtgactctactttgatttgacagaagaaacaatggaaagaggagagatggaagtttttctacctaaacttcctaagaggatgtgtttaggggatgtgttggtaaaaagttattagcattaatgtttacctcgtatctttctcatagataatgcaaagacctttaactccacttatccctccttttaacttatgttgttattgccttgtatttaaatactatatatgaggctctacaagacatcattattttatgcaggcattgtttatttaatcagagttcagtaaactttttctgtaaatgccagatggtaaatattttaacccctgcaggccttatagtctctgtcacaactactcaactccactcttaatagtgccaaaatggctatagacaatatggaaatgattgtgtgtacccatgttccaat

SEQ ID NO: 252860 - DNA, 139 bp, Homo sapiens
aaaggatagtctctttaatgaattatgtttggaaaactggttatccacatgcagaagaatgaaatagcaccctgatatcagaccacatgatttccatatggaaaaatcaactcaaaatgagttaaagatttaacatgaa

SEQ ID NO: 252861 - DNA, 400 bp, Homo sapiens
acggatagcggagatgcagaaagatggacattttatatactgctggtagaaatatatatttatacatttttgaaaaccttttgataatatgtattaaaggcctcaaaaaaatatataatttattcttgatataaatactttttaagaaagtctcaaaatctgttaagagcacagtgatatatatgcaaagatgttcattatagcattatttatattaacaaaaaatgttagttagttaaattcccaaaataaggaagagtttaaataaattatgttacatatttaagacaggttattccaccataataatgtttttcaagaatatttgacatggggaaatacaaaggatgtattatgttgacacaaaagtaattgcagtttttgccattacaagtaatgg

SEQ ID NO: 252862 - DNA, 692 bp, Homo sapiens
cggagccaagagattcccagcccagtgctccaaaatactcggcctgggggaggctggtccgtgagcgtgcgcccggaccgttccgccatgcatagtggacccagcactacagcaagcctggcacgacctctaaggcggttcgcggcaacgtccgcacgtcggctcgttggtctaggggtatgattctcgcttcgggtgcgagaggtcccgggttcaaatcccggacgagccctcctttaccttttactgagacaagagtgtcttcaaggaatatgttacctgaccagcgctgcaggaggcttgactgtaagtcatcaatgtacagtaagctcttttgtggcaccgcggtagcagaaagcatctcaatccccagacccgcctggcatgtcaggaagagacgaggcacgcccagacttgggcaggtccctccctttctgcttcctgacttccttcctggtgtctcaactcggccaccacagcctggtttcgctttgattgacacgcgtcaatctatagttgtggatgacagtgttcgggagagcccaggaactgtcaaaacttggttctctgcagtcctgaaggcactctgtctctttcggtcactccatctgacgattggtgcctgaaatacacctacggtttctggtcagcgtttatcagtggttggaagaacagaacccctaggaaccctg

SEQ ID NO: 252863 - DNA, 483 bp, Homo sapiens
ttgatcttgagaagttagaataagcaaaagttgacatagtttaccattttttgaagtgtacagtctaatgagagacaaatgtttacactaatgatcgtattattacaaattaagaaaggttcttataagaaaaggaatgatttctatgagatcacatagataaatctggcctagcttgggtggtaaggaaaagcattgaattctgaactgagatctgaaacaccagtatgagttaactagactaagagcagcgtgaagaatattcctggaaagggtgatataatatacaaagaccctggggcaggaggagagacaaggcatttgaatgaaaaagagaaaacaacgaaatcagaatgcagaatgtgaacacacagcagtaggatttgggatttgggtattaggcatgagtgaaaccagtggtcacattaagggtgagggaagagagagacgctctcatattgttttatactcagtacctgtttt

SEQ ID NO: 252864 - DNA, 465 bp, Homo sapiens
aaagtcagaaagggagcttgttgatggctgctgtcaattttattgctttaacctgtttactaggatagactctgtaacatggtgtgtttattggttttatgtattgcatgttgttgctgctctgacaagctactcctataaaaatgtgttattattgcacgatgtagctcagtgagctgaccctgcatttcaaagggtactggagcaaatagcactgaagtccataaaagctgactggcctccatcacagaggactctctgcatgagctgcaactcctacaacccaggagagaattacacctttccctgtgccagcagccactgcttagtacagcacagcccttgaacacaggcaatatctgtaaaattccaagacagaaaactgtcgtgccattcttatttgtccaactctccaatcagtgtagtttgcaattttgatgtttataaaagtatgaaacaaatggc

SEQ ID NO: 252865 - DNA, 590 bp, Homo sapiens
  misc_feature (1)..(1): n is a, c, g, or t
ncaatatcttaaggctgaataagtttacggcaaggcacatcaagaaatagattacatttattcccttggagagctgcataatatgagtgctgtaggctgatacaactcaaatcaacaaatgctgtgtacaaggctctgtggtagctcgtgccgaattcggcacgaggtggaactggggagcaggtgttttgtgtttcaccagctctgggttctcaagactctgtcatgagaccaaagatttcactgtgctctcaagttattgcaaaccagcaagccgcgaacttgttaaatttcccaaaatgtgctttaaatagaaatcccatatggtcagtgttgcgttctgtggccttacccttatcttagggtcatccatagtgtgagtttaggcttagtctcactttctttactgttttatcagatagtttattgggtacctgcatgggccaaacactgtccatttggctcctaccttctctagaaatagaggaagtagaaagatagtaatgatgggtttaacattttgaaagctaggttagttatggataaattccagaggttttagaatttggagcaaaaacaacattggaatt

SEQ ID NO: 252866 - DNA, 1037 bp, Homo sapiens
actgaattagatctttttacaaaatgaggccctcaccagaagctaagcagatgtcggtgccatgcttcctagacttctaagccttcagaaccatgagctaaataagcctcttttcttcataaattactcagcctcaggtattctgttacagcaacagaaaacactaagacgctgtgccaatgcgcgagtccacggctcttcacgggacctggcatgggacgcactggctcaggggctccaaggccactcagctcttcctcagcacagtttggctcatctctctgctgaccagcttcctacgcttagggtttccagtccccaagacttccgtccgtaatggacataatggtctataatggcacccagccctagtcctcctcctggaccaatcagtgcagcccccatagccaccaggtccatccctcaggttctagattccaaattccaaagatgagaatctgaccagtcccagctcttttgccagggcacacgtttccaagggcatgggccagccactggacaggccctcttcgggtgagcgatggcaaaatatagggtccctcctaagaacagtcattaggagagcagcagctgtgagggctgattagcccagaagggaacattggatgtgtcagccaatcctctagcacaacagaattaacataaaacaagcattttggatgagggatactcaacctgcactgttactcactggagagcgtctgagtgacccacagactcacaccccttcttacccacctcatctgcggggaggcggaccaggacatgtagagcaagatgaggaagagcagcaccacgaaggcagccaggctcacccagaatgcgatcacgatggaatctgcgggaggaggagatgcatctcagcgctgggttatgtcaacataaagcaacgctgaggggcagtaaggagtcccagggtattgtggaatgagggccctgagtttcggttgtcctccagcctctcagctgttaccatggggaagatctcccattaacaataactttgggaaagaaca

SEQ ID NO: 252867 - DNA, 470 bp, Homo sapiens
cagactcagacaaactgtcagacatgttaaccctgctcgttaaatacctggaggggaaaaaaggtagaagtaatttatactttctaagtcatatataatttggcaatgataacccgattattctgttatcttctaccacctattacctaataaaaggggagaggggctcaagagtataattctacatgttataatgagaaacaataagttctcatgaaataaaacatgaaccatctacccagagcataggttgaaatcagagagtatgcagtaagcactctaaggagccaatacatataataaagtctctcatgatattgacaggcaaaatgatgagtgaaatcttcactcgagaatacatttattctattttactcaacaagcctggttaattagtttcaaaaccacagtagattaaaaatactttaatttggaaatgaagcttttaaagcaggccgactgacagttaa

SEQ ID NO: 252868 - DNA, 340 bp, Homo sapiens
tctactctctatcttataataattactcagaataaaacaaagcaatgcattcattcaaatataaacaaaatggaatgcaacttaaaacagaaaacaggttcaaaatcaaaatttaacttcccattttgcttgtatgagatcagaatcaattaaaaagcatacctttgtctcccaatgataactgtgccttgtttttttgaattgttacttccttaattttaaaattgtaaatatttaaggtataaatgatgttttgatatatataagcatagtgaagtgattactatagtcaagtaaattaatatatctatctccttacataggtagatctttatttaat

SEQ ID NO: 252869 - DNA, 501 bp, Homo sapiens
ccttatattgaatgcctgaagaaaaaaatttttttgtgatgactaaaggtgctattaacctaaaatgtttatgttccatgtttttacaacttgtctgtgccatttgcactgaagagctaaggctattctgcaaattaagggatgattaatttctacacagtacagaatacacagaaaacaggtactcccaaattatgtaatccttgcctttttatgaagtagcttatttgaatatagattcaattaatcagtgtcacagtagaaattgtgataagtctttctgggatttgaagaggtctcatggaccctctataccacccaggttgagcagaaagaatcatcatttgagagattttctaaagaatccctcttttcttgcttatgaaaaaatccacgtacaatttaatcactttgatactaagttgggcttggataatatcattttggtatacctaaaacactggtttcattaaaaattttgcacatttaaaatgttcatgt

SEQ ID NO: 252870 - DNA, 508 bp, Homo sapiens
tccagggtgatggcggaatgggtcacggggcctcctggtccagcctggaggccggaaagccgcagcccagtgtgatgtccacagtggagacccaagccagcctcatcagggctggggcaggaagcgcctgctggcacagggctgggccctgcactgagtccctgggcaggggaatgcaggtcaaggcgggaagggcctgccttgaggggcactgggcaccacccccgggctggagaggagctgagggatgggctgggggggcagcggggaggtggagcttcctcaaggtcattcagattgaggggagcgcccagaccccccgcacccaccgtgtgaccccctctgtgcacgtgtagcgatgggatcctcttggccatgcatgtttgtacgtccatgtacgaaataaacatcttctcatgagacgcgcatgtgtgtggcgtctgtgcatatacatgtgcgtacacacagcccccgcgcacgcacgcatgcacttccacccctcaggaca

SEQ ID NO: 252871 - DNA, 1244 bp, Homo sapiens
agttcacggagggtgccggggaatagaagctctgtcagtctcgtctggatcttggtcctcagcaactgtctggatcctgacaggtgtgtgataattacttagtgaattcatgggtgtgggccgtgatagaattaagtgatttgatgtcctctcgataaatccaggtaacgacatagggttttttgagtttgaccctctcctgaaatttgccatctgacaaaatgacatcatggcagagttgtaaactgctgtggatgtattttatttaatttctcaaattaaaataaaaggtaacggtacacttaagagtggtcactacagccaagctaattgacacccactgaactttctggaatgggccataggatgctggacaataggacagatttggaatgagcagtcttccattccaactttagtttctgcaaagctgttgagagcatggagccaggctgcggggtctgggttcaaatcctgactctaccacttaggagctgtgtgtacatgggcaggacaactggcctgcctgagtctcagtgtaggtgtctgtaaaatggaatgataatagcttccatctcacagattcactgtgtgggtaaaatgatagatatgaaatgctaagaacagcacctgtacgtagtatgtcctacatatcttactgttatcattagcatattttgtttattccaagatacattttttttggcccatttgatatctatgaaatctaaagattttttttcctgtcttgggagatagaataatgatgtgccttacaatggattgtgttttagattcactgaaattcattattgttgtttttatccctggtctgtaacatgatatttggtaaataacaaggactccatacgttttgcaaagagtaaattctctccctccctactgaggccttggtctaggtctctccaggcctttccttcctggagccacagtgcttagagacaggccactggggtcagcatttgagctcagctatgatcagaaaaaagcaccgttgaggttgcagtgagccgagatcacgccactgcactccagcctgggcgacagagagagactccatctcaaaacaaaaacaaacaaacaaacagaaagcaccgtcgagaaatggctccagcgctgactagcggccacctcatttccccccttgaccactgggccagttgggtggctaggttgcctcattttgcatccttctgtatccccaaatctgaaataaaagctgg

SEQ ID NO: 252872 - DNA, 958 bp, Homo sapiens
  misc_feature (955)..(955): n is a, c, g, or t
  misc_feature (958)..(958): n is a, c, g, or t
agttcacggagggtgccggggaatagaagctctgtcagtctcgtctggatcttggtcctcagcaactgtctggatcctgacagtgcagtaagagcttgcctggcctgtgtgcagagctgcctcatcctgaaattctgggagttgaaagccccagggcaacccttaaccaatgggggaaaagcattggtgtgtaaatcccccagcttccctgggtgggctgcagctgagccatattctacatgacacttccgaggatccccagtgggcatgacctcaatcgcccacattggatgccacaacctgcactggcttttctcccttccctgtgggtctctctctgcacttcctcccttgtgcattctaggttcaccttccaaataaatgatgtgcactcagaaaaaaaataaatacaaaaaaaaaaaaaaaaaaaaaaaaaaaaaagagaggggggcgcgcgctctcataaaataattattccctctcggggggcgccccagtttgtacgcgcgcatccccccattttttttttgttcaaaagaggggtgcccccctatataagagggagggccgcttttttatatataaggctcagaggccgcggggcgccgcgcggttttaacaaaacggtctgcgggatggggagaaaaatcgttggcactcgtcgtggggaactcttgtggggggaagcggacccctttacttctgtggggggggctggacacattatgtgtggcggaacaaaacctatcccaatataggagagaatttagaacgccttctagagggcgataaaatattataatcattcttatgacaggggtttatacgtggtgtgttaacaactgagggtgaaaattttgtcgtcgcgggattggaaaaagtttgggacttcaagggaaggatgttgattcttgggaacaatttttttccggggggaactatctgttaaaatacnggn

SEQ ID NO: 252873 - DNA, 473 bp, Homo sapiens
  misc_feature (26)..(26): n is a, c, g, or t
aagcttgcggccgcagctccctcacnaggctcgcctcgcacatggccgagtacgagtgcttccagattgaactatccaagaactacggcatgtccgagtggcgagatgatgtgaagaaggtcctgctcaaggcgggcctacagaacctacccatcaccttcctcttctcagacacccagatcaagaacgaatccttcctggaagatatcaacaacgtcctaaactctggtgacattcccaatctgtatactgcggacgagcaggaccagatcgtcagcaccatgcggccctatatccaggagcagggcctacagcccaccaaggccaacctcatggctgcttacacagggcgtgtgcgcagcaacatccacatggtgctgtgcatgagccccatcggagaggtcttccgagctcgtctgaggcagtttccctccctggtcaactgctgtaccatcgactggtttaacgagtgg

SEQ ID NO: 252874 - DNA, 326 bp, Homo sapiens
cagttggggctgccctagagagagaggtgagaggataggaagagagggcaggaagcattggccaaggacacttgtgggctataaaagcctcttgcatgaaagatgggccagttgggactttcatattatctgtgagtaataaaaaggttgacaaaaagatcattattacccaaaactcaagtatcagcagggtgggctgaaatcaatagggccatagttgtgaataagatgtgtagcaatctgtacttgggaaatgcattttttaaaaaccacttataaactgatcttcattacttaaagataaagctgctaatgtatacacaaga

SEQ ID NO: 252875 - DNA, 449 bp, Homo sapiens
tggtgtggtagcttgggcaaaacattggatcataaatcaaaatacttgagttctaatgagaacacatggacaaagggaggggaacatcatacaccagggcctgtcagagggtagggggctaggggagggatagcattaggagaaacacctaatgttgatgggtgcagcaaacaaccatggcatgtgtatacctatgtaacaaacctgcacgttgtgcacatgtacccgagaacttaaagtataataataaataaaatacttgtgttctaggaccaactctgtcagtacaagttttatgaactttgacaaaacctaaggcactcttgttgacagcttcatctgttgactgcactaataatatctttcccatgtacctctcaagacttctgaagttcaaatgaagattaataaataaaaaggctttgaacattaaaagttctatatatatg

SEQ ID NO: 252876 - DNA, 382 bp, Homo sapiens
ggagtatctattgagcttatcctgtccctgtgtcaccattgtacattgggcgtgtggtcttgtctttttagctcacaggtccctgagtgaagaggagccacccctgaggagttgtacccaaggagactcagccacagccagacctactgcacattttgagatcatggtcttggagcctgatgtcgtgattgggtgctttgggaagggtgggtgtattttacaagtgggaggacagagcatctttaggagtagagagcaaactgtggtggagtgccacattaatgccctcagccagtcatgcctctttcacactgactctggcttggccataagacatgttttggccaacaggagttcagcaaacgtggtgcaagcgatttcc

SEQ ID NO: 252877 - DNA, 637 bp, Homo sapiens
cgtttgagagctagacataagccatgtgaagggtgtatggttgttcgcatttgttgtaggaggacacatgaaccaaaagtgccgatcagtggctgtgtcttccctccagaagccagcacagagcttgggcgtgggacttagctggatttcctctctgccttttggggtgagatacggctgatgccttgatgtggaggaggaagcagcggcatcgagcccatgcccacagttggcctgaggcccactcagcacctggtgccaacccagggcagtgagaggagacagagcctgtccctggctcagaaccagttgcggtggagagcggaggagggaggccatgggaaccactcctcttgccctgctgagggtgtctgggtggatgagggccaccgcggacccaggccaggatggctgctgtgggggaggagaccgccagggcagcagtgacagccaagagcagtgagcgagagaaaaaagaccagtgttttactggcttatggggaggcagctatcaccagggctacaagactctgcaaagaaacccgtgcacttccaagttcgtggtgaaaggaaagacacttggcagctgggcaggattttattttttgagacagagtctcgctctgttgccaggctg

SEQ ID NO: 252878 - DNA, 433 bp, Homo sapiens
cgtttgagagctagacataagccatgtgaagggtgtatggttgttcgcatttgttgtaggaggacacatgaaccaaaagtgccgatcagtggctgtgtcttccctccagaagccagcacagagcttgggcgtgggacttagctggatttcctctctgccttttggggtgagatacggctgatgccttgatgtggaggaggaagcagcggcatcgagcccatgcccacagttggcctgaggcccactcagcacctggtgccaacccagggcagtgagaggaggtaggaattccaggaatgagccggctggccctgggctggttccaacaggctccctgccctggcagaggctccaaatctgagcttccttccagaggaggccaggccaggtgcagcgatggggttgggagtctaaggtagggacaggaaggggt

SEQ ID NO: 252879 - DNA, 397 bp, Homo sapiens
tgtttgctgtggtctgcaggctgggtgtctgagaacaagcctgtttgggggttagaggcccagctttatccttgggcaagtcacttcatctctgggccgccctttcctaacttcagattcagaggtcaaacccactgataattaagggctcttctatccttaaagatctgtgtttgcataagagttcggttttgttttttgttttttgtttgtttgtttgttttctgagacacagtttcactcttgttgcccaggctggagtgcaatggcatgatctcggctcactgcaacctccgcctcccaggagaattgcttgagcctgggagacggaggttgcagtgaaccaagattgcccccctgcactccagcctgggagaccgagcgagactccgtctca

SEQ ID NO: 252880 - DNA, 437 bp, Homo sapiens
aatcatgaattagaaaactcaagctacatcataatcatgaattggaaaactcaagctataccataatcatgaattggaaaactcaagctataccataatcatgaattggaaaactcaagctataccataatcatgaattggaagactcaatactgttaacacatcagttctcctgaacttgatgtactgattcactgaaaccccaatagaaatcccagaagtttattttgtagatatcaacaaactgattctaagatatggaaggcaaaggagtcagaatagccaaaaccattttgcaaaagtagttggatgacatagtatctaatttcaaggcttaatataaagctatagtaattaagagaaagtaatatgggcacatactgttacactgacacatggatcaatattatataaagagagcccagcgatagatccat

SEQ ID NO: 252881 - DNA, 443 bp, Homo sapiens
aggggaaatcagctttaaacagttttctaaggtatggtgttcattacatactggggaaaggatcataaaatatatagacatgttgaaataaaataagaatccagtttggaactatgcctgtttgtaagaccatatttcaaaaatataagagtaaatggtttctacctatctgaattaaactttaaaaaattgagaatatttttgtcaacaactgtcatattttgttatacctcaactttgaaaaatttctgaatgtgtgtgataaaagattgatgaattctaatacctaaactgattattgctaggcctcaagcatcaaaatgcctgacatgataacttttttttttcatttgtaaaagattatgtagtttaatatttggggctattaaaataagcccacaatacatctgcattttaacagtagacaacaatatttttcttat

SEQ ID NO: 252882 - DNA, 463 bp, Homo sapiens
gggaaggctctggacccctctgagggtgagtgcacacctgcagcctggagccctgctttcagagaaggattaaaacggggccaaaaatggaagccctggagcacaaggtcctgcagaggcttttaactgctgaaaggttgccaacgactacggtcaatgtcttgggagcccctggagccccggcccctagcctggctgtgaaaggtataagctacagaagacacccaccagccccaacttcccgcctgctgcaccaggtccatgaacctattccactttgcatgggaacacagaaggcttgggagtcaaggccaggcacaggctgcatggatgggttcccttgggacagaaacctggagtgggacagctctgcctagcctttcccaggtcaggtgggggtcctgagctcaggccaagggtccctcgtggaccagcgatgcaagaacttgggagtgagtccttg

SEQ ID NO: 252883 - DNA, 368 bp, Homo sapiens
agccctgtttcctgatctttgcagattttcttttgcaaataagaaagtttctgtaagagccaagttgtgatttgaatacccagcaagtcatggtggcttatgcctataatcccagcactttgggaggccgtggctggcagattgcgcaagttcaggagttcaagaccaccctgggcaacataatgaaaccctgtctctgcaaaaaaaaatacaaaaattagccaggcatggtggcgaatgcctgtggtcccagcaactttgaaggctgaggcaggaggatcacttgagcccaggaggttgaggctgcagtgagctttgattacaccactgtactccagcctgggtgacagaaactgtcttaaaaaaat

SEQ ID NO: 252884 - DNA, 496 bp, Homo sapiens
agcattgtgcaaattgacttgtcagactctaatttggaataagggcgattccaatttaaaagtccttatttcctacctcggtggagcttgcagtgagccaagatcgcgccactgcacaccagcctgggtgacagagtgagactccgtctcaaaaaaaaaaaaaaaagagtccttatttcaaaggtgatggctctagtttacattctccgtcatttacatgctctggccatggcatgggtaaagtcactcagaaagcgtttaaagaaaagccagagggaggtcacagaaccttgtggaaaacttatatttaaggggtaggtaaatcttcatatttagaagagattatgtttcaaaacttactaaaaagacaaaaatgggctgggcacagtggctcatgcctaaaatcccagcactctgaggccatggcaggaggattgcttgagcccaggagtgcaagatgagcttgggcaacacagtgagaccttatcactaccag

SEQ ID NO: 252885 - DNA, 467 bp, Homo sapiens
agccaggtcacccctcaaaggtgaagtgctagaaagagcatcatgtaagtgactatttgccacatggctgaaaggaattaaaatagccctctattggtgtgctatatagcagatggaaaaaatagaacctcagcacccaaaacattctcctgttggccaaacttgcacttttaaataagaggaaaagcagggagatcaaagacagttttgccttcttttttgtgctttctttctttttctttctttctttcttctctctccttccttctttctttcttttttttgaggggaaaagaccctgcagggtcttttcccctcaaaatatcaatctttcagactataataaagcctttcctataattgaaaaaaaaaacttttttgttaaaggtaacgggggttgttacttggcctttgaagagcgtacctttgtaagtatttgtaagaagcctatgtgaattaggaaatgc

SEQ ID NO: 252886 - DNA, 432 bp, Homo sapiens
catatttacactcacacactttaactttatgtacagatgggcatataaacatacataattgcctatgaagatatgtggaaaactgaaaagagtaactgaatccttgaggaaaagggaaatatgaaagacaattttactttttaactaatttatcattacaaatcttgtatttttatgaggaaaatacaattattatgtattacttgtatcattgaaaataaaaatctatgttgcatacattataagatactgtctctcatcttgcgggaaaatgacttaaggaaacccataatttaaaatgaagcagaatgaatttttttgttataagaactatttgtaagattcacagaatactcactgggggttaaaacagctgaacatcaatttactgtaaagtgggactgcttttgccacacgtcaatgtcacttcat

SEQ ID NO: 252887 - DNA, 417 bp, Homo sapiens
ccggtgtcctgccaagctccatcgaaactaaatctagaatgaatgtttacttctgctgtgacatataattggagaccaggcctggccttccagtcactggattctaagttggactgtgagagtttttgcagctgactcatttatcaaatgcccggctattggctcacgcctacatgatgctgggtatgtttgttaatttgagggaagcaatggaataataataactaatgatttaaaaaacaaagtaagtgcattgactgtagtggggttctgattttaaatttttttaaaaattaataccaggagcagtggcttatgcctaaattccagcaactcgagaggctgaggtaggaagatcacttgagcccaggagtttgagacaagcctgggctatggtgtgagacacccatctctaaa

SEQ ID NO: 252888 - DNA, 469 bp, Homo sapiens
tgtatttttagtagagatggggtttcgccatgttgggcaggctggtctcgaacccctgaccttagggaatccacctgccctggcctcccaaagtgctgggattacaggcgtgagccactgtgcttgcccagattctctaatatttatatgatgacttacatagattaaataaatataaaagcgtatctttcttaaaaatttttaaacactaggactaataaaaatattatactcaaataatttaaatgcagaagattgtacttacaaattatgtgaaatagattactatatttagaaagtgttttatttattacttatggggaagtggtggaaatgtgtaaaatgtcttatctcagttatgtttctgaaactctatgatctatacactggtttatgatattgtcttgtttcccttggacagaaaattctagtaagttataaaacaatttataaaatacatataaattat

SEQ ID NO: 252889 - DNA, 404 bp, Homo sapiens
gaaaaaataaaacaaatctacaatgaacacatcagtatgtatatttctacaaacttgtgtgagaagttctgtaagatcaagtcctaaaagcagaattgctggctcaaaggatatgagtaacatcagctgactcgaagttaagaagattggcctccacaatcagggtgggcctcatccaatcagtaaaaggccctaagtgcaaaactaaggcttccctgaagaagaaatgtccacctaacagacagcctccctgtggatttcagacttgcctagccagccccagcaattatgtaaaccagttccttgcaaaaaaaatctctttatatgtatataaacctgttgaaaattttatatagcatatatatatgtataatacatacatgtgtatacatgcataaaatgtg

SEQ ID NO: 252890 - DNA, 424 bp, Homo sapiens
ataaaatgaaaagtcaacccagagaataacggttcttcatctttttgaggggggcgttgggaggaggtcatggaaaatctgagagaagctaacgatgctcccccagattcccacacaagcttgcacacaagcaagtttactgatcatttcagaagggttcatcagctccctgaagctgatacacacacgatgaattaaaagctcctgtcacaggctaggcacagtaatcccagtgctttgggaggcagaggtgggaggactgagcccaggagtttgagaccagcgtgggcaacatagcaagaccctgtctttacaaataatctttttttaattagaagcatgatggcatgcacctgtagtcccagctacctgggaggctgaggcaggaggatcacttgagcccaggaattcaaggttgcagtga

SEQ ID NO: 252891 - DNA, 430 bp, Homo sapiens
aagagcaagcaacatccctcccactcacatgccttgcttcttagggagctgctgttgtggatggaagtgctgttctagggtataagtccccttcaagtacaaacataatttagagctatcttagaaaagttgtcactcatataacctgcttgtaagtaaactcaggaaactgaggaaacgacattgcttttggtgtcaaggcaaaaaattccagtgagtcacatatgtacccattacttcctgttatacacacacatgcacacccatgtacaaaaacacatagtggaaccacattacacacaaagacaatattcttaaatgatgcagatgaaatgaaagtcacatagagtcaaaatgaccctaggttatcccttctttagttgaacccccagtgaagccgttacattgattccaggatccaggttgtgag

SEQ ID NO: 252892 - DNA, 528 bp, Homo sapiens
cgctttcaaacacttcagtgtactttcagctctcaggaaaaatgcaaactttcatctgggcctaagaatctctatatgaactacccctgctcacctccggagaggcatccccttccaccaccctcccctccttcttctctatcctcattgctcctttcaatggtcctgacaggatccctttcagccacaggcccttagcaaatgctgctctcacggcccaagtcatcttccctggttcatgcctacttcggattaaagttacccctccggagagtgttcccaatcaatctgagttgaccaagtccttattacacactctcaaactccatgagatgtccttcatagctctcatcccagttataattagtttgcatttatttacacaatggctgtattaatgtctgtattctccaccagaatgagagcttcatgagagccaggatgtgtgttttctcaaaatctgctttattgtggtctaatttgtgtataataaacacacccatgttaggtgtacccatcaatgaaaaa

SEQ ID NO: 252893 - DNA, 367 bp, Homo sapiens
ataactccccaaaatgtttgaacagaaaagagcaaatgaaggcatttggtcagaaaatcaggattcaaattcgggctttaccagacactgagctatgtaacattgattaagccacttcatatccatttcctcatcagtaaaatgaaaagttaggtgtgtgtacacacatactaattttaatcagtaggttaagtataaaaaaatagaaaacttgaagaatgggagacagttctgtattcacaccaacttacaaataactcaatgcaatagcttttcgtgagcagtctctgtctcccagcaactgtcagatgcttgagacacagagattaataagtggtttggtctcctcttaaaagtgagcattaaa

SEQ ID NO: 252894 - DNA, 2873 bp, Homo sapiens
ccacgcgtccgataataaagaaacttgaagacggaggttcttccaaacaactggcagtgatttatggaattggtgaaacaacagttcgggatataagaaaaaataaggaaaagattataacttatgcaagcagttctgattccacaagtcttttggccaagaggaaatctatgaagccatccatgtatgaggaattggacagggcaatgctggaatggttcaaccagcaaagagcaaaagggaatcccatatctggaccaatttgtgcaaaaagggcagagttcttcttttatgctttgggaatggatggtgattttaacccctctgccggttggctaactcgttttaagcagcggcacagcattagagagattaacattagaaatgaaagattaaatggagatgagactgcggtggaagatttttgtaataactttcgagattttattgaacgagagaatttacagcctgaacaaatctacaatgcagatgaaactggactcttttggaagtgcttgccttctaggatttcagtaatcaaaggtaaatgcactgtccctgggcacaaatcaattgaagaaagagtcacaatcatgtgttgtgccaatgcaacaggtttacacaaacttaaactttgtgttgtggggaaagcaaagaaacctcgctcctttaaatcaactgacaccttaaacctgccagtctcttatttcagccaaaaaggtgcatggatggatctttccattttccgacaatggtttgataaaatttttgtgccgcaagttcgagagtatttaagatctaaaggcttgcaggaaaaggctgtgctcttgttggataattcaccaacacatccaaatgaaaatgtcctaaggtcagatgatggccaaatatttgctaaatatttaccacctaatgtggcctcattgattcagccttcagatcagggagtcatagcaacgatgaagagaaattatcgtgcaggtcttctccagaacaacttggaagaaggtaatgacctgaaatcattctggaagaagctaactctgttggatgcactttatgaaatagcaatggcatggaacttagtaaaaccagttaccattagcagagcatggaagaagattctccctatggtagaggagaaagagagcctggactttgatgttgaagatatttctgtggctactgtggctgccattttacaacacaccaaaggattggaaaatgtgactactgagaaccttgaaaaatggcttgaagtagacagtactgaaccaggctatgaagtgttaactgatagcgaaatcatcagaagagcacaaggccaggcagatgaatccagtgaaaatgaggaggaggaaatagaactaattccagagaaacatattaatcatgcagctgccctccagtggactgaaaatttattggattatctagaacaacaaggtgatatgattctacctgatagactggtaatacgtaaacttcgagccaccatcagaaataaacagaagatgacaaagtcaagtcaataatgtcatttcaattttattgttctgctcattgtgtttgtgacaaactctttgcaatatggcttaattttctttgtgttctgaattctcagacttggtcctgtgaaatacaggcacaaaatgtatctgaagtggtttgaggattatgtgttttcatcatctgtgtcttttgtccttttatttgtacagataatcagaagatgatactgaatagatataaattacatgtacacatgtattcactttttagaatctgcaattataccttctgtaacagtggcattcccttaattttctagtgaaagttagagataactgaacagactgaagcacttttctgaaatcttttgcttgatttatgaaggctgccatagttatcttttcttgtgttaaccatcttaaatgatgttttgtatattttaatagactgataggatgagaaagatttatattattagatttcaggatgatttataataattcaaaaatgaaattcaataatggggaaataattatgaattatagaaattatgccttcattctcttacatttgtgtgggttgcaagagggggagattattctggaaatgaagtaaatatgggaagttattgccaaatgagagagaaactatgggaaagctgatctataaagaggcattctgatcaattcatttgtaggaaactgggaaataaaaacctggggaactttaggttatttatacaaagggaataaataggctgattttaatttggtaagttgatctttttattatgaatttggtaatagtataggtttattatttattcatctaattttatagtacaggttttgtaatgttacatgtgatgatatgagctcccaccttatatgggggaacatcttgggaatttgagatttaataagttttttttttttttttttagtgtttttactgcatactcacaaatgttgtctataatttgaaaaatattgtcatatctggccctttgatgagaaaaggaaattacaataataaagttttatgattttaaataagtcatatgtttgtatcctgttttatgaagaaagcagaaataattactgaaagtgccagacactaaggaatattattgtttattattttaatacatataaaaagggattaatctgctaaaatgtaatctaaatcagaattttgataaattttttttgtaaactaagtatgtttattcaagacattgaaactactttgcacatatgaatattaatgtaacttgtaatttaaaagtaaagtgtttccatgctatttcatgttttggccaaaaatttttaaaaaataaattacaattgttctctattagt

SEQ ID NO: 252895 - DNA, 1295 bp, Homo sapiens
cttttatagatggtaatagcctttaagtttgtgattatttacaaatcaaatttcctttttattcctttaaattataagaatttagtataatgtagtattgctatcctaaagccatcttgaatacttgaaagattttgtcatagccattttgaaacccttgtatccctatattgcagggcatcttccaacagggttccattttgtttcagagtcttctatgaagtctccatgtaaacctccattgctgcccaccttatcatgttcattctgtcttgttttacaaaggcaaacatcacattttattttattctgtcactgtcttctcagtgccttctgtgttgtctcaattcagagtatctcctgcaaatagttctctttcagttttcagaggttatagggttacaattcataatgtttgaatgtgtaactctttatttttgttattatttttatataaaataaaaattattaactaaattttatgtgttattcctccactcccaactcaccattagtatcttatgatattgtctaatttattacatgaacacagtatatttctcttcacttatttatgtcattaatttctttcagcaatgttttgtagtgtttggtgtatagattttgcacattttttggttaaatttacatctaatttcatattttaatgctattgtaaatggtattgttttattaactatttccaactggttattgctagtatatagaaatacaattgatttttgtatattgctcttgtatcctataaccttgataaactaatttattggctctagttagtataacttttttgtagattacatagtattttctacatagccacattgtctgaataaagaaaattctacttctccctttccaatctggttttcttctatttatttttcttaccttattatatgagctataaccttcagtacaatggtaatagaagtgctaggagtggacatccttgcctttttgttggtcttaggggaaaagcaattattctttcacagttttgcatgatgttagctctagggttttttgttttaataaatactccttatcagcttgaagtgcccacctattcttagttagctgaaggttttcttttaaatcagtaatagattgtgtattttttcaaatgctgtttctacatctattgagatgtttatattgggctttgtttctttgttttaatgcctgttcatatagtgagttacattgatttttaaatgttaaactaacttgctttcttggaataaatctcacttgatcatgatgaattatct

SEQ ID NO: 252896 - DNA, 858 bp, Homo sapiens
tggctcacgcctgtaatcccagcactttgggaggccgaggcgggtggatcacgaggtcaggagatcgagatcatcctggctaaaacaaaacaaaaaactgaaaaataaatataatgtcacaggcaggtacgattaagggttctgttttaccacccaaggcacacagcagctaagtacccaaagtctctccacaggtaagtattgaagctcttggtaagtatgcacatccccaaggacctgactttggggccctgctctgaaagcccagacctcggggtctgcccttggagctgaatgatgcagtggggacacacagataaccgctggactcaatccctgcccatgagttgctcaccactcaagcggagagacagatgtgcctcttaagaaagaaagaagtactggctgggcacagtggctcacgcctgtaatcccagcactttgggaggccaaggtgggcggatcacgaggtcaggagttcaagaccagcctgaccaacatggtgaaacccgtctctactaaaaatgcaaaaattagctgggcgtggtggtgcctgcctgtagtcccagctactcaagaggctgaggcaggagaatcacttgaacctgggaggtggaggttgcagtgagctgagattgcatcattgcactccagcctgggtgacaagagcaaaaaaaactccatctcaaaaaaaaaaaaaaaaaaagaagtactgaaaaaaaaacaaaaaagacagatgagatgggtcccagccccactgaacacagttctcaattcagacaatctccagtgacgctgggaaaccaggtctcattacacaggtctctccacctgctcctgccaagaagaaacagacat

SEQ ID NO: 252897 - DNA, 2451 bp, Homo sapiens
  misc_feature (951)..(951): n is a, c, g, or t
  misc_feature (2420)..(2420): n is a, c, g, or t
ccaactgttgatgcatcttgaaaatcattcctcaagtttattatcacttccattccccatgtcagtggcatagctaattatttagaaggcaggtgtctctaggtaattatagttagttctgtatgcaattatcctttctgaaatgtgtgttgtatgccgtaaaaatacctgttacgttatagaatataacaaatagctaacacaatagttaatacttagttgatgctgactatatataattctctagtttattatcataataatacacctcacatcattgaagtcttttacagtttaccaagttctttcattcacggtgtttcatttgggtatcccaacaacattttcaaggcaaacgtgttaccatccttagtttgaagaggaggaacctgaaacttaggaagactaaataacttgtaaaagatcacagaagtgatatctaatagagacgagcttcaaattcaggtttattgaactcagaatcaatgctcctgccccctacctctcaggagtgataatggtaaagattgggggactgtaggccaaataggtcctctgacctcttttataattgtcagcttatctaacgtgaatgacttagataggccttgcagattgagtccttgggagatttcctgcctctgtctagtattatacccagcccaatttgtacctgctgaccttccaagttcctgtgggcatttgagtttctgacctttgcctttgaataagcctgccatttcctatagcatatgtgcattttttgcttcctggaactttctactactttatatttgttctgattacttatcagcaaacaaatcttttagactgccttgtagttctattatggaaaaagtgagaaattattatcctaagaataggcacaaaacatataatacagtgccttgcacttaatgtgtgcttacaaaatgttaattgatgatgaanaagatttaaatcttcctctaaataataagattttatagttatccatcaaaatctaattatgctgaagtcacttcacatcatcataaaaaagtgtttaacactgtttatcaacagataaactgttgttggcttgtaaaatcaaacttgttctgcacttggaattttatcaagttatttgttgggaaaagtttggattatgtggatacttttggtagaagcgttgtgtaaaatgtgtggagtaaaaagtttttgcagataatgtgtttgacataccatattattatattggatgagactttcttccacctgcagatgtttctctttgtcttcccctggtagggttccccttatataataatattcctaggagcaataattgttcccccagatttggatgtcttccagtagttcagagtttcacttagcaccaaaaattaataagctttaattaaaagaagtgattattgctgaaaatgatgacctgttaactccagaaaggcagggtgcttttatccattctcctccttcaaggttggcttttgaattctgaaccatggatttcaatgcagtccatcctcaatttgtaggaagcgttgttttatttggaatttaaaaaggaagctctgttaggtaacattgcagcacaagttctttttaatgtaagtccatgtattaatcaaaacagctgtgagggttactaggtagactgtgacaccgggtggcaataaaatgtcttcctcattacaattaataccgatgacttgcagagacctcctgtatgtgatggcctttctcgatgggcatcctcacttggtggtagggaaaatgagtatgggctgtatgaaacaatttcagcaccaccctgagcttaatagagccgtctttcattgcctgttaacaagctgtgctgctgccataaaatgttcaagctgacaaatgctgtcaaagctccttcaatgcaaagattttctgccgtatttaacatgttaacttttattttaatgatgccaaaacacacatcagttgtttgtgcaacatccagtgtggtctctggagccatcccattagctgaaaagtatagtcagtgtcctgttccagtggccattaatggtaaaattcttcaattaaaaactgtggagttatgctgattcaaccattcactctatcccagaagtaaaatagatatacctacttgctgtgaaattattgagtttgtttagcttgattttctgtgcattacattagccatgagtgtattatagaggctaagaatgataactctatgaaggtttattatgagattcccatatttggctcaaggttttatacaacttgatatgctacctactactagtcttccagttccactattgcaactagttaacacatacattgtacttattgtgtgccaggctctgttctgactgctttatatgtatctactcatttaattttcacaacagtcctanttattaagtgccattgtcctcacttaaaggt

SEQ ID NO: 252898 - DNA, 1211 bp, Homo sapiens
gacagctgttatgagctagaagcgcatgacttattgtgacgatgtcttgcctttctgtggtccaagttggagtacatggcaatgccctcctgctgatgtgcattaaggaaaatctaagtctaatatttggaattaagatatattttagggggaggggacagaagcaatgtaaaatagttgatttatgataaagctcagaatgtcctcttcatttattttcttgttttattttcctttctaaacagaaactgcatttaattccaaaaagtagtattcttatttattatttaaccctttgctgctgctaaaatgtgcacatattcaggctttagtttttccaaaaggcattttttttttggctgaaaaatattaaacatttgaccacagggaagaatcaagtttctaggatgtcataggtatactatgtagcactgaaaaaattgattttaggtgacagccaaaagtagtcttaaagtagcatgagaccttagataatcgacctaaaagaaagaaaattgtgaaaaagacaaaaatcttcatgcattcctataaaacgctactttaaggtctacttttggagttaattttgtttggtactttttttttttttaagacgagcaaattgttatatgcttttggcaattgatacaataaactgtaatggtctgtaaataaataaatattgactcatgcgatttatgtaaatagtggaactgggagagtggatggctcagggtttcggtgtgggcattgtctcttgggcagtagagtgagtcatccccagctcatgggtttgcatccagttcttgtcttaagagacccaaagcccagtgaatggcagccctgagccactgtggaatgggggttctggtttcacaaacagatgcttagatagccaaaccactgtcttgttggtgccaacacttgcactgtggtcaaagacttaccgagcatgggctgaacaaccttcccatctgtcatgtgaatgtccccaagcagtggtgaaggacatgctaggtcagtgttggggaacctgccctgccaggtcctgttttgtagataaacaaatggctgccttctggtgtttttattctatttcatctcattaacactacaaccttgtgttatttacttgataatctgtaattgtatgtaaatacatacaggattatgtaatttgtgtaaatacataattacagagttttgaaaac

SEQ ID NO: 252899 - DNA, 449 bp, Homo sapiens
gtcaagttttatttttgacctaggtactagttacagtgtgtttgccttttaataaatgtagtaaaccacatatttgctttgcatgattctctgtatctgtgttttattttaaaagaatttttatttatttatttttaagacagagtctcactctgtcgcccaggctgcagtgcaagacagagaaaaaaaaaaaaaaaagaaaaggatcggtcacttttgaagagcagtaggaaaccaattcatcatcttgaaaactggtaaattacagaaaaaaaatcaagcatttaccataactgcctttcttatacaaactgaactaccatgtaactaaataatatatgaggtaagtgtctccctataaaagtattcaaatacatgaaaaagaaataatagaatatcagcaaccttcaatgaattgatatagtcattaagcatcagtagaggcttat

SEQ ID NO: 252900 - DNA, 473 bp, Homo sapiens
gatggatcagggctggcaaccattactggggtggtttctttgggtcttttaagataaaagagatttgatatgtttattaagtaatgtggttaccctggaagctgggcatgtacttctcgtgataactgtatagcaattacttctgttggttacaagcctcagcttttgtttgctgaaatgttagatttggttatatctttgtaggtatgagatacttttaaagggatagtgtttagtaaatttagatatgtaaaacttgcctttcattggcaaggatcacaataacagctttgtaggatttctccgcagacaaataatctctacagtggacctcaagcagtccttctgcttcggcctcccaaagtactaggattataggtgtgagcttctgaaccctgcacaccgccagattttttgttgtttttgagtcagatttggtaatttgtatttctcaggcaatatgtctatttcat

SEQ ID NO: 252901 - DNA, 433 bp, Homo sapiens
gatggatcagggctggcaaccattactggggtggtttctttgggtcttttaagataaaagagatttgatatgtttattaagtaatgtggttaccctggaagctgggcatgtacttctcgtgataactgtatagcaattacttctgttggttacaagcctcagcttttgtttgctgaaatgttagatttggttatatctttgtaggtatgagatacttttaaagggatagtgtttagtaaatttagatatgtaaaacttgcctttcattggcaaggatcacaataacagctttgtaggatttctccgcagacaaataatctctacagtggacctcaaggtgtcatccaagaattcacttgagtcctatgccttcaacatgaaagcaactgttgaagatgagaaacttcaaggcgagattaacgatgaggacaaa

SEQ ID NO: 252902 - DNA, 520 bp, Homo sapiens
aactgcacggagtttaccattgctaacacccagtacctatagtcacctaatgtctggaacacagtaatgcagatggcaagtttcttttgaaaatgacttaagtagttttcttgtggaacatcaaactttattattccaagaaattaagatataggtaagaaaaaatgaaatgccaaccctaatttaaattatctacatcttcaagtctgttaacagtaggaggttagatgtctgtggccaattttaaattaggtttcagataattgatatgaaactgtttacacagaccactgaaaaatggtttaaaaaggtggtcgtttgagtaaggtaacaattcttaattaaaaaaaaatatacagaacaaaattctattaaagatatttgcatctctggttatgatacaaattctgaaaaatgtatataccaaatactccttaaggcagagctgacatttaactcttgaggataataaaaactggatcagtattttgttgaaataaaacttatgataaaagtgaaa

SEQ ID NO: 252903 - DNA, 547 bp, Homo sapiens
tcatgagtgatttacatgaactgtgttctcctcggggatctgtaaaaatcctgtgcctaacaggtaaggctgtttctttaatgccagtagggccttcgtccctggccagggtctcctcgccttagactggccccagtgatgctgtgaagccacttgggcatctgtagggccagcatatgcctgtcctgtcagggttgctcaccctgagtttcacatgtgggtggaagtggactgttttctggttgcctgtgaatatgccctgcacaaacgctgtctgcttggagggaagttgacgggagtgtggctggatgctgtctgcccggcgctgtcttcctgggctcagcatcctgggacacaggacattgtagtggagcatcccaacctgaaactttgtctcagtgtagagacccagaaagatggggtctgggtgaaggagtgtggagtatggctgctgctttccaggaaacggtttcccctggtaacagatggcattgggcttttagtcctgttgaaattttgttgtcagaagataaatgtaaatagactc

SEQ ID NO: 252904 - DNA, 711 bp, Homo sapiens
tcatgagtgatttacatgaactgtgttctcctcggggatctgtaaaaatcctgtgcctaacaggtaaggctgtttctttaatgccagtagggccttcgtccctggccagggtctcctcgccttagactggccccagtgatgctgtgaagccacttgggcatctgtagggccagcatatgcctgtcctgtcagggttgctcaccctgagtttcacatgtgggtggaagtggactgttttctggttgcctgtgaatatgccctgcacaaacgctgtctgcttggagggaagttgacgggagtgtggctggatgctgtctgcccggcgctgtcttcctgggctcagcatcctgggacacaggacattgtagtggagcatcccaacctgaaactttgtctcagtgtagagacccagaaagatggggtctgggtgaaggagtgtggagtatggctgctgctttccaggaaacggtttcccctggtaacagatggcattgggcttttagtcctgttggctctctttgcatctggcctcatccaccgagtctgtgtcaccacctgcttcatcttctccatggttggtctgtactacatcaacaagatctcctccaccctgtaccaggcagcagctccagtcctcacaccagccaaggtcacaggcaagagcaagaagagaaactgaccctgaatgttcaataaagttgattctttgta

SEQ ID NO: 252905 - DNA, 476 bp, Homo sapiens
tgctttgtttgttgctcaggctggtcttgaactcttggcctcaagcaatcctcccacctcagcctcccaaagcacagggagtataagtgtgagccaccatgcccagccttctttgttttagactggatgctgctcagttcatgaattactaataaaagccaattagatctttaaaattaaatttgttgaaattttgttctttgacggaacatttccatcaccccacaaagaacatttcatatacatggaatcatacaatatgcagccttttgtatctggcttctctcacttaggatgttttcaaaattcatctacagtacagtatatatccacatttaatttctttctttttttaaattgaggtaaggttcatataccatgaaattaatcattttaaagtgtttaattcagtgccatttagcaccttcattatgttgtgcaatcatcacctctatctaattccaaagcattttcat

SEQ ID NO: 252906 - DNA, 608 bp, Homo sapiens
gtttgtaacatctggaagggagaggataatattactcgcaatatcgcagggggtgtacaccccttgtgatattgcttgtagtatctgttggggagaggatgttattcctcgcaatatctcagtgcgtatactcactggaatattagaagtaatatcctcgggagatattactcctaatttcacagtgggtgtacaccctgtgatattatttgtaatatccttggggtatgttactcctcatgtgacagcgggtgtacatcctgtgatattatttgtatcatttttagggggtgttactcctaatgtacagggggtgttcaccctgggatattattggtaatatcctagagatatgttaccgtaatgtcacaggcagtgtacacttagtgatactattcgtaataccctaggaggatgttactcctaatgtcgctgtgggtgtacactctgtgataatattcgtaatatcctaagagtatgttattcctaatgtcacagcgtgatattattcccaatatccaaggagaatgctactcctaatgtcacagggggtgtaaaccctgtaatagtatttgtaatattttagggggatgttacttgtaatgaca

SEQ ID NO: 252907 - DNA, 405 bp, Homo sapiens
tcactttattgggaaaagtttgttatagaagcaaactaatcgatcactggtgactgtttttcttttagcaaaggaaaaagacttcattaattgacgtatacttgctactgtttggtcctacttacagaaattcctctaatttacaggggcaggttattgtgcataccacagtatagcttggatttgtaatttcaatactaatgcatattcatcccatgtgctctttatagtttcttatgtcaattagttactttcttctgggatttagtgttttgtcttggattttatagaaatgtatatatacttttagaaggtacagggaatagatgaaattaactttagaattatataatttatctgatataagtgcatgtatagcctaaatatatttctatattgaaagat

SEQ ID NO: 252908 - DNA, 303 bp, Homo sapiens
gtaacataattttttattggggaaaatttctttggtttttacaagttgtaaagattgtcgttgaaatttcatttttaccgtggatgcaaagatatttttctaaatctggtaattgcagtctttaaaccaaagataacagtaggtggtagaaacattctgtgaaatcctgaccagtaggaatgctggaggtatcactttgtgttgaatggaaggagaaacgaattgttgaaaaggtcagttaagtgtttcctttgcttggccggatgggtaagaaaataactgcttttgaagcaggcttttgcc

SEQ ID NO: 252909 - DNA, 299 bp, Homo sapiens
gaccctgtctcaaagaaagggggacaacaaaagatccatgtgggtgggtttctcgggagcatcatgacgttagtctgtggagtctttaacgcgcccaagctgactgttggtagagccgtgaccacatctgctgctgctttgtatttgagactatttgagttgtgatgttcctgccaacgttccttggtatctctatacgaataaaatattccacaatcgtttactgtttctcatgatctatggcatcagtcttggcaagtcctttcgttgatgaatatttaataaatacttaactggtc

SEQ ID NO: 252910 - DNA, 592 bp, Homo sapiens
ttttagtttaggtatcatttatgctgcacacgacattactgacttaacgtggtgggaaatgtacaagatagaggctgccattttcctgtttgagctgggcccagattctgcttttatattgaacatcacgattccattctctagagaacattttatttttctcaagaaatgcattaagtccaactgctaaacatagatcttgaatctctagctgtaggattttcaacagtcttacttatggggattcaccttccttccacaatggtcttattatttaaatgagtaggacagatacaaataaacctgaacatagatcttgaatctctggctgtaggattttcaacagccttacttatgggattcaccttccttccacaatggtcttcttattatttaaataagcaggatagatacaaataaacctgtcctggtaggctggggaccacacggcagcgcaggccatcttcacaagggtccaaataccaacagcccagaagccacagggagagaactgagggagcgtttcaatctggtagtctatttagcttacagtacctggaagaaagaatataggaatctgtctggaggttct

SEQ ID NO: 252911 - DNA, 412 bp, Homo sapiens
ccctcctgttgttaagtttgtggagcaacttaactcttcaacactgctagtagacatgtatagtacaatagtattatcagtgtttcagagactgctcatttacttccaatatcagttttccctttcttccttagtaatagaatccactattttttgtagagcatttaaccacccagaataaagatgacacatcccagtctctcttgcagctaggtgtgatcaggtgactaagtgctggccaacagtatatacttggaagtctttcttctcctcttctcccttcttgctggctggaatgtgtatgtgatgagtgaagtttgaacatccatattgcactacaagatgaagaccgcatgctaaaaatggtggagcagcaagacggaagtctcctgtatccctgatgattttgtga

SEQ ID NO: 252912 - DNA, 673 bp, Homo sapiens
tcctcaatttgagatatatagctttcataaaattagggtttagtcctctatagtttgacattgtattattctgtttgaagctagtgtttgggttattgacagtttgtctttttaaatatttgcgtaactatttacagagaatttggaggaacctcattagaaaatcctagatgcaagtttcctgatttcaactcatcaagcctctaatctctctccactcttcttaggccccttactaagtaaatgaataagacaaaccctcatccttgatgtggacagccatcaaacctgatgggtgggaaaagggaaaagaaagaatgaagaaggaatcatatcttttactttgtttagctctacatctgaattttgtatctgaagtaagttttacagtgaactaaatattgtaaaacacttattactctcatattgacacaatttaatgtaatcgttaccaaaatcataacaggatttttaatgacttggcaatattattttaaagttcatctgggctactctggatgcactgcttatgggttaactttgctccacaaggagcgaaagaaagaatagaaagaaacaaaacaaagaaaggaaggaaggaaagaaagaaaaaaagtaagttcatctggaagagtaaacatatgagaataacaaagaatattctaaaaaataa

SEQ ID NO: 252913 - DNA, 182 bp, Homo sapiens
gcacaagctagaacctccagtacagtgtgaaatagaacaatgttgaagagtgggcattcttgcctgtttttccatctgaggaaaagcctgtggtaattaagtatgatgtgttctgtagttttgtttgcttgtttgttggtagaaactgtcagattaagaacgttcccttctccttgtttgtt

SEQ ID NO: 252914 - DNA, 485 bp, Homo sapiens
  misc_feature (198)..(198): n is a, c, g, or t
  misc_feature (200)..(200): n is a, c, g, or t
tgtgatgtataataagaaatatatgtttgtctttgtttcctggacacagctcctgaaaccataagtggtgggagcgataaacgtgaacaaagaatcttttgttattcaaaacagatccctttcgatcacacctaagtttatgtaaaggagatgtaaagtctctaaggatgagggctagttgccagggaacaaaacccntncgattagagggaagaaaggagagagagattgaagattgatttgatcaccgatgggcaacaatctaatcaatcatgcctactatgtatggaagcctacataaaaactcagaagggcagggttcagagagctttcaggttgctgaaggtgtggagggtggggcacccagagatggcagatggggctccatggccatacccccatatcttgttctttgtactttttcctctggctattcatccgtattgtttgcaatatcctttgtaataaaccaaacctagtaaata

SEQ ID NO: 252915 - DNA, 512 bp, Homo sapiens
gatgatgagacgttatttccatcaaaaattggtgtcccgttcccaaagaatttcatgtctgtggcaaaaactatactcaacgccttctttagggtttatgctcacatttatcatcagcattttgaccctgtgatccagcttcaggaggaagcacatctaaatacatctttcaagcactttattttttttgtccaggaattcaaccttattgatagaagagaacttgcaccactccaagaactgattgaaaaactcacctcaaaagacagataaaaggatgcagagctgtgcaaattgttcctcaaatgaagcagtgtggagtgtattggggattttgttatattttgtttttatctggattgtttttgtcctaggtttgggggcgggggcttgtttgggttcctttttctttattctgattatgtgaaaccatattctattgctaggggaagccaagaaccattctctatacacttgataagggtaaatttatcttagtgtttttaaacttg

SEQ ID NO: 252916 - DNA, 462 bp, Homo sapiens
gcggccgctactactactaaattcgcggccgtgcgacatagtcaggctctggcgagagcctttcctgggtttcagaacacttcctcactgtatcttcacatggcagaaagcaaagtagaggaagcaagctctcttgtgacttttataagaacgctaatcccactcatgacgactcctccctatgacctcatctaattataattattcccaaagtctctacctcctaacaccatcacattgaacagtaggatttaatcctattgaacagtagtggggaaaaagtggttcagtctataacacttgtatttaaatgtaaatttgtttttctcatttttgagttactttcagatatccatcaatatccatgctgacttctccccctcatatcaccttttatgatattgcatagtaaatttcctttaacttttagaatttaaaatattagtcatacatttaatactt

SEQ ID NO: 252917 - DNA, 2349 bp, Homo sapiens
ctgctcaataaacgacctttagtctcggattgccggcccggacattccactgaattctgtgaatgtgtagcagggttggaggaccctcggaataacccccttggggaggtggacaaggacaatctcagcgaagagcttgctcccctcctccccacccttaggaaacgtccgtgaaccggagtgagagggcagtgggagttcagggagcaaagtccaggcggaggagcgtgaggcggggcttccgtccgtcccgcacacttctgggattgttttctctttcagaaagcgctactgcggagtgaaccggtccttatatcttagtttcgtgactttgggggcggcaggcctgtgagttgttttccgccctggacgctgttttgcaaagatctctgcgcgcccaccgccaccctcccgggcgtgcgggccgggaagcagccagcggtgggaaactccgacgccctcctcgacacttttctccccccaactccccaagactcacttctagggaagtcctttttcccatcaagccctgggaaagactggccaggctgagagagggacccgtcctcctctgtgccaaaggcgggagcaaatcctggtgctgtcgcctttggatgtgagtcctggaaatggcgggggtgaggaaggtgggcaggggcaaggtttggccctcaggcgagaaccgacgccttgtcccggaagcgcagcacggccgagtgcgtccgggggtgcagacggcgccctggggtggtcctgccgccacctctcctttgactcaggagcgccgcgccgcgtccgggcgcgttctcagtcgcgcgaagccagagaggaccctgggcgtgattctccctccctggcacagacggagacccgagtgaccccggggtccgggtgggcgtggggaatggacccatagacccgggacgagcggcgcggagcccgcagctggccagcttcagccaccttgggagacgcagtgcagctgccgctgctgacagacaagaccaaggctcggctgggccccaccccagatccggcctgagcgccttccgcgctgctcggcctcaaggcgtgagtcaccaagggcaagtcccgtgacttggtcctcagggtctccggcctcggcacattaatcttcagacccggctttttcgacgccgagctgccgcccagccccaatggcagggccttccagggagtcccagtcagactgctccccagctcccgcagctgctcggtccctgcaaagcccccgggagcgtttctactctcccctgagcccacgccatcccgtcactcctaggaaacttttcgcgcagaaactcctggagaacagccccggccgccaggtactcgcccgcccggaccgcaaagcccacagagcttcaattcgcaggaaggggagtggggagccctgagctggggtgttcctggaagaggtcggggagcggggggagaggcattccaggctggaggcctggaaacgtttggaagctttgctaaccttggagaccatgtcaggaaagaagcgtacccaggccgtctgctgtgtgcccaccccgatccccatcagtgccccacgcactcgagctcttcttcggcgtctgcagcctcttcatccgcgcggagaggcggaggtctcccggaaacagtgtccgactgtggcaccccagagcgtccaatgcgagctcaggcctttcccgcaagtctggagttttcttatccagttgaggccgccttcgctgtactcactctctgcctcccaccccatcttctgccacccgacctccatctttgatggttagcgccttcagccctcaacagcttcgcacaaccaacccctagaagccgtggagtcagaccggccagggtgggacctaggttttaactcgggttctggctacacacgctgcgcctccatacagtttgtcccaggtttggcagcaggccggctaccttcaggaattctttgctttggcttctgtctgttcctgtctgttgggcaagtttctagctaccccactgagagaaccatagaacaaggaccctggcatggcatacagacaaggaatgtttgctgaattaatggagctggtgccttgcagcttcccttttgttccttgaagttgcccttgctctcctccacatcagctccctctcctcctcagctacttattccccaccctggcttcttctagtcgcagtccccaagtacttgctgaatcctgtatggacagcctaagcctccatttctgacaattcctgtggccccactccatttgttttttagacttctccctcctttttgtccccatcccccaagttataaaactataatgcaaaaaaatg

SEQ ID NO: 252918 - DNA, 480 bp, Homo sapiens
gatcatcccacaagcaatacgtttgataatagttttttcttttaacctctttaaggaatgattctgcttgagaatattgaaagtacttgccagaagttgtggatttcagttttaacaaatgctattaaagtggagaagcacactctggtcttggaattccatttgaggatttagaagggtcatgtttataactattcaggtgtgtttgttgctggcttgttgtaaagcaataaaatttttttggtctttttgtaagggagtgtggtgctgtaaaaaatctacctccctctcctcctcagctacttattccccaccctggcttcttctagtcgcagtccccaagtacttgctgaatcctgtatggacagcctaagcctccatttctgacaattcctgtggccccactccatttgttttttagacttctccctcctttttgtccccatcccccaagttataaaactataatgcaaaaaaatg

SEQ ID NO: 252919 - DNA, 2117 bp, Homo sapiens
ctgctcaataaacgacctttagtctcggattgccggcccggacattccactgaattctgtgaatgtgtagcagggttggaggaccctcggaataacccccttggggaggtggacaaggacaatctcagcgaagagcttgctcccctcctccccacccttaggaaacgtccgtgaaccggagtgagagggcagtgggagttcagggagcaaagtccaggcggaggagcgtgaggcggggcttccgtccgtcccgcacacttctgggattgttttctctttcagaaagcgctactgcggagtgaaccggtccttatatcttagtttcgtgactttgggggcggcaggcctgtgagttgttttccgccctggacgctgttttgcaaagatctctgcgcgcccaccgccaccctcccgggcgtgcgggccgggaagcagccagcggtgggaaactccgacgccctcctcgacacttttctccccccaactccccaagactcacttctagggaagtcctttttcccatcaagccctgggaaagactggccaggctgagagagggacccgtcctcctctgtgccaaaggcgggagcaaatcctggtgctgtcgcctttggatgtgagtcctggaaatggcgggggtgaggaaggtgggcaggggcaaggtttggccctcaggcgagaaccgacgccttgtcccggaagcgcagcacggccgagtgcgtccgggggtgcagacggcgccctggggtggtcctgccgccacctctcctttgactcaggagcgccgcgccgcgtccgggcgcgttctcagtcgcgcgaagccagagaggaccctgggcgtgattctccctccctggcacagacggagacccgagtgaccccggggtccgggtgggcgtggggaatggacccatagacccgggacgagcggcgcggagcccgcagctggccagcttcagccaccttgggagacgcagtgcagctgccgctgctgacagacaagaccaaggctcggctgggccccaccccagatccggcctgagcgccttccgcgctgctcggcctcaaggcgaaacttttcgcgcagaaactcctggagaacagccccggccgccaggtactcgcccgcccggaccgcaaagcccacagagcttcaattcgcaggaaggggagtggggagccctgagctggggtgttcctggaagaggtcggggagcggggggagaggcattccaggctggaggcctggaaacgtttggaagctttgctaaccttggagaccatgtcaggaaagaagcgtacccaggccgtctgctgtgtgcccaccccgatccccatcagtgccccacgcactcgagctcttcttcggcgtctgcagcctcttcatccgcgcggagaggcggaggtctcccggaaacagtgtccgactgtggcaccccagagcgtccaatgcgagctcaggcctttcccgcaagtctggagttttcttatccagttgaggccgccttcgctgtactcactctctgcctcccaccccatcttctgccacccgacctccatctttgatggttagcgccttcagccctcaacagcttcgcacaaccaacccctagaagccgtggagtcagaccggccagggtgggacctaggttttaactcgggttctggctacacacgctgcgcctccatacagtttgtcccaggtttggcagcaggccggctaccttcaggaattctttgctttggcttctgtctgttcctgtctgttgggcaagtttctagctaccccactgagagaaccatagaacaaggaccctggcatggcatacagacaaggaatgtttgctgaattaatggagctggtgccttgcagcttcccttttgttccttgaagttgcccttgctctcctccacatcagctccctctcctcctcagctacttattccccaccctggcttcttctagtcgcagtccccaagtacttgctgaatcctgtatggacagcctaagcctccatttctgacaattcctgtggccccactccatttgttttttagacttctccctcctttttgtccccatcccccaagttataaaactataatgcaaaaaaatg

SEQ ID NO: 252920 - DNA, 354 bp, Homo sapiens
gccctctttcttccattcacttacctgtctagtcaaacacccatcagacctttgccaggtgtccagcctgggcactacgtttcagaaaatgatgcacatagaatccctaactgaaaggagatcgcagctcatttggtacaaagtggtaacggcagagtcccaaaacacatgaagcaagaactgacagaactggagggagacatcaatcaataacaacagttggagaattcaataccctgctctgaataatggatagaacaattaggcagaagaccaacaaagaaagaggatatttgaacaacgtgataagccaatttgacctaataaatatctttatctgtgaaacaccctaaa

SEQ ID NO: 252921 - DNA, 650 bp, Homo sapiens
aattaaaatagtatattagaaaacagttgtctaacacacaagaaggcagtaatggaaagagtgaggaataaaaaaataagacacacagaaaacaaatagcaaaatgacagatgtaaatcccaccttataattatattaaatgtaaagagactaaacaatcatatggcaaagagtagaaatgtggatataaaaaatatccaacactattatgtctacaacgcactttatattcaaagacacaaataagttgaaagggaaaggatagaaaagacatgtcatgcaaataggaacaaaagagtgttggggtcgctgtaccaatgtaggttatacacagtaaacttagagacagaaactgttactacaaagagcagcattttataatgataaagcgtggattcatcaggaagacataacataaacatgttataaacacgcatgcaggtaacggcagagtcccaaaacacatgaagcaagaactgacagaactggagggagacatcaatcaataacaacagttggagaattcaataccctgctctgaataatggatagaacaattaggcagaagaccaacaaagaaagaggatatttgaacaacgtgataagccaatttgacctaataaatatctttatctgtgaaacaccctaaa

SEQ ID NO: 252922 - DNA, 488 bp, Homo sapiens
atccaataggattgctgtacctataagaagaggaagagacaccaggggtgggcatgcacagaggaaaagtcacgtgaggacacagtgagaaggtgatcatctgcaaaccaaggagagaggcctcaggagaaaccaaacctggtggcaccttaaccttggacttgcagcctccagaactgtgagaaaataagtatttgtttacgccagctagtctgtggtattttgttatggcagccctagcatatagatgatagatagatagatagatagatagatagatagatagatacatacatacatacatacatacatacatacatacatacctaatgttacttcataggagagaaaaagaataaaatcaagctcttcacattctatgctctgttttattatgagcaagtcactttcttttctgcctcaatgtcctcaattttaaaatagaaaaaaaaaaatcccctacatcccaaaagtagagagagaagatg

SEQ ID NO: 252923 - DNA, 746 bp, Homo sapiens
ctatgaacggcctgggcctgggtggtacaaagcatgtggtcttttcctcatggaaccgggcgactttagaagtagcattgatggttgtttgctgtgacacctgtgtgagtgttaacatgaacagtcaacagagtggccgcagcgtgtagcgccatttaggggtgtaatagagtgtcactcaatattagctcctcacaggcaagaacgttttcactgaaagtaagagagtgcacttcctggtgctaccttcatttcctgccctgggtcccatgttttaggtgagacacattcttaaattgcccagctgtctatgtgatagggctgagacagatcatctttctgatcttccggattatcgtgtctattgcctttccattacactaaaaatccctcctctgccatactcttagtaggaaagggtgattttttttttccccgaaaggaaaagggagcctataaataaaccgtattatcttcctatccccttctgctaaccaaacacccaagagccacactgagagaggaaatggaaggagaattgtcagttcccaaatgtgaggtgaaagctgtgcttttctttctattatctggtctgattttgagttctctaccctgggatgttacccagtattaccagctgtttctcacagtgaccgattgtggtcatgaatccttggggattcatgatatttttataatacatgcactcagggaaactcagtaaaacacattagtgttaataagca

SEQ ID NO: 252924 - DNA, 405 bp, Homo sapiens
ttcctgcacgttccttccttccagcagttttacccgaagatgggggaggttttttatttataatgaaaccagtgtgactgaatgatggaggaaaaaaggaagtcctcatgtcttttcaaaatgaagcacaggccgggagcagaggctcacgcctgtaatcccagcactttgggaggctgaggcaggtggatcgcttgagtccaggagtttgagaccagtctgggcaacatggcgaaacctcatctctacacaaaaatacaaaaacaaattagctgggcatggtggtgcgcacctgtggtcccagctactgggaagcggaggtgggaggatcaggaggcggtgactgcaatgagctgagattgtcccactgcactccagcctgggcaacagagggagatcctatct

SEQ ID NO: 252925 - DNA, 341 bp, Homo sapiens
tacttttcagtttttccattttatctgaaactttaagttggcatttctgaccagcctttcttgagaccatcattttttgggcacttactgtagacaggaatcagcaccctagcctccttcagcccaccccatgtaacactaaagagacaactggtgcttggcaataacaaaaatattagtgattgataaacttgtaaatttattaaaatggacagtgaaagaaaacagccaatttagttgtgaactggagaagggacgtgaggcatctgttgtctgcaatcttgtatgttgtggttgaccacaaaggcttggcatcaggttttacttccagcactacttct

SEQ ID NO: 252926 - DNA, 286 bp, Homo sapiens
ctatgaggatgcaacggcataagaatgatacaatggactttggggactcaaggaggaaggctgggagggagtgaggcataaaagactacatattgggtacagggtacactgctctggtgaactccaaaatcaccactaaagaatttttccatgcaacaaaacaccacttgttcccccaaaactattgaaataatttttttttttttttttggagacagggcatcactctttggctcaggctacagtgcagtgccgcgatctcagttcatggcaacagggtctctca

SEQ ID NO: 252927 - DNA, 479 bp, Homo sapiens
cccacttgcagatgatggaaggcttgctggcaattactgaaagaaaatgggaggtgggaaaatggagctgcatttatattttacttcctgaatgtcaaggtgatgctggcacaaatattaaagggaacattccccttctttgggatataggaaatgctgctgcaaacttagagataagggaagagatatgcagagttaatgaggaccagctttacctctcaagtgcccagaaatggctttaataatcaggtctgggttctttgaggcttcctttctttaacttagaccattccttcccaacagaaatacagatttctccttttaccttctggctggccattagatagggggctaaaacttcgaataaatctcactgtcaaaaacttttgatttatccagaatatttgggttttctcattttttttaaaaaggaaataacaggttattgaataaagaatttcattaatggttaaaaagct

SEQ ID NO: 252928 - DNA, 2491 bp, Homo sapiens
  misc_feature (1037)..(1037): n is a, c, g, or t
  misc_feature (1329)..(1329): n is a, c, g, or t
  misc_feature (1382)..(1382): n is a, c, g, or t
  misc_feature (2460)..(2460): n is a, c, g, or t
acacatacatgttttggtcttcttggctcatctatcaccctatgtacagaactcgcggtacacacaaataaaattaatatgatcacaacttaaagggacagataaggaattttaaccaattttcagcaaatggttattaatgtttactttcagaaccacacgcacagcatgtgcagctggtgactctgcgtgggccacctgctacctagtgctttttcaatcatgcctgattacaacgacgagggagaaaaacaccagatagctcagcctgatatgttttttatcattcagtctgcttttgggcagaggagttcaaaccacgagtgtcagcagtgtgtaagacagcgtggggctcgggccacctgccgcagtggacccctggcttagtttccatgtgctatcttagcatggcagaaagcggattccaaccagccacagcaggtgacaggagctgaagctcagcccttcctgaaagcaacccatgccctcgaggatgctgacggtgatctgagtacattttccagctcccttgttctgtgtaaataaatgtttaagaagaaataagcactagcagcgatccctagcactttatgaagaccaggatactgatactcccttcccgttggatggcacaccacagtttgtttgcatttcatttgctatttataacaatagaggaagaaagacaaaatgtttttgtttttgttttaacacgtgaagaacatgagatcggaagaggtaaagttaatttcccagaattatctatgctaagccttgaaaagccatgtttattacagatcagatatttactctaaaacaaaagtgtagaatagcagaaaaacaatggacttagaggtcaaaaggctataattttgtccacatacatctctatgatcccaagccagtcatttactttctctgagcctgatattctcatccataaagtggaaccacctgtcttttgcatagtcaaggaggcagtgcccatggaggagcactgagttataaagggctaactcctgtgagggatgactccngtcatggtgaccagttatcctctcctctgaattttgttcttcagaggccaacttgaaagagtttgaagcctgaggttggatttataggcactagaatacatcagcttcaaacattcacaaatcaggaactgatttcatctcctcttgaaacctatcatctgttagctaaaatagctctggttgcttttattccagataataacacttaaagttttaatgagagatgagcatgttcattaaaaaacaagtcaaatgaaactaaaaaaaaaaatcatttacttggaaatccatncctgtaatgaagtcatactattgtgtagacaacagtggaatgattaggtctgnttttaaaaaaagagttgtcaccagcaccctatgtagaaagactttttttcaatttccatgagagttgtgttcacttgcaaattggttgtgaggcagccaggtgggagggggtccccggaaaaattccaaccagactgcgccctgggaagggtgtgcactggggtggagccacagaagtgcgaaccctttgcagtggggaggagcctggcccctcctcttcctgggtggagctggggattcaagctgcgaggcagtaagcacactagatgaactctggccttgaggagtccctgtttcccttttttccttttcacccaataaaaccctgctttactcacccttcaaaccatctgccagcttgaattttcatggctgtgggacggacaaggaccccgtctttagctgaactaaggaaaagtcctgcggcagttgtgtgaggttattaacacaagctacacagaaacacatgttatccacgttaggccagcctctccatgcctatttgatggaagtgcaggcaaaatgtaagaagaataactctgctgtgttttggattaaaaggatttttgtggactagcatgattatttatttactgtacctataggcaaatgtattcatgaatggtagctcaaaatgttgcaagtagacatcagctgttttcagaacagctcagagagatgccaccctgccaatgagaagaagcttaggaagggggagccctctgcagctgctccgggtacttggcacatggccagaagggatcccacaccctgcatctgccatggcctctcaaagaaagagaagaaaatgtttcacccatgcatcgaacatgcctctatacaggacagtcataatttgggtgtttataggtcagggatgactgtgatgcatttcctaacttttattctctgctgtagctatgtaagatggggagtctttagctatatgccctaaaacacagaaataacctgaccccaggcctgttactgtggcagcttggttggcctttagaggttaacattcaaatcctcaaaaggaagaaactcgtatgagagaataacatcttcagatactgangcagaaagaatattaaagcatatggattcag

SEQ ID NO: 252929 - DNA, 207 bp, Homo sapiens
gaggtaggcgcgtcgtcgcggcgggtccgagtgcgccctcgccccggtcccggtctccgtggagtccggcgcctctcgggcgggccccccggaactcccggccgcccgcttgctgagcctgtccctccccagccccggctgccatcggcccggcacccgaaacgggccgtgcccccgcccccctgctcgccctccgcccccctgctc

SEQ ID NO: 252930 - DNA, 6561 bp, Homo sapiens
  misc_feature (1)..(1): n is a, c, g, or t
  misc_feature (3)..(3): n is a, c, g, or t
  misc_feature (5)..(7): n is a, c, g, or t
  misc_feature (10)..(10): n is a, c, g, or t
  misc_feature (5184)..(5184): n is a, c, g, or t
ngnannnctncctctcaatttttgggaatagtttgagaagaattggtgtttgtttttctttataaattgggtagaaatcagcataaaagcctagtctagggcttttctcttttgggagactttatgttactgagtcaaacctgctattcattttgggtcagttcaggttttctgtttcttcctagttcaatcttggtaggctgtgtatgtctgggaatttatccctttcctctaggttttccaatttgttagcctatggttgttcataatagcctctaatgatcctttttatttctttggtaacagttgtaatgtctcctttttcatttctgattgtatttatttgggtcttttttttttttttttttttttttggttagcctcactagtggtttatcaattttgtttaacttttcaaaaaaccaacttttatcttgttgattctttgcatttcttttttgtctctgttgcatttggttctgctatgttatttatattttttctttctactaattgtgtgtttgatttgttcttgcattttgagttccttgaggtgcatcattaggtcgtttatttgaaatctttctacttttttggtgtaggcatttattgatataaacttttctcctagtactgcttttgttgtatcccataggttttgcatgatgtgtttccattttctgtttaaaaaaaatttttgatgtccatcttaatttcttcattgacccaatgattattcaatagcatgtttaatgtccatgtatttgtacagtttccaaatttcttcttcttattgatttcaagttttattccattgtggtctgagaagatacttgatatgattttaatttttaaaattttattgagccttgttctgtgtcctaacatatggtctatcctggagaatgttccatgtgttgatgagatgattgtatattctgctgctgctggatgaaatattctgaaaatatctgttaggtccatttggtctaaagtgcagcttaaatcaatgtttctttgttgattttatgtctagatgaactgtccaatgctgagagtaggatattgaagttctcaactatcattgtattggactctatctctccatgtagatttaataatatttgctctatgtctctggatgtgcttgtgttggttgcatgcatatttggaattgttatactttgttgctgaattgatccctttattaccatataatgaccttctttgtcctttttacagtttttgacttaaagtctgttttatctgatgtaagtttagctactcctgattatttttgatttctgtttgtgtggtatatctttttccatcccttcactttcagtctgtgtgtgtctttacaagtgaagtgagtttcttgtagacgttgttgggtcattttttatccattaagcctgtctctatcttttaggtaggtaatttaacccatattcgaagttattattgataggtgaggacttattcctgtcattttgttcattgttttctggttattttgtatatccttttgatatggtttggctgtgtccccactcagatctcatcttgaattcccatgtgttgtgggagggatccagtgggaagtagttgaatcatggaggcaggtatttcccatgctattcttttaatagtgaataagtctcatgagatctgatggttttaaaaggaggagtttccctgctcaagctctctctttgcctgctgccatccctgtaagatgtgacttgcctctccttgacttccgcaatgattttgaagcctccccagcaatgtagaactgtaagtccattaaacctctttcttttgtaaatttcccagtcttgaatgtgtctttatcagctgtgtgaaaatggactaatacagtaaattagtaccagaagtggggtgttgctaaaagatacctgaatatgtggaagtgactttggaactgggaaacaggcagaggctggaacagtttggagggctcagaaggagacaggaaaatgtgggaaaatttggaagagatttcctagagacttgcccaaaatgctgatggttatatggacaataaagtctaggcttaggttgtctcagatggaaatgaggaacttgttaggaactggcacaatggtgactcctgttatgttttagcaaagagactggtggctttttgcccctgctgtagagatttgtggaattttgaacttgagagatttagggtatctgatagggtatttgaacttgagatttagggtatctgatagaagaaatttctaagcagcaaagcattcaagagatgacttgggtgctgttaaaggccttcagttttataagggaagcagagcatgaaagtttggaaaatctgcagcctgacaatgcaatagaaaagaaaatcccattttctcaagaaaaattcgatctggctgcagaagtttctttaagtaactagagtcaaatgtgaatccccaagacaatggggaaaatgtctccagggcatgtcacaggtcttcatggcagcccctcccatcaaaggtccagaggcctaggaagaaaagatggttttgtggcctggacccagggacccatgttgtgagcagcctagggtgcctgagtcctagccactccagctgcagctaaaaggagccaaggtacaacgtgggctatggcttcagagggtgcaagccccaagccttagcagcttccacatagtgttgagcctgtgggtgcacagaagtcaaaaattgaggtttgggaactgctgcctagatttcagaaggtgtatggaaatgcctagatatccaggcaggagtttgctgcaggggcagggcactcatggagaacctctactagggcagtgcagaagggaaatgtggggtcggagcccccacatagagtccctactgcagcgccacctagtggagctgtgagaagagggccaccatcctccagacctcggaatggtggattcactgacagcttgcactgtgtgcctggaaaagctgcagacactcaatgccaacccgtgaaaggagccaggagggggtttaaacccacaggagtggagctgtggccttttttctcccaaggccatgggagcccacctcttacatcagcatgacctgcatgtgagacatggaatcaaaggagatcattttggagctttgagatttgactgccccactggattttgggcttgcatgggtcctgtagcccctttgttttgacaattttctgccatttggaatgactgtgtttacccaatgcctatacccccattgtatctaggaagtaactaacttgtttttgattttacatgctcataggcagaagggatttgccttgtctcacatgagactttggactgtggacttttgagttaatgctgaacttagttaagactttgggggactgttgggaaggcatgattggttttgaaatgtgaggatatgagatttgggaagggccaggggcagaatgatacagtttggttgtgtccccacccaagtctcatcttgaattcccacatgttgtgggagggacctggtgggaagtaattgagtcatgggggcaggtctttcccatgctgttctcatgatagtgaatacgtctcacaaggtgtgatggttttgaaaagggtagtttctctgcagaagctctatctttgattgctgccatccatgtgagacatgacttgcttcttcttgccttccaacgtgattcttaggcttcctcagctatgtggaagtgtaagtccattaaacctctttcttttgtaaattgcccagtctcagtcaggtatgtctttatcagcagtgtgaaaacagactaatacacctttgttccttttttctctcattatttatggttgcagtttggtgggtttctttagtggtgatgtttgaatcctttcttctttgtgtgtctgaactactagtgagttttatactttcatgtattttcatgatggtagatattgttcttttgcttcccaatgtaggactcccttaaacatttcttgtaggaccacaacaaacaagacacaaacaaacagtcttttgcttatctgggaaatacttttttctcttttattattactattttttttttagcaatggagtctcactctgccacccaggctggagtacagtggcatgatcatagctcactgcagccttgaactcctgggatcaaatggtcctcctgcctcagccttttgagtctctggaattgcagatgtgagccactgtgccaggcttcttcatttgtgaaggatagctttgctggatatagtatttttggcttacatttttttatttttattttacttgtagtatacatccccttttctcctagcctgtaaggtttctgctgagaaatcccctgttagcctgatggagattctcttataagtgacttgatgcctttctcttgctgtttttagcattttctctttgtcttttgacaattttacaataatgtgccttggagaagacctttttgagttgtatttatttggtaatctttgagcttcctgcatttggaagcattcaggaagttttcagttattattttattaaataggttttctatgcctttacccatctcatctccatccagaactcccagaatttcagtttttggtgacatatgtgtcccatatgtcatgtagccttgcttcattcttttttctttctttttgtctgactggattattttaaaagactagtcttcaggttcagaaattctttgttttgcttgatctagtctattgttaaagctgtcaattatcttttgtatttatttcaatgatttattctcttccaggatttgtgtttggttctttgttatgctgtctatctctgttgaatttgtcgttcagatactgaattgttttcctgtttggttttttttttttttttttttttttgtattcattatctgtgttctcttgtatctccctgagtttctttaataacattattctgaatttttttcaggcatttcatagattttcttttcattggatctgttgctggagaattattgtgcttctttggagatgttatgtttcctttttcatatttcttgcatccttatgtgactatctgtgcctctgacataacagtcatttcttccaattttatggattggcttttatatgggaaagaccttttcttatagctntatctacagtgttcattggatatcacactttggctttgattctgggtgggtacagtggtatagtctgcatatgattccttcagctgtaattggcatgagtggtgcctgtgagtcattcagtggcttagactgcagtgtttttttttgtggttgttgagatggagtctagctctgtcaccaggctggagtgcagtggcacaatctcagctcaccgcaacctctgcctcccgggttcaagcaattctcctgcctcagcctcctgagtagctgggactataggcacgtacaaccatgcgcagctaatttttgtatttttagtagagatggggtttcactatgttggccaggctgctctcgaactcctgacctcgtgatctacccgcctcggcctctcaaagtgctgggattacaggcgtgagccaccacacttggccagactgtagttgttattggaggctgtggtgaggctttgctgaggatggggatgccaggaagtcttgtccttcagcatcagtggtagcggtggtggaccaggtgtgtcaatactagggactgtgggcagtgtttgtgggcactgatgatagcctgtctgcgtgggccaatccctgggcctccaggtggctcctttggttgctggcagtggcagcactgggccaagtgggcaggtgcaccactgggctcctgggtggtgtgcgtggcaggctgatctctagttctccaggtgacatatgcaggttctggtggtgggtaggcaggcatttcctcaggcctctcagtagtaagtgtgagcactagctctggaggcagatgagtcaatctccaggcccccagatggtacattcaggcaccagcatattcctatgcatttctagataaaagtatttttcagaaaacctgagtgtatgtcctattaatacaactaaccctcatcagctctgcatgagaagaagggggaattccctcagtagaacagtcagaatggaatcacagacttgtttttagccagtcactggtaaggggggttaggctaaaatgataagctcagaatctaaaccttagactagggaatggcaaactttttccataaagatgcaaacggtaatattttaggcttttggtctagataacctctgtcgtagtgacacagtggtgccatcgtagcctaaaagcttatgtagacaatggataaatcaatggacctggttttattccagtaaaacttaatttatacagtcagagggccagatttggcccttggtctatagttggccaaccctgtttagagcagtcaaaatttattccctggggctgggccaactttttcttaaaaaaaaaagtcgacgcggccgcgaattagtagtagtagtaggcggccgc

SEQ ID NO: 252931 - DNA, 1340 bp, Homo sapiens
gtctcagtcaatgtaggcagagtacaagaccctacagcctgctctctcacctgccatcgtacagaccagcttttaggggagccaagttgggatactcaatcccaacttttttccttctcttccatctcacatacaggaaaccttacgagagaggattaggggcctgaaaaagctgacaagacggcaaatatgggaagtggagccagtgctgaggacaaagaactggccaagaggtccaaggagctagaaaagaagctgcaggaggatgctgataaggaagccaagactgtcaagctgctactgctgggtgctggggagtcaggaaagagcaccatcgtcaaacagatgaagatcattcaccaggatggctattcaccagaagaatgcctggagttcaaggctatcatctatggaaatgtgctgcagtccatcctggctatcatccgggccatgaccacactgggcatcgattatgctgaaccaagctgtgcggatgacgggcgacagctcaacaacctggctgactccattgaggagggaaccatgcctcctgagctcgtggaggtcattaggaggttgtggaaggatggtggggtgcaagcctgcttcgagagagctgcagaataccagcttaatgactccgcatcttactacctgaaccaattagaacgaattacagaccctgagtacctccctagtgagcaagatgtgctccgatccagagtcaaaaccacgggcatcattgaaaccaagttttccgtcaaagacttgaatttcaggatgtttgatgtgggagggcagagatccgagagaaagaagtggatccactgcttcgagggagtcacctgcatcattttctgtgcagccctcagtgcctatgatatggtgctggtggaagatgacgaagtgaatcgtatgcatgagtctttgcatctgttcaacagcatatgtaaccacaaattctttgcggctacttccattgtcctctttctcaacaagaaggacctctttgaggaaaaaatcaagaaagtccatctcagcatttgttttccagagtatgatggtaacaactcctatgatgatgcggggaattacataaagagccagttccttgacctcaatatgcgaaaagatgtcaaagaaatctacagtcacatgacctgtgctacagatacacagaatgtcaaatttgtgtttgatgcagttacagatattatcatcaaagaaaacctcaaggactgcggcctcttctaatcctcaccattcctcaggtataagttctataaacaggcttggaatctgggtaattaaaaacagaaaattatagtcaatataccatg

SEQ ID NO: 252932 - DNA, 1141 bp, Homo sapiens
gtctcagtcaatgtaggcagagtacaagaccctacagcctgctctctcacctgccatcgtacagaccagcttttaggggagccaagttgggatactcaatcccaacttttttccttctcttccatctcacatacaggaaaccttacgagagaggattaggggcctgaaaaagctgacaagacggcaaatatgggaagtggagccagtgctgaggacaaagaactggccaagaggtccaaggagctagaaaagaagctgcaggaggatgctgataaggaagccaagactgtcaagctgctactgctgggtgctggggagtcaggaaagagcaccatcgtcaaacagatgaagatcattcaccaggatggctattcaccagaagaatgcctggagttcaaggctatcatctatggaaatgtgctgcagtccatcctggctatcatccgggccatgaccacactgggcatcgattatgctgaaccaagctgtgcggatgacgggcgacagctcaacaacctggctgactccattgaggagggaaccatgcctcctgagctcgtggaggtcattaggaggttgtggaaggatggtggggtgcaagcctgcttctaatcctcaccattcctcaggtataagttctataaacaggcttggaatctgggtaattaaaaacagaaaattatagtcaatataccatgacatgaagaatgaatccattctttggagatggagtatacatgactgcaactgtatttcatacgttcttttcaaagtgggatagctattgcagcttaaagagcacaggttccagtactggttttccaacttaatacaaaactgtgaatactttatttctgagtcttgagtctttcaactataaaatgaagatgacttccctacctactttacagggttattctgaggagcacgaacataactgaagggaaggcacataaaaactgcttgtgcaggccaggcacagtggctcacgcttgtaatcccagcactttgggaggccaaggtgggcagatcacgagatcaggaatttgagaccagcctggccaacacagtgaaaccctgtctctaccaaaaatacaaaaattagctgggcatggtggcaggcgcctgtaatcccagctgc

SEQ ID NO: 252933 - DNA, 1807 bp, Homo sapiens
gtctcagtcaatgtaggcagagtacaagaccctacagcctgctctctcacctgccatcgtacagaccagcttttaggggagccaagttgggatactcaatcccaacttttttccttctcttccatctcacatacaggaaaccttacgagagaggattaggggcctgaaaaagctgacaagacggcaaatatgggaagtggagccagtgctgaggacaaagaactggccaagaggtccaaggagctagaaaagaagctgcaggaggatgctgataaggaagccaagactgtcaagctgctactgctgggtgctggggagtcaggaaagagcaccatcgtcaaacagatgaagatcattcaccaggatggctattcaccagaagaatgcctggagttcaaggctatcatctatggaaatgtgctgcagtccatcctggctatcatccgggccatgaccacactgggcatcgattatgctgaaccaagctgtgcggatgacgggcgacagctcaacaacctggctgactccattgaggagggaaccatgcctcctgagctcgtggaggtcattaggaggttgtggaaggatggtggggtgcaagcctgcttcgagagagctgcagaataccagcttaatgactccgcatcttactacctgaaccaattagaacgaattacagaccctgagtacctccctagtgagcaagatgtgctccgatccagagtcaaaaccacgggcatcattgaaaccaagttttccgtcaaagacttgaatttcaggatgtttgatgtgggagggcagagatccgagagaaagaagtggatccactgcttcgagggagtcacctgcatcattttctgtgcagccctcagtgcctatgatatggtgctggtggaagatgacgaagtgaatcgtatgcatgagtctttgcatctgttcaacagcatatgtaaccacaaattctttgcggctacttccattgtcctctttctcaacaagaaggacctctttgaggaaaaaatcaagaaagtccatctcagcatttgttttccagagtatgatggtaacaactcctatgatgatgcggggaattacataaagagccagttccttgacctcaatatgcgaaaagatgtcaaagaaatctacagtcacatgacctgtgctacagatacacagaatgtcaaatttgtgtttgatgcagttacagatattatcatcaaagaaaacctcaaggactgcggcctcttctaatcctcaccattcctcaggtataagttctataaacaggcttggaatctgggtaattaaaaacagaaaattatagtcaatataccatgacatgaagaatgaatccattctttggagatggagtatacatgactgcaactgtatttcatacgttcttttcaaagtgggatagctattgcagcttaaagagcacaggccagtagttagaagaccccccaggttccagtactggttttccaacttaatacaaaactgtgaatactttatttctgagtcttgagtctttcaactataaaatgaagatgacttccctacctactttacagggttattctgaggagcacgaacataactgaagggaaggcacataaaaactgcttgtgcaggccaggcacagtggctcacgcttgtaatcccagcactttgggaggccaaggtgggcagatcacgagatcaggaatttgagaccagcctggccaacacagtgaaaccctgtctctaccaaaaatacaaaaattagctgggcatggtggcaggcgcctgtaatcccagctgc

SEQ ID NO: 252934 - DNA, 1783 bp, Homo sapiens
gtctcagtcaatgtaggcagagtacaagaccctacagcctgctctctcacctgccatcgtacagaccagcttttaggggagccaagttgggatactcaatcccaacttttttccttctcttccatctcacatacaggaaaccttacgagagaggattaggggcctgaaaaagctgacaagacggcaaatatgggaagtggagccagtgctgaggacaaagaactggccaagaggtccaaggagctagaaaagaagctgcaggaggatgctgataaggaagccaagactgtcaagctgctactgctgggtgctggggagtcaggaaagagcaccatcgtcaaacagatgaagatcattcaccaggatggctattcaccagaagaatgcctggagttcaaggctatcatctatggaaatgtgctgcagtccatcctggctatcatccgggccatgaccacactgggcatcgattatgctgaaccaagctgtgcggatgacgggcgacagctcaacaacctggctgactccattgaggagggaaccatgcctcctgagctcgtggaggtcattaggaggttgtggaaggatggtggggtgcaagcctgcttcgagagagctgcagaataccagcttaatgactccgcatcttactacctgaaccaattagaacgaattacagaccctgagtacctccctagtgagcaagatgtgctccgatccagagtcaaaaccacgggcatcattgaaaccaagttttccgtcaaagacttgaatttcaggatgtttgatgtgggagggcagagatccgagagaaagaagtggatccactgcttcgagggagtcacctgcatcattttctgtgcagccctcagtgcctatgatatggtgctggtggaagatgacgaagtgaatcgtatgcatgagtctttgcatctgttcaacagcatatgtaaccacaaattctttgcggctacttccattgtcctctttctcaacaagaaggacctctttgaggaaaaaatcaagaaagtccatctcagcatttgttttccagagtatgatggtaacaactcctatgatgatgcggggaattacataaagagccagttccttgacctcaatatgcgaaaagatgtcaaagaaatctacagtcacatgacctgtgctacagatacacagaatgtcaaatttgtgtttgatgcagttacagatattatcatcaaagaaaacctcaaggactgcggcctcttctaatcctcaccattcctcaggtataagttctataaacaggcttggaatctgggtaattaaaaacagaaaattatagtcaatataccatgacatgaagaatgaatccattctttggagatggagtatacatgactgcaactgtatttcatacgttcttttcaaagtgggatagctattgcagcttaaagagcacaggttccagtactggttttccaacttaatacaaaactgtgaatactttatttctgagtcttgagtctttcaactataaaatgaagatgacttccctacctactttacagggttattctgaggagcacgaacataactgaagggaaggcacataaaaactgcttgtgcaggccaggcacagtggctcacgcttgtaatcccagcactttgggaggccaaggtgggcagatcacgagatcaggaatttgagaccagcctggccaacacagtgaaaccctgtctctaccaaaaatacaaaaattagctgggcatggtggcaggcgcctgtaatcccagctgc

SEQ ID NO: 252935 - DNA, 2785 bp, Homo sapiens
cgccaccaatgtggcccaggccaccagcccccgtgacactgcagccatcccctttgctccccgtcgtggcctcccgaccgagcagccagagtgaccccgaaagcctaaatcagcctgcggcgccctcacccgtcctccagctgccatcgcctcctgggtgaagaggacgcaggtcgcagcccccgcagctctgcccctctgccctccggccaggccgccccgctgtcccccttgctgtccacctctctgtccacccctgctgtccccccccgctgtcccccccgctgtcacacccccgctgtcccccccccgctgtcccccctgttgtccccccgctgtccctcccgctgtccctccggcgaggaggcttctgcacgttctgcgtgggcctctccccggggccgccccaggtctcccctgacgcccacacccaccaccaggctgttgtgcgggaccttccttctctgcctctccagctggtgacgcgcactgacgtcctgcaaggcccgctccaggtgcgccacctttgactggcatgctgaaaggacaaagggacggaggcattttaccggagaggacatccatggggcccagcaggtcaaattcctttctctaagtatgggagacatttttaaaaataatggagtcctccagggccggctgcgtgctgtggcctgtgctcctcaccgctttggacccaggctgcgctgtctccaccacgaccaaggactcacagagctcgcctgggggacctggccccacagtcaccccgtccgtcatcagcctcaaatgccatcagcccgtgaatgctgctccatcgtctgcatggcagccaaggaggtctctgctcctaaagcacctgggagcccttggatggtgccaggtgatgtggcgatgagtgggcatcgcgtgggggccttggacgagcgtggacaccccaatccccagactggccattgccgtggaggcagcgtgagtgtgacatggagctcggtgtcgtgctgcagaggacgcctcgcggctgtacgcgtcatgatagccagggacccctccacatgtcacttagccaaaggatgcagcccggcctggggctttctaccccaggcccgaggacctgcagggacaaggacccctcagcgcagatgcagctctcatgaggcctgaaaccaagctggacttgcagaactgcgcacgctccctttctgaaagaaacacccgttaccgggtccagactgaatgtgggcgtaagaaagcgggaagggtcccccacagcaagagagagagcctcccagtcacttggtcatctgagccttgagtgtgtccggccccagccaccagcctgtccccactatccctcttgtcagcacggctgaaaggagctgcctgggcacctgaggtggctgaggctcatctttgaggagcatggaactcgaggggagaagtcgcgcccccagggaagccaggaaactctgacacagaacgcccaacgtggacacaggtgccagttcagcagtgaccgtcaagaccggggaagtgccctgtggtgaccaggagaacaaggagctcctccagcaagcagggctgcagtgggagctgggagggagcagtgcacctgccagcgtggccgagtcacacagtgcctgccctcacctgtggaatttggtgtcagctaaaaggaagaagaaatggaaacttaaattctagccggtcattttcttaaaactgcaaacatttctctcgagtgtggactggcccggcttcggtgaaaggcgccctcctacctagcagggtctcggcactctgctgtgttctttgcaccgcggtcactatttcagaaacacggtcctgatactcatcctgataatctcttaagagcacccgagaagaagaatgaaacgcctgtatatcctggttaagtttctataaaataagaacatacacgattcataaaattatatgattaatgatcacagtataattacataagaatttgttatatatgtttctatagaataataacatacccacacaattaatataagggatatgttgttaactggaagggtgtaaagcagttcttcggcccgggcctgtcgatgcccgccaggactgttttcatgctgcctgtgcctcggctcacttacagaagttctgactcaatacatctgggatttctactttcaaagcagtacatgtgattttatgcccttaaagtatttaagaaacagaaagtcaagtgtttcaccaatttccgtaggaagggccgctcactgcacggtggggcgatgctgggcgcgagccgtgtttccgtctattgttgacttcctcacgatgctggctcaggctcagagcctctcatcaccgcctgtgaaatggggaccaccctcctaatctactatccagacctaccttctggaagctcaattatcacgagcacatggtggaaaacgtgggccggtgacaacttaacatgtaaatgtacataataaaattccaggcacaatacatatgaacgcttttagagaactttgggagcaaagcaactgatgtcctgcgtggaaagtcctcttctccccatgaaattatctcaaggatcttccatgggaagatgtgacagaaccaggacactactgcttaatatttaatatcagatactcttaaatcacaagagcataactaaagtattcttcgtttctttagtcaaatctccttttctataaaatggagacggctttcatatgtttgggaaacattttaataacgaattaataaacattttaatatc

SEQ ID NO: 252936 - DNA, 441 bp, Homo sapiens
cagggcataggaggcccttcatgaccagcctcaccagcacctctagctacatctcctactgctctcacctccacatttacccttcggcatgccaacctgcttatggttacggacacagcttgctgttttggcttctgtgcctccccttgtttgcttcctgctgctgaatcatgctggaacatcttgtccattagctgtcaagtcacctgtccaaattcagctctgttggccctttctctcctggacatcgcctccttgataaaccaacagttttagcaatgtgtttatttacgtgtgtttctccctttggccagtgttctctagaaggacaagagctcttaatgatgtttgcctagcacagtagctggcggtgtgtgggtgtctaatacatgttaaacgtttaataaatgcttaatttattgatgcattgattaataagtg

SEQ ID NO: 252937 - DNA, 349 bp, Homo sapiens
  misc_feature (84)..(84): n is a, c, g, or t
  misc_feature (105)..(105): n is a, c, g, or t
  misc_feature (179)..(179): n is a, c, g, or t
acttatagctctgcaatactgcacttatttagatggtaaggcacctgacagtctccatgctaagtaactctcctcatgcatttnaacatcgccatcattctcctnttactcctccaagccctcttccatcggggaatagagctggtgcagcgctttcagttcattgtactcctgggggngaataatgctcttcaactgatctggtgtctcagtcaaacttagatccctctgaaagtcagatcctttcagcgtagcatccctgagtgccgtgttggcaggaagcgagactcgtaccttaggctgaatggatttcttctaaccaatcccagatatcagagtagtgcaaagt

SEQ ID NO: 252938 - DNA, 575 bp, Homo sapiens
ccaccattgagaacgccaggattgtcctgcagatcaacaatgctcaactggctgcagatgacttctgaaccaagtttggtttgagtgtttgggtgctggatgaggtgaccctggccaggactgatctggaggcacagatcaaaggcctgaaggaagagctggcctacctgaagaagaagcatgaggaggaaatcaatgccctgaggggccaagtgggagaccaggtccatgtgagggtggattcagctcggacctgccaagatcctgagtgacaggcaaagccaatatgagatcatggccaagcagaactggaaggatgctgaagcctggttcaccagctggactgaggaactgaaccaggaggtcactggccacatagagcagctccagataagcaggtccgaggtcactgacctgcagtgcaccctccagggtcttgagattgagctgcactcgcagctcagcgtgaaagctcccttagaaggcacactggcagaaacagaggcatgctttggagcccagctggtgcagatccaggcactgatcagcagtattgaagcccagctgggcgatgt

SEQ ID NO: 252939 - DNA, 506 bp, Homo sapiens
ttttttaagttcagtgtttacatggttgctgtaaacctttgactattttctagcatactgaaaaatttgattctgatcgttttctcttgattttttgatgttactgtggaagaactggcccttggtctacctactccatttcctgctgatatcactcccaaaagggggaaattagtttgaatatgttgagtttgaggtactatgagaaggcccagtgaatatatctcacaggtaattaggtataagagcttgaatctttctttctaagagaggagatttgagctacacatatgaactgagatgtcacctgcttatcatggaaaatgcaagggtgtttaagatcatcagggagagttccagggcataccaccatagatgagttcacagtagaggcagaaaaccaatgggcacaaagtacaaggaaaaccaggagcctgtggtacagtgaaaggtgttcttatcataagttattttagtagaatggtgacatttgaatgaaaagaaaa

SEQ ID NO: 252940 - DNA, 622 bp, Homo sapiens
caagccaaatttcaactgctgtgttttcaataagtgttcagcgactgttctaagcagtcaaaaattgatctgagagttgatagagtaacttgcactttcatagatgatggaagagtgtagtagatggaaccatctgtacatagaagtattctagtgacctggcattaatgtgcctggtctgctgttgcgagctgtgccttccctgacacttgggttatcaatagtctgcctattgttgactcaaaacaggggaggtcagaggcccagagccagcaggaagaagaggaaaagaaatccagaatttccggttagaatgaaaatcataaaaagtaaggccgggcgcagtgactcacgcctgtaatcccagcactttgggaggccgaggcaggcagattatgaggtcaggagttcgagaccagcctgaccagcatggtgaaacccctgtctctactaaaaatacaaaaaattagccgggcgtggtggcgtgtgcctgtagtcccagctactcgggaggctgaggcaggagaattgcttgaacccagcaggcggaggttgcagtaagccgagatcgcaccactgcactccagcctgggtgacagagtgagactctgtctcaaaaaaa

SEQ ID NO: 252941 - DNA, 314 bp, Homo sapiens
tattcctgacttagcaagcagacctagaagtgggatggagaagggcttttgaatctccctccaaaggtccagagaaatctccttggaaatttgattgattattgattattgtaacaagagtttctcctcccccaggaagctccccagagtggtcttcttctaatagaggcggaactgtgtgatgggtggtcggaggttccggctgctgtgccagaccgcttgggttcaaatcttatctttaacagttacctaatattcgctgtgcttcagttgcctcatccataaagtagaaattacaatgatatctatcacat

SEQ ID NO: 252942 - DNA, 434 bp, Homo sapiens
gactgtgaaattaaaaactctgaaactcctgttaggcactgtcaagaactcatttgtattctaaaatttaaatctgacctttattgagtgctttctctgttgagacatcatggtaggtgcttttgaaacccaccttatttagaaaagtaatacaaatgtttctacttttgagtagataagtctaagttttaaataaatttaccagtcaatcttgtttctcagttatatggtaatttttttcataccacaaacctttcatttattattaagttcagttaccattctagctgtcaggtgaatcacaaatctagatattagagaaaatatttaccctaagaaagcttgattcactcagtatcaatttggatgttctgaatcttggtcatgtggaaatttaattctaggacatcttgatttgaatcaggtaaaccagc

SEQ ID NO: 252943 - DNA, 123 bp, Homo sapiens
tctttacttttcttttatctgaagtgtctttactttgctttcattcttgagggatatttcaccggatataagattcttagttgacaggtttttttcctttcaacaccttggatgtgttttttt

SEQ ID NO: 252944 - DNA, 885 bp, Homo sapiens
gcgcctgtgtctgttcttgcagaatgaagtacctctggacgtcacacatgtgtgtgttcgcatcattcggcctatgtagccctgaaatatgggagttacttctgaagtcagtccatctttataacccaaagaggatatgtataatgcgatattcagtaccgatattaatactgctgtatctatgctataagaaccagaagtcctgacacctgatttcccatcactagcaattttcctgattcacccacccaggagacaagatttgaatgagcagtaaaaatggccaaagatgagatgaccaaaaaaacagtgataggtctcaaacacagccagagatcaatcaggtgctgctttgattctactagtggttcttaaataaaagtattatattttctacgtcagtggagcatacatacattgtcattggtcttctatgctaatatgtgaagtgaattctacctttgaccttagaatgtatatagatatgatcaagtctttttagtcaactgtcatttgataaaaacaattaagatttagttaattgttgaattaaatggacttaagatattagataagtgggtaattcagagagtaatttttacattttatttagaaatgtaccagatattcctggagagccctacatttaaatattattctctttcattgtaccagcaattatattaatatatgtcaaaccatttgaccagatttctagtacaaaaatacaatcatgctattttgaaatgaaaagggggctggatttggagccagggtccaggttgtagctctgccgcttgtgacttggtcaagtcagatacctctctgagcctcagtttccacacttctaaatgaaaaataaatcccagtgggtgatgctgcctg

SEQ ID NO: 252945 - DNA, 939 bp, Homo sapiens
gcgcctgtgtctgttcttgcagaatgaagtacctctggacgtcacacatgtgtgtgttcgcatcattcggcctatgtagccctgaaatatgggagttacttctgaagtcagtccatctttataacccaaagaggatatgtataatgcgatattcagtaccgatattaatactgctgtatctatgctataagaaccagaagtcctgacacctgatttcccatcactagcaattttcctgattcacccacccaggagacaagatttgaatgagcagtaaaaatggccaaagatgagatgaccaaaaaaacagtgataggtctcaaacacagccagagatcaatcaggtgctgctttgattctactagtggttcttaaataaaagtattatattttctacgtcagtggagcatacatacattgtcattggtcttctatgctaatatgtgaagtgaattctacctttgaccttagaatgtatatagatatgatcaagtctttttagtcaactgtcatttgataaaaacaattaagatttagttaattgttgaattaaatggacttaagatattagataagtgggtaattcagagagtaatttttacattttatttagaaaaccttaagtactcaagttgaccaggaggcaccaagtggtataaatacagccagatgtaccagatattcctggagagccctacatttaaatattattctctttcattgtaccagcaattatattaatatatgtcaaaccatttgaccagatttctagtacaaaaatacaatcatgctattttgaaatgaaaagggggctggatttggagccagggtccaggttgtagctctgccgcttgtgacttggtcaagtcagatacctctctgagcctcagtttccacacttctaaatgaaaaataaatcccagtgggtgatgctgcctg

SEQ ID NO: 252946 - DNA, 412 bp, Homo sapiens
  misc_feature (412)..(412): n is a, c, g, or t
gattgtttctcttaggaaaaaaaaaaatcataatctataacagaagtggtcctagcttggaagatacctggagggacatgtgtttgtgagtaaagacatgttatatccacatcccagagtcactaatcatttctttaacctgtggagtgcaccttaagtataccctgaaaagtctagtactccatggaaattcatagtatcatcttctttccccctcttttttaaaaaaaaaaaaaagaaactcgagttttttttttttttttttgtagagacggagttttgccatgttgcccaagctggtctcgaacccctgggctcaagcagtcctcccacccctgcctcccatagtgttgtgattatagtgagcccactgcacccagcccaaactatagaatattttgcaccgtttttn

SEQ ID NO: 252947 - DNA, 454 bp, Homo sapiens
tatatttgtagacctgtccatgccccacttacctcctccacgtacagtgaatcactagggtagacatgagtgtctccttttcattgtaggattgtctcctttttgtttctgtttttattcaacatttgataaagtctatgcactaagtatggagtgttctggcatttttttaatgcacaaagcccaggatgcatcacttaacaatggggatgcattctgagaaatgcattattaggtgagtgcatcactgtgcagatctcatagggtgtactcacaaacctacatggcagagctgactacacactgaggctatatggtacagtctgttgcccgcaggctacaaacccatacagcatatagagtagtactgaatactgaaggtaactgtaacacaatggtaagtatttgtgtacctagcttttctttaggatgggatttaaaaaaaaaaagccaa

SEQ ID NO: 252948 - DNA, 255 bp, Homo sapiens
ttataatatgtgtaaaagtgaaagatgggacaacagtatcccaaaatattaggaggtagaattgtaaggttcttacgttcgtgaagtagaaaatatgaactgttggctgggcatggtgactcatgcctgtgatcccagtgctttgggaagctgagactggaggatcacttgagcccaggattttgagtttacactgagttctgtttgtgccactgcacactagcatggttgacagagtaaaacctggtctctaac

SEQ ID NO: 252949 - DNA, 392 bp, Homo sapiens
cattgaaggcagcagggggatcatggtttctacatgttgtcctgcaaaggggcacaggagaatgggcagtaggtggcagggaagtggaggatcaagagatggtgtttaagatggtgagatggggccaggtgtggtggctcacgcctgtaatcccagcactttgggaggccatggcgggaggatcatgaggtcaggagatcaagaccatcctggctaacatggtgaaaccccatctctactaaaaattcaaaaaattagcagggagtggtggcgggcacctgtagtcccagctacttgggaggctgaggcaggagaatggcgtgaacccaggaggcggaggttgtagtgagccaagatcgtgccactgcactccagcctgggcgacagagtga

SEQ ID NO: 252950 - DNA, 2304 bp, Homo sapiens
agagtgggcgggatagagagcgtgggcgggggggctagcctcgtgcgggctccttaagtagcggctgcgtggcttccctggcacgctagtcttacgacgtcacggtcaggtggtgcagagctggacggcaacgacgtcggacgcgccccttcttggaacaatgtcccaccacggaggagctcccaaggcctctacgtgggtcgttgctagtcggcgaagctcgacagtgtcccgagcgccagagaggaggccggcggaggagttgaatcgaacaggtcctgagggatatagtgtcggcagaggtggtcgctggagaggcacctctaggcccccggaggccgtggccgctggtcacgaggaactgccgctgtgttttgctttgaagagccactttgttggcgcggtaatcggtcgtggtgggtcaaaaataaagaatatacaaagtacaacaaacaccacaatccaaataatacaagaacaaccagaatcattagtcaaaatttttggcagcaaggcaatgcaaacgaaagcaaaagcagtgatagacaattttgttaaaaagctagaagaaaattacaattcagaatgcggaattgatactgcattccaaccttctgttggaaaagatggaagcacagataacaatgttgttgcaggagatcggccattgatagattgggatcaaattagagaggaaggtttgaaatggcaaaaaacaaagtgggcagatttaccaccaattaagaaaaacttttataaagagtccactgccacaagtgccatgtcaaaagtagaagcagatagttggaggaaagaaaattttaatataacgtgggatgacttgaaggatggggagaaacgacctatccccaatcctacctgcacatttgatgacgcctttcaatgttatcctgaggttatggaaaacattaaaaaggcaggttttcaaaagccaacacctattcagtcacaggcatggcccattgtgttgcaaggaatagatcttataggagtagcccagactggaacaggaaagacattgtgttatttaatgcctggatttattcatctggtccttcaacccagccttaaaggtcaaaggaatagacccggcatgttagttctaactcccactcgggaattagcacttcaagtagaaggagaatgttgcaaatattcatataaagggcttcggagtgtttgtgtatatggtggtggaaatagagatgaacaaatagaagagcttaaaaaaggtgtagatatcataattgcaactcccggaagattgaatgatctgcaaatgagtaacttcgtcaatctgaagaatataacctacttggttttagatgaagcagacaagatgttggacatgggatttgaaccccagataatgaagattttgttagatgtgcgcccagataggcagacagttatgaccagtgctacatggcctcattcagttcatcgcctcgcacaatcttatttgaaagaaccaatgattgtctatgttggtacattggatctagttgctgtaagttcagtgaagcaaaatataattgtaaccaccgaggaagagaaatggagtcacatgcaaacttttctacagagtatgtcatccacagacaaagtcattgtcttcgtttctcgaaaagctgttgcggatcacttatcaagtgacctaatacttggaaatatatcagtagagtctctgcatggagatagagaacagagagatcgggagaaagcattagagaactttaaaacaggcaaagtgagaatactaattgcaactgatctagcctctagaggacttgatgtccatgacgttacacatgtctataattttgactttccacggaatattgaagaatacgtacaccgaatagggcgcacgggaagagcagggaggactggtgtttccattacaactttgactagaaatgattggagggttgcctctgaattgattaatattctggaaagagcaaatcagagtattccagaggagcttgtatcaatggctgagaggtttgaggcacatcaacggaaaagggaaatggaaagaaaaatggaaagacctcaaggaaggcccaagaagtttcattaatgtcttctgtactagtggggtagagaattcaagattttttagaaatatagtaagacagaagtattggacatgttggcagtatgaagagaccggactgatttgactgattcttaaaataatagtgtttgaaaatatagaatccagtgttttatactttctttaataaaaatagaagtatttaaacttggaagttgttt

SEQ ID NO: 252951 - DNA, 480 bp, Homo sapiens
gcaatgaaagccccgccaaggaagaaatatgtagagtggaggtggggaaagttgtagaagatggggtaaatgttccagcagggggaacatattcaggctcagaggtaagaaagaatatgtagaaaatgctaccatataaaggcacattaaaggcacttggaagcagctgaagcagcaaattttatagcctgtagatggatgtagggtttaatcgagatacctgtttctgtttaaaggatgtcatgtaaccagctgtgcgattatctgaaatgatttggatgcattttagtgttgtagaaaagaactcagaatcctaataacaacacgttgaataatttcagagtattccagaggagcttgtatcaatggctgagaggtttgaggcacatcaacggaaaagggaaatggaaagaaaaatggaaagacctcaaggaaggcccaagaagtttcattaatgtcttctgtactagtggggtagag

SEQ ID NO: 252952 - DNA, 336 bp, Homo sapiens
gtactttttgtgttaatgtttatcattccgtttcagtcacaggcatggcccattgtgttgcaaggaatagatcttataggagtagcccagactggaacaggaaagacattgtgttatttaatgcctggatttattcatctggtccttcaacccaggtaagaattcctatggctggtttcttcttatagaggtttaatagatttagatatcaaaaatgtaattaaagtttctttacctattgcttgatccaaaggtaatgcctagcttcagagaagatgcaaggaattaaacacttagattgtgctggtgaaagtataaactggcaaaacattttta

SEQ ID NO: 252953 - DNA, 2088 bp, Homo sapiens
  misc_feature (30)..(30): n is a, c, g, or t
  misc_feature (336)..(336): n is a, c, g, or t
  misc_feature (1363)..(1363): n is a, c, g, or t
tctctttgatacatacctaggaatggaatngcggggccatgtgtggtaactgtatatttaactttctgaagaaccgccaaactgttttccaaactctaccattttacattcccaccagcaatatccaggtgttgccatttctccacttcctcaccaacacttgttttccatttttgtttttgttcttattatggatatcctagggagtgtgcagtggtatggcattgtggttttgattgacatctccctaatgattagtgatgcagaacatctttttattttattctttattttgatttttaggtcattcatacgtctttagagaaatgttcagancatttgcccattttttaattgtgttactgtttttttgttgttgagttgtaagagttctttatatgttctggatattatacccttatcatgtaaatggtttgcaaatattttctcccattctcttgtcttttcacttttgtgattgtgtctgttgacacacagaagtttttcattttgaagttcactttatctatttttttctttggttgctaatgcttaagtgtcatatcaaataaatcattccctaatccaaaatcacaaagatttacacctatgttttcttgtaagaagtttatagtttagctcttaacgtacttagatctttgatccagtttgaagtaatttttatatatgtgaggtacatgtaaggtaggagtccaaattcattctttgatatgagatattatcccagcactatatatagaaaagattattctttccccattgaattgtcttgaattgtcttggcaactttgttagaaatcaattgaccatagatgtatgggtttatttctagattcttggttctattccactcacctaaatttctgtccttatgccagacttggttagttttgaatccattttttagttaaatattgacttattccctgcatttaaacttcataaatataaaaagcaatctgtgtagtgcagtacacaatgtaaaatgactgtttcattgctttgcaaattccatcttagaagttttatggttctgtaatgaataattgcttgtagaaatttattgaattaatcgtgtatcattgggaatttgccaaaggagactcagaaaatcttttgggaataaaatcatttaaattttctgaatgctgactcaaatactcaaaattgctgttggtatttaatgataacttttatttttcatcttttaagaaattctgagagaaaatcaggaatgaactatgaagtccttgtattcctagtccctaataggacattttaataatatacagtactaattgtttgttgttacagttaagaattttacttttgggtctaattnttttttctaactaagttttaaagagaagggaaacttaagcaagtacattcattctaaacttgtgtatataatctttaatcttagaagtgcatctgtattttgatttttaggtcagcgtacacaagtagagttagttgtccgtagtccctcaccttatctgcggttttgctttcgtatggttctgaggtcagaaaatattaaatggaaaattccagaaataagcacttcataagtttaaattgcacaccattctgagtattgtgatgaaattcatgccatccacttctgtcctatctggtctcacctgggacatgaatcattcctttgttcagtctatccacactatatacaccacctgccgttagtcactgtgtagccatctcggttatcagctcgactgctgtggtatcacagtgcttatgttcaagtaaccttattttacttaataatggccccaaaacacaagagttgtgatgctggcaattcaagaagctttaaagtgctccctttaagtgaaaaggtgaaagttcttgacttaagaaaggaaaaaaaaaaaaaaaaggtatgctgagattgctaagatctacagtaagaacaaatctcccagctgggcactctggtttaggcctgtaatcccagcactttgagaggccaaggcaggaggatcacttgaagataggggtttgagaccagcccggtctacatggtaagactctgtctccacc

SEQ ID NO: 252954 - DNA, 269 bp, Homo sapiens
tgcattgtagaggggtggagcatgtcagtctggatccctggccctctgctctcactatggcttatcccaagagcgggacggccatggaacatgggacggccacggaacatgggttcctgcccatcagagtgctgcaccgggagctgctctcaccttttcctgcctggagaccacagcatgagggtcaagttttttccttttcaggaaccaaagtgtctctttgtgtaccccatcctggtgagcaatagagctaagtggacatccatgcc

SEQ ID NO: 252955 - DNA, 277 bp, Homo sapiens
ccccaatgctgatttgcctgtggggtaatgttctgtgcctatctcatcggtgcacttagcacagtgtattataattttgtatgttctttctccctcgcagcagtccgagctccttgagagcaaggaccatgtaccttttcatctttacatatccattgcctacatatttgttgaacgaaagttcctagcacagcccctgtcccataacaggcctttaaatatcaagcactatttttttttcctccctttcccgcaacatgcagacatacacactttc

SEQ ID NO: 252956 - DNA, 359 bp, Homo sapiens
gagatggaatttcactcttgttgcccatgttggagtgcaatggcaccatcttggctcaccacaacctccgcctcccagctgaggcaggagaatggcgtgaacccaggaggtggagcttgcagtgagccaagatagcgccactgcactccagcctgggtgaaagagcgagactccgtctcaaaaaaaaaaaagaaatggcagagctgggttgggagcggtggctcatacttgtaatcacaacactttgagaggatggcttgagcccaggagtttgagaccagccgggaggtcaaggctgcagtgagccatgatcacgccactgcattccagcctgggtgacagagtgagaccctgtctca

SEQ ID NO: 252957 - DNA, 253 bp, Homo sapiens
tgcactctgctttctgtgctgtggcaatctcctgcctctgttagtaaaccaggtgcgatgggatccgtttttttggttgcagtggagaaggacctcagacttcaggctttccatgtcagaaaggggcttaggtggagcaggacattagctcactgtgtgagttttctcctgggactaccatcacaaagtatttaatcgcaggaactgggtggggttaaacaacagaaatgtattctctcagagcctgaggcta

SEQ ID NO: 252958 - DNA, 657 bp, Homo sapiens
gctaattgaaaagactaaagaattaagctcttctcatggaagaaaggaaagtaggacttaatgtcctgaccttgatttgagaactatattgttgtagaacatactgaaaggtacatgtttaatagcttgggaaaaatcttaaaaaaaaaaaaaaaacacagtttttgaacctggccatgtcactgagtctagtacatgacaaacctaggaagttggtagcagaacacagggtcaaaataaaatacaagaaatcactgtagcctgataatctgcaagacacaccaagcagacaagtggtaagacagtgggaagtgtgcacacatttaaagcaacaattctgaaatgtgtccatgtggtgaagtgtgcacctacctggaagccatgagcaccctgcagaacacctgaaacattgataagtgtaaatctgtaatagaaactgagaacatcagagctaaatgacaacttaggaacacaaaggaggagacagcagacactgggggagggtagcaagagagagaggagcagaaagataactgttgggtactgggcttaattgggtcctgggtgatgtaataatatgtatgacaaaccctcgtggcaggtgtttaactgtgtaacggaccttcacatgtacccccaaacctaaaataaaaattt

SEQ ID NO: 252959 - DNA, 491 bp, Homo sapiens
  misc_feature (351)..(351): n is a, c, g, or t
  misc_feature (361)..(361): n is a, c, g, or t
gctaattgaaaagactaaagaattaagctcttctcatggaagaaaggaaagtaggacttaatgtcctgaccttgatttgagaactatattgttgtagaacatactgaaaggtacatgtttaatagcttgggaaaaatcttaaaaaaaaaaaaaaaacacagtttttgaacctggccatgtcactgagtctagtacatgacaaacctaggaagttggtagcagaacacagggtcaaaataaaatacaagaaatcactgtagcctgataatctgcaagacacaccaagcagacaagtggtaagacagtgggaagtgtgcacacatttcagaactgttatctatagctaattgnaaagactaangaattaagctcttctcatggaagaaaggaaagtaggacttaatgtcctgaccttgatttgagaactatattgttgtagaacatactgaaaggtacatgtttaatagcttgggaaaaatcttaaaaaaaaa

SEQ ID NO: 252960 - DNA, 350 bp, Homo sapiens
gaaagaatgcttctgtaagagggcggcacaagggtggatgctcagagtgccatcaggccattttggacttctcaggcttctaaggaaacagagtcttcgtggaagttccttgggatgcagaggacagtctgtggggtatccccactggggtgctcatttgtgactgggtatgggatggccggatctgtgcgctggggacctccttagaagtgtgtgtgcgtgcacacatatatgtgagtatacacacacatgcacacacactggacaaaggaaggggaccagttagcaggcctctgctgtgggaggcttcctgactcaccctaatttccccctctttgaaaactgtcttc

SEQ ID NO: 252961 - DNA, 3443 bp, Homo sapiens
agcagagcgtgagcgggaggcggagccgggagagcggctctcgtagctcaccctggccccaggccgggcggctcgagggggaggagttaccgccgttcttcggcatcagaacacaccatgatggctgtgacctaagaccctcaggaagccccggggtcatggcccagaagcaccccggagaaagagggttgtatggagcccaccacagtggtggtgcctccctcaggactttaggaccctccgtggaccctgaaataccttcattctcaggactcagggactcagcagggactgctcctaatggtacccgctgcctcacagagcactctggtcctaagcacacacagcacccaaacccagcccattggttggacccaagccatggccccccagggggtccaggaccacctagagatgcagaggaccctgatcagagtgagacgtcttcagaagaagaatcaggagtggaccaggaactctcaaaagaaaacgagactgggaaccagaaggatgggaactcttttctttccattccatctgcttgcaactgccagggaacacctggaattccagaagggccttactctgagggaggaaatggttcttctagcaacttttgccaccactgtacctctccagctttgggggaagatgagttggaagaggaatatgatgatgaagaatctctcaagttccccagtgatttttcacgtgtgtccagcggaaagaaacccccatcccggagacagcggcaccgctttccaacgaaggaggatactcgggagggtggacgtagggatcccaggtcccctggtcgacatcggctgggtcggaaacgaagtcaggcagataagcgcaaaggcctgggattgtggggagccgaggaactatgtcaacttggacaggcaggcttttggtggctgattgaactgctggtattggtgggagagtacgtagaaacttgtggccatctcatctatgcctgcaggcaactgaaaagcagtgatttggacctttttcgagtttggatgggagtgtggacagggcggttagggggctgggcccaggtcatgtttcagtttctaagccaggggttttactgtggagtaggactgtttactcgttttcttaagctgctgggtgctttgctgctcctggctctggccctctttttgggctttctacagttgggatggcggtttctggtgggactaggtgaccggttaggctggagggataaggctacctggctcttctcttggctggattctccagccttgcagcgttgcttgactctgctgagagatagcaggccatggcagcggctggtaagaatagttcagtggggctggctggagttgccttgggtcaagcagaatattaataggcaggggaatgcacctgtagctagtgggcgctactgccagcctgaagaggaagtggctcgactcttgaccatggctggggttcctgaggatgagctaaaccctttccatgtactgggggttgaggccacagcatcagatgttgaactgaagaaggcctatagacagctggcagtgatggttcatcctgacaaaaatcatcatccccgggctgaggaggccttcaaggttttgcgagcagcttgggacattgtcagcaatgctgaaaagcgaaaggagtatgagatgaaacgaatggcagagaatgagctgagccggtcagtaaatgagtttctgtccaagctgcaagatgacctcaaggaggcaatgaatactatgatgtgtagccgatgccaaggaaagcataggaggtttgaaatggaccgggaacctaagagtgccagatactgtgctgagtgtaataggctgcatcctgctgaggaaggagacttttgggcagagtcaagcatgttgggcctcaagatcacctactttgcactgatggatggaaaggtgtatgacatcacagagtgggctggatgccagcgtgtaggtatctccccagatacccacagagtcccctatcacatctcatttggttctcggattccaggcaccagagggcggcagagagccaccccagatgcccctcctgctgatcttcaggatttcttgagtcggatctttcaagtacccccagggcagatgcccaatgggaacttctttgcagctcctcagcctgcccctggagccgctgcagcctctaagcccaacagcacagtacccaagggagaagccaaacctaagcggcggaagaaagtgaggaggcccttccaacgttgatgccccttctctttcctcaaatcaatgtcagggagtcaaaagggctgtagcacaggatggagtttgatttatccctcctcccccaacacctaggaactgaatctttttctttttattttttgagatggagtcttgctctgttgcccagctggagtgcagtggtgtgatctcagcttactgcaacctctgtctcccgggttcaagcaattctcccatctcagcctcctgagtagctgggattacaggcacacaccaccacacctggcccagctaattcttttttgtatttttagtagagacggggtttcaccatgttgcccaggctggtctcgaactcctgagctcaggtgatccacccgtcttggcctcccaaagtgctggattacaggcataagccactgtgcccggcctgaatcttgtcttttgacaataccaaagaaatagggggtagctagagtaaagaacctagggcctggacctgggctggacagtgtatccctttaggtgtgggaactgggtatttccctggggtctgtatgcctttgtcttgtcatttgcttttagggcagatgacactttttcccacccttttaaagctacaagtctatcttctttcttgacccatttcaggagggagccctctcctttatcctgatataatatttaaaagacagaacaagaaagcatgtagccctaatgataggagattatcgcatagagttcagagactggaaactgaattttccctcgactttcactttgtgggtaaatcacccaattttaggctcttttctgcaaggatggccaaaattaatcatttttaaaaagtagattcatgcccactgcccttgggtgagggggaagaatacgggggttcccagaagcccccatgtgatccaagggtttgtattttttttttaagtttgttcatatttgtatgtacatgactatttaaagccaggggattatctttctataaatgtataactggcaacctgtatcttccctctttgttgcccatatagccggagccctttttctcatttgagaatctcttccctactaagtgttaagcttagagtgaagggcacctcctactggaccaaaggagaggggattggagaattgttttaagttttatacattaggtcagtattccatcttcccacccccagc

SEQ ID NO: 252962 - DNA, 3569 bp, Homo sapiens
ggttcaagcgattcttctgcctcagcctcccgagtagctgggactacaggtgcgcgccaccacgcctggcgaatttctgtatttttagtagagacggagtttcaccatgttggccaggctggtctcgaactcctgacctcgtgatccgccggcctcggcctcccaaagtgctgggattacaggcgtgagccacggtgcccggccaccttcgtcccttctacacagccggcatcagaacacaccatgatggctgtgacctaagaccctcaggaagccccggggtcatggcccagaagcaccccggagaaagagggttgtatggagcccaccacagtggtggtgcctccctcaggactttaggaccctccgtggaccctgaaataccttcattctcaggactcagggactcagcagggactgctcctaatggtacccgctgcctcacagagcactctggtcctaagcacacacagcacccaaacccagcccattggttggacccaagccatggccccccagggggtccaggaccacctagagatgcagaggaccctgatcagagtgagacgtcttcagaagaagaatcaggagtggaccaggaactctcaaaagaaaacgagactgggaaccagaaggatgggaactcttttctttccattccatctgcttgcaactgccagggaacacctggaattccagaagggccttactctgagggaggaaatggttcttctagcaacttttgccaccactgtacctctccagctttgggggaagatgagttggaagaggaatatgatgatgaagaatctctcaagttccccagtgatttttcacgtgtgtccagcggaaagaaacccccatcccggagacagcggcaccgctttccaacgaaggaggatactcgggagggtggacgtagggatcccaggtcccctggtcgacatcggctgggtcggaaacgaagtcaggcagataagcgcaaaggcctgggattgtggggagccgaggaactatgtcaacttggacaggcaggcttttggtggctgattgaactgctggtattggtgggagagtacgtagaaacttgtggccatctcatctatgcctgcaggcaactgaaaagcagtgatttggacctttttcgagtttggatgggagtgtggacagggcggttagggggctgggcccaggtcatgtttcagtttctaagccaggggttttactgtggagtaggactgtttactcgttttcttaagctgctgggtgctttgctgctcctggctctggccctctttttgggctttctacagttgggatggcggtttctggtgggactaggtgaccggttaggctggagggataaggctacctggctcttctcttggctggattctccagccttgcagcgttgcttgactctgctgagagatagcaggccatggcagcggctggtaagaatagttcagtggggctggctggagttgccttgggtcaagcagaatattaataggcaggggaatgcacctgtagctagtgggcgctactgccagcctgaagaggaagtggctcgactcttgaccatggctggggttcctgaggatgagctaaaccctttccatgtactgggggttgaggccacagcatcagatgttgaactgaagaaggcctatagacagctggcagtgatggttcatcctgacaaaaatcatcatccccgggctgaggaggccttcaaggttttgcgagcagcttgggacattgtcagcaatgctgaaaagcgaaaggagtatgagatgaaacgaatggcagagaatgagctgagccggtcagtaaatgagtttctgtccaagctgcaagatgacctcaaggaggcaatgaatactatgatgtgtagccgatgccaaggaaagcataggaggtttgaaatggaccgggaacctaagagtgccagatactgtgctgagtgtaataggctgcatcctgctgaggaaggagacttttgggcagagtcaagcatgttgggcctcaagatcacctactttgcactgatggatggaaaggtgtatgacatcacagagtgggctggatgccagcgtgtaggtatctccccagatacccacagagtcccctatcacatctcatttggttctcggattccaggcaccagagggcggcagagagccaccccagatgcccctcctgctgatcttcaggatttcttgagtcggatctttcaagtacccccagggcagatgcccaatgggaacttctttgcagctcctcagcctgcccctggagccgctgcagcctctaagcccaacagcacagtacccaagggagaagccaaacctaagcggcggaagaaagtgaggaggcccttccaacgttgatgccccttctctttcctcaaatcaatgtcagggagtcaaaagggctgtagcacaggatggagtttgatttatccctcctcccccaacacctaggaactgaatctttttctttttattttttgagatggagtcttgctctgttgcccagctggagtgcagtggtgtgatctcagcttactgcaacctctgtctcccgggttcaagcaattctcccatctcagcctcctgagtagctgggattacaggcacacaccaccacacctggcccagctaattcttttttgtatttttagtagagacggggtttcaccatgttgcccaggctggtctcgaactcctgagctcaggtgatccacccgtcttggcctcccaaagtgctggattacaggcataagccactgtgcccggcctgaatcttgtcttttgacaataccaaagaaatagggggtagctagagtaaagaacctagggcctggacctgggctggacagtgtatccctttaggtgtgggaactgggtatttccctggggtctgtatgcctttgtcttgtcatttgcttttagggcagatgacactttttcccacccttttaaagctacaagtctatcttctttcttgacccatttcaggagggagccctctcctttatcctgatataatatttaaaagacagaacaagaaagcatgtagccctaatgataggagattatcgcatagagttcagagactggaaactgaattttccctcgactttcactttgtgggtaaatcacccaattttaggctcttttctgcaaggatggccaaaattaatcatttttaaaaagtagattcatgcccactgcccttgggtgagggggaagaatacgggggttcccagaagcccccatgtgatccaagggtttgtattttttttttaagtttgttcatatttgtatgtacatgactatttaaagccaggggattatctttctataaatgtataactggcaacctgtatcttccctctttgttgcccatatagccggagccctttttctcatttgagaatctcttccctactaagtgttaagcttagagtgaagggcacctcctactggaccaaaggagaggggattggagaattgttttaagttttatacattaggtcagtattccatcttcccacccccagc

SEQ ID NO: 252963 - DNA, 2271 bp, Homo sapiens
tggctttccgatcctcttcgggctctttcctccctctgttcactgtgagtttttttgtctctttctgtggctgcgtatggtgtttcatcctgagcctcttgttttcttctccttctacttctcctacgtacctcttgctttgcctcctcctcctggcctagtgttggcggtggtcttcgctgctcttttcttccccctctttgtttctccttcactgtcgactggttgtctcgtacttctagttatctctaccacctctcttcagcccagctcttcttgtcgccacctgctgttgtcggtgcggctctgtggcatggcccaccctcgtcattatgatttccttatttctgatccctcgttgtgtttttttttgtttttataatttttttttttttttttttttttttttggttttttctttgtcatattgtcaatagactgacgattttaattagcactaagaaacattagctttaggatagaacgttgaagggatatgaaatactaagtggggtaattttagatgtttcagccctatttgtgaataatggtaagactactagcagtgccctaggtaggcttgacaaattattaaggaactatccttttgttggttgcaggaggtttgaaatggaccgggaacctaagagtgccagatactgtgctgagtgtaataggctgcatcctgctgaggaaggagacttttgggcagagtcaagcatgttgggcctcaagatcacctactttgcactgatggatggaaaggtgtatgacatcacagagtgggctggatgccagcgtgtaggtatctccccagatacccacagagtcccctatcacatctcatttggttctcggattccaggcaccagagggcggcagagagccaccccagatgcccctcctgctgatcttcaggatttcttgagtcggatctttcaagtacccccagggcagatgcccaatgggaacttctttgcagctcctcagcctgcccctggagccgctgcagcctctaagcccaacagcacagtacccaagggagaagccaaacctaagcggcggaagaaagtgaggaggcccttccaacgttgatgccccttctctttcctcaaatcaatgtcagggagtcaaaagggctgtagcacaggatggagtttgatttatccctcctcccccaacacctaggaactgaatctttttctttttattttttgagatggagtcttgctctgttgcccagctggagtgcagtggtgtgatctcagcttactgcaacctctgtctcccgggttcaagcaattctcccatctcagcctcctgagtagctgggattacaggcacacaccaccacacctggcccagctaattcttttttgtatttttagtagagacggggtttcaccatgttgcccaggctggtctcgaactcctgagctcaggtgatccacccgtcttggcctcccaaagtgctggattacaggcataagccactgtgcccggcctgaatcttgtcttttgacaataccaaagaaatagggggtagctagagtaaagaacctagggcctggacctgggctggacagtgtatccctttaggtgtgggaactgggtatttccctggggtctgtatgcctttgtcttgtcatttgcttttagggcagatgacactttttcccacccttttaaagctacaagtctatcttctttcttgacccatttcaggagggagccctctcctttatcctgatataatatttaaaagacagaacaagaaagcatgtagccctaatgataggagattatcgcatagagttcagagactggaaactgaattttccctcgactttcactttgtgggtaaatcacccaattttaggctcttttctgcaaggatggccaaaattaatcatttttaaaaagtagattcatgcccactgcccttgggtgagggggaagaatacgggggttcccagaagcccccatgtgatccaagggtttgtattttttttttaagtttgttcatatttgtatgtacatgactatttaaagccaggggattatctttctataaatgtataactggcaacctgtatcttccctctttgttgcccatatagccggagccctttttctcatttgagaatctcttccctactaagtgttaagcttagagtgaagggcacctcctactggaccaaaggagaggggattggagaattgttttaagttttatacattaggtcagtattccatcttcccacccccagc

SEQ ID NO: 252964 - DNA, 2367 bp, Homo sapiens
tggctttccgatcctcttcgggctctttcctccctctgttcactgtgagtttttttgtctctttctgtggctgcgtatggtgtttcatcctgagcctcttgttttcttctccttctacttctcctacgtacctcttgctttgcctcctcctcctggcctagtgttggcggtggtcttcgctgctcttttcttccccctctttgtttctccttcactgtcgactggttgtctcgtacttctagttatctctaccacctctcttcagcccagctcttcttgtcgccacctgctgttgtcggtgcggctctgtggcatggcccaccctcgtcattatgatttccttatttctgatccctcgttgtgtttttttttgtttttataatttttttttttttttttttttttttttggttttttctttgtcatattgtcaatagactgacgattttaattagcactaagaaacattagctttaggatagaacgttgaagggatatgaaatactaagtggggtaattttagatgtttcagccctatttgtgaataatggtaagactactagcagtgccctaggtaggcttgacaaattattaaggaactatccttttgttggttgcaggaggtttgaaatggaccgggaacctaagagtgccagatactgtgctgagtgtaataggctgcatcctgctgaggaaggagacttttgggcagagtcaagcatgttgggcctcaagatcacctactttgcactgatggatggaaaggtgtatgacatcacaggtactctctgtcctctagaaatacaggctcatacttcctgatcttttatgtgctctaaactgcgacgttttggctaattatttctcatgtttatagagtgggctggatgccagcgtgtaggtatctccccagatacccacagagtcccctatcacatctcatttggttctcggattccaggcaccagagggcggcagagagccaccccagatgcccctcctgctgatcttcaggatttcttgagtcggatctttcaagtacccccagggcagatgcccaatgggaacttctttgcagctcctcagcctgcccctggagccgctgcagcctctaagcccaacagcacagtacccaagggagaagccaaacctaagcggcggaagaaagtgaggaggcccttccaacgttgatgccccttctctttcctcaaatcaatgtcagggagtcaaaagggctgtagcacaggatggagtttgatttatccctcctcccccaacacctaggaactgaatctttttctttttattttttgagatggagtcttgctctgttgcccagctggagtgcagtggtgtgatctcagcttactgcaacctctgtctcccgggttcaagcaattctcccatctcagcctcctgagtagctgggattacaggcacacaccaccacacctggcccagctaattcttttttgtatttttagtagagacggggtttcaccatgttgcccaggctggtctcgaactcctgagctcaggtgatccacccgtcttggcctcccaaagtgctggattacaggcataagccactgtgcccggcctgaatcttgtcttttgacaataccaaagaaatagggggtagctagagtaaagaacctagggcctggacctgggctggacagtgtatccctttaggtgtgggaactgggtatttccctggggtctgtatgcctttgtcttgtcatttgcttttagggcagatgacactttttcccacccttttaaagctacaagtctatcttctttcttgacccatttcaggagggagccctctcctttatcctgatataatatttaaaagacagaacaagaaagcatgtagccctaatgataggagattatcgcatagagttcagagactggaaactgaattttccctcgactttcactttgtgggtaaatcacccaattttaggctcttttctgcaaggatggccaaaattaatcatttttaaaaagtagattcatgcccactgcccttgggtgagggggaagaatacgggggttcccagaagcccccatgtgatccaagggtttgtattttttttttaagtttgttcatatttgtatgtacatgactatttaaagccaggggattatctttctataaatgtataactggcaacctgtatcttccctctttgttgcccatatagccggagccctttttctcatttgagaatctcttccctactaagtgttaagcttagagtgaagggcacctcctactggaccaaaggagaggggattggagaattgttttaagttttatacattaggtcagtattccatcttcccacccccagc

SEQ ID NO: 252965 - DNA, 989 bp, Homo sapiens
cttcatatatattcttatttaatcctcccaacaatccatgatagatattcaggctgacatgatagataatcccaacaatccatgatagatattcatgatggcacacgcctgtaatcccagcactttgggaggctgaggtaggcagatctcttgaggtcaggagatccacccgtcttggcctcccaaagtgctggattacaggcataagccactgtgcccggcctgaatcttgtcttttgacaataccaaagaaatagggggtagctagagtaaagaacctagggcctggacctgggctggacagtgtatccctttaggtgtgggaactgggtatttccctggggtctgtatgcctttgtcttgtcatttgcttttagggcagatgacactttttcccacccttttaaagctacaagtctatcttctttcttgacccatttcaggagggagccctctcctttatcctgatataatatttaaaagacagaacaagaaagcatgtagccctaatgataggagattatcgcatagagttcagagactggaaactgaattttccctcgactttcactttgtgggtaaatcacccaattttaggctcttttctgcaaggatggccaaaattaatcatttttaaaaagtagattcatgcccactgcccttgggtgagggggaagaatacgggggttcccagaagcccccatgtgatccaagggtttgtattttttttttaagtttgttcatatttgtatgtacatgactatttaaagccaggggattatctttctataaatgtataactggcaacctgtatcttccctctttgttgcccatatagccggagccctttttctcatttgagaatctcttccctactaagtgttaagcttagagtgaagggcacctcctactggaccaaaggagaggggattggagaattgttttaagttttatacattaggtcagtattccatcttcccacccccagc

SEQ ID NO: 252966 - DNA, 1073 bp, Homo sapiens
agcagagcgtgagcgggaggcggagccgggagagcggctctcgtagctcaccctggccccaggccgggcggctcgagggggaggagttaccgccgttcttcggcatcagaacacaccatgatggctgtgacctaagaccctcaggaagccccggggtcatggcccagaagcaccccggagaaagagggttgtatggagcccaccacagtggtggtgcctccctcaggactttaggaccctccgtggaccctgaaataccttcattctcaggactcagggactcagcagggactgctcctaatggtacccgctgcctcacagagcactctggtcctaagcacacacagcacccaaacccagcccattggttggacccaagccatggccccccagggggtccaggaccacctagagatgcagaggaccctgatcagagtgagacgtcttcagaagaagaatcaggagtggaccaggaactctcaaaagaaaacgagactgggaaccagaaggatgggaactcttttctttccattccatctgcttgcaactgccagggaacacctggaattccagaagggccttactctgagggaggaaatggttcttctagcaacttttgccaccactgtacctctccagctttgggggaagatgagttggaagaggaatatgatgatgaagaatctctcaagttccccagtgatttttcacgtgtgtccagcggaaagaaacccccatcccggagacagcggcaccgctttccaacgaaggaggatactcgggagggtggacgtagggatcccaggtcccctggtcgacatcggctgggtcggaaacgaagtcaggcagataagcgcaaaggcctgggattgtggggagccgaggaactatgtcaacttggacaggcaggcttttggtggctgattgaactgctggtattggtgggagagtacgtagaaacttgtggccatctcatctatgcctgcaggcaactgaaaagcagtgatttggacctttttcgagtttggatgggaatcccggtgggaatccgggatcctctagatcacctcggc

SEQ ID NO: 252967 - DNA, 396 bp, Homo sapiens
gatgacctcaaggaggcaatgaatactatgatgtgtagccgatgccaaggaaagcataggtatgaaatagaaggagagggatgggacaatcacagctcagggattatgtaaccaaggatctttctagtgagtactggtaattatgagttacatctgtatctcataattagtaaaaagacccttaagtttctacctttgtcatattgtcaatagactgacgattttaattagcactaagaaacattagctttaggatagaacgttgaagggatatgaaatactaagtggggtaattttagatgtttcagccctatttgtgaataatggtaagactactagcagtgccctaggtaggcttgacaaattattaaggaactatccttttgttggttgcag

SEQ ID NO: 252968 - DNA, 380 bp, Homo sapiens
tctttgctacatacttcatatatattcttatttaatcctcccaacaatccatgatagatattcaggctgacatgatagataatcccaacaatccatgatagatattcatgatggcacacgcctgtaatcccagcactttgggaggctgaggtaggcagatctcttgaggtcaggagttcgagaccagactggccaactagatgaaaccccgtctccactaaaaatacaaaattagctgagtgtggtggtgcatgcctgtaatcccacctactagagaggctgaggcaggagaattgctagaacctgggaggtggaggttacagtgagctgagatcgtgccactgcactctagcctgggtgacagagcgagacttcatctc

SEQ ID NO: 252969 - DNA, 3260 bp, Homo sapiens
agcagagcgtgagcgggaggcggagccgggagagcggctctcgtagctcaccctggccccaggccgggcggctcgagggggaggagttaccgccgttcttcggcatcagaacacaccatgatggctgtgacctaagaccctcaggaagccccggggtcatggcccagaagcaccccggagaaagagggttgtatggagcccaccacagtggtggtgcctccctcaggactttaggaccctccgtggaccctgaaataccttcattctcaggactcagggactcagcagggactgctcctaatggtacccgctgcctcacagagcactctggtcctaagcacacacagcacccaaacccagcccattggttggacccaagccatggccccccagggggtccaggaccacctagagatgcagaggaccctgatcagagtgagacgtcttcagaagaagaatcaggagtggaccaggaactctcaaaagaaaacgagactgggaaccagaaggatgggaactcttttctttccattccatctgcttgcaactgccagggaacacctggaattccagaagggccttactctgagggaggaaatggttcttctagcaacttttgccaccactgtacctctccagctttgggggaagatgagttggaagaggaatatgatgatgaagaatctctcaagttccccagtgatttttcacgtgtgtccagcggaaagaaacccccatcccggagacagcggcaccgctttccaacgaaggaggatactcgggagggtggacgtagggatcccaggtcccctggtcgacatcggctgggtcggaaacgaagtcaggcagataagcgcaaaggcctgggattgtggggagccgaggaactatgtcaacttggacaggcaggcttttggtggctgattgaactgctggtattggtgggagagtacgtagaaacttgtggccatctcatctatgcctgcaggcaactgaaaagcagtgatttggacctttttcgagtttggatgggagtgtggacagggcggttagggggctgggcccaggtcatgtttcagtttctaagccaggggttttactgtggagtaggactgtttactcgttttcttaagctgctgggtgctttgctgctcctggctctggccctctttttgggctttctacagttgggatggcggtttctggtgggactaggtgaccggttaggctggagggataaggctacctggctcttctcttggctggattctccagccttgcagcgttgcttgactctgctgagagatagcaggccatggcagcggctggtaagaatagttcagtggggctggctggagttgccttgggtcaagcagaatattaataggcaggggaatgcacctgtagctagtgggcgctactgccagcctgaagaggaagtggctcgactcttgaccatggctggggttcctgaggatgagctaaaccctttccatgtactgggggttgaggccacagcatcagatgttgaactgaagaaggcctatagacagctggcagtgatggttcatcctgacaaaaatcatcatccccgggctgaggaggccttcaaggttttgcgagcagcttgggacattgtcagcaatgctgaaaagcgaaaggagtatgagatgaaacgaatggcagagaatgagctgagccggtcagtaaatgagtttctgtccaagctgcaagatgacctcaaggaggcaatgaatactatgatgtgtagccgatgccaaggaaagcataggaggtttgaaatggaccgggaacctaagagtgccagatactgtgctgagtgtaataggctgcatcctgctgaggaaggagacttttgggcagagtcaagcatgttgggcctcaagatcacctactttgcactgatggatggaaaggtgtatgacatcacagagtgggctggatgccagcgtgtaggtatctccccagatacccacagagtcccctatcacatctcatttggttctcggattccaggcaccagagggcggcagagagccaccccagatgcccctcctgctgatcttcaggatttcttgagtcggatctttcaagtacccccagggcagatgcccaatgggaacttctttgcagctcctcagcctgcccctggagccgctgcagcctctaagcccaacagcacagtacccaagggagaagccaaacctaagcggcggaagaaagtgaggaggcccttccaacgttgatgccccttctctttcctcaaatcaatgtcagggagtcaaaagggctgtagcacaggatggagtttgatttatccctcctcccccaacacctaggaactgaatctttttctttttattttttgagatggagtcttgctctgttgcccagctggagtgcagtggtgtgatctcagcttactgcaacctctgtctcccgggttcaagcaattctcccatctcagcctcctgagtagctgggattacaggcacacaccaccacacctggcccagctaattcttttttgtatttttagtagagacggggtttcaccatgttgcccaggctggtctcgaactcctgagctcaggtgatccacccgtcttggcctcccaaagtgctggattacaggcataagccactgtgcccggcctgaatcttgtcttttgacaataccaaagaaatagggggtagctagagtaaagaacctagggcctggacctgggctggacagtgtatccctttaggtgtgggaactgggtatttccctggggtctgtatgcctttgtcttgtcatttgcttttagggcagatgacactttttcccacccttttaaagctacaagtctatcttctttcttgacccatttcaggagggagccctctcctttatcctgatataatatttaaaagacagaacaagaaagcatgtagccctaatgataggagattatcgcatagagttcagagactggaaactgaattttccctcgactttcactttgtgggtaaatcacccaattttaggctcttttctgcaaggatggccaaaattaatcatttttaaaaagtagattcatgcccactgcccttgggtgagggggaagaatacgggggttcccagaagcccccatgtgatccaagggtttgtattttttttttaagtttgttcatatttgtatgtacatgactatttaaagccaggggattatctttctataaatgtataactggca

SEQ ID NO: 252970 - DNA, 2369 bp, Homo sapiens
agcagagcgtgagcgggaggcggagccgggagagcggctctcgtagctcaccctggccccaggccgggcggctcgagggggaggagttaccgccgttcttcggcatcagaacacaccatgatggctgtgacctaagaccctcaggaagccccggggtcatggcccagaagcaccccggagaaagagggttgtatggagcccaccacagtggtggtgcctccctcaggactttaggaccctccgtggaccctgaaataccttcattctcaggactcagggactcagcagggactgctcctaatggtacccgctgcctcacagagcactctggtcctaagcacacacagcacccaaacccagcccattggttggacccaagccatggccccccagggggtccaggaccacctagagatgcagaggaccctgatcagagtgagacgtcttcagaagaagaatcaggagtggaccaggaactctcaaaagaaaacgagactgggaaccagaaggatgggaactcttttctttccattccatctgcttgcaactgccagggaacacctggaattccagaagggccttactctgagggaggaaatggttcttctagcaacttttgccaccactgtacctctccagctttgggggaagatgagttggaagaggaatatgatgatgaagaatctctcaagttccccagtgatttttcacgtgtgtccagcggaaagaaacccccatcccggagacagcggcaccgctttccaacgaaggaggatactcgggagggtggacgtagggatcccaggtcccctggtcgacatcggctgggtcggaaacgaagtcaggcagataagcgcaaaggcctgggattgtggggagccgaggaactatgtcaacttggacaggcaggcttttggtggctgattgaactgctggtattggtgggagagtacgtagaaacttgtggccatctcatctatgcctgcaggcaactgaaaagcagtgatttggacctttttcgagtttggatgggagtgtggacagggcggttagggggctgggcccaggtcatgtttcagtttctaagccaggggttttactgtggagtaggactgtttactcgttttcttaagctgctgggtgctttgctgctcctggctctggccctctttttgggctttctacagttgggatggcggtttctggtgggactaggtgaccggttaggctggagggataaggctacctggctcttctcttggctggattctccagccttgcagcgttgcttgactctgctgagagatagcaggccatggcagcggctggtaagaatagttcagtggggctggctggagttgccttgggtcaagcagaatattaataggcaggggaatgcacctgtagctagtgggcgctactgccagcctgaagaggaagtggctcgactcttgaccatggctggggttcctgaggatgagctaaaccctttccatgtactgggggttgaggccacagcatcagatgttgaactgaagaaggcctatagacagctggcagtgatggttcatcctgacaaaaatcatcatccccgggctgaggaggccttcaaggttttgcgagcagcttgggacattgtcagcaatgctgaaaagcgaaaggagtatgagatgaaacgaatggcagagaatgagctgagccggtcagtaaatgagtttctgtccaagctgcaagatgacctcaaggaggcaatgaatactatgatgtgtagccgatgccaaggaaagcataggaggtttgaaatggaccgggaacctaagagtgccagatactgtgctgagtgtaataggctgcatcctgctgaggaaggagacttttgggcagagtcaagcatgttgggcctcaagatcacctactttgcactgatggatggaaaggtgtatgacatcacagagtgggctggatgccagcgtgtaggtatctccccagatacccacagagtcccctatcacatctcatttggttctcggattccaggcaccagagggcggcagagagccaccccagatgcccctcctgctgatcttcaggatttcttgagtcggatctttcaagtacccccagggcagatgcccaatgggaacttctttgcagctcctcagcctgcccctggagccgctgcagcctctaagcccaacagcacagtacccaagggagaagccaaacctaagcggcggaagaaagtgaggaggcccttccaacgttgatgccccttctctttcctcaaatcaatgtcagggagtaagctagagttgattcctcctccccctacacctaggatttctgctcgtgccagctggagtgcactt

SEQ ID NO: 252971 - DNA, 1587 bp, Homo sapiens
tcctaggcgacgagacccagtggctagaagttcaccatgtctattctcaagatcacctactttgcactgatggatggaaaggtgtatgacatcacagagtgggctggatgccagcgtgtaggtatctccccagatacccacagagtcccctatcacatctcatttggttctcggattccaggcaccagagggcggcagagagccaccccagatgcccctcctgctgatcttcaggatttcttgagtcggatctttcaagtacccccagggcagatgcccaatgggaacttctttgcagctcctcagcctgcccctggagccgctgcagcctctaagcccaacagcacagtacccaagggagaagccaaacctaagcggcggaagaaagtgaggaggcccttccaacgttgatgccccttctctttcctcaaatcaatgtcagggagtcaaaagggctgtagcacaggatggagtttgatttatccctcctcccccaacacctaggaactgaatctttttctttttattttttgagatggagtcttgctctgttgcccagctggagtgcagtggtgtgatctcagcttactgcaacctctgtctcccgggttcaagcaattctcccatctcagcctcctgagtagctgggattacaggcacacaccaccacacctggcccagctaattcttttttgtatttttagtagagacggggtttcaccatgttgcccaggctggtctcgaactcctgagctcaggtgatccacccgtcttggcctcccaaagtgctggattacaggcataagccactgtgcccggcctgaatcttgtcttttgacaataccaaagaaatagggggtagctagagtaaagaacctagggcctggacctgggctggacagtgtatccctttaggtgtgggaactgggtatttccctggggtctgtatgcctttgtcttgtcatttgcttttagggcagatgacactttttcccacccttttaaagctacaagtctatcttctttcttgacccatttcaggagggagccctctcctttatcctgatataatatttaaaagacagaacaagaaagcatgtagccctaatgataggagattatcgcatagagttcagagactggaaactgaattttccctcgactttcactttgtgggtaaatcacccaattttaggctcttttctgcaaggatggccaaaattaatcatttttaaaaagtagattcatgcccactgcccttgggtgagggggaagaatacgggggttcccagaagcccccatgtgatccaagggtttgtattttttttttaagtttgttcatatttgtatgtacatgactatttaaagccaggggattatctttctataaatgtataactggcaacctgtatcttccctctttgttgcccatatagccggagccctttttctcatttgagaatctcttccctactaagtgttaagcttagagtgaagggcacctcctactggaccaaaggagaggggattggagaattgttttaagttttatacattaggtcagtattccatcttcccacccccagc

SEQ ID NO: 252972 - DNA, 3670 bp, Homo sapiens
ggaagactacacattttaggtatgtgattagaaaacatacttgtcagaattgtctggctggattaatttgctaatttgaccttcttcatcatttgatgtgatgccagatactaatagcacaatcaatttatcactaagcactcgtgttactttagcattttttatgtccttagtagcttttgctataatgctaggaaatgctttggtcattttagcttttgtggtggacaaaaaccttagacatcgaagtagttatttttttcttaacttggccatctctgacttctttgtgggtgtgatctccattcctttgtacatccctcacacgctgttcgaatgggattttggaaaggaaatctgtgtattttggctcactactgactatctgttatgtacagcatctgtatataacattgtcctcatcagctatgatcgatacctgtcagtctcaaatgctgtgtcttatagaactcaacatactggggtcttgaagattgttactctgatggtggccgtttgggtgctggccttcttagtgaatgggccaatgattctagtttcagagtcttggaaggatgaaggtagtgaatgtgaacctggatttttttcggaatggtacatccttgccatcacatcattcttggaattcgtgatcccagtcatcttagtcgcttatttcaacatgaatatttattggagcctgtggaagcgtgatcatctcagtaggtgccaaagccatcctggactgactgctgtctcttccaacatctgtggacactcattcagaggtagactatcttcaaggagatctctttctgcatcgacagaagttcctgcatcctttcattcagagagacagaggagaaagagtagtctcatgttttcctcaagaaccaagatgaatagcaatacaattgcttccaaaatgggttccttctcccaatcagattctgtagctcttcaccaaagggaacatgttgaactgcttagagccaggagattagccaagtcactggccattctcttaggggtttttgctgtttgctgggctccatattctctgttcacaattgtcctttcattttattcctcagcaacaggtcctaaatcagtttggtatagaattgcattttggcttcagtggttcaattcctttgtcaatcctcttttgtatccattgtgtcacaagcgctttcaaaaggctttcttgaaaatattttgtataaaaaagcaacctctaccatcacaacacagtcggtcagtatcttcttaaagacaattttctcacctctgtaaattttagtctcaatctcacctaaatgaatcaggtctgccctttatcttgcccttttcattctaccaacagatctgcactttgaagtcaatggtaaattactccagtgaataatagcagtataatatgacttgataatatttttgtaaacttgtagtcataatagtactatattcttcttagtcctcacctcttccttgtcttttagatcttaatttcatgctgattacaaaaatccagttttgttttctttctatgttccatgcataatacagtcttaagtgaatttctcttttttaattttatcgtaatagaaacttatccagtttgaaaatcattccctaaagcatgcaataggaaaaagaacctcctggctgggactgcccaactctgttctgatcagtgggtgggtgaggtagggtttgagttggcaagagcagggaacgggcatgtgcccaggtgagctcctgtgtgtgtccagattttatattcctaatcccagtaaggaagaaagcgtagtgtgggagaggagagagctgatgactgcagttctcaaaggtcctcagtgaagttattttggaggccctggtggtcacaggatcagaaggcaagggataggcagtggtcaccaatggttgaaagtatggcttgtcccatttcttcctgttctctttttctagcttccacatcagcttccttttttgagaacatatagaagaagaaggctaagagatggtgaagagactgcatgattaaactagatagacctggtatacagtcactgaactagtagatgtcaataattattatttttaaaaatttttatttgttggccgggcatggtggctcacgcctgaaatcccagcactttgggaggccaaggtgggcggatcatgaggtcaggagatcgagaccatcctggccaacatggtgaaaccccatctgtactaaaatacaaacaagtagctggttgtggcgccgcatgcctgtagtcccagctactcgggaggctgaggcaggggaattgcttgaacccgggaggcggagttttgccagcctggcaacagagcaagactctgtctaaaaagaaaaaaaaatttttttgtttgagacagcatcttgctctgtctcccaggctggagcgtagtaatgcaatcatagctcactgcagcctggaactccttggctcaagcaatcctgctgccttggcctcccaagtatgtgggactacaggtactcgccaccacacctggataattaaaaaattatttctgtagagatgaagtctcactgtgttgcccagcctgggtgtcaataattattttttaaaaaaaatttttaaaaaggttttttgagacagattcttgctctgtcacccaggctggagtgcagtagcatgatcagggatcactgcaacctctgcctcctgggttcaagcgattcttgtgcctaagccacctgagcagctgggattgcaggtgcatgccaccatgcctggctaattttggtatttttagtagagatgaggttttgccattttggtcaggctggaattttttttttttttaattttgataagacagggtattgccgtgttggccagactggtctcaaactcctgggctgaaacaatcctcccgccttggcctcccaaagtgctgggattataggcacaagacaccacaataattattgcctgtatgtcaattattattttaaaatattgttgtatttacttaatgtctttaatgcatttgcccaatattttacattgttactgctcagaggtattcctttattatgtggttagcataggttatactttgctgacgattcacattttattagtttggttatgttttgtccttttaaaacattttcttttgagatgggggtcttgctctgttgcccacgcaggagtgcagtggcatgctctcagctcactgcagccctgactgcctaggctccagcaatcttcttacgtcagcctccagagtagctgggaccgcaggcacttgccaccacgccccactaaaaattttttaaattgttgcctttcttgaagtgttctctgcctgtctttgtcacaaaatttcatttttctcatagttaatttcatctctccggtaagattttattggtgtttcttttataactttgcagttcttacaccgtttggtgattttcatgtttcttagaaactttaaacctttaacttcaaacattaaaatacaagtcttttaagtacatgagtgcttagaaatgtacataatgtttatatacacttatgccttacattaaagtccaatatgagaaatacatgtttaacattcaataataattttaaaaatttgagaaataaactctcataaatgc

SEQ ID NO: 252973 - DNA, 223 bp, Homo sapiens
  misc_feature (196)..(196): n is a, c, g, or t
gccgtttacccgcgcttcattgaatttcttcactttgacattcagagcactgggcagaaatcacatcgcgtcaacacccgccgcgggccttcgcgatgctttgttttaattaaacagtcggattcccctggtccgcaccagttctaagtcggctgctaggcgccggccgaggcgaggcgccgcgcggaaccgcggncccgggggcggacccggcgggggggac

SEQ ID NO: 252974 - DNA, 289 bp, Homo sapiens
gccgtttacccgcgcttcattgaatttcttcactttgacattcagagcactgggcagaaatcacatcgcgtcaacacccgccgcgggccttcgcgatgctttgttttaattaaacagtcggattcccctggtccgcaccagttctaagtcggctgctaggcgccgactcaggtggtgtggactcaggtggtgtggactcaggtggtgtgactcaggtggtgtgactcaggtggtgtgactcagctggtgtgactcaggtggtgtgactcaggtgtgtgactcagcggtg

SEQ ID NO: 252975 - DNA, 802 bp, Homo sapiens
gttcaacgcctaatgactaaccggcaggatcccactccttcattcttgtgttcctagcacttcgaagagtgtggcccaacagatagcactgataatctgttaaattggattgagattttccccatccctcccacaaatggagtgtgggcgttgtctttccggttacctgccagaaaggttttcacatcgaggtctaagcgagctacctaacagaaactggggaaaaaaaaaaagttacttcttgctagactcatttatttatgcattcattcaccatagttttactgagtgcctattaagtgttaaagactgccctaggtattggggctgcaagggtgattcagttagatgatcttcaccgatgccaaattggctatgctctaaccctgagacatgataaaaaaataaacaaaatagtttcagttagtaacaagtattattgatagattaaaacagtaatgtgatagtgagagattggagagaagagggaggaggactctctaaagaggtgccatttgagcccagacctgactgataagaatgatccaacctcttaaagatccaggcagaggaaacaacatctgcaaagaacctgaagtagaatgaattatgattgaaatgggaaaaagccagtgtcggtggattatagtggtcaagaaggtgggtggtaggaatgagatggcacagggaggaagtagaaccacaggatggagggattgttattgatggtaggggtgttggtagtgaaggataaagagtcaagggtgacttacggatggtgatgccaatcagcgagatggca

SEQ ID NO: 252976 - DNA, 923 bp, Homo sapiens
aagccactgcacctggccgggacttagatttatattccctgaagtaatacagggccttagatggaatgaacgatttatattggtgctaattgggcagaaaagaaaaagcattgctgtaatatgaatgttgatgactttatgttctgaaaaatagtctgggtcaaagtgaaacatttaattgtgttcattattcctgtttctttgaggaatagactatcctgcgttaaattctacattgttaatataaactcaagagctatgtgagcagttgtaaatgatcccatttaaactgattgttgcataatttatactgattacagaaaccacaatgttatttgatgctcaccctctaaaatttaaaataatatctctcactttaaaatgtatgtgaaaaaacaaaaacaaaatgtagtatgcgatcatcatttagtagaatcactcagtgatttggatttggtccaaatataattctgtcccttgctttttctgttatgtaaacgtgcagacctgtgataacagagccattttctcgtcacgatttgcttttcttccacaacagtatcagttttcttgtatctgagatcagtgatgtcccaataaatcagatgggttaattgaggaggcaaaggaaattcaaacttaggagagtaggagtaggggctttgcctctgccccccactgtatgtccaaggcataaggaacaaggccctgtagcagagtctcacagtgtgtacttatgttaatattcaataaggaaaatgccacaggaagtaatcactataatgatgaagattttaagttattaaacacaccttccagtaaaaacctgtgatattattattatttttgagacaggatctctctctgtcacccaggctggagagccgtggtacaatctcggctcactgcaacgtccgtctcca

SEQ ID NO: 252977 - DNA, 302 bp, Homo sapiens
gagacagtgtcttctcactgtcacccacgctggagtgcagtggtgcaatctcagttcactgcagccttgaccccttggcctctagccatcctcccacctcagcctcctgaatagctggaatacaaatgtgtgcctccacacctggctaagaaaatatctttatgcgacttttcctcagtcatcatttgactctacagagcactatgttaaatactttctcaggaattttgtaggcatttctctgttgtcttctggtttttaatttgctgttgaggaggtagatacccttctgtcgtcttctc

SEQ ID NO: 252978 - DNA, 334 bp, Homo sapiens
ccttgactggtcgtccaacacagcatggagattccagtacacactcccagtaagtttgtttgcctgatttccaagatgttgattttatagtttctctaatcttttctaacgttcatgtcttttccctactgcccacccaaatctagcctcatacttcattactaaaacatgctgccctggaacaatttgcaccactgaagattccatttctgcctctacctggtctccctggttcctactccaatgaccattcaaggggggctctactgtctccaaacgaacacctatgaactcttatctttccaaagtcttagttcctggagttctcttattt

SEQ ID NO: 252979 - DNA, 411 bp, Homo sapiens
catacttgagagtatgaatgtatgtgcactgtcactttgctctgggtggtcctatgttgctggatctccctttcccttcttggtgcttacacatctcagaccctttagctgaatgcttgctaaagtaaaatgcttgaacagtattttggttctcagttctcactgttccctctggttgttgaggcgtcgaataaaaatgcacatagcagtggggtttagctggaaaaggtgaccttcttccaacttcacctctacttctggctcctcaaacagcgggtggacagtaaggcagggaagttgttttctcatttctcactgaccagactgtgaatattttcatatggattttctcttattaatgttactctggtgcttctttgttttaagataaaaattctgaatgtacacatg

SEQ ID NO: 252980 - DNA, 727 bp, Homo sapiens
caaatggagaaattgcaaaggtcatcacaaagtcaggcttgctgcagaagatagcactgtgggtgaacaggagatacccaaagctccagcttctggactgacttactccatttgctaccttctactttaagcctagatgaccagatggagaatggctgcccaggccgctagggaaaatcaggacatgtctccaggggcaaatgcctaggctccaaagctcttgctaccatctagagggatgaagcagataagaagactgaggctcagagaagcaaagcagcccatccaagtttccccaatgaacatgtttaaatggaagagagaggaatgagagaggaaggcaagaatacaaatatttaagaaagctttattttcctgaagcaaagaatgacacttgaaaccgagggaatctcaatgtccaccttgcatttccatgaccagcaagagaggggaacccctacaggaatgttcatcctctgcctctgacctgggaagtctcagtcatccccgaggaccaattccaaatgtcaattcattcaccaccattgcccttgtcattgcatccactcctcctctctctctgacttgtgttaatggtaggtaactgtgtatgaatctaggctgggggtttgtctttgaggtcaaggactatttctgattcactgtgtgtctccctaaatccttcttccacccagcaaagatgctcaaaatatatatacaaatgata

SEQ ID NO: 252981 - DNA, 520 bp, Homo sapiens
atgctgggcatctcaggtgcctgctgatctgagcagttgccagccttggcgactcacacaggcgagagcgcctgccattgactctaggctccacgaagcccactccctctcccagccctgcgtccacctgcacccacagcagcgctcaccaactgtgggcctggctctgtcctaagaacgctgtgggtcactcgggtgataccaagggcagtggttaagcccatgctcactggggcccagatttaagccccaagccccaggtggctttgggggtatcagtttcctcatctctcaaatggatataacttaatcatcacaatcaccattttgccagagaggaaacgggcccagagcagcacccctgtgccccgagtaggggagcctggacttgaacccaggcagccggactccagaggcccactctacacactgcccacccctgccacctttccaggccaccagtgcccctgaaccctgctgccacgtgctgccccagatttgcgatccacccagcggccgc

SEQ ID NO: 252982 - DNA, 381 bp, Homo sapiens
ctggttctgttggacttttgatgagcatttcttcatctgtaaatgaaagataacaacacataaagtttcatttccgctctcccttttgtaggctagtttcagaagccaagttcaattttttagaatgtttttaagtgaaaaaaatatatgtattttctacatacaaggaaattggcagagggaaggatttaacatgtagaaaacacatttttaccttgtgaccaggttgtgactgtagggagaattgcccagccaacacatgcaacagagttctcattcatgggctaaagtaaaaatctatttaagaaattgtcatttgggtgtttaatcagctaaccttagctgcagtatgttaaaataaaataatgcttggaccagagg

SEQ ID NO: 252983 - DNA, 327 bp, Homo sapiens
cattgtcatcaccattatcatcattattattaaacttatgttcccaggccaaaaggtagagttgtcgaatctataattaatgacttcagaaaagtataagcacttaagcattcttggattccttcattaaagaacttgaggctctttattaagttttagcccttcttactttgcctgtttagtaatgtttgtaaaaatatagtatatggcccaggcatggtggcttatgcctgtaatcccagcacttttggaggccaagacaggcagatcagttgagtccaggagtttgagaccaggctgggcaacacgggaaaaccccatctctgc

SEQ ID NO: 252984 - DNA, 484 bp, Homo sapiens
cctgccctaaggaaagcatagtgttaagttaccaaattaagatatttgtagacttagaaatcatgcattttaatctaacataaatgtttctatcacatttgcttacatagagaatattagtcgtagcaataccccttcttggttatagttttgaaagcattcttgtagaagttatttggtcctcacagtgtctccatgttagacctgccaagggaggtaggtacattgcagctgggaagtgttaagcacccggctcacagacgtgctccagaaccatctagcacccatctcaggctggtcagttgcagtcccttaagcttctcctctaggttctgggcttgccgtgttagacatcactctgtcagtattttaagggagataggcttcccactaaagtttacgttagatgaacttataaatgagatgactctgattcacaaaagcttgttgggctttgcatgcttttcataatttatggagctta

SEQ ID NO: 252985 - DNA, 665 bp, Homo sapiens
gctgcatcaatgcagatttttctctacaaatacaaatctcctgcacaaaagacagctttgcagagctacctctttttgctggctctctgacagccatgtcaaaatatgtcaaaaaaatatattttggggtaaaatattctgatttcctttaacacctttcctgacagcctcccccacccctgcatgagtggattagtgctctgactttgggctgccatagcccctgcaatggtctgtgtgagcctctctcagccccctttgcttccctgtgttcccatacagtatcagtgctccaaaggcgggaccgtgatacctaatgtatggaaggcacttcagtgaatgtttgttgaatgaaagaaaaggcaagccagacacggtggcttacacctgtaatcccagcactttgggagcctgaggcaggcggatcacttgaggtcaggagttcaagaccagccagcatgacgaaaccccatctcttctaaaaatacaaaaatctcttctaaaaaaatacaaaaatcagctgagtgtggtggtgcatgcctgtaatcctagctacttggtaggctgaggtgggagaatcacttgaacccaggaagcggaggttgcagtgagcagagatagggccactgcactccagcctgggtgacagagcaagaccccatctc

SEQ ID NO: 252986 - DNA, 447 bp, Homo sapiens
aaaacacagaccggggggatgtctttagagtcaggagaaaacatcatgtgccaagggtgctctccaaactgatgactagttcccagacttaacagaggtcaagcggagaaaaaggaaaactttctttagagaagaaaaagaaaaatcttatcacttctcatatttctttaggcagtgtatgagcttatttgctgatatcactaatcctgagatgaaaaacaggatggacttaagtaatttttaacctatttctgaggccaaaaagactgtagtattattttaatcaaatttatgcattttcagtgggacttcaaattttaataataaggcaatacttttatcttcttaaagtatatttcctgtacttataagtgtgcaaatgacataattttaaaattagttggaatattgaaaaaaattaaaatttcacttgtaaaataaaaaaat

SEQ ID NO: 252987 - DNA, 451 bp, Homo sapiens
tgggggcacaggatgcagaagctctctccagagggcacaggtggtgaaccttgcatagtgccatctctcctggtgcagctcatgcgtgtgctctgagagtgtacctacctccacctagatttcaaagaatagagtcacttggagcctcactcagagggccatcccaagggcagggccacttcaagagtccccactagggcagtgcctagtggagtcatggggatgtgggcacttttgtgactctggaccagcagggtagccttcatgtgattctagcctggaagagcaacatgtccctaactacaacccattagagcttcagaaatggctgtgggggcaggactacaagcaatgttggaggttctccttgctttagtctgtctgggagactggatatcaagtcaaagaagattattcttgaaaattaaggttttggactcactcaggacct

SEQ ID NO: 252988 - DNA, 362 bp, Homo sapiens
tctcccagtagtgcatgcttactctgagaagctggattagttcccacatggatgaattagttctcatagaatggattgttataaagcccggatgcacctcagatcttgctctcttcacttgtatctgcttctcccttgaactttctctaccattttaaaacgcagccttcactaaaagccaaacggatgccagttttgtgtttcttacacttcccagtctgcagaaccatgagctaaataaatctcttttctttataaattacccagactcaaatattctgttacagcaacatgaagcagactaagacactctctatctagtaaagaatttgaattcataaatataaaccttttcatctcaa

SEQ ID NO: 252989 - DNA, 492 bp, Homo sapiens
gtctattacatgtcaaattatctttgtacagtatctaagttagtcctcactgagcctggaaagagagctatttatcttatttcactcaggaggaaagtgaagttcccaagagttcactaggtagcttgcagtcatgtggcaaataactactgagtatggaatatgaacctaggctttcttcgctccagggaaatcttgctggttctggaaaagcaaagtacaccgccagccctcataaccctgactctcagcagaagctctgaaactagaaacacatttttagggagcacagttttttgctgcccaaggacctaaagtcaacagatacctgaaactttctgtcgctgactacagggagtaggtcccatcccccacagtataaaggtcagaagccagaaaccagcttctgggtataaacattacagttcagtgctctcctcctccacctctgaggggcaaaaataaatttgagggtgatggaaaatctaaaca

SEQ ID NO: 252990 - DNA, 272 bp, Homo sapiens
acccttgatatactatttagagcttctattctgggaattttattatgcatgcatagctagttttaaaatttttctccttattgatttgttaatcaatcctcatcccttcccttcttttaaaacattatttcctcattaatatttacctacattcatactgctgtttgacttgtgcagaaaagatggaggaggacaggagatgctgtgtttatctcatattcagcagaagtagaaaaaggtaaatgtcttcaacatcggtcagacggtactta

SEQ ID NO: 252991 - DNA, 316 bp, Homo sapiens
cacatctgaccacagctgcctaaatctctacttgaggtcacatggcaacctgtcacgtttcacagtaaaagttggtcttgaaaagaaagccgccactagagaagatgagggtggtgaagatatgtaagactgactgttcttactcagaaaatggacattttgaaagagagcagcaggttggatttggtggtgattctgatctgtgaggcagtagtccactccaggttcttttcagaaacaaaagtgattactaaaactactcgagcaatgctcttgcctgtgccagaattgcttatcaacaaaaagacaaaacttg

SEQ ID NO: 252992 - DNA, 2945 bp, Homo sapiens
  misc_feature (2030)..(2030): n is a, c, g, or t
ggttgagtacatgaggctgggtgaaaacatcattgaatattccagggattttaagttatacatcacaacccgtttgaggaatccacattacctcccagaagttgccgtgaaggtctgtctcctcaacttcatgatcacccccttgggtctccaagatcaactccttggcatcgtggctgcgaaggagaagccagagctggaagagaaaaagaaccagttgattgtggaaagtgccaagaacaagaagcatctcaaggaaattgaagataagatcttggaggttctctccatgtccaagggtaacatcctggaggatgaaaccgccatcaaagttctgtcctcctccaaagtgctatctgaagagatctcagagaaacagaaagttgcttccatgacagaaacgcagattgacgagactcggatgggctacaagccagtggctgtgcattctgccaccatcttcttttgtatctcggacctggccaacatcgagccgatgtaccagtactccctgacttggttcataaatctctacatgcattccttgacccacagcacgaagagcgaggaactgaatctgcgcatcaagtacatcattgaccatttcaccctgagcatctacaacaacgtgtgccgttctctgtttgagaaggacaagctactcttctctctcctcctgaccatcggcatcatgaaacagaagaaggaaattacggaggaggtgtggtacttccttctcactggaggcatcgcactggataacccctaccccaatccagctccccaatggctgtctgagaaggcatgggcagagattgtccgtgcatctgccttacccaaactgcatggcctgatggagcatttggaacagaacctgggtgaatggaagctgatctatgactcggcctggccccatgaggagcaactccctgggtcttggaagttctctcaaggattggagaagatggtgatccttcgatgtttgcggcctgacaaaatggtgccagcggtccgggagttcattgctgaacatatgggaaagctgtatatcgaagcccctacgttcgatctccagggatcctacaatgattccagctgctgtgcgcctttgatttttgtgttgtctccaagtgcagacccaatggcaggcctgctgaagtttgctgatgatcttggtatgggaggtaccagaacacagaccatctcccttggccaaggccaaggccctattgctgccaaaatgatcaacaatgccatcaaagacgggacctgggtggtcttacagaactgccacctggccgcaagctggatgcctaccctggagaagatttgtgaggaggtgattgttcctgagagcaccaatgccagattcagactctggctaaccagctatccatcagagaagtttccagtcagcattctccagaatggaatcaaaatgaccaatgagccccccaaagggctccgggccaacctgttgcgctcctacctcaatgaccccatctcagatcctgtgttcttccaaagctgtgcaaaggcggtgatgtggcaaaagatgttatttggcctttgtttcttccacgccgttgttcaagagagaagaaacttcggccccctagggtggaatattccctatgaattcaacgaatctgacctgaggattagtatgtggcagatccagatgtttctcaatgactacaaggaggtgccctttgatgctctgacctacctgacaggggaatgtaattacggaggcagagtgactgatgacaaagaccggcgtctcctgctgtcacttctgtccatgttctactgtaaggaaattgaggaggactattactccctcgctcctggagacacttactacatccctcctcatggctcctaccagtcctatatcgactatctcaggaatctccccatcacagcccacccagaagtgttcggcctccatgagaacgcagacatcaccaaagacaaccaggaaaccaaccagctgtttgagggggtcctgctgaccctccctagangtcaggaggaagtggcaagtcccctcaggaagtggttgaggagttggcacaagacattctctccaagcttcccagagactttgacctggaagaggtcatgaagttgtaccccgtggtctatgaagaatccatgaataccgtcctaaggcaggagctcatcagattcaacaggctgaccaaagtggttcggaggagcctcatcaatcttggccgagccatcaaaggacaggtcctgatgtcctcggagctagaggaagtctttaacagcatgcttgtgggtaaagtgccagccatgtgggcagccaagtcttacccatcactgaagcctctggggggctacgtggctgacctgctggcccgcctgaccttcttccaggaatggattgacaaggggccccctgtggtattttggatctctggattctacttcacacagtcttttttgactggcgtctctcaaaattatgcccggaaatataccatccccattgaccacattggatttgagtttgaggtaaccccacaagaaacagtgatggagaataaccccgaagatggggcctacatcaaagggctcttcttagaaggtgcccgttgggacaggaaaacgatgcagattggggaatctctccccaaaatcctctatgacccactgcccatcatttggctgaaacctggggagagcgcaatgtttctgcatcaggacatctatgtgtgtccagtctacaaaacaagtgcccgcagaggaaccctctccaccacaggccactctaccaactatgtcctctccattgagcttccaacagacatgccccagaagcactggataaaccgaggggtggcctcactgtgccagctggataactgatggcatttgtctcaagacagaaaataaaaagcatttcattcttaatg

SEQ ID NO: 252993 - DNA, 424 bp, Homo sapiens
tggagctcatagctttttattcttccaggtaaccccacaagaaacagtgatggagaataaccccgaagatggggcctacatcaaagggctcttcttagaaggtgcccgttgggacaggaaaacgatgcagattggggaatctctccccaaaatcctctatgacccactgcccatcatttggctgaaacctggggagagcgcaatgtttctgcatcaggacatctatgtgtgtccagtctacaaaacaagtgcccgcagaggaaccctctccaccacaggccactctaccaactatgtcctctccattgagcttccaacagacatgccccagaagcactggataaaccgaggggtggcctcactgtgccagctggataactgatggcatttgtctcaagacagaaaataaaaagcatttcattct

SEQ ID NO: 252994 - DNA, 312 bp, Homo sapiens
gtggctcagcctgagatgagtggactgatgctagtgttaggagtggactgggacaaggtgaggctgattggcccaagttccgggtccctcctttcttcaagcacccatgtgtctatgacagtcatacaaagaaatagaggggaaagagtatggagagaagtcagtagaggaaaaaaagaaggaagggaagaggggagcagactgttaaccaaccatacaataagggcactgcttgtacccagttcttgggaagccacagtcatcagcaactctaagactaaccaaggctacttgtctcattttgcctccctg

SEQ ID NO: 252995 - DNA, 385 bp, Homo sapiens
agaaagtagagagcttagatttgtttgcttaacacatttataacacctgaataaccgaatatgtatttatggtttagtaccgtggccttgaagttagattcatgattttcattttaactttatatttttaatcaaattaattgtgatcccagtagcttaatttcgccattgagtagataaaattgctcctaggaaatatgtgagcatcaatataaaataccgatggtgtttttcaataacagtgtctgaagctctctaatttgtaaaaaatactaacattttcctggaaataattttactgacaagacatctgttaggctttttaggttatgaaagaagtaaccctaaatttttaataaatgtaaaataaagaatcaacatgtgt

SEQ ID NO: 252996 - DNA, 1415 bp, Homo sapiens
acgggcttgcagaggagagagggagtggggctgggtcttcccaccctgggtcctttcctccttccccactccgtttagctgtaaagctcaattaagtgtgattagctgagaagagtttctgcagaattagagcacgccccacccctgtcttcgtggtccccttcccttaacccggaaactggatgggccaggacaaagagagttaagagctttgtcagtggtctgtctggagcgacagatggaaggaaagggaccggttgagcaacatgacaggtggctgaggagccaggtgcagagtggtagagttggctggcggagtggccagcacatgagaagacaggcaggtaggtggacggagagatagcagcgacgaggacaggccaaacagtgacagccacgtagaggatctggcagacaaagagacaaggtgagaaggagactttggaagtgacccaccatggggctcagcatctttttgctcctgtgtgttcttgggctcagccaggcagccacaccgaagattttcaatggcactgagtgtgggcgtaactcacagccgtggcaggtggggctgtttgagggcaccagcctgcgctgcgggggtgtccttattgaccacaggtgggtcctcacagcggctcactgcagcggcagcaggtactgggtgcgcctgggggaacacagcctcagccagctcgactggaccgagcagatccggcacagcggcttctctgtgacccatcccggctacctgggagcctcgacgagccacgagcacgacctccggctgctgcggctgcgcctgcccgtccgcgtaaccagcagcgttcaacccctgcccctgcccaatgactgtgcaaccgctggcaccgagtgccacgtctcaggctggggcatcaccaaccacccacggaacccattcccggatctgctccagtgcctcaacctctccatcgtctcccatgccacctgccatggtgtgtatcccgggagaatcacgagcaacatggtgtgtgcaggcggcgtcccggggcaggatgcctgccagggtgattctgggggccccctggtgtgtgggggagtccttcaaggtctggtgtcctgggggtctgtggggccctgtggacaagatggcatccctggagtctacacctatatttgcaagtatgtggactggatccggatgatcatgaggaacaactgacctgtttcctccacctccacccccaccccttaacttgggtacccctctggccctcagagcaccaatatctcctccatcacttcccctagctccactcttgttggcctgggaacttcttggaactttaactcctgccagcccttctaagacccacgagcggggtgagagaagtgtgcaatagtctggaataaatataaatgaaggaggggca

SEQ ID NO: 252997 - DNA, 558 bp, Homo sapiens
acgggcttgcagaggagagagggagtggggctgggtcttcccaccctgggtcctttcctccttccccactccgtttagctgtaaagctcaattaagtgtgattagctgagaagagtttctgcagaattagagcacgccccacccctgtcttcgtggtccccttcccttaacccggaaactggatgggccaggacaaagagagttaagagctttgtcagtggtctgtctggagcgacagatggaaggaaagggaccggttgagcaacatgacaggtggctgaggagccaggtgcagagtggtagagttggctggcggagtggccagcacatgagaagacaggcaggtaggtggacggagagatagcagcgacgaggacaggccaaacagtgacagccacgtagaggatctggcagacaaagagacaaggtgagaaggagactttggaagtgacccaccatggggctcagcatctttttgctcctgtgtgttcttggtgagttctcccggagcagggagagggcaggactgcgactggatcccttcacccccatgaggag

SEQ ID NO: 252998 - DNA, 358 bp, Homo sapiens
taaaggcaaaataatgtttaatttcattacatcaaagttaaagatttctgttcatcaaaagacacaatggacaaggtaaatcaacatgtaacagcttgagaggtgacatttgcagtctgtactattgacttaagattgacatattgacccaaatatgcaaggaagtaagccgtggcaggtggggctgtttgagggcaccagcctgcgctgcgggggtgtccttattgaccacaggtgggtcctcacagcggctcactgcagcggcaggtaagtcccttcctggggtgggcgaagggaggactatgggaaggcaagcgctgggggtaggatcacaagggagggtggtgcccactgggaa

SEQ ID NO: 252999 - DNA, 264 bp, Homo sapiens
gcggccgcctactactactactaaattcgcggccgcgtcgacggaacaactgacctgtttcctccacctccacccccaccccttaacttgggtacccctctggccctcagagcaccaatatctcctccatcacttcccctagctccactcttgttggcctgggaacttcttggaactttaactcctgccagcccttctaagacccacgagcggggtgagagaagtgtgcaatagtctggaataaatataaatgaaggaggggca

SEQ ID NO: 253000 - DNA, 899 bp, Homo sapiens
taaaggcaaaataatgtttaatttcattacatcaaagttaaagatttctgttcatcaaaagacacaatggacaaggtaaatcaacatgtaacagcttgagaggtgacatttgcagtctgtactattgacttaagattgacatattgacccaaatatgcaaggaagtaagccgtggcaggtggggctgtttgagggcaccagcctgcgctgcgggggtgtccttattgaccacaggtgggtcctcacagcggctcactgcagcggcagcaggtactgggtgcgcctgggggaacacagcctcagccagctcgactggaccgagcagatccggcacagcggcttctctgtgacccatcccggctacctgggagcctcgacgagccacgagcacgacctccggctgctgcggctgcgcctgcccgtccgcgtaaccagcagcgttcaacccctgcccctgcccaatgactgtgcaaccgctggcaccgagtgccacgtctcaggctggggcatcaccaaccacccacggaacccattcccggatctgctccagtgcctcaacctctccatcgtctcccatgccacctgccatggtgtgtatcccgggagaatcacgagcaacatggtgtgtgcaggcggcgtcccggggcaggatgcctgccagggtgattctgggggccccctggtgtgtgggggagtccttcaaggtctggtgtcctgggggtctgtggggccctgtggacaagatggcatccctggagtctacacctatatttgcaactccactcttgttggcctgggaacttcttggaactttaactcctgccagcccttctaagacccacgagcggggtgagagaagtgtgcaatagtctggaataaatataaatgaaggaggggca

SEQ ID NO: 253001 - DNA, 449 bp, Homo sapiens
cttggattgttggcttcctcagctctttaagatactgactccaataagaccttttcaagtcgagggctccctgacttaatatgtaaaattacaacactctgattctgcctttctgtctttgctttatttttctctgtagcaattgttgcctttgaatatactttataatttacttactttgtttattacctaaataatcagtaaaatgttacctccgtgaggggagggatttttgtctgtttggtttactgccatattcccaatgcttagaacgtagatgtggtgctagctacaagtctggcagcatcccacatgctggtgatgtagtaaagaacattacagatgtagttctcacccttacgcaacttatattccggtggtagagacagatagaaaataaatgggcaaataaataaaatattgccagagatattaagtgttacaaaaaa

SEQ ID NO: 253002 - DNA, 469 bp, Homo sapiens
aaagcctggatgctggatgttgaggagggaattgaaggaggggatgtggaaagaggagtgtagacaactcatgagaatttgggttgtggaagaaaggggccagggaaggcgtcttagaaggaagttatttctgagaggcatctgagcaggtttatagcatgaatggaagaaagcaaggtgcctgggaatagggataggaattaagcagaagcggtcctaggctttgtcttcaggaagataggtgttcaagtcccagctctgccacatgctggctgtgggactttgggcaagttaatgaagccccatgagtctcagtgtcctcatctggcgagcagagagagtagcctgtaccttgcagagtcatggcaaggatgaaacaagaatgtctctcagggccttcacagcgcttagtgcataatgaggggttagttagtgaactcctaccaagctcctttgtacagggcattta

SEQ ID NO: 253003 - DNA, 569 bp, Homo sapiens
ccagtgaggcccaacaagccctctcagtcctgctctaacaaaaaacggccagacccctttttgctttctctctttcccttattggaaacctgcctatgaccctggatacaactctcaggaaggtccctgcccccatcactggcaaagaagctactgccagctgacctcagccactatcacttcttccctttgcagagtgttctaggatttatgacatatgcttgttgatcctgggaaggatgtgtgcctgggcaggcgtggagaattgggtactgtgggcgggagggcaggccctgaggagcagggggtgggatcctccagtcttagaatagtcccagtctggctacaaccttcaacccaagacccggattcttcagcaccgagtgtgagtgttccttcatgaggcccccaccccattcctgggtctccttagtggagggaagtatgagtgccgaggggagattgggtcctaggccttttaatatcaagccatctctgtctgcctcagcttgatccagagggaagcccagcttgaggggtcaaggtgtttgggcagtggggttgtgagg

SEQ ID NO: 253004 - DNA, 733 bp, Homo sapiens
tgctttctcttccaccctctgctgtctctccagcacagcacctgccacagagtgggtactcagtgaagatctggtaatttcctgcgactcctccctcctttggccaccttgtcatttcatagtataaatggtgtgccataagatggtatattgtctggtgagatgttgtcacacagttctgcacctccaccccccattcccacatggtctgccctccctcatctccgtgactgaacagcctcgtccccagcatggtctcagccacactctcagtccagccactcttgggctttacaaccctgttctttgtttgtttgtttgagacagagtcttgctctttcgcctaggctggagtgcagtggcatgatctcggctcactgcagcctccgcctcccggattcaagcaattctcctgcctcagcctcccgagtagctgggggcgcgcgccgccacgcctggctaatttttgtatttttagtagagacagggtttcactatgttggccaggatggtcttgatctcctgacctcgtgattcgcccgcctcggtctcccaaagtgctgggattacaggcgtgaaccaccgcgcccggccacaaccccgttcttcacacgccatccacagctcttccctatctggccggaactagctcttccattttatctctaaccagctggccactgtctgcatatcccggccacggccagtctctgaaagttccccacacagatgc

SEQ ID NO: 253005 - DNA, 439 bp, Homo sapiens
tgctttctcttccaccctctgctgtctctccagcacagcacctgccacagagtgggtactcagtgaagatctggtaatttcctgcgactcctccctcctttggccaccttgtcatttcatagtataaatggtgtgccataagatggtatattgtctggtgagatgttgtcacacagttctgcacctccaccccccattcccacatggtctgccctccctcatctccgtgactgaacagcctcgtccccagcatggtctcagccacactctcagtccagccactcttgggctttacaaccctgttctttgtttgtttgtttgagacagagtcttgctctttcgcctaggctggagtgcagtggcatgatctcggctcactgcagcctccgcctcccggattgcttgagaccaggagttcaagaccatcctggccaacaca

SEQ ID NO: 253006 - DNA, 691 bp, Homo sapiens
tactatgtacaaatttactacttcttaaagtatactttaagaatgcttattcagcaaatgatattgggacaattgagtaaccaccaaagaaacaaaacaaaccaaacacaagcctttcatggtatcaccaaggagttgcagatggattaaaaatctaaatgtaaaaattaaatagtagcatttgaaagacagtataattgagattaagaatgcctcaattcaaactctgactctatcagattctagctgtgtgacattggccaagtcgtctaattatttcatgccttaaattcctctataaaacgagaacgataaaagtacttaacttgtagagttattgtgaaaattaagttttagggttattgtaaagatgtacagcagttaaaagagtctctggcacatagaaagcactatataaaagttgtatattattatttctagacttgaaaaaggatggattggccgggcgcggtggctcatgcccgtaatcccaacactttgggaggctgaggcgggtggatcacgaggtcaggagatcgagaccatcctggagaacacggtgaaaccctttctctactaaaaatacaaaaaaaaaaattagctgggcatggtggcgggcacctgtattcccagctactcgggaggctgaggcaggagaatggcctgaacctgggaggcggagcttgtagta

SEQ ID NO: 253007 - DNA, 439 bp, Homo sapiens
catcacagcagcacgcatgacctcagctttgactcgtttaactctgagacgtccttcttgaaggcccttgccacagtttccctggccacgccaccccatcccacctctggtcatctccccagccctttatgccccgtcgccctccacccctacatcagctcctccaaaactgagctcccagttcattttgcatatcctaactcaaaatgctcagctaatccaaggggactttctttaccaggattcaaccctagtagagagctgttatggtttcaatagtcatatttatttcttgtaaaacagttgccaggtgctctccagcaataacgttttgtcagtcatgtttcatgttttaacttaggtgtattcatgtgtgacacttccatgttgacaggcccggaaaggcctcatttttaactaaaagatgttttataaaccc

SEQ ID NO: 253008 - DNA, 418 bp, Homo sapiens
tctctatatatagcctagatgaacccatgtactatgttgcacaagacacatacaaaggcatgaattgcagcattcttgttaatggtgaagaattagaaacaacttaaatatatatcaaaagaagaataaggaaaaaattaagctagtttcatacagctgagtattctacagcagtgaatgtaaatgaactggataatcatttgttaagaagaataaatctctagacataatcgcaaggaacaggaaaacaaacgaaaaagaatgtataaatatgacttaggtaaaacattttaaaagcacctataacattatatctgtcatgaattatattttaacataggaatgacaatatattaacttttgtcaaattgaggtagtaggcatatgaagttcttaaattgttttcagaaactgtttt

SEQ ID NO: 253009 - DNA, 203 bp, Homo sapiens
gattagtattatctggcgagggaggaaaagtgccagagcaagtgccgaaactggaaggttacatttagttcaggatatgaagatcatataaggcctgcacggtggctcacacctgtaatcccagcactttgggaagccaaggtgggggaggatcgcttgagctcaggagttggagaccagcctgggcaacatagtgggacccc

SEQ ID NO: 253010 - DNA, 408 bp, Homo sapiens
taacactcaccgcgagggtccgcagcttcattcttgatgtcagtgagaccaagaacccaccaattccggacacaatgccagtgccctccactcggcaacagagcaagagtctgtctcaagtcaaaacaaaaccataaaaaattaaaataaaataaaaaaataaaaacaaggacccatgttatcaactatatgcaagatctaggttgacttcaggaatcatgtgaacaccagaagaggctcgatctctttatctctgagttgctgtatccaaccttcaaaagattccaaactactaggaatactgatgaaactcagcaggattgaggattggtagtgaccttgaccattttgatgagttttcaaactacttactgaacactatgattaaaaaatggttatttgattttg

SEQ ID NO: 253011 - DNA, 1253 bp, Homo sapiens
cccgcctggagcaccagcctcgcgcgtccggaggaaccttggcttggcgccccatcctggtagcctcaaacttcatagcactttgtggtttttcttaaaactctgagcctgtgcccgggcggatcacctgaggtcgggagttcaagaccagactgaccaacatggtgaaaccccgtctctactaaaaatacaaaattagcccggcgtggtggcgcatgcctgtgatcccagctacctgggaggctgaggcaagagaatcgcttgaacctgggaggtgtaggttgcagtgagccgagatcatgccattgtactccagcctgggcgacagagtgagactccgtctcaaaaacaaacaagcaaacaaacaactttgggcctgtgccgaagggtctgggcagatcttccaaagatgtacaaaatgtagaaattgccctcaagcaaatgcaaagatgctcaacacccttagtcatcaaggaaatgcaaatggaatccacagagagatactgcacactgacaaagatggtcgtattactaaaggtgaataaccagcgcggggggcacgtggagtcactggaacatttgtgcaatgctggtgggaatgtcaacccgtgcggccctctggaataagcctggcagctcctccaagagttaccgtgtgacccagcaattccactcctagctccacccacaggaattgaaagcaaagacgcaaacagatgcctgtgcaccaaagttcacggcagcatccttcgccatagcggcagcatccttcgccatagcggcaaggtggaaaccctgtccatccactgaggcgtgcatagactaaacatggccagtccaggcactggaatccaggccgtagaacggcgcccacggtcaaaaggaatgagaccctgatgcactgggcgacacagacgggcgacacagacttggagacatcatgctaagtgaaaagccaggcacacggagcggacggcgtgatcctgctcacgtgatgtgtcccgaatgggcacgtccagagggaagaagggagatggcgctgccggtgcccgggacgggggttgggagcgacggttgctggtttggggtttctttctggggtgaggaagtgttttgatattggccgttggtgatgtttgcatacctctgaatatgctaagacccacagaattgcacactttaaatggatgaattgtatggtatgggaattacacaattatgtctcattaaagcagttattttaaaaaaaaagt

SEQ ID NO: 253012 - DNA, 362 bp, Homo sapiens
tgcctaagaagaactggattgccatttatgaactcctttttaaggagggagtcatggtggccaagaaggatgtccacatgcctaagcacccggagctggcagacaagaatgtgcccaaccttcatgtcatgaaggccatgcagtctctcaagtcccgaggctacgtgaaaggaacagtttgcctggagacatttctactggtaccttaccaatgagggtatccagtatctccgtgattaccttcatctgcccccggagattgtgcctgccaccctacgccgtagccgtccagagactggcagcctcggcctaaaggtctggagggtgagcgacctgcgagactcacaagaggggaagctgac

SEQ ID NO: 253013 - DNA, 1233 bp, Homo sapiens
ccgtagtcaacgtgcgcctcccctcccggctcccagccgggcgcgccccgggctcgagtctctgcctgcccagtggcagccccgcccttcctctcccagtgggccctcggcgcccagctccgcgtcctgtgaggtccagtggccgcccaggcgcgaccagatctgggtgcgcggagagcgcgcatggcggctgtgggaccgcggaccggccccggaaccggcgccgaggctctagcgctggcggcagagctgcagggcgaggcgacgtgctccatctgcctagagctctttcgtgagccggtgtccgtcgagtgcggccacagcttctgccgcgcctgcatagggcgctgctgggagcgcccgggcgcggggtctgttggggccgccacccgcgcgccccccttcccactgccctgtccgcagtgccgcgagcccgcgcgccccagtcagctgcggcccaaccggcagctggcggcagtggccacgctcctgcggcgcttcagcctgcccgcggctgccccgggagagcacgggtctcaggcggccgcggcccgggcagcggctgcccgctgcgggcagcatggcgaacccttcaagctctactgccaggacgacggacgcgccatctgcgtggtgtgcgaccgcgcccgcgagcaccgcgagcacgccgtgctgccgctggacgaggcggtgcaggaggccaaggagctcttggagtccaggctgagggtcttgaagaaggaactggaggactgtgaggtgttccggtccacggaaaagaaggagagcaaggagctgctggtgagccaggcacccgcaggccccccgtgggacattacagaggcctgagaactcagcaccagggctcggtgtgtgtggtgttggagtgtgtgctatggaaccgcagaatcgatttcagaaagataatagagtccatattatatagggtgtccacataattgttgtacaaaccagagctttttaaagtgaaaagcagtgctaaaataattattgcaaaacaactggcttaaactggagctgtcccagcgaatcaggacgctcagtcactctgatattacgtaacataccagttagggcctgcggaagcatcttgtaatggaacacattactatttctgcagagaaacatggatattcaataagtgggaatattaatacaataaagagcctcatggcatgttttgtcaacaaaacagtagtgaaaaaaaattca

SEQ ID NO: 253014 - DNA, 2332 bp, Homo sapiens
ccgtagtcaacgtgcgcctcccctcccggctcccagccgggcgcgccccgggctcgagtctctgcctgcccagtggcagccccgcccttcctctcccagtgggccctcggcgcccagctccgcgtcctgtgaggtccagtggccgcccaggcgcgaccagatctgggtgcgcggagagcgcgcatggcggctgtgggaccgcggaccggccccggaaccggcgccgaggctctagcgctggcggcagagctgcagggcgaggcgacgtgctccatctgcctagagctctttcgtgagccggtgtccgtcgagtgcggccacagcttctgccgcgcctgcatagggcgctgctgggagcgcccgggcgcggggtctgttggggccgccacccgcgcgccccccttcccactgccctgtccgcagtgccgcgagcccgcgcgccccagtcagctgcggcccaaccggcagctggcggcagtggccacgctcctgcggcgcttcagcctgcccgcggctgccccgggagagcacgggtctcaggcggccgcggcccgggcagcggctgcccgctgcgggcagcatggcgaacccttcaagctctactgccaggacgacggacgcgccatctgcgtggtgtgcgaccgcgcccgcgagcaccgcgagcacgccgtgctgccgctggacgaggcggtgcaggaggccaaggagctcttggagtccaggctgagggtcttgaagaaggaactggaggactgtgaggtgttccggtccacggaaaagaaggagagcaaggagctgctgaaacagatggcagcggagcaggagaaggtgggggcagagttccaggcactgagggctttcctggtggagcaggagggtcggctgctaggccgcctggaggaactgtcccgggaggtggcacagaagcagaatgagaacctggcccagctcggggttgagatcacccagctgtccaagctcagcagccagatccaggagacagctcaaaagcctgaccttgactttctccaggaattcaaaagcacgctgagcaggtgtagcaatgtgcctggccccaagccaaccacagtctcttctgagatgaagaataaagtctggaatgtttctctcaagacctttgtcttaaaagggatgctgaagaagttcaaagaggaccttcggggagagctggagaaagaggagaaagtggagctcaccttggatcccgacacggccaacccgcgcctcatcctctctctggatcttaagggcgtgcgcctcggcgagcgggcccaggacctgcccaaccacccctgccgcttcgacaccaacacccgcgtcctggcgtcctgcggcttctcctcgggccggcatcactgggaggtggaggtgggctctaaggacggctgggcctttggcgtggcccgcgagagcgtgcgccgaaagggcctgacgcccttcactcccgaggagggcgtctgggccctgcagctcaacggcggccagtactgggccgtgaccagccccgagcggtcgcccctcagctgcgggcacctgtcgcgcgtgcgggtggccctggacctggaggtgggagccgtgtccttctacgctgtggaggacatgcgccacctctacaccttccgcgtcaacttccaggagcgcgtgttcccgcttttctctgtttgctccacgggcacctacttgcgaatctggccttgaggggcactgctggggagctcctgtctctgggctgccggtgggaggggatgtcgcctccccagagatgcctggtccgtcttgggtctgccctccgtgctcctgacccctgctgcccaagagagcctgctacagacacaaccccgaggcaggagagtgactgtggccaaccgagcaggggaacaggggctttggactcctgagggtgttcccttcctgaggtcacatgtggatttggccagagccttcaggaggtggaggccggtgaggtcaggagcccagctctccagggggcttctgccctgactgggaagggtgcctggctccctaaaacaatgtcaaagccagtcctgctgttctctgttgccagggggcaggtctgggcctgggccaaccacgtttgttatcatggctgctgccttctggacagctgccagctctgccttgagaggttgtgggacctctggatccagctgacctgacaggtcatctactcagggaggagccctgtgctcccagctcagaggacagtctgggccagaactggaaggagacaggtgtcccgtctttgagtgacaagcccgggacaacagccagtgggcatcacggctctcca

SEQ ID NO: 253015 - DNA, 2380 bp, Homo sapiens
  misc_feature (508)..(508): n is a, c, g, or t
  misc_feature (560)..(560): n is a, c, g, or t
ctgcagcctgcctggaagctgaaggaaaggtgggggcattgtaggacaccttgaacccaggtctcccaacttcacaggactcccttcctccgcccaggagttttaaggaagaggaacttcctggtgggacatattgagtgccaaacgtgtgttcacataaaaaatcaagagatcagggcatgagtctgcatctgaaaactcgagtaaaaaatccggtgtatgctgttaatggaaagaacagaatatgacacttgcatgccgcatattctcacttcgttccttgggggtgtgctgctacctctggtcactggcatcggacttttcttccttctttctactttcctacatctcccaagttttgtattttgagcatgtgttagcattataactgctaaacaggaaagatggcctttaaaaagaaagtgaagtgtaaaagtttgagggtgatgaaataaatgtgcttgaggaagaaaaagcaatctcagtttaatcctatggttgccccagnaggcactaatttatcccttctgcttttcaagtgaggaagctgcagcttggcntagttctggggggagtatgaagctgccttggtttaggtgatggagcacaggtccacagacatgtgtgggtgcatctgtggcaggggagaaaagagcatgtgtccagactacagcttgttcagagctgggacactgacaatagagcacgcactgcgtgcgtaggtgggtgtgtctccgatcctccagcagtgacagggacgaagccttgccctgtgggatgactcaggccactggccaaatgttatgtctccatgttcaagtccctctccaacttctcctcctgggacagaaacagatggcagcggagcaggagaaggtgggggcagagttccaggcactgagggctttcctggtggagcaggagggtcggctgctaggccgcctggaggaactgtcccgggaggtggcacagaagcagaatgagaacctggcccagctcggggttgagatcacccagctgtccaagctcagcagccagatccaggagacagctcaaaagcctgaccttgactttctccaggaattcaaaagcacgctgagcaggtgtagcaatgtgcctggccccaagccaaccacagtctcttctgagatgaagaataaagtctggaatgtttctctcaagacctttgtcttaaaagggatgctgaagaagttcaaagaggaccttcggggagagctggagaaagaggagaaagtggagctcaccttggatcccgacacggccaacccgcgcctcatcctctctctggatcttaagggcgtgcgcctcggcgagcgggcccaggacctgcccaaccacccctgccgcttcgacaccaacacccgcgtcctggcgtcctgcggcttctcctcgggccggcatcactgggaggtggaggtgggctctaaggacggctgggcctttggcgtggcccgcgagagcgtgcgccgaaagggcctgacgcccttcactcccgaggagggcgtctgggccctgcagctcaacggcggccagtactgggccgtgaccagccccgagcggtcgcccctcagctgcgggcacctgtcgcgcgtgcgggtggccctggacctggaggtgggagccgtgtccttctacgctgtggaggacatgcgccacctctacaccttccgcgtcaacttccaggagcgcgtgttcccgcttttctctgtttgctccacgggcacctacttgcgaatctggccttgaggggcactgctggggagctcctgtctctgggctgccggtgggaggggatgtcgcctccccagagatgcctggtccgtcttgggtctgccctccgtgctcctgacccctgctgcccaagagagcctgctacagacacaaccccgaggcaggagagtgactgtggccaaccgagcaggggaacaggggctttggactcctgagggtgttcccttcctgaggtcacatgtggatttggccagagccttcaggaggtggaggccggtgaggtcaggagcccagctctccagggggcttctgccctgactgggaagggtgcctggctccctaaaacaatgtcaaagccagtcctgctgttctctgttgccagggggcaggtctgggcctgggccaaccacgtttgttatcatggctgctgccttctggacagctgccagctctgccttgagaggttgtgggacctctggatccagctgacctgacaggtcatctactcagggaggagccctgtgctcccagctcagaggacagtctgggccagaactggaaggagacaggtgtcccgtctttgagtgacaagcccgggacaacagccagtgggcatcacggctctcca

SEQ ID NO: 253016 - DNA, 2014 bp, Homo sapiens
tgcgcgacgtcccccacggacttggcgatgttcttcctgtctgttcggagcctctagcctggtctgcgtctccgcagctctctgcccgcgggaagtctccggcacagccacgcagccgctgcccccactcttatctctttccccgaagcgggctctgctcaaagtccccacctcgtggaactgagtgagaggacctcgccaagatgtccagggagggggctcccgggttaagccgcgcacctagagccgtctgactgtgccaacgctgtcgattctgggggccctttctttgctattttctcgctgagcctcagcgagggagctcttggagtccaggctgagggtcttgaagaaggaactggaggactgtgaggtgttccggtccacggaaaagaaggagagcaaggagctgctggtgagccaggcacccgcaggccccccgtgggacattacagaggcctgagaactcagcaccagggctcgaaacagatggcagcggagcaggagaaggtgggggcagagttccaggcactgagggctttcctggtggagcaggagggtcggctgctaggccgcctggaggaactgtcccgggaggtggcacagaagcagaatgagaacctggcccagctcggggttgagatcacccagctgtccaagctcagcagccagatccaggagacagctcaaaagcctgaccttgactttctccaggaattcaaaagcacgctgagcaggtgtagcaatgtgcctggccccaagccaaccacagtctcttctgagatgaagaataaagtctggaatgtttctctcaagacctttgtcttaaaagggatgctgaagaagttcaaagaggaccttcggggagagctggagaaagaggagaaagtggagctcaccttggatcccgacacggccaacccgcgcctcatcctctctctggatcttaagggcgtgcgcctcggcgagcgggcccaggacctgcccaaccacccctgccgcttcgacaccaacacccgcgtcctggcgtcctgcggcttctcctcgggccggcatcactgggaggtggaggtgggctctaaggacggctgggcctttggcgtggcccgcgagagcgtgcgccgaaagggcctgacgcccttcactcccgaggagggcgtctgggccctgcagctcaacggcggccagtactgggccgtgaccagccccgagcggtcgcccctcagctgcgggcacctgtcgcgcgtgcgggtggccctggacctggaggtgggagccgtgtccttctacgctgtggaggacatgcgccacctctacaccttccgcgtcaacttccaggagcgcgtgttcccgcttttctctgtttgctccacgggcacctacttgcgaatctggccttgaggggcactgctggggagctcctgtctctgggctgccggtgggaggggatgtcgcctccccagagatgcctggtccgtcttgggtctgccctccgtgctcctgacccctgctgcccaagagagcctgctacagacacaaccccgaggcaggagagtgactgtggccaaccgagcaggggaacaggggctttggactcctgagggtgttcccttcctgaggtcacatgtggatttggccagagccttcaggaggtggaggccggtgaggtcaggagcccagctctccagggggcttctgccctgactgggaagggtgcctggctccctaaaacaatgtcaaagccagtcctgctgttctctgttgccagggggcaggtctgggcctgggccaaccacgtttgttatcatggctgctgccttctggacagctgccagctctgccttgagaggttgtgggacctctggatccagctgacctgacaggtcatctactcagggaggagccctgtgctcccagctcagaggacagtctgggccagaactggaaggagacaggtgtcccgtctttgagtgacaagcccgggacaacagccagtgggcatcacggctctcca

SEQ ID NO: 253017 - DNA, 2223 bp, Homo sapiens
  misc_feature (411)..(411): n is a, c, g, or t
  misc_feature (523)..(523): n is a, c, g, or t
tgcgcgacgtcccccacggacttggcgatgttcttcctgtctgttcggagcctctagcctggtctgcgtctccgcagctctctgcccgcgggaagtctccggcacagccacgcagccgctgcccccactcttatctctttccccgaagcgggctctgctcaaagtccccacctcgtggaactgagtgagaggacctcgccaagatgtccagggagggggctcccgggttaagccgcgcacctagagccgtctgactgtgccaacgctgtcgattctgggggccctttctttgctattttctcgctgagcctcagcgagggtgtgtgcaggggtgagggcggggcggggaggctcgggcggcagtccccagtctctccttgctggcccatcctgctccaactctcccagccncggggcttcctggtgggggggcggagagtagaggagacgactaggggtagggctgccggagcttgtgtttcagtctggctggtccagcagatgcttttggggaagcaagatnccgagaccttcagagtcacctcgcagtgtaacctgtagcctgtagagatgacttctacccggcctccccctcagagctcttggagtccaggctgagggtcttgaagaaggaactggaggactgtgaggtgttccggtccacggaaaagaaggagagcaaggagctgctgaaacagatggcagcggagcaggagaaggtgggggcagagttccaggcactgagggctttcctggtggagcaggagggtcggctgctaggccgcctggaggaactgtcccgggaggtggcacagaagcagaatgagaacctggcccagctcggggttgagatcacccagctgtccaagctcagcagccagatccaggagacagctcaaaagcctgaccttgactttctccaggaattcaaaagcacgctgagcaggtgtagcaatgtgcctggccccaagccaaccacagtctcttctgagatgaagaataaagtctggaatgtttctctcaagacctttgtcttaaaagggatgctgaagaagttcaaagaggaccttcggggagagctggagaaagaggagaaagtggagctcaccttggatcccgacacggccaacccgcgcctcatcctctctctggatcttaagggcgtgcgcctcggcgagcgggcccaggacctgcccaaccacccctgccgcttcgacaccaacacccgcgtcctggcgtcctgcggcttctcctcgggccggcatcactgggaggtggaggtgggctctaaggacggctgggcctttggcgtggcccgcgagagcgtgcgccgaaagggcctgacgcccttcactcccgaggagggcgtctgggccctgcagctcaacggcggccagtactgggccgtgaccagccccgagcggtcgcccctcagctgcgggcacctgtcgcgcgtgcgggtggccctggacctggaggtgggagccgtgtccttctacgctgtggaggacatgcgccacctctacaccttccgcgtcaacttccaggagcgcgtgttcccgcttttctctgtttgctccacgggcacctacttgcgaatctggccttgaggggcactgctggggagctcctgtctctgggctgccggtgggaggggatgtcgcctccccagagatgcctggtccgtcttgggtctgccctccgtgctcctgacccctgctgcccaagagagcctgctacagacacaaccccgaggcaggagagtgactgtggccaaccgagcaggggaacaggggctttggactcctgagggtgttcccttcctgaggtcacatgtggatttggccagagccttcaggaggtggaggccggtgaggtcaggagcccagctctccagggggcttctgccctgactgggaagggtgcctggctccctaaaacaatgtcaaagccagtcctgctgttctctgttgccagggggcaggtctgggcctgggccaaccacgtttgttatcatggctgctgccttctggacagctgccagctctgccttgagaggttgtgggacctctggatccagctgacctgacaggtcatctactcagggaggagccctgtgctcccagctcagaggacagtctgggccagaactggaaggagacaggtgtcccgtctttgagtgacaagcccgggacaacagccagtgggcatcacggctctcca

SEQ ID NO: 253018 - DNA, 1946 bp, Homo sapiens
tgcgcgacgtcccccacggacttggcgatgttcttcctgtctgttcggagcctctagcctggtctgcgtctccgcagctctctgcccgcgggaagtctccggcacagccacgcagccgctgcccccactcttatctctttccccgaagcgggctctgctcaaagtccccacctcgtggaactgagtgagaggacctcgccaagatgtccagggagggggctcccgggttaagccgcgcacctagagccgtctgactgtgccaacgctgtcgattctgggggccctttctttgctattttctcgctgagcctcagcgagggagctcttggagtccaggctgagggtcttgaagaaggaactggaggactgtgaggtgttccggtccacggaaaagaaggagagcaaggagctgctgaaacagatggcagcggagcaggagaaggtgggggcagagttccaggcactgagggctttcctggtggagcaggagggtcggctgctaggccgcctggaggaactgtcccgggaggtggcacagaagcagaatgagaacctggcccagctcggggttgagatcacccagctgtccaagctcagcagccagatccaggagacagctcaaaagcctgaccttgactttctccaggaattcaaaagcacgctgagcaggtgtagcaatgtgcctggccccaagccaaccacagtctcttctgagatgaagaataaagtctggaatgtttctctcaagacctttgtcttaaaagggatgctgaagaagttcaaagaggaccttcggggagagctggagaaagaggagaaagtggagctcaccttggatcccgacacggccaacccgcgcctcatcctctctctggatcttaagggcgtgcgcctcggcgagcgggcccaggacctgcccaaccacccctgccgcttcgacaccaacacccgcgtcctggcgtcctgcggcttctcctcgggccggcatcactgggaggtggaggtgggctctaaggacggctgggcctttggcgtggcccgcgagagcgtgcgccgaaagggcctgacgcccttcactcccgaggagggcgtctgggccctgcagctcaacggcggccagtactgggccgtgaccagccccgagcggtcgcccctcagctgcgggcacctgtcgcgcgtgcgggtggccctggacctggaggtgggagccgtgtccttctacgctgtggaggacatgcgccacctctacaccttccgcgtcaacttccaggagcgcgtgttcccgcttttctctgtttgctccacgggcacctacttgcgaatctggccttgaggggcactgctggggagctcctgtctctgggctgccggtgggaggggatgtcgcctccccagagatgcctggtccgtcttgggtctgccctccgtgctcctgacccctgctgcccaagagagcctgctacagacacaaccccgaggcaggagagtgactgtggccaaccgagcaggggaacaggggctttggactcctgagggtgttcccttcctgaggtcacatgtggatttggccagagccttcaggaggtggaggccggtgaggtcaggagcccagctctccagggggcttctgccctgactgggaagggtgcctggctccctaaaacaatgtcaaagccagtcctgctgttctctgttgccagggggcaggtctgggcctgggccaaccacgtttgttatcatggctgctgccttctggacagctgccagctctgccttgagaggttgtgggacctctggatccagctgacctgacaggtcatctactcagggaggagccctgtgctcccagctcagaggacagtctgggccagaactggaaggagacaggtgtcccgtctttgagtgacaagcccgggacaacagccagtgggcatcacggctctcca

SEQ ID NO: 253019 - DNA, 493 bp, Homo sapiens
agaacatctcacccatcacatggaacatcccgtcacccgtcacacggaacattccgtctcccgctgacacggaatatctgatcacccatcacatggaacatcccatcacccactcacacggaacatccgatcacccgtcacatggaacatcctgtcaccagtcacacagaatatcccgtcacccatcacacggaacatcccatcacccgtcacacggaacatcccgtcacccatcacacggaacatcccgtcacccgcagctgcccctgcccctttgtggccagctccccgcctggttcgtctcttctggaattccacgtccatgaatcacagcgcgtgttctccctgctgtggaattcttttacccaacataatgtctgcgtgactcatccccctgcagcctcggtcggagctggcctgccatcgatcctgttgtcctccccattttttagataaggaaactgagagttagggagggcacagatggaagagg

SEQ ID NO: 253020 - DNA, 492 bp, Homo sapiens
agtacagatagtcgtttaaggacgcgagattatgattctcatagagcgcatgttgaagcccggcgagtcgcgtgggtcaatagtacttgccgcagtactcgttaaaactaggcggctatggtataatacgcctcgcactcattctcaaccccctgacaaatcacacagaatatcccgtcacccatcacacggaacatcccatcacccgtcacacggaacatcccgtcacccatcacacggaacatcccgtcacccgcagctgcccctgcccctttgtggccagctccccgcctggttcgtctcttctggaattccacgtccatgaatcacagcgcgtgttctccctgctgtggaattcttttacccaacataatgtctgcgtgactcatccccctgcagcctcggtcggagctggcctgccatcgatcctgttgtcctccccattttttagataaggaaactgagagttagggagggcacagatggaagagg

SEQ ID NO: 253021 - DNA, 983 bp, Homo sapiens
aatcaattaaaataattgaaagattgtgttgaacccagctcttttcttttttagagacaggatctcactctcacccaggctggaagtgtggtggtgtgatctcagctcactgcatccttgacctcccgggctcaagcccacctcagccactgcccatgtccccctgggcaccatgacacccagcgtgtgtgtatgtgtgcgtgtgtgtagagaaatacaaatccgtgtgtgtgtgtgtgtgtgtgtgtagagaaatacaaatccctcccaaagtgctgggattataggcgtgtgccaacgctggtggcccagcatttttcctgtagattttttgtccccctagaaatgagttaacattctttaacagtagagaaaatgtagacggaaccatcagacattcacaccacaagtaaaaaggaagtgattggtatcatcttctcagtgttggaggtggcattgtagtctagtggaatcagtacttacattaaaagtattaccttaagtactcaggacttaaatgctgtttttcttagtagtatctgtctttcttaaaaaaaaacataatcaacatagtgaatgtaatggtggtctctcattttgtgttttctagttctgagaggtaaatggcattacatcaagtgtattacttggggtgaatgttcataatcagaattcagtgttattttttctggagtcatttgaaaactgaaatttagcagtcttacaaaagttgcactttgggaacatgctctcacatcgagccattttctgctttcccatactctgttcatagtagtaacagctcttgctggataactaagtctatatggaacttttattcattgaatgttcaaaatatatgctaggcatgatgctaagtgcttcatgtatttaattcctgaaacaagccaataattgggtaataatctccattttgtacatgtaaatattaaggctaggcaagggttaagtagattacttaa

SEQ ID NO: 253022 - DNA, 6473 bp, Homo sapiens
gatcaataaggtctcgaccccgagccccactggatgatagaggtgggcatcacctctgtcctatgccatagccttgtcccagcaggaggtgcctacctaggctctgagagtgcctgccaggaaggggtgcccccttaaaaataaccccaactccttctaccccgaagtccttggggagtgctgggtctgctgatgggagaagctgcagaatttgagcccggaaggtggtcctgacagcgaggggggaggggttggtgtaacccagaaggaatgcaaaccctgtactttgttcccctacccttggaacaagagactttcctaagtggatcaaaatgtcccccctcaactttgggaggagggctctagagggaaaggttacatgggggaggtcctcgttccagcgccgccgagagggcactggggtttgttgaaaggcactggagccctcacctggacattgcagggggcgggggttggaggctggggacctaaggtaagcacccctttccctgggaatgcgcagaacagagagacgcggcagggtgaaggagaggactgatgagaagggcttgttgggaaaccctggctccgtcaggaccccaccctgcgagctctccctggaacccgggagcagggttcttctggctgcccggctgcagagagctgacccggcatcctgacgcctcaaatccctttgcccgcctctgcgggctgcgggaggcgggggttggcgtgcctgagggtgagcgcatctgggccggtgcagccagcgcggcctcggagctccgctgctcaggatgaaggaagagcgcagacgcggatcgcgaatgggaaactttccgcgtctggggcgcagagggagatccgaggcagccgggagccctctcttctccgcagaggagagcacacgagggtggggtccctccttcctccttccaagtctgtgcccagaatggggggcggggtgcgagaagagtccgtgagagacgcaagaggcgggctgtgccggaggagggcgcccttcctggaggtggccgagagaggtgcacctggcagcggctttgcagggccacctgcctccgagggcgcagagaggagcaacccgcgccggccttcacgaacgtactggcggtcactgctcggggaggggcacggccagaacgccctcgccggttctgcccctttgggtggcagagcaagggtgcccgacgctagagagtcgggtctggcaggaggaaggaggccgctgcccctcgcactggctgggccggaagtccttgccctggctccccacttcccagaatcagaccctccaaaggagaaacccacatttctcgggactcctgggcgtgtcctggggcgttttcaactcctccagcccccgtgaaccgtgcctgggcacttctgggaagtcctgcactggagcctgtgcagtggcgccgggctggggatggaggagtggtccttagccgctgttcagccctgggaaacgttccgctgagagcagggtgggggcagccccagttaggggtagcccacggccccagccgggggtctccgggattgcgcgggcggaggtgggcggccctgcgggttctcgggttctcgggttctctgtctccgcagccgcgtgtcagcaggtggatgggatggaggggctgtctccgctaggccgccgcaaccgcaacgccgagactgcgggggctgtgcgcgcgcgagcgggtgtgacgactttatatatttatcctcccttcacacgccccctcccactgggcggggcctctggcgcggcagggtttcttctccagccccaactgggggagttaagggccctaatcccttgcaggctgcctcgcccatgcccctccagcgtggccccgcccctagccataaactccacccctcttccaccccataaccgctctgcaaatgggagtttttcattttcgtgttttaagtgcagagaatattcgagctggagcgacctcggagatcactcacttcggtggttttgaaacttgtgtgtttttctttttcttttaagtaggaaaacccttttagaggaaacattatcaccctcctaaaatcccaataccttgagcaagatgatagatcttaaagtaaagctgccctggtggatgctggggatgaggcccacatcgagcgctccttccacacaagtctttcacaacctcaagactgctcccttcctccgcagctagtattgtagctggggttttgtttttccaatagccccgattatatggatcagctgcgatgtgtcaagcaggatgctggctgctgcttcgcagtcctcattcatgctgcaagatagatttaagaccttcttttcacagattaggaaactgaggttctgaggtttaagacttgttaatgacagaagtacaggctccttccgctccctcctagttctgccccaggctcctctttccgctgaatcttcctttcctctctctggccgcaaagaatcccttgggcagggcatgtgagtagagaaggacccaggtcatctgagtgatgcctcagatctgcctgctactctgatatttcagaacgtcagtcacagacacacttgaacttcactacactctggcaagatgggcagaggacggagtaggggaaggaggtggaggagcttaggggacttgcttagttaggtgcctggtttatagtggtgtgtgacttcaaaggcagagaccgacaaaatagaggctgtttagttctattaactgggtttcctgggatctgtagaggtatttaacctaggcagttgacagcctggcttaccaccttgcccgcctccgctatagccccaggccaccaggaattcatttattcatgcatccaacaaatgcttattgtacactatgtgccagacacggtgctgagcattgggaaaacggccctgagcttggtagaggagtcccctgcctctatggtgtttaaggctcagtgggaaattgatgcttcatttagagggaggaaggggctattatctctctctggccctaactgagctaggtgttacgccatgtgctttatctttcttgtcttacagaatccttacaagcaccctgagaagtaaaatgaagtccattttgtagatgaggaaactgaggctcagagaggctaggtgactttgccaaggctgcagagtcattgaatggcaagcaggaattcagatacagggccctctgactccctggcctgtgcttcctccctccatgctctgctgtctcctggtgatcatttcctgagccccagccacatggatgtgtccagtctcctgtctggatgcctgactccttcccaaacccacactgaaatagaatcatccagggtgttcatctgcacagatgggagagggagtgtccctgaaagctattgccatcaccaagagaatgaataggcatctgctgtgggcagggcacatgtgaaaagagcaaggcctatgagtgtgatcctcatcccagggcagcgagagactgggcatgtttccgaaaagatgaacgacaatctattttgtccatcctccctctccacctcctttcctcccccatccactcctgttcccttcctctcttttttctttttgccttcttttttctttttaaataaaaggaggttcaggatcttttgtaagtggaggaactgggagtttcaaaaccaggtctgaagcaatccagagacagctgctttttcatcactggaaagggagtacagcagcccttactacttgtaggaggctgcaaagctgttcatttcaaatgataaatgtcagtggtggtaaaacacatgagatcacttcctaggaggtgtccttctttaggatgaaattccagggaagattggggtggtgagatcctggaacccacctttatgctacagtgagctccaggagtggagggggctcatgttcactaagacccccggctaagattccatggatggagcaataaaggtagtgtgtatggggctggagatgcaggccctgttcagtcacctctgcagcccaaaagagcaggagagacaggtcgtgggcagggtgtggcttgggggtggggtttttctgagacccagactttagtcccctcccaggaaaggaatctggtgtttggtttttccaccagcctttgttacatcttctggccacatactaaatttgctttgggaaatcacaccaaccccgcacccccacccccaccccacccaacacataaattgcatgacatcttggtgggtgaaactactgggtaaggcatccccaagatgggccctggaatctgaatattgagcagagtgtcacaaagactgagagacactagaatgtcccccttgcccctgggacccccaggaaaccgtcctttgttggtttcctgagactgataatgatgggacctatctcccagtgtactgagagggtggaatcaggcattacaagcagagctcttagctcagtcccgtgggctctgatgcttgttactagtgttaaccatggtaacgatgagtacccgctgaagcagccccagtccttgcgttactcgactttttcgtagtgttctcattggttacattttttggcttgagagtctagtgtcaatttctgctgcttgcaaggaaaggatcccatgtgataacctctctaggtgtgatgaccagtgccagccttggagttgccagtcagtgcactcttggtaatgcacagaggatggttcatggccctctggctgggggtgaccaatcccaccgcctgccctctgtctttccctggagtcttgaggcccattgagtgcagtgtgagactcaagttgttccccgctagtaaaatgtacagatggaggccaatcttatagtgaacttccaatcccctgacccactagaccctgctccacccaggcagggaccccatctggttctgttcactgttgagtcctccacaaaacacatagcaggtgctcagtcaggttgtttgtttgggtgattaggctacctctggccttgcgacatgtgcaacctggttttgaaaaagactgagcatgtggctttctatttctatggaaaattgtgtgaaaaggcttatagcatgtggaattgaggctggacttgcaggtggacttcctggcagcaaagatgttctgatcctggaactacattctttctttctgcagtttctccgataaagtagcagaggccctgactagatatcttaactctctacctgctggcagtacttgaaaatgcacaaaacacttccacgcccattattccatttagacctcacatcacacagggagacagctagtcttgtacctgttgaacagatgagggaaaatgaggcccaggaagatgaaaggatggcagtaggcagtggctggactggaacccagattctgtggttgcgagctcagccttcctcccatcctcaacccattgctggacttcatttagccacaggggtctggcatgagacaggtcagtttcccatgtgcttacaggccagtaagctttgatctcaagtgtgcactgtgagctgtgtgctgctgtagccactttgctgctgtgacttcctctatcctccactgctgtccaggtgggtgttatatccccagtccacaggtgaggacactgacatgcccagggtcacacagcttgagacaagagctcactgtctcccctgtctccacagtcttgtcctgctcagagatttctggccttagcttctccatcctccacctcctcccccacttccgccctttcttggctcagagagcagacatctgccctcagctagcacagtccctggctccccataaggctttctccaagtttctgctcacccacatcctccctccacagccccccaccacacacacacagactcaggtgtgccctaagcatgttggcagcagtacttttggcaacactttgaaagcagccctccttggggctggagatcgttggggatagtctccctcctgaacagagctattgagggtgagcatctctgcaccctcggccctggcaccaggcctggctctgagcacatagatcctgaagatgtgtttgttgaatgaatgaatgatgtctcccctgagcctgaggtttggttcaaacaccagacccaggcttgtttcctggccctgctcagttgcctctggaagtcctttctggtgtgagaatgtgtccattgtccttctccattccatggaccacagtggcatcacagctggcatctggaggaagggccaacactgcaaggtgatgggaagaccaaggggacttcgtgtcccctctatgttctccttggagaggggactgtcctagatgggtgatggggatttgggaaggtaaagaaagaaggaaggagggaggaaaggaaggaaaaaggttgagaagggagggaggaagacaggaaggaaggaaggaaggaaggaagaaagaaagaaagaaag

SEQ ID NO: 253023 - DNA, 420 bp, Homo sapiens
gcttttcattttgaaagtgaccgtgttgatagcatgcgtgctttcagtatgactaggacagagatgttaagagtttgcgatgcgtgtcttttatctgatagtagagacgctaataattctattaacagactttagatctagcgacttcatggcctcagtgatcatctggaatttacgcatagtgagaaacaatcgcatttatttctcctttaagcccaagtatcttttggttaatgaaatactaacaaaccagtggtatcagggaacggaaagctcctggcagtactgcatttgaaacgtctggaggtggtgatgcttcagccaggaagcaggttcatcttcccagaagatcttacggatcccacagtgcattgtgcatagtgccgtggggctgcagggtaactgaggtggtgcacagag

SEQ ID NO: 253024 - DNA, 703 bp, Homo sapiens
gagactccatctcaaaaaaaaaaaaagttattaaatcaatgaataatatgtccaaattatggatcaatttgcaaaggttaaggaaacattcattcctttattccaaagcatttcttgagcttcttatttgtatgagtcactgtggtaggacccaaatatacagagacaaacaaccagaagctttgctcaacagtgactaacagtggagtgggaatgttttacaaataaattagtgacaacacaaggtgaaaatattaaacacaagtattaagttgttgttatggagacaaagagtaggaggacaggagagaaaaatcccccaagaaggtcaggaatttccaagaagaggtggaatttgttattaatcttaaaggatgaatgaattttccatagcaaagagagatagagaaggaaaatggtgatgtcagagaaatgtcaaatggtgatgtcaaagaaagaatactcttgaaggaagagaaggcaacagtttgacatttgacttgggtaagttcagtcttagattggtaggtttttgttaatgagtatagaaatacaactgtcaatttcaggtaatagaatgtacaattatgagtcatcagaaaatacatgttatgtgaacccttgatatacatgtttatgtaaaagatataaagaaactcatggtagaaccccaataaaaacaatatttcgggcatggaggaag

SEQ ID NO: 253025 - DNA, 675 bp, Homo sapiens
tgggattacaggtgtgagccaccgtgcctggctggatactttttattcctactgattcgctttcctttctcttctctgatagtaaattttttatatcctgtctttgtgctcactgattttcctgcttgattcattctactgttgagagcctctaacgcatttttttttcaatttagcaaatgtatttcttagtttcaagatttctgtttgattttttacaatgtttcaatctgttttttgaatctctctgatagatttctgaattgcttttctgtgttatctttgagttgctgagcttctttaaaactactcttttgaattcattatgtgagaatgcacacctttctatcttgttagggtcagtcactgacattttcctttgtctttttgaagaggacataatttactgcttcctgtagtgtgtgtagtgtgcgtgtgtgtgtgtgtgtttgtgagtgtactttaatggcttcacaataaaatattaattacttattccagtcttcactgcctgacttgttttggtctttctcaggtatgtttgcttagaggttctctacaggtgtttgtgaatcctttaaatcctaaattgctgttttctttttggaactagatgacaccttaagcccaggtatgcctcttgcaagtttggcttactgcctgttccagatggtt

SEQ ID NO: 253026 - DNA, 375 bp, Homo sapiens
cgaacaaaaccatctggactctgctgcatggccccgtctgtggctgctgtagctgcccgtgggaaggccctgcctccagcttctgcccttggctgcgaaccatggagtcccggctcccaggcctatccccgggatgatgcactagacatttttgtggcagggtgcagaacaatggattccccctgatgcttgctttaagcatgaatttttgttttgcaaatgcaatcctgggaaggaagggagtccaccaattagtgggaacagctcttactgactaatggatggttaactttacaagtggaatgatttttacaaatgagctacaatatgactgtaagtagaaagtaaaaaagcaaatctttttcatcctgcaaa

SEQ ID NO: 253027 - DNA, 600 bp, Homo sapiens
aagatatatagaatcttagtttggcaataatttaaaacattgataaaggcttatttaaaaagtgtgggtgaataggttctttcaaacattacgatcttgttgctgactagagtgtaaattggtaagtctttgtctcaagaacattttggtaatatagacatcaaaagccttaaaattgggtaacccttgaccttgaagttccacgtctaagattttatcttaaggaaaaattagcgtaccaatgacgtgcaggaagttgttcagtagatgatgtttataatagaggttaattggaaacagttccaatgaccatctgtaaaggatcgatataataaatcctggcatattcaaatagtagactcatacatagctattaagaattatggagatccagactgggcagcatggtgaaaccccatctctacaaaaaacaaaaacaaaaaactaaaattagctgggcatggtggtgtgcgcctgaagtcccagctactgtggaggctgaggtgggatgatcacttgagcctgggagttggaggttgcagtgagccacgatggtgccagtatgctccagcctgggtgacaaagtgataccctgtctca

SEQ ID NO: 253028 - DNA, 393 bp, Homo sapiens
gattcatttgctctggttcctgcactcactcgcttgcacgctccctcctgccaagagtagccagtgcgggctgagtggaatgagctactccagtttccgcccacgaaggagttcaagagaactaacccgtcccaataggaaagggaaaaaaagcagagtggaagaaccatgtttaacctattaatctttttgcttctgtaatacttagagtttcctgatttttttgaaaaataacttgaggtgatggctagctttgcttaatgaacaactcaagcataattgttaaaaatgagtaaattaggtgtatgtaaatggtatacaaattgataaatgaacttttcagttttgaaaaccttttaccgtaacttaaagtcctgttatgattaagtaata

SEQ ID NO: 253029 - DNA, 587 bp, Homo sapiens
gactctcctagatgttaggtctctgagatcatagtaatgcagtcagcaatgaaacctacctggttaattagagaaacacagctccatcaatgtaagagagaagtctgggctgccgagtgtctgacgggacaaatccttccaacggccgcagcaggtgcttcttctagccctgtgttgcaatgacctgcagctcctggggataactcaggcacgctgctgacgccatcaggaggctcaacaccctcacccgcttacgctacgaccagcaaaagcaaaccccgcagctgcctgccagccgggaagaaggactgtgtttccatgttgtgagtctcctcattgcagccagatgatgaatttgctgctggctttgtgcgaaaccgagaaatacccagcgtccagctgagggcccgggtggcaacaaaatcaagctgatgaattaaagaaatatggcctggtcaggatgcctggaggcctcagagttctgatctttcttctgagttactacatcttctgaactgctcccaggatggtgtttgtgataagttggtttgcccagtaaaactgtcgcccagtggaggcaagcccta

SEQ ID NO: 253030 - DNA, 610 bp, Homo sapiens
ggctggagtgcagtggtgtgatctaggctcactgtaacctctgcctcccgggttcaagtgattctcccaagtagctgcagttacaggtgcccgccaccatgcccagctaatttttgtatttttagtagagacggggtttagccatgttggctaggctggtctccaacttctgacttcaagtgatctgcccaccttggcctcccaaagtgctgagattacaggtataagccactgcgcccagcctatagtagtgattctttaaaggaggtgggtagatgacactgtgatacctgtctttaatgcacccattctgtgcatgtagagactgaggtggttgtaaaattacagtactgaactttggaattaggtcaattcttctcattatgataacggttttggatgtatagccccttctgactcctggaatcctttatttccacagcacttcccatgtatccaaacagaggaaaaaataattagtagtatagtgcttgcttcagcagcacatatactaaaattggaacgatgcagagaagattttcatggtccctgcacaaggatgacacataaatttatgatgtgttccatatttattattatttttaataat

SEQ ID NO: 253031 - DNA, 375 bp, Homo sapiens
gtgatttctttatttatttatgacaacaggaaaatcttatttttaaatacttataaaaatccagagttgccctcaaagcatttggtctgggaggtgtgtatcagaggagttgccttactttatcacccactcctacccaccccaggctcttctcacaactatgagattctatgaaacacataaagcctctgtattatttccttttattgtcatattcctgcagtttactatagaagactattggactggaagtcaagagagctacgctctagtgctggcttggctgttaacttgctttaatgttgagtaagccgcactctgtctttgggtctcagtttcttcatcagtgaaataaagaaatttgtctgtatgaat

SEQ ID NO: 253032 - DNA, 444 bp, Homo sapiens
gcttgcagagcttcttgtttttccatgctgtgatgggacattagctaagcacacagaacataatttcctatggtgtgtcaggcctttctcttaggtctgatgaggtctaaggataattatgtgcaacaacctactgtggcagagaaactgaattatcagttacatctgagagtcttctcacaaaagaatgtcagtctctcactgctttatattagctaatctctagacggactttcctggttgaagcttacttttttcatcagtctcttatcaagaatgctctggttaagaactaattcatattacggacatcattaatatattgtaagtatccataaatataaattttaatattaaatgttaatagggatattacatgatattggcatactatataatgtgcttatatatatttatttcaaatgttaactgaatcagatcttt

SEQ ID NO: 253033 - DNA, 296 bp, Homo sapiens
ggaggtggaggttgcagtgagcttagattgcaccactccactgcattccagcctgggcaaaacatagcaagactccatctcaaaaaaacaaaaatgaaaacaacaacaacaaaaaaacaaacaaacaaaagatttaaccctctaggttcaggaaaaatccctgagaaagagagagcaaagcttctatactctgcctaggatttctttctctttccgggtgaaaaataggtgttgggatgatactgagttgataaaagtatttaggaaaagtggccagtgtctaaattcaagccatt

SEQ ID NO: 253034 - DNA, 402 bp, Homo sapiens
gcacattttgtagctggagagaaagaaaaagaagatgaaagaaaaatcttttgaagactgaagaaaggggaaatcccactaatatagtgaaaccccttaattgttttccaagagacagaaaaaaaacactatttaaaggtcacattggcttgtttgaattcgtttggctttcagaagataaatattgtgtatgggaatataagaatgtctgctagaaaccacttttgcacaatgaacaaaggaatcatccctaatatgtgattaactgacgttccctgctcaccacaaatgttggctttcatagacttcaagtgaaggggcactttattaattggctgaagaattccttagaacgcctaagagattaagaccacaggatgcttcaaggttctttctttcttg

SEQ ID NO: 253035 - DNA, 471 bp, Homo sapiens
tccacacttaatgtcttataatctctgccaagaatttaaaaatttttgttggtcggacaggaagaggaaattccatggtttggtgaacccagaaattgttcagtacatctcggttataaaactgtgttaaatacacttaaactctataattctataagacccattttaggtttatacactgagcatccagttcctcaccgtcctctcataggttaaccctgtgtaatacaagttctgctcccataattctatgaacaaaacagcccttgatatataggtttgattttttaaatacattttctttactttattctaaatgtaacataaggtcaacatagaaaactgaaaagcataaggaaagtgaaatatctgtaatcttatcaaccattgttaattttgctgtattcctagtttctttttatacatatcaatatggtacttttgttttaataaaaggactgccaaaaggca

SEQ ID NO: 253036 - DNA, 355 bp, Homo sapiens
aggcaatataaagctgggtcctaagactaggtttcatttatagcttatgaactattgccagacattttctcttacttgaattttaaaaaatgatacaaggaagctaggcatggtggctcccatgtataatcccagcactctgggaggctgaggcaaggggattgcttgagccgaggagttcgacaccagcctgagcaacatagcgaaaccccgtctctattaaaaaacaagatacaaagatttgagcgtacccatctatgctccagaaacactcatttacactttgtgatctatcttgctagcactgtattatcagattatgaggaaaaatataaattaatatcaggctaaaaaa

SEQ ID NO: 253037 - DNA, 509 bp, Homo sapiens
tatatacatatattcccactgaatggatatgcatgaagattatgcatagtttaatatcagttcaggtcaacttttattgccaaataagttacaaaaaaagatttgttttttagaactttttggattacaaaatggtgatagggattgtggacttgtcttacttttagttatatacctattgagagtctgttaaatttttttactgtaaataatatttcccatattcccaaaggttggaaaccacaatcacataagcaggggtcacaaaccgaagtgccaggttgggtaaaataaataagtgaaatgggaggcgggtataggacagtagggaatgtggggactgcagtgaactggtgaatacatgttcattcaaaggggagagctgctcttcagttctagccacttgttgccatggtgaacgtgggagtagtgaagctacatcttccatttttgatgatactccagaatgctgattttcatgtgaagtttcttgatatttaaatgttggc

SEQ ID NO: 253038 - DNA, 114 bp, Homo sapiens
ctaactttgactttcactcttcgccaagggcttgcagaacaccttaaaggaaaaaagatggaggcgcttagagttcagatgttcatgccatgctcctttgaaagcttgtatctg

SEQ ID NO: 253039 - DNA, 479 bp, Homo sapiens
gaagagtaaaaatagtgtagtgtacttcaatcagcccgtcttgtactgtgcttgctgacaaaccatctttgatagtaatggccttcagggataaagaaaacacctggcaccacacttccagcatcgcatgtctacttggatatttttctttattacttatatcttatttttttaacactttttttttaaattataagaatcatgtatttatactttctcagtaaaaaatgtagattatagagaaacttgaagtccccctggatgcttcttctaccttcttcaatcctattgtctccctcaaggaaaccactggcctcatattggtgtgtttccttcagttttttaatacataaatgcctaaaaaggtatttatgtattaaattttaggtatttatacataaatacctaaaaagatgaatacaaaaggtattatgtattaaattgttattaatttatatataaatagctaaaaagaaata

SEQ ID NO: 253040 - DNA, 291 bp, Homo sapiens
tattttcctaatattggtcattgatgattatttgtatataagccactttcattaggttgagtcatgtcttttttgagttaactgaatttttctgaatttctcctgtcatttatatattgcttcaaaggaggagaacgagatggagacatttggtgcaacggtaacaaatgaaattagctcttatatagctgatcataggataaaaatgagttttgaggttatagctgatcagaaactgtagcaatatgaggggacttcagaaggttcatggaaaaatggaattaacagata

SEQ ID NO: 253041 - DNA, 320 bp, Homo sapiens
cagcctgtgcggggcaggcgttagactgcagaaggggagagcttaggataaccgcactcaggtggcgcaaggaagtcagccacgaagaaaaagaaagggaaggaaaaacatcgtcccagactgataaactctctgctccccggtgtaacgtcgctcagtatagcgagagcatggatggacgaatgaagccctcttgatgcagactatccaaaaatttaatttacaaagggctccaaaaatttaaattgcaaaggttccagcagtgtaaaagcctcagtcagaagagtggtcaataaagtagcacatcacctctggttaca

SEQ ID NO: 253042 - DNA, 179 bp, Homo sapiens
gaaagagttcaaggggaaaagaaggctaatacagtatgtacttaaaaaaagtctatagtgatactagtgaatacttatgtgttgtaacgagaacatttgtgattactttgagcttggggaaatattatttctaagattactttgagcttggggaaataaatgtaaggttggctaagaca

SEQ ID NO: 253043 - DNA, 1115 bp, Homo sapiens
gacttttattttaattaattttgtgggtacatagtaggtgtatatatttatggagtacatgagatgttttgacacaggcaagcaatgtgaaataagcacatcatggagaatgaggtaactatcctctcaatcatttatcctttgagttacaaacaatccatttacattctttatttaaaaatatacaatgaagttattactgactatagtcaccctattgtgctatcaaacagcagatcttattcattctttctatttttttttgtacccattaaccattctcatcccctctccaatccccgactacccttcccagcctctggtaaccatccttctactctttatgtccatgaacttaattgatttgatttttagatcccacaaataagtgagaacatgtgatgtttgtctttctgtgcctggctttgaatatactagtaatagctatgtttctgtcactttttggatctaggtaaaatgaaaaagggcaaaaaacttactgccttgggaaagaatactagattaaaagatgacactaggaatactgctaaatccttgcatttgcttaaatgttgccatcaaggagaaaattcaaacctcaaacttctgacaagtgaagcctggtaggtggggtgatggtggatgatctggatgctttcatcaagagtctgggaattaaatgcctataggcaggcagatcaagtatgtaggtacagcaggcaggatgtcagacgattgacgcagggactcactctgtggcagtggagagcatgccaagtccaaagacttattcaggatgaattttaacaatcactgcaagtccagcaaaacagccctgtgtgggcagatgctgcccacaagccaccgttttttgaagtatgctttcaatgggttaaaggaacccgaaaagaactccctactgtgatcaccagaaaatgtaggtaacccttaagaaccaatgggaaataaaaagaaatgccagaaaattggagatagataaaagcttttcctgatatttaaaatttctagattctagaaattatgtaaatttgacacaaattctgggcagcattataaaatggctcagtagtaggtaattaaacagacggtatttt

SEQ ID NO: 253044 - DNA, 350 bp, Homo sapiens
tgtgcaggtttgatgcataggaaaacatgtgtcctgggggtttgttctacagattatattatcacccaggtattaagcctagtacccattagttatttttccttatcctcctcgtcctcccaccttccaccagggcctgttggggagtgaggggtgaggggagggaacttagaggacaggtcaataggtgcagcaaaccaccatggcacacgtatacctatgtaacaaacctgcaggatctgcacatgtatcccatttttttagaagaaacaaagaaaaagaacactaattagcatatagaattaaaaagtaaaaataaagacaaaaccagaaaaggcagaaggaaacgg

SEQ ID NO: 253045 - DNA, 355 bp, Homo sapiens
cccaaaccagacgcttttccagagaaagacaaatttgccactgatgtttcaactgtctatcctctggagtaatggttcttaaagtgtggccccctttgagagtgaagaagatatcttcataataacacaacctttttctctctcattctctcagaagtgtatatggagttttccagaggctccatgacgtgtgatgatttctctgacagctaatggaatgtgtgaaacagatctgaggatacagctgtcttcaattaagccagacattagttgcagaaatgtaaaacaatgcaactcttctcactaaataattttgtaaaagtattttttcataaaaatatgttatttagcagat

SEQ ID NO: 253046 - DNA, 413 bp, Homo sapiens
atttatagttgtagtgatttatagtatgaaaactgatttgactttcacatatatatgtgtgtgtgtgtgtattcagtcttatggaaaataaagcatatctttgactttttttttttttttttttttttgagatggagtctcgctctgtcgcccaggttggagtgcagtggggtgatcttggctcactgcagcctttgcctcctgggttcaagcgattctcctgcctcagcctcctgatatctttgactttttaatagtgtgtttaaggatagcagtgccagcccaaatttgctttttcattaatatagcaatatttggggtatataacatataaattttcacatttgaacttaaatatggcactgtaacaatattgtcttaatataagaagtacaaagtgactgaaaaaaaaa

SEQ ID NO: 253047 - DNA, 370 bp, Homo sapiens
gccgagcatacacagagtataggaaaaatacgtaaaacagatctttattttgaatttgaaccatgcattctattatgggtcctactccaggtgttgtcccattgtattccaggtgcctttcccagtttcccagggtgcaggcctggtaattgattctctgagtgaccatgtggtcactcccttgtagccagttgacctctctgactctgaccttccacccatcctccgtttccttcgatcctccagaccttggaatctcttctcctcctggcaaggactcctgtcttggatgaactttagtcaggctcctctgagcccacagctaggcctcatccttagtcctggccttggcctgctgagcccagtttta

SEQ ID NO: 253048 - DNA, 801 bp, Homo sapiens
ttttaagaaattaggctaagacttctaaaggttaagttggagttaagtctattgaaagtctccaagtctggaaacagcatgatgttttagaagaacatactttcctttatcagtttgaaaattttgcttatttaaaactaatttcctattagtctcttgttcctcattcccatttacactcttcattgctgtcctggattattacaaaagcctgtttgtttgttttttttctttttgtatctttctagttcattctgtccattgctacttttttataaagaacatttcactaccatatactttctgttccagccacaggaacctgtttgcaggtccctgaacctaccttcattttctagtgctgtgcatttcctcatttctttcgtttggaaagtggtgagaaggtcctctaacttgcttcttgccctcatttctctaagcagagctacaactttgtcctgtctgttcctctggcacttcccatcaccgtgatagcatacttcactgtggctggtttccattcccatttcctctactatagtgagccacttgaggcgagaacccttgtatttccaacattggtgtactcagcatcttgcgtcgaggactcagtaagtattatatttgaattcccactgcaccgctctaattagaattttaaaaatcactttctatctggattgttacacactttttttccccttaattcatttttctccatgtactacccatatgcatcctatataaatttaccaacactcataaaaatcttactcagaaatcttcagaggtttgctaagg

SEQ ID NO: 253049 - DNA, 416 bp, Homo sapiens
gctttcatccttcctccaaccatgtatgcaggtgcgcgggggcggggtgcattctctatgtgggaatcatggaattttgctgtttgtagagaccagtctcccacctctcaacagaatcccctcctctttctgaagacctcttgggaatggggagcttgctgcttcccagggcagctgatcttaggcctggccagagtcgattgttaggaagctcttagaccaaccataaatcctcctcgcagcaccctcccacccgcaaatcacatttcatcactgattgttgtgttcctcttgccttttgaatcagggcagagcattgtcaacttcctttgctactcacagcacccttgaatgttatgagagagtgctcttaggatggaagggacttggagtaaaaatcaaggaactgaatccta

SEQ ID NO: 253050 - DNA, 3939 bp, Homo sapiens
ggtcagggtagttccccaaccctccctttcgtgaattccccctcgtcctcgctcaccttaaaaccatcgtgcatcaccatggcgagttgctccttcactcgcgaccaagcgacaagaagactaagaggtgcagcagcggcggcagcggcagctctagcagcagtggtgaccaccccgcttctttcctcgggaaccccgaccgcactcattgggaccgggtcgtcttgtccgggagccatgtggctctccacggccactggctcccggtcagactccgagtccgaagaggaggacctgcccgtcggggaggaagtctgcaaacgcggctacctgcggaaacagaagcatgggcacaggcgctacttcgtgctcaaactcgagactgctgacgccccagctcggctggaatactacgaaaatgccaggaagttccggcacagtgtccgcgccgcggcggctgcagcagcggcggccgcctctggcgccgcgatccccccgctcattccaccgcggcgcgtgatcaccctataccagtgcttttccgtgagccagcgagcagatgcaaggtaccgacacctcattgctcttttcacccaagacgaatacttcgcgatggtggccgagaacgagtcggagcaggaaagctggtacttgctgctcagccgcctcatcctcgagagcaagcgccgccgctgcggcacgctcggcgcgcagccggacggagagccggccgcgctggcggcggcagcggcggcggagccacccttctataaagatgtgtggcaggtaatagtcaaacccagggggctggggcacagaaaagagctgagcggcgtgttccggctgtgtctaaccgacgaggaggtcgtgtttgtgaggctgaacaccgaagtggccagcgtggtcgtccagctcctgagcatccgtcgctgtggacactcggagcagtatttcttcttggaagtaggcaggtccactgtcatcggtccgggagagctctggatgcaggtcgatgactgtgtggttgcccaaaacatgcatgagctgtttttggagaagatgagagccttgtgtgcagacgaatacagagcccgctgccgcagctacagcatcagcatcggcgcccacctgttaaccctgctgtccgctaggaggcacctgggcttggtgccgctcgagccgggaggctggctcagaaggtcccgctttgagcagttttgccacctcagggccatcggcgacggggaagacgagatgcttttcaccaggcgcttcgtaacacccagcgagcctgtggcccactccaggcgaggaagactgcacctgcccagagggcgcaggtcaaggagagcggtttcagtgccggccagcttttttcgccgcttagcacccagcccagcacgtccccggcaccctgcagaagccccgaacaatggagctcgcctgtcttctgaagtgtctggttctggctctggcaactttggggaggaaggcaatccccagggcaaagaagatcaggaaggaagcggaggtgactacatgcctatgaacaattggggctcaggaaatggccggggctcaggaggtggccagggctcaaatggccaaggctccagtagccatagctcgggaggaaaccagtgttcaggcgagggacagggatcccgaggtggtcagggctcaaatggccagggctcaggaggaaaccagtgctctagagatggccagggcaccgcaggtgggcacggttcaggtggtggccagagacctggaggtgggcatggctcaggtggtggccagggacctggagatggccatggctcaggtggtggcaagaactctggggggggcaaaggctcaggaagtgggaaaggatccgatggtgatggtgaacgtggaaaatctctgaagaaaagatcctattttggcaaattaactcaaagcaagcaacagcaaatgccaccacctccaccacctcctcctccacccccaccagctggaggaactggtggaaaagggaagtctgggggaagattcagactttatttttgtgttgacagaggagccacgaaagaatgcaaagaagccaaagaagtgaaagatgcagagatcccagaaggtgcagctcgaggtccccacagagccagagcttttgatgaagatgaggatgacccatacgtgccaatgaggccaggggtggccacccctcttgtaagctccagtgattatatgccaatggctcctcaaaatgtctctgcttcaaaaaagcgccactctcgatccccttttgaagattcaagagggtacatgatgatgtttcccagagtgagcccaccacctgctccgagtcctccaaaagcacctgatactaataaagaggatgactcaaaggacaatgacagtgagagtgactacatgtttatggctcctggagccggtgcaattccaaaaaaccccagaaatcctcagggtggctcttcctccaaaagttggagctcctacttctctctaccaaacccttttcggagctcacctttgggacagaatgacaacagtgagtatgtgccaatgttacctggaaagttcctggggaggggcctagacaaagaagtctcctataactgggaccccaaagatgcagcttcaaagccttcaggtgagggatcattctcaaagcctggagatgggggatcaccttcaaagccttcagatcatgagcccccaaagaataaagctaagagacctaaccgactttcttttattacaaaaggatataaaatcaagccaaaaccacaaaagcccacacatgagcagagagaagctgacagctctagtgactacgtcaacatggacttcactaaaagagagagcaatacaccagctccctctactcaaggactaccagattcgtggggcataattgctgaacccagacagtcagccttttctaattatgtgaatgttgagtttggagtgccatttccaaatccagcaaacgacctctcagatcttttaagagctataccacgtgccaaccccttatctctggacagtgctaggtggccacttcctccccttcccctcagtgctacaggtagcaatgctattgaggaagagggtgactacattgaagtaattttcaactcagcaatgacaccagccatggctcttgctgacagtgccattcgctatgatgctgaaacaggtcgaatctatgtggtcgacccattttctgagtgctgtatggatatttctctctcccccagccgatgttctgaaccaccacctgtagctaggctgctgcaggaagaagagcaggagagaagacgcccacaaagccgttctcaaagtttctttgcagcagccagagccgctgtctctgcttttccaacagacagcctcgagagagacctttccccatcctcagccccggctgtcgcttcggctgcagagccgactttagccctcagccaagttgtagctgcggcctccgcgctcgccgcagccccgggcatcggcgcagcagccgcagctgctggatttgactccgcctctgcccgctggtttcaacctgttgctaatgctgctgatgccgaagcagtaaggggagcccaagacgttgccggtggctcgaaccctggagcccacaacccatctgcaaaccttgccagaggtgataaccaggctggcggggctgccgctgcagctgccgctccggaaccaccacctcgcagtcgccgggtgccaagacccccggagagagaagattctgacaacgacgacgacactcacgtgagaatggattttgccagacgtgataatcagttcgactctcccaaaagaggtcggtaattttagaattaatttccctaaagtgaatggtcattgtctaatgattcgatgcgctacagtctacagtgttagggtatatttcattaa

SEQ ID NO: 253051 - DNA, 550 bp, Homo sapiens
tcattacagaaagttctattggacagagctgctctaagggataacctctcatttgtgtgagcctgcctcttgttcaactcttgtttgcaagtacactgattttgcacagtgagtgtgttctgtgtgactcctcactaaatgcaagctctgtgagggcagtgattttgctcttctgttctcagcgatgtgtacagggcctgatgggagaagatgcgccaccagcaatatataagggttccaatttctcagtatcctcaccaatatttaatattgtcaatgtttttttattataactattctgttgggtgaagaatggtatctaattgtagctttaatttgcatttccctaacaactaatgatgttgaacatttcttatttgctcattagcattctttgttgttatagctattcaaatttgttgtccattctttagttgtcttgttattgaattgtaagatacttctatgtattctgaatacaagttccttattaaatacctgatgtgcaagtattttctccgtctgtgatctgccttttcattttccagta

SEQ ID NO: 253052 - DNA, 535 bp, Homo sapiens
tatttccattttggggctattatgaataatgttgctgtaaacattcacatttaagtttctaagtggacatatattttcatttctcttgggcagatatctaggaattgaattgctgggtcttattctaagtttatatttaattcgctagttttaagaaactgccaaattgttttccaaagtgcctgtaacattttacatacccaccagcaatatataagggttccaatttctcagtatcctcaccaatatttaatattgtcaatgtttttttattataactattctgttgggtgaagaatggtatctaattgtagctttaatttgcatttccctaacaactaatgatgttgaacatttcttatttgctcattagcattctttgttgttatagctattcaaatttgttgtccattctttagttgtcttgttattgaattgtaagatacttctatgtattctgaatacaagttccttattaaatacctgatgtgcaagtattttctccgtctgtgatctgccttttcattttccagta

SEQ ID NO: 253053 - DNA, 111 bp, Homo sapiens
gagactccatctaaaaagaaagaaagaaacgtaatacccattagtggtcactcctcatttatcccaaccccaacccttggcaaccatgaatcccccttctgtagatttggc

SEQ ID NO: 253054 - DNA, 1240 bp, Homo sapiens
  misc_feature (1026)..(1026): n is a, c, g, or t
  misc_feature (1080)..(1080): n is a, c, g, or t
ggcgaatgagaacacgagtgtgtgtggagagagagaacggaatcaagcgaatgagagcgcgtgtgtgtggagagagagaacggaatcaagcgaatgagaacacgagtgtgtgtggagagagagaacggaatcaggcgaatgagaacacgagtgtgtgtggagagagagaacggaatcaagcgaatgagagcgcgtgtgtgtggagagagaacggaatcaagcgaatgagaacacgagtgtgtgtggagagagagaacggaatcaggcgaatgagaacacgagtgtgtgtggagagagagaacggaatcaagcgaatgaagcgcgtgagttgtgtgtggagggagagaatggaatcaagcgaatgagaacgcgagtgtgtgtggagggagagaatggaatcaagcgaatgagaacgcgagtgtgtgtggagggagagaacggaatcaagcgaatgagagcgcgtgagtgtgtgtggagagagagagaacggaatcaagcgaatgagagcgtgagtgtgtgtggagagagaacggaatcaagcgaatgacagcgcgtgagtgtgtgtggagagagagaacagaatcaagcgaatgagagcgcgtgagtgtgtgtggagagagagaatggaatcaagcgaatgacagcgcgtgagtgtgtgtggagggagagaatggaatcaagcgaatgagaacacgagtgtgtgtggagggagagaacggaatcaagcgaatgagagcgcgtgagtgtgtgtggagagagagaacggaatcaagcgaatgagagcgtgagtgtgtgtggagggagagaacggaatcaagcgaatgagagcgtgagtgtgtgtggagagagaacggaatcaagcgaatgacagcgtgtgagtgtgtgtggagagagagaatggaatcaggctcgtgccgttttcctgggaaagttcacatcaaaaagagtgaatgtggtatatttctaaatgatatggaaaatagagacagatttgtcctttacagaaattactgagtgtgaatacanaggtaatatattggatacaaagacacatatgtattgtgtgttcaattattatgntgtcttgagatttaatattctttccaagagctttttatgaaaccgaaagcttagacctcattttcacctggatcattttcaagctcatgaggtgtcacaggctcttgaccccctgatcttgaagccagaggggcttgatgtatggtaacctaattcttgc

SEQ ID NO: 253055 - DNA, 955 bp, Homo sapiens
  misc_feature (923)..(923): n is a, c, g, or t
ggcgaatgagaacacgagtgtgtgtggagagagagaacggaatcaagcgaatgagagcgcgtgtgtgtggagagagagaacggaatcaagcgaatgagaacacgagtgtgtgtggagagagagaacggaatcaggcgaatgagaacacgagtgtgtgtggagagagagaacggaatcaagcgaatgagagcgcgtgtgtgtggagagagaacggaatcaagcgaatgagaacacgagtgtgtgtggagagagagaacggaatcaggcgaatgagaacacgagtgtgtgtggagagagagaacggaatcaagcgaatgaagcgcgtgagttgtgtgtggagggagagaatggaatcaagcgaatgagaacgcgagtgtgtgtggagggagagaatggaatcaagcgaatgagaacgcgagtgtgtgtggagggagagaacggaatcaagcgaatgagagcgcgtgagtgtgtgtggagagagagagaacggaatcaagcgaatgagagcgtgagtgtgtgtggagagagaacggaatcaagcgaatgacagcgcgtgagtgtgtgtggagagagagaacagaatcaagcgaatggaaaacaaaaaaaaggcaggggttgcaatcctagtctctgataaaacagactttgaaccaacaaagatcaaaagagacaaagaaggccattacataatggtaaagggatcaattcaacaagaagaactaattatcccaaatatatatgtacccaatacaggagcacccagattcataaagcaagtccttagtgacctacaaagagacttagactcccacacaataataatgggagactttaacaccccactgtcaacattagtcatatcaacgagacagaaagttaacaaggatatccaggaattgaactcagctctgcaccaagcggancctaatagacacctattccgtactccccaccc

SEQ ID NO: 253056 - DNA, 866 bp, Homo sapiens
  misc_feature (652)..(652): n is a, c, g, or t
  misc_feature (706)..(706): n is a, c, g, or t
ggcgaatgagaacacgagtgtgtgtggagagagagaacggaatcaagcgaatgagagcgcgtgtgtgtggagagagagaacggaatcaagcgaatgagaacacgagtgtgtgtggagagagagaacggaatcaggcgaatgagaacacgagtgtgtgtggagagagagaacggaatcaagcgaatgagagcgcgtgtgtgtggagagagaacggaatcaagcgaatgagaacacgagtgtgtgtggagagagagaacggaatcaggcgaatgagaacacgagtgtgtgtggagagagagaacggaatcaagcgaatgaagcgcgtgagttgtgtggagagaacggaatcaagcgaatgagagcgcgtgagtgtgtgtggagagagagaacggaatcaagcgaatgagagcgtgagtgtgtgtggagggagagaacggaatcaagcgaatgagagcgtgagtgtgtgtggagagagaacggaatcaagcgaatgacagcgtgtgagtgtgtgtggagagagagaatggaatcaggctcgtgccgttttcctgggaaagttcacatcaaaaagagtgaatgtggtatatttctaaatgatatggaaaatagagacagatttgtcctttacagaaattactgagtgtgaatacanaggtaatatattggatacaaagacacatatgtattgtgtgttcaattattatgntgtcttgagatttaatattctttccaagagctttttatgaaaccgaaagcttagacctcattttcacctggatcattttcaagctcatgaggtgtcacaggctcttgaccccctgatcttgaagccagaggggcttgatgtatggtaacctaattcttgc

SEQ ID NO: 253057 - DNA, 421 bp, Homo sapiens
tataaacttatttcaaaatttattaatcattaagattttgccacatttgtttttatcattcctgttctctctctccttctttccttcctttatccccatttagctatctatatatttttcagtaatgttaataggaagaaatgaaaatagatttgtgtctgattcatctatatacttcttcacaaagcctgccaactgccttgtatatatgtaataaatatttatgaatgaatgaatgatgaataatattcaacctagatcttgtctttgatcttttagatttgtgtttgtacataaatataaaatgtacttattatttttctaaacatatgtaatctttcataaaatactaatctaccccccaaaactatgtccgatcaatgggtctaataaacaaacaacaaattttttttttaatgca

SEQ ID NO: 253058 - DNA, 470 bp, Homo sapiens
ggaatcttgctgtgatgagttttaaatgcctcccatactgaatgttctccaacctctgtctccagctccaatctctggatttagagatctctggatagagttcactctatctagctccacattcctaaaaggatgagaaaacctggaggcctctaagcactttatgctgaattggtttgcacccaaaacatcatagtcctgtagaatttcacgagaactatgtgagcatagttctagtttctttgaatggcacatcactccagctgcttaaaccagggcccagaagagtcttaaatgccttctttacccttttactccatgtccatgcagtctacctgctttcagaacccagaggaaaaggatgtcctcatccccaatttacagcaaaagccatgaatttacagatgacagcttcagaattcatgtcaggatatgtgttctaatctgaataaagcattatttccaaaaaa

SEQ ID NO: 253059 - DNA, 336 bp, Homo sapiens
ctgaattctggatcctctgggacatgaatcggagacaaagaaaagaagaaggaatggagccctgagcattaaagaaagtgaggctgaagctatggtttggaaacgacttagggactttttgggaacagaactatatacacttgagctattgcactgttgtcatagaaaaccccgttttcccacacccacagcaagggcctccatacctacaacgctaagtgtaagtacgcctgtatcttggtctgtcaccccaggctggagtgcagtgatgcaatctcaactcactgtaacatgcccccccctggaagatccaaattcctccaatttataattatt

SEQ ID NO: 253060 - DNA, 183 bp, Homo sapiens
gaaactggggaggaagcaagcaagtatctgaatgtcacatagcaggaatggtttcatgttgtaggttttagaattacccaactcagacctagacttgcagtcacgtagtagtgaaccagaactctaggtagcgaaatcgtcatgtgtttacctaaatatctataaatatgatctacaagaaca

SEQ ID NO: 253061 - DNA, 436 bp, Homo sapiens
tttcatgtttcttctgttagactgtgaattttagcacatagcttattcatctttgatggtgcctagtgcattgcctggcatataacaggtactcaatgaatgaatgaatgaatgaattttcctatgcttaggtccaacaaagtacattgtaaatgattatattgtttttaaatctcaaagaagtcttacacctgaaataaatggagcaacagcaattttggagttaagtttttttgttgttgtttttgttcttttttttttttaggctggagagacaaccacagtcccactaggcttgatgtacttcagttctatcaacaactgatttcacttaggataattttatttatttgtttatttatatattattattattatttgagacaaggtcttgctctgttgcccaggctagagtatggtggtgcactcacatctc

SEQ ID NO: 253062 - DNA, 434 bp, Homo sapiens
catggtagttgttgagtaaatacttattgaataagcggatgggtaggtgttgaatgaagaattaggattgttaataccccatttttctctgaaatggcttttacatacctgttcttgaattgatcttgagttgtccttttcaattctgtgacccatgatgcccagacattgataatcaagtaccagacattggattgaactagttacaaataatgactattcttctatttctctttggcacttaactagcttccataggagaaacttcataccaatgtgaatgactctaaaacaggcaagaaatgggaattttaaacttttaataaatctctttttgccgtgatgaattgaacatggtttcagttttgtttttgtttttgtttttgagacggagtctcgctccagcctgggcaacagagggagactctgtctca

SEQ ID NO: 253063 - DNA, 352 bp, Homo sapiens
gcaagtgccaaagtcagcagtagaattcagctgtgtacattttgaacgagctggaagataagtttatgagcactatacggatgcagattgtacagaaaccagatggccatattgtcctcaaagtcctctggagggcggtagctgacatgaagctccagcatgaggagagtgaagcaatgtcagctgatgatgggaaggcagggtaggatggtgttgaagaacagaggtgtctggcaagcctgtgtctgagcccgggatgcactcattatctgcataaccttgtacaaagtatttaccttctccttctctcatctgtaaagtgagtgcaattttagtacccatgtcatagagt

SEQ ID NO: 253064 - DNA, 395 bp, Homo sapiens
tttggcccagaggcagcggggtaaaatggagagagtgaaggattgaactcagtcctggctctgactcctggttctgctgcttcacggtcgtgtgactttggacagattgcttcacaacttgtgaccctcagtttcctcatcagtaaaactgaagatactgatggtgagaattaagcctgaaatgtgcttcctctttccatcttcgcacagagtgaagcaatgtcagctgatgatgggaaggcagggtaggatggtgttgaagaacagaggtgtctggcaagcctgtgtctgagcccgggatgcactcattatctgcataaccttgtacaaagtatttaccttctccttctctcatctgtaaagtgagtgcaattttagtacccatgtcatagagt

SEQ ID NO: 253065 - DNA, 721 bp, Homo sapiens
gcaggggcttcttgtgagattatctgtcttgaagatatttgtgactaattacaagcagtgtaacctgggagagaagctgttcaggctgaggattttaaaacgatgagatgagagaaaattagcagacatcttttattatgtctactgtctttaaaagtcaactctctggaaaactatttttataggcaaaaagtaggtgggtatgtggtatgattatttgttttacttttgagggcagatgctgtacctcacatcatgagcaatccaccctcatgttagagggaagatggagtcgtttctgggtgtttgtgaactcttggtagagccaactgaatgtcagtttctattattctgtggtgaataataactcaagtaattttcataaagaaacagattgaatttcactgtgaacattttcatcaattcctagaatcttggaatttcgctaattagcgagttggaagtattgtattatgtgggagggggatttaatgaattaaaatactattaattttgtctctttttgttttggttcctgagacatttacattttattgactccttagatatgggcttaagcaagtctctttttaagacaggaagtcattgaacaaattatttgtgagctccaagagtaggctgattttattgcttcaaattatgtgtggggggaaatgtactttgatccaaatgttaattggatactgaagaattgtttctg

SEQ ID NO: 253066 - DNA, 514 bp, Homo sapiens
aaagaatccaatctacagctatcaggccaacctttaagagacctggtgcatttaggaaatttgctgcctggcctagaaaccttttctgtagaatccagagcctgatgctgaggagagtaggaatcagccattggtaggccttttttcttccctcggggctcagccccctcagtggaacagtatgccttggaaagagattttgaaaatgggagacactaggcctgtgggttgtttagaagtacagttggtggcgctatagagagggatggctggggctggagagaataacagcattgcctcgtggtctaggaggttgggagtctctctgcagaagtagtctgtgaaaacctactttgacaacatgatagactgtgactctagggggtaagcttcccaaaagatccagcttaaagccagttgtaccttgaaggctggtgacctgcacagctctccaggtctaggggtcatcattgccctgaaatgattcagctacctcagggactcacagaatact

SEQ ID NO: 253067 - DNA, 408 bp, Homo sapiens
tcctaaggaaaataaattgttatcattatgttcaaacttaacagcgtgatgccaaaaaccgatgctgacacctttttaaaaatcacaagtcgattttatgcaaggtttttcttgcttcccttgctttccccggaccctacagatgttttatatgcttagaagagcacataaatgcaagtagagcctgtgggaatttaggcgaagtcaagagctttttctcctaacatagatctttcccggtagtatgtgagtatgcttgattgttttcttctttctcctgtatatttggaaaaatgattgacttgcaaatgttgtgcaggaaatggagaccagcagggtacaaggctgttgacagaggccattcagttgatctccttgcctcactttgcccttccacattttttttct

SEQ ID NO: 253068 - DNA, 405 bp, Homo sapiens
gaaactaccatatagtgataatgtcttctctggagggcatacctctccagacacatttgctaggttaattcttgctttagaattctagatgtgcagttgtaccataaaagactgagagtctttatcactaataattaacactggcttatgattctctttttcctcttgtccttttaaccctgtcctgtcccctgctcccactgcctctgttctcgtttgttttgcatttttgtttttccttgtaactggcatttcagtagtattaacctgaaattttttttttttttgagacggagtctctctggctctgtcgcccaggctggactgcagtggtgcaatcttggctcactgcaagttccgcctcccgggttcatgccattctcctgcctcagcctacctgaatta

SEQ ID NO: 253069 - DNA, 121 bp, Homo sapiens
tcttgcccctttttcttacttttgtcctcttcagtaatgatgtcactctctgaaggacagggctgttttaccattttgggtctgcctcttggttttggaatcttgacttccgtagctgcag

SEQ ID NO: 253070 - DNA, 1426 bp, Homo sapiens
atggcaagaagttcgatgaagctggaaaatagagtacaaagggaaccaaaaggtcaggttacagaaatagggtgtgtactggtcatctacggctccataacaaaccactcaaaaatatagggacctaaagcaacagccattttatttgttcatgatttgatgagtgagttagcgttttgtactgagctcagctgagtacctcccctactagtctcacttggggtactcatatgggtgcagtcatttggatgttagatgggaaacaacttttccccatattcccacagtctaactgggcctcctcacatggcaacaccatgcactaagccagtgagaacctacaagacagaagcaggccacgtgcggtcacacctgtaattccaacactttgggaggccaaggcgggcggatcacttgaggtcaggagttaagaccagcctggccaacatgttgaaaccccgtctctactaaaaatataacaattagctgggcatggtggtatgcatctgtaatcccagctactcaggaggttgaggcaagagaatcgcttgaacccgggaggtggatgctgcagtgagccatgatcatgccactgcactccagcctgggcgacagagtgagactctgtcttaaaaaagacaaaagcagcaaaagcagaaccccttgaagcctgggaattcacacattccttgaaggcttggaattcacgcactgtcacttctggttaaaataagtcacgtggctagcccagattcaaggggtgggaaaatggattctacttgatcggagaagcagcaaagtctcattgccaaagggtgtgtgtacagggaggggaatcgtagctgtcttctcatactgtcagaagcagattgtgaagacttgcacacaaagtaaacagtttggaatttatctcaagggcacaggaaactatcaaagtttggctttttggtttttgttgaaagcactaacataaaaaataagattttctactcagcaccccttattcaggaaccgttcctctcttgtaatccacatggttattgcagaaaccatcacattaggagaatggatagaatggactaccttttggcaagttgtttgaattagggccaatcagaatccttctttttggtgtttttctcctgaaaatgagagttggtctcttgctaagcctgaagctttaagatgtaaatttgggggagtgctaggtggctgtgcttgcagctatgtgaaaaaagcactccgcacaaagaagcagaggcgaaagatgagaatcctgatggccttggagtccgctcgttctgatatccctctctgcctcagcttcaagtttggtttgtctcttggaaccaaaggagtctcgactactataaagagagcttaccacctgcaagtagggagttgcaagtgacaacataaaaatcca

SEQ ID NO: 253071 - DNA, 1064 bp, Homo sapiens
atggcaagaagttcgatgaagctggaaaatagagtacaaagggaaccaaaaggtcaggttacagaaatagggtgtgtactggtcatctacggctccataacaaaccactcaaaaatatagggacctaaagcaacagccattttatttgttcatgatttgatgagtgagttagcgttttgtactgagctcagctgagtacctcccctactagtctcacttggggtactcatatgggtgcagtcatttggatgttagatgggaaacaacttttccccatattcccacagtctaactgggcctcctcacatggcaacaccatgcactaagccagtgagaacctacaagacagaagcaggccacgtgcggtcacacctgtaattccaacactttgggaggccaaggcgggcggatcacttgaggtcaggagttaagaccagcctggccaacatgttgaaaccccgtctctactaaaaatataacaattagctgggcatggtggtatgcatctgtaatcccagctactcaggaggttgaggcaagagaatcgcttgaacccgggaggtggatgctgcagtgagccatgatcatgccactgcactccagcctgggcgacagagtgagactctgtcttaaaaaagacaaaagcagcaaaagcagaaccccttgaagcctgggaattcacacattccttgaaggcttggaattcacgcactgtcacttctggttaaaataagtcacgtggctagcccagattcaaggggtgggaaaatggattctacttgatcggagaagcagcaaagtctcattgccaaagggtgtgtgtacagggaggggaatcgtagctgtcttctcatactgtcagaagcagattgtgaagacttgcacacaaagtaaacagtttggaatttatctcaagggcacaggaaactatcaaagtttggctttttggtttttgttgaaagcactaacatagatccacatgggtattgcacaaaccatgaccattgggagaactggatgggcctacctttgggcaagtgagtggattagtgccaatcgtccct

SEQ ID NO: 253072 - DNA, 1717 bp, Homo sapiens
attgagaaaggagttggagctaaatgtgtcattctaatcctatctaatggactaatttgtcaggcacagatagctctgttgattgtataaagagctcagcctttaatggctctttttaggtctccagattagcttcagattgttatgtgcaacacaatgcattgacacaattaagtacttgttctctggcatcatgctgcttgatataaatcctagtgttggcacttcctttctccctaatcatccactttttttccacatttgataactcctttatatgtatttcttagaatttttttttcactgaacttggcgctttctgagctctcccatataccagcattgcgtttcattaccacatgacagtttgatctctctgctaagctccaaacctttgtttctagctgcttatcggtcacctccttctggaatttcatagtcacagcaaatttagtttgactaacacaacacttatgttccccaaatacttcgtattttggcgaattgtattttcattcaactggtttttcaagcaagaacctgtaatttgtaactttttcttaatcaactctgttccttctatgtccctaatagctattcttccttttgtgtattgcaattctctgctggttgatctctctgcccttaaaaacttaccccttctccattccccactgccaataccttgctacaaaggatttcttttgtcctacccgtcccagctcaacagtgtagtttgcagatgaataacacagactggatttgagaataaacaggtaaatacaggcacaatagacaggcaaaaaaaaaaaattgttgaatgcaaaaaggaatgaataaatggcaagctgccaaggaagtgcaaatatttcctcaggaaaatctttcctgacgcctaaagcaaaatcagatggtgtttctttgtgtacctgtaatcccccttgcaatttctcttaattgtcatgtgtattttaatcatggcagtcttcttcactagtcattgaccatcctgagaagagggaatatttaaaaaaaaaaattattcttccatgtggtgcaaaccaaaataatggaattatggagaggttagagcaggaatgcagtttgtgtacattggaaatgaatcttagcatataatctatgaaaattagccatgttctttgatgggaaataaatttgcatcttgtgttaggatcttctttaacgttaagaatatgtgcaaagtgtgcttaaaaactgtttttttcctttaaaaatgttttatccagttttttgtacacacatacacaaaaacatacacaatggccatatcattcagcctttttcatcttttcacccccttttctgcatattggtatatctgcaacccatattaatatcctagatttttgtttatacacgtataatccagttactagttgtaacacgtggcacattgccagattacttagaataaagctgtcacatttgaccttttcaccagcaatgtggaatgataacaatttcttcacatcttctccagcagtaggtattttaattaattcaatttttgccagctagattgggcatgaaatgatgccttattattattttaacttgtacttcctcctctacgtttaaaaactattgtctgatcattatgataattaaggaacaaactaatgaaaatgtaagcatcattgttttcttaaagatacactttgaaaactacaatttc

SEQ ID NO: 253073 - DNA, 346 bp, Homo sapiens
agaaacctgcacccctcagccatcaacccctaggccccatccaccctccagccccaagcaactactcacctactttctatctccatgaatatgcctattctggatattttatataaatggaatcatataatgtgtggtcctttgttactggcttcttttacttaacatatttccaatgttcatccatgttgtagcatatattgtacttcattcctttctctgggcaaataagagttccttgtatggatatactgcattttgtttatcgttaatcagttgatggatattgtattaatctgttctcatgctgctaataaagacatacccaggctggctaatttataaa

SEQ ID NO: 253074 - DNA, 531 bp, Homo sapiens
ctgcagaacccggtgacagcatggagagatcaaggagtgtcccgcccagcacactgcagggaccagcagacaaatccacgcggcctgcctgagcgtgcagtgaccccgcctgatctctgatacagctgttcgcaactcctgccagagagcttgttatcggcacagggtggacaaaagaaggaaaggaagagaacgatggcttcccctcagttccataatctaagctctactgcggtaatatccagctgagaaaagacacaggacaatcatttgggcactttatttccatggtaacaaatagaagattcttccagatgtttgctaacatcgtggaggtaacatgtctggaccgttgtctgatattcagtttttatagctggggagacatggctttagctttgggtaaactattctatctcttcctcctcttcctctgcctccttctccttcttgtgttctccatgagcataaaaccaaaatatacttgatgctttgttgtaaaataaacagatgataaatagcagtctctgt

SEQ ID NO: 253075 - DNA, 423 bp, Homo sapiens
atgagagtttgtgcatgtctttgtctctccagactgtaaagtccttaatgccaaagattgtgtcctattgatctttgccaaacaaccctttgacaacagataatgtagtaaataacctattgtatagtgaagggaataccgatttcgtatgtctgcagtttggcaaggggtgaacttgtgatggttctttttatgtgtcaacttggctgagccacaatgcccagatatttggtcaaacattattctgggtgtttttatgaaggtgctttttatatgagacattgcacctgggcaaaatgaaagatttttgaatacccaacttgaactagggactttaagagcaccattacattttttcattcatgttttgttaaacattttaatcatttttttatttgcaaaggaagagaaaccactgatcga

SEQ ID NO: 253076 - DNA, 443 bp, Homo sapiens
  misc_feature (113)..(113): n is a, c, g, or t
gctgcctgtcttttgggttcaaatgctataaaacaccaaaggtcccctgctggcaaataaaataataaatttttttattatcattctgcaaaaggcgacgaagggctaaaaanatccccctctatacttcgagatgctcttttaatctgagaattttatatataactattgcaagaattatatacacatgcatacacattgtgtgtctatgtgtgtgtagtatgtatgttgtatgtatatcacagagatgacttatctactttaaatttataaataagtataataattaggatttcatcccagaccaagaacccaattaaaggaagagaatacctggggaatttcggtctttttcctataatagtaactactatttaaaaagggctttttaaatgccaagtaccacatgctattgttttatatggtgtctcatttcaatgaac

SEQ ID NO: 253077 - DNA, 2539 bp, Homo sapiens
  misc_feature (1624)..(1624): n is a, c, g, or t
agtgctaggaacctgcgcccggctgagctgagcgaggcgagaggagaaagcgaggcccggggacgggactgagagctctgaaaggagggaggcggctcccgagtactccgcgccgggcaggccccggcctcgcctgttcgcccatttttaaggctcgagttagaggccacctcctccgagaagccttcggtgacaccacctctcccagacggttcccctttctgattcccacagcattttccaaccattcacggtcagaaccactcaccaggacgtgttgtcaccattttaccgctttgcctcgtctcttaactagacgaaatgggttccttttggctctttggaaagggaggctgtcttctatttatttccgtggtaatcccacctcccacaacaagttccattctacagcaatgtcttttctcttgctgagaaccattcaagtctaagttttctgtcctggttgctcatctcgcccacttgcacagcccacctgtgtggccgactcaggattgacccacctgctctcttcaggccatattcccacgcagaagtgggtcccactcctcaggcctctgtgctggccccgtctgtggggttagcaagcagccctgctctccatttccagctcagaagcaactggatcgttacctcattggtgacaacttgactgtgctgcccagagctgataagaaacatcacccggggaagaccagctgcctcttccttgcttcctaatcagggtggaaatactgctaaatatatcacaactctttgcaagcatcgttgggtaatgatcgggacatctttgtgggttccctatcattttctcacaaagttgagcctttcaaggtcagttctaggccagccagtctgggagtcattctttagaatcagaagagaatttaagaagaggagaagataagattgtctctaaaacctgctaatgagaactacaggaaggtggggatgctagctacttttaatatttctggtttgaaccccttcctccaccccagaatgaactgagagtaggtacagaaatagataatgcaaagacggttagggttgagggtaagcagaaaactacccatctagaccgaaggaaggcttgctaacatatcagtaagcaaacagctttctaatctgcaggtaacaagttttacatccctgaggacactttttgagataggactttgtttgtttgtttgtttgttgttttttgtttttttgagacagagtctcgctctgtctcccaggctggagtgcagtggcatggtctcggctcactgcaaccttcacctcccaggatcaaacgattctcctgcctcagcctcctgaatagctgggattacaggtgcatgccaccatgtccagctatttttgtgtgtgtgtgtgtgtgtgtgtgtgtgtgtgtatttttagtagagatggggtttcatcatgttggtcaggctggtctgaaactcctgacctcgtgatctgccctcctcagcctcccaaagtgctgggattataggcgtgagccaccgggcccagcctggggctttttgagaccctattgaaggctgaggaagaatctggaagctaaagagtaacccattccaccacctgctctgaaganagaagaagcaaaaaaagattaaattgtacaaaaagcacttaaattagacaacagaagaatttcctgatacaaagtgggtgtctaagatgtgttaaacaagatgcctgctccagccaggactcagacactcctggatggagagcatcttcacagtttgggataaaagtgactatacagagtggtggagtgaaggctgcaggcccctccccaaggtggcatctaaccccggaggtatcaggacctcagaggctacccacatgatttccagctgatgagcagaaatagctgtggcaggtgcaggcttcacttgctgccaccaacatgggagctcaccaaacacccagtggccaaaagaaccagggtctctctaagccctgggctcaccgccaggcaagcttgggtgcttgggagggccgtcgttcttcacagtgcagcccctggatttcttctcaatttactcaactctctctcttgaatcccatctgtgcagcttagaagtcacaaattagaaccccccaaggcaaagctgaccatagatacaaatggttttgtctgtatagtgtttaagcacttaaaaaattcattgtgaacatttaataattagaaagtgtcaaaatgaaaatatctatagtttctctctaaaaaccagaagatctgttaacactgatcccacacttctatttggcaatgactggcccctaagacagggggtacgtcctctagctcaccacagtctccacctttacctactgcatccctgctgagacaaagtggtacatgccatttattaaggatgaatgctgttttttttaattatacttaatcctcatttgcattacctgccttcattctggaggtatttgagtttgcatctcctgataaagaataaatctcaaaattgtcatctctaacttc

SEQ ID NO: 253078 - DNA, 313 bp, Homo sapiens
tccctctctccctcccttccttccttccttccttccttccttgtttccttctttcctcctctcatttatttattcaacagccattgagcacctcctgtgtcaagcctgtaggactcaagaggagagagctcatgcatgaacagtgcctagcagggaagaattggcaccggggagaagaacagaggaagttacaggggttagaggagggggatgttttccagctgacaatgatgggggtatcagaaaggctcttggtgagattgcaccattgcactccagcctggcaacaagagtgaaactccatctcaaaaaa

SEQ ID NO: 253079 - DNA, 504 bp, Homo sapiens
tatataggtttaagtctccttcataagattttctttcttctaaacctttggaatatgccatgcttttcaaaaagccccactcattatttttatgatagtggaataaaagtctccaatttgtcaagctcattattcaagccttccaggattgtttgcagttttaaaataaactgctgggggttttatgcatcttgcaatatgagtacttaattaaaattaaaaagggggccatgcatctatctattctattaaggtcgtatataaataaatgattttattgggattttcagtgtatttagagtaatctatacttaatgagagggacttgtacttttcatttctttgtactatttttcagcctttcctgaacagtaaatgttttaaaaaaaactatacccttattccttggtctctaagaactgcgcccggcctcatgcaccgttcttaatgaataatgtgatgtttacaacaaccctgtgctcaaccaaaaaaaaaaacacaaaa

SEQ ID NO: 253080 - DNA, 128 bp, Homo sapiens
tgtcaacataaatgtctcttcttctggatttttctctgcctcagtttttttggcctcttgcctgggtcttgggaaaataaatcaatgataaaacagagtaaaatcagtaaataaacagataataaata

SEQ ID NO: 253081 - DNA, 768 bp, Homo sapiens
tagaacatccagttctgttgcatattaatcagtgttaattaactaatactgttcaaaaactcaagttgtgtttaaattagcagtcaagtaaatctctattcttatggttagctaattctgcaggctattatacatgtgttgtttttttcatggttttagaaatttcatttaattatttaaaaaaccaacagtgtttgcttacaaaaggcatagggctgaaattgtaaattatttttaaatatgaattgtgtgagaatcaaaacaaaggaattacctctgaaacttcatctccaaaggcttcccttgtgtttagatctggaatctcccaaggaattgttttaggtctcactgtgatgagttgatcataaactttagacatttgtgtgcattaaggaaatttcccagaccggggaatttactttaggccttacttatctggtaaatgtgtttgaggactgatctttggaaatcaggaagtttttggataatataggaacagttccagatgcttcccagagatttaaatcagttcaaggcacctggactgctcagagactgcaagaccctacttggcataatgaaatgtagtatagtctaagtagtgcatacgttttacatttgttcatgagctcaaagctgtcaaaatctgcatgtttgctggggttccacaatttaatgagtaagggagtgaacccccaccagcagctagtgggtgtgatgagctgatgggcagatgatctagtgctgtatatgcagagttggtcccac

SEQ ID NO: 253082 - DNA, 957 bp, Homo sapiens
gcatcttgggctgcactttgaccacttgctccggtaagagagaatactcacacatacaacaggttccatgaaatggtggcaaggaacagcagacaccttggattcatggtgagctggtttctcaaggctcaggaaagctgcccagggcaggtggagtctcatctgcgtgtgcctcacttgcaccccagatgcaggaccctggaaagtagccgtctctgggttttctactccagggataacatgacctgctggattaatgtgctgaaggacatcctgtttctagcggggactggaacagagcctaggccttatctcgggatgttgcattcccagcacattctagttattcttaaaactacaagtgagaaagcgggaggactggtttggtccaaggccacctagggaactgtcctgcaccagatgcaaaatatcactcatcagaggtcctcttaatacccatctctaatcctgggctggcaacattgaagtatacatctttgttcaggagtctgtcttcttactaaactgtacactccttacagacagaaactggcttttatttattttgtatcccaagcagggtagaaatgtacatcagatattacacgttggcatatttaactacattaaatccttcttccagaaaatcatactgtgtgctggagaccagaaagctaacaatattaagggtagttattcagactccctgagagtcaagctgcatcttgaaccaacttctccaaacagactcagccacgtgagagctgaaaaacacagtatcacaaggcagggccatgctcctgctgacaaacaagcacagtcatgaacacacttggctgttctgtgcagctggaatcccagtttccagggtctagctacatgggtgtcagcctagatcctgggcttccagcccttctattttgtaagcacctaattacccctattaagtagctttct

SEQ ID NO: 253083 - DNA, 367 bp, Homo sapiens
aaagaaaaaaaaaaaactaaaaggcagaaatgaaatccacaagcagacagcccggcgccgtgtcctgggcctcgtagttaaagattgacccctgacctaatcggttatgttatctatagattacagacattgtatggaaaagcactgtgacaatccctgtcctgttctgttctgttctaactaccggagcatgcagcccccagtcacgtacccactgcttgctcaatcgatcacgaccctctcatgcacacccccttagagttgtgagcccttaaaagggacaggaattgctcactcggggagctcagctcttgagacaggagtcttgctgacgcccccagccgaataaaccccttccttctttaac

SEQ ID NO: 253084 - DNA, 282 bp, Homo sapiens
tttattattgagaaggagtctggctctgtcgcccaggctggaatgcagtggcgcgatctcggctcactgcaagctcccaggttcacgccattctcctgcctcagcctcctgagtagctgggactacaggtgccgccaccccgcccggctaagggaagcccttcttagatgacctcaatccccatacattccttctccctggagacgtcatttccacgttccagcgcagataatcgctcatgcaccatttgttcctgtaaatttagcaatgcacaatcaacgc

SEQ ID NO: 253085 - DNA, 574 bp, Homo sapiens
tgggggcacttatgcacgcttactatcttacaagctttgagtgcaagagatgagagtcaaatctgaccaagatgttgatgttggataagagaattctctgctccccacctctaagttgcccgccaatcgaattcgattggcgggcaacatagggagaccctgcttctgcaaaaatccaaaaactagctgggcatggtggcttatgcccatgcttcccgctacttgtgaggctgagacacgaggatcacttgagccaaggaggtcagcgctgcagagagctgtgatactgctactgcactccagcctgggttacagagtcagactctgtctcagtatgtaaatgaataaggtctgggagtggtagcttatgcctgtaatcccagcactttaggagaccgaggtgtgtggatcacttgaggtcaggaattcgagaccagcctggctcacatgatgaaaccccaactctactaaaaatacaaaaattaactaggtgtggtggcacacgcttgtcgtcccagctattcaggagactgaggcaggagaatcacttgaacttggtaggtgcaatctagcg

SEQ ID NO: 253086 - DNA, 766 bp, Homo sapiens
agcaggttccaccctcttgcgggcgagcgctggctaccattggactgtccggcgcgaggggaagggtgatctataaatagggaatgggtacacgtgacagtttggcagctgctcctacccctccaccccgcccaaccttcagcttctgaggctgcgcagggggagaaaagggttagggggtcgagccctgacttcgcctcctcttccaagaagccttcccagacactcagctgtaaaaccagacggacgtcctccgatgaaattgtttctacttagggccggcttcaccggcttggaatccacttagaagggtcttcgcgcttggttgaatgttctgcaatttctgtcttgaaatttttagtttttgagcaaggggccccttattttcactttgcactaggccaaatatgtagccggtcttgctgctaagagtctaagatcgattgcattccaaattctggaattataagaccctgggtggaagattctatgctttgaccagaagagagtctaagcagcttttgtctcccaggtgctaggaggatgtgtgctcatcattcttccattccaggggcctttgttctacgttctaaggggctttgttctcagccttctatgatgctctattctcaacgttctctggtcctaggagtctgagcctgacattcgtttccaaggcttcctgctgtctctccaggctccgcaagcagggctggggcaccctcaggcggccaatctgtatcactacgccgagcctgcctctacc

SEQ ID NO: 253087 - DNA, 895 bp, Homo sapiens
agcaggttccaccctcttgcgggcgagcgctggctaccattggactgtccggcgcgaggggaagggtgatctataaatagggaatgggtacacgtgacagtttggcagctgctcctacccctccaccccgcccaaccttcagcttctgaggctgcgcagggggagaaaagggttagggggtcgagccctgacttcgcctcctcttccaagaagccttcccagacactcagctgtaaaaccagacggacgtcctccgatgaaattgtttctacttagggccggcttcaccggcttggaatccacttagaagggtcttcgcgcttggttgaatgttctgcaatttctgtcttgaaatttttagtttttgagcaaggggccccttattttcactttgcactaggccaaatatgtagccggtcttgctgctaagagtctaagatcgattgcattccaaattctggaattataagaccctgggtggaagattctatgctttgaccagaagagagtctaagcagcttttgtctcccaggtgctaggaggatgtgtgctcatcattcttccattccaggggcctttgttctacgttctaaggggctttgttctcagccttctatgatgctctattctcaacgttctctggtcctaggagtctgagcctgacattcgtttccaaggcttcctgctgtctctccaggctccgcaagcagggctggggcaccctcaggtatgtctctctactggcagggcagtacttggctgtctcagtcaccactgtgtccccagcatcacccagctcagtgacacaaaggaatgagtgaatatatacttctctatttcatagatagagaagtcatcacatcaacataaaataaaatactgaatgttacgtatc

SEQ ID NO: 253088 - DNA, 443 bp, Homo sapiens
aagcggggcaactagcactatccgatttttggacacatcacaaagccacagaaggaaagagaatatgatgatgacaaaagagcagattaatgaaccaatggattatgacagagagctcagaaacagacccgtatatataggataacttgacataaaccagccaaggttgggttgtcacgtgatgggattaagaaaactggcttgctctatggagaaaaataggttcttatcacacttgaaacaaagatagaatccaaattaaagacctaaaaatgaacagtaaaactatgaagctattatggaagaaaatgtaggagaacatcctggtgatttggggacagggaaggagttcttaagacaagccacacaccataaagcaaaacattggcaagttctgcattaaaagtaaagatttctgttcaacaaagggcaccacagaaaaa

SEQ ID NO: 253089 - DNA, 1232 bp, Homo sapiens
aaagttatttgtgttcctctctgccaccctgccctcgtgccttcagctgtcccttctcccagtgccagaggaggcttggattgagcacccatgctctatggacaacagcaagttgagcagaccttaacatcattcccggggaggcaacgggtcatctgctggctggggttatcaaaggccccatctcctactcctctcccatgccccacagtgaagagccccagagctggctgtggttatgaagccggctgccatgtgggcgacctggagtcagagcacggggcagtcacatatgacaattggttgaaatatcacagccactctccccccacccccactggtgatctatgggctgcgtgccctgtaaaaattatttatcggggcctcagagtgtcctgatttagtgccgctgcctctggggccttggggcctgcctgtccaccagagtctaagcgttaaacgacgctaaaaagttaaacagccaacgctgggggctcactcgaggaggcaccataaagctgtcggagctgcttaaatcaggagcgaggattccctgggacgtcttctctccatacgccgcaagccaagaaggctctccttacccctctgccactcacccatacccagaagcccacagagggcaggggacacgtgggccgggggcctggaacagagcccaaaaggaggccacggatgacctcctctgcagggctttctccagcagaacaggggccgtggctcaagagggtaggggtcatgttgtccagctcaccaactctgggcaggggtctccttgttccggtccagtttttaaagacttccaacaaaaggcactgccaaagtctctcccaggggcccctggggagaagttgtttcccaagtctgtctcacttcaatccacgcttctgtgtgttgaatccactggaactcagtgtcttcccactcaggtttggagaggctgtgctggccacaccagcctgtgacttcttgcctcctttcacccctccacacccacttgcatggctctctgaggaacagagccccacccttccatcaccaccctccgccaacgcacccctgggtgctggcataacacgcaagcttcacagatggcttttctcagctgaagcccagtccctgctgccaccacccggccgccgagcaagagggaaggtgggtctctgcatgctgcctatcacaccttctttcagcagcaataaaactcactctta

SEQ ID NO: 253090 - DNA, 417 bp, Homo sapiens
ttttatgttgttctgtattttgcttactgtaacactttctgaaatgtttgctttcttaagtaaataatgaaaacatttttggtataggccagcacatccagctataatgagtaaataggtaccttagatggattcagaaagaaaatgatgcacaaaatgcatcataaattgcaaaatggttggaatttttgctgagtagaatttgtggaatttatgaattcatggattcatgtggcttatggattcataatttcatctttttccctcgtttaccttagagatgttataagtattaatgagataatatctgtaaaaatccttgagcttctcagaagaaaagggcttataaacatagatactaattggattatgctgagaatgcagctagaaaaataccccaaataatgttatatattg

SEQ ID NO: 253091 - DNA, 1060 bp, Homo sapiens
  misc_feature (1050)..(1050): n is a, c, g, or t
gaccgtttttcagccctttccaaccgagtattcatagaaacagaagaggaacgttctagatgtataacaaaaagctgcccatccccacagtgaaaccactttgaagacatcactttaaaattcatgtgaattcggccgggtgtggaggctcacacctgtaatcccagcactttgggaggctgaggtgtgtggatcacttaaagtcaggagtttgagaccaggcaacatggtgaaaccccatctctactaaaacagaaaaattagccaggtgtggtagtgcacccctgtaattccagctacttggggggctgaggcatgagaatcacttgaacccgagagacggagcttgcagtgagccgcagtcgcgccactgcactccatactgggtgacagagtgagactccgtctcagaaaagaaaaaaaaaaatgtgaattcagttgggtgtagtggctcaggcctcaggcctgtaatcccagcactttgggaggtcaaggtgggaggatcacgaggccaggagttcgagaccagactaaacaacatagcaagacctcatctctaaaaaaataaataaataaaaaacaaaaacttgtgtgaatttgcattctattttacaatataaccaaatgatctcggccttcacaccatcttcttggaaacctctgcaccatgagagcctagtggaggaagcgaatgcgcaggctgaagcgcaaaagaagaaagatgaggcagaggtccaagtaaaccacaagcttatgcacccatggaggctacaggagcagaaacatggaatccagaggctggggatgctggtacagttattgggctgcatgctactgtctagagcttgtttcagtgcatctagaacttcatctccatctggtcgccaagaccacctctgagactcaccttgctcataaccaaaactgcatgttggtcctttgctccggacctgtgatattctggactatttctgtgttcactggtggccgagtgtaacaaccatataataaatcacctcttctgctgtcttacgtttcaagtgtcgggancctcagatca

SEQ ID NO: 253092 - DNA, 505 bp, Homo sapiens
tttgatttcatcactgcagcgtggctgatttttttattcatggttctctgtgggtccagtctggccctgctggtcaggatcctctgtggctccaggggtctgccactgaccaggctgtacctgaccatcctgctcacagtgctggtgttcctcctctgcggcctgccctttggcattcagtggttcctaatattatggatctggaaggattctgatgtcttattttgtcatattcatccagtttcagttgtcctgtcatctcttaacagcagtgccaaccccatcatttacttcttcgtgggctcttttaggaagcagtggcggctgcagcagccgatcctcaagctggctctccagagggctctgcaggacattgctgaggtggatcacagtgaaggatgcttccgtcagggcaccccggagatgtcgagaagcagtctggtgtagagatggacagcctctacttccatcagatatatgtggctttgagaggcaactttgcccc

SEQ ID NO: 253093 - DNA, 521 bp, Homo sapiens
taagaacagttttccctaaattggcatccacagaggaaggccccataacatgcactcctgtagtgtgaccaggccttgccatcccctcgctgggtaaccttgggagtcaagaccccctctggcccatcccctctatcatctcagtcccccagggctctgacacaggcagaagattctcaaacactatcgaattttttttctccaaactagatgtttgtggtggactgaatgtttgtgtcccctgaaatacctatgttgaaacccagtacagttaaatgaggtcataagagcggagccctgatcccataggattgtgtccttatgagaagagacaccggagagcctgagctccctcttctcccaccccaagcatatgtccaggaaagaccatgtgagctcactgtgaaaagttggcccagcccaaggagagagcccttaccagacaccaacactgccggcaacttgatctccgacttccagcctccagaaatgtgcaaaataaatttctgttgcttaagcca

SEQ ID NO: 253094 - DNA, 579 bp, Homo sapiens
caggataagagctatgagacatatggccaaaatgagaacaaggccaagtggaagagaccgccattctcagtagacggccaggccaggttaggggctggccctttcctctccacagttagctctcacatttttaaatccaatgtaaaatcccaaacctgttactaatagtcggagaagggggaagctataatgacaaggaaacatgggaacaagggcatgagaggaacagggatattagaagaggattctggttaacattgaaattgagtttgctttccaatttctacaattgtttttaaataaatcatcgtgtggggggtggttaaatttgctgtctaacttactgtcatagaaaagtaaagccaaaagcccacttattaaagaagtgaaaagatgagctttggtttgttgaaaaactagttaaaaaaaaaaaaaacttcattcattataattgtaggaaaaatatttctcaagctagagaagaagaaagatattacctaagaccttagtataaaggtattattgtgcagtgattaaagagcatataccctagggccaaatctcctgggttcaaatcta

SEQ ID NO: 253095 - DNA, 524 bp, Homo sapiens
ccaggctggagtgcagtggcacaatctcggctcactacaacctcctgggttcaagcgattctctagcctcagcctcctgagtagctgggactacaggcgcccaccactccaagctaatttttgtatttttagtagacatggggtttcaccatgttggccaggctggtcttgaacttctgacctcaagtgatccacctgttgcagcctcccaaagtgctgggattacaggtgtgatccatcgcacccagccccctaggattttctatatggaaggttatgtcttcttcaaacagaaatactttaaactcttcctttctaatctagatgcctttatttccttttcttgcctgatttctctggctagtacctccagtacagtgttgagcaggagtagcaagataagacatttttgtcttgttcttaggtataaagcttttaatctttcatcattacatatgcggttaccttgggcttttcatagatgccccttattaactcaaagaagttcccttctgtttctagtt

SEQ ID NO: 253096 - DNA, 414 bp, Homo sapiens
atggtacacagcctgttctctctggaacgggagaagaaactgttaggctaggatttcctgtggatccacgaaaggtgctaatagtagctggccatcacaactggattgtagctgcatatgcccattttgctgtgtgttacagaatcaaagaatcttcaggatggcagcaagtgtttacgagcccatatttggattggactatcgaacgagtagctttattagcaagggcaagaaggactgagagctttcacagttatagggacttccagactattaatttgaacagaaatgtagaaagagctgtccctgaaaatggtaacttgggtccaatacaagctgaagtgaaaggggcaacaggggaatgtaatatatctgagagaaagtctcctggagtagaaataaaaagtttgagag

SEQ ID NO: 253097 - DNA, 658 bp, Homo sapiens
ccagctcccccagcgcctgctgccgggtgcactgagggcagggattgaggctgtgctgctgagcttacacccgggcttccgtgtcggcttcaacagcctgggaggcttggcctcggtgaaccacctccacctgcatggctattacctggcccacagactgcccgtggagcaggcgccaagcgagcccctggaccctggaggccatttgcatctgctccaggacctcccagctcctggcttcctcttttacactcgtgggccagggcctgacttggagtccttgataagcagggtatgtcgggccactgattatctgactgaccatgagattgctcataacttgtttgtcacccggggagctccgccgggaaagacatcaccttcctcagccctcacaggggtccgagtaattctgtgggcccggaagtccagctttgggataaaggacggtgaagctttcaatgttgccctctgtgagctggctgggcacctccctgtcaaaacatcccaggacttcagcagcctgacagaggcagctgctgtggccctcattcaggactgtcggctgcccccatcccaggcagaagacgtacaggcagcactggtggccctgatgtcccaggaagagcaataatacttctggatgtatttatgttct

SEQ ID NO: 253098 - DNA, 462 bp, Homo sapiens
gcacaggctgcgctgtttacgtttggtgcctcatcagctgcctgggcacttccggtcacccttgccccctgtcccctgggcagctcggagaactctgtccagagggctgtttaagccccacagctggtgtggacgcaggattggtgtgggtaggcgggcacagggctccagaggctcaccctggcctccttctcctggcccagggcagcagcacggagcctccacaggcacagctccatcgttacaatggcctctttagacccagctcctgcctcccagccttctctccaggccctgaactttctgaagtcaacctcaccaggtccagctcatgcttctttgcagcctctccaggcccagctcctgcatcttggtggcccctccaggcccagcctctgcctcccgtcggcctctacagtcccaacatctgcctcatagcagattcttgaggcccagcatctg

SEQ ID NO: 253099 - DNA, 1407 bp, Homo sapiens
  misc_feature (384)..(384): n is a, c, g, or t
  misc_feature (679)..(679): n is a, c, g, or t
  misc_feature (707)..(707): n is a, c, g, or t
  misc_feature (747)..(747): n is a, c, g, or t
  misc_feature (948)..(948): n is a, c, g, or t
  misc_feature (1142)..(1142): n is a, c, g, or t
  misc_feature (1165)..(1165): n is a, c, g, or t
  misc_feature (1244)..(1244): n is a, c, g, or t
  misc_feature (1296)..(1296): n is a, c, g, or t
  misc_feature (1406)..(1406): n is a, c, g, or t
cgccaccaatgtggcccaggccaccagcccccgtgacactgcagccatcccctttgctccccgtcgtggcctcccgaccgagcagccagagtgaccccgaaagcctaaatcagcctgcggcgccctcacccgtcctccagctgccatcgcctcctgggtgaagaggacgcagctggtgacgcgcactgacgtcctgcaaggcccgctccaggtgcgccacctttgactggcatgctgaaaggacaaagggacggaggcattttaccggagaggacatccatggggcccagcaggtcaaattcctttctctaagtatgggagacatttttaaaaataatggagtcctccagggccggctgcgtgctgtggcctgtgctcctcacngctttggacccaggctgcgctgtctccaccacgaccaaggactcacagagctcgcctgggggacctggccccacagtcaccccgtccgtcatcagcctcaaatgccatcagcccgtgaatgctgctccatcgtctgcatggcagccaaggaggatggtgccaggtgatgtggcgatgagtgggcatcgcgtgggggccttggacgagcgtggacaccccaatccccagactggccattgccgtggaggcagcgtgagtgtgacatggagctcggtgtcgtgctgcagaggacgcntcgcggctgtacgcgtcatgatagccanggacccctccacatgtcacttagccaaaggatgcagcccngcctggggctttctaccccaggcccgaggacctgcagggacaaggacccctcagcgcagatgcagctctcatgaggcctgaaaccaagctggacttgcagaactgcgcacgctccctttctgaaagaaacacccgttaccgggtccagactgaatgtgggcgtaagaaagcgggaagggtcccccacagcaagagagagancctcccagtcacttggtcatctgagccttgagtgtgtccggccccagccaccagcctgtccccactatccctcttgtcagcacggctgaaaggagctgcctgggcacctgaggtggctgaggctcatctttgaggagcatggaactcgaggggagaagtcgcgcccccagggaagccagtacagacgggtttcnccctgttgcccaggctgctctcnaactcctggcctcatgtgatctgcccgcctcggcctcccaaggtgctgggattacaggcatgagccatcgggcctggcnggctagtgcaatttggacgatgagtttaaaactgcagaaccaaagtaacctnttccacaggcttcaagcacagtagctgaagataataaatccattataacaaaagagtagccaaaatgctgtggcattcttagaaatgaagaaagaactgaactgataagnc

SEQ ID NO: 253100 - DNA, 449 bp, Homo sapiens
  misc_feature (388)..(388): n is a, c, g, or t
  misc_feature (404)..(404): n is a, c, g, or t
  misc_feature (434)..(434): n is a, c, g, or t
  misc_feature (446)..(446): n is a, c, g, or t
gatggtatagcatttatatttataatcatacttatagttatattttgtaaatgaacttaggtaagatttccttttccatatttgtttaaaccagggccaccttttattattatgggtaagaaattaagaaaaattgttgacatttatgagtaacgtttattgataatgtttatgggttatattatgggtaagaaattaagaaaaattattgacatttcaaaatgaacaagtttattttatttacttacacacacacacacacacacacacacacacacatatattgagatagggtcttgcattgtagcccaggctggagtgcagtggcatgaacgtggctcagtgcagccttaacctcctgatcctcccaacggccccctcactgaanattcagtggacaatantattatccaccgggaatccggaacggtacngcaggcttacanctt

SEQ ID NO: 253101 - DNA, 437 bp, Homo sapiens
ctgcacatttcctgccatctaaggctgaccccccatctcccaattcttttttgcctgtttgtgattggagggcctactgtcctctcagactgaccaaagggttatgatttgcggtcatcgtcatcgtgagcagcacccaactactactcgagatacccaggcctagcttacaggaagcaggggacggagtcctgtattcaggcaccttggatgtgtgggttcccccagcagctgagcatcaccccagcctgctccttccaggtgacactaaggaagtgcaacccctcccagaagagcatgagcctggtgaagtcctcagtggaaccagaactgttcttctcgtcaagcagttatctatgttatctttcttggcacgattgtcttatggattagggagattaggggtaataaatgtctcgtttgagtgacaagctgga

SEQ ID NO: 253102 - DNA, 288 bp, Homo sapiens
tctttctgcttattttctgcagtttcaaaatagtcaatatgtaaggaggctgttacggctagaacctgctatgcattctgtactaaagtttatgcctccattttctaccattgttttcatcaccagtacccatgaaaataatttagattgtttcttaccaagcaagtttttagtgaattttttatagccatgaaaggcaaatgtttctttaaaaatacaaagtagaagtaaacatattaagatttcatcctgtttcctgattaaattaataaaagataaatttccatt

SEQ ID NO: 253103 - DNA, 441 bp, Homo sapiens
ttttctattgttgctggaaggaacagcaaagtctcaggtttctgggcacagatgctccagtgagagctcaggggaagtcaggagactgcccccgcctgctgcccaaggcacccccctctcccccaacacacacctcttctgcatagagttcctgttgccctcctccaactgggttagttttcaaggggcctagggtcacctttccccatgtgtggcccagggacaatggggtcaaagagattttaaaaaaagcgtcctagttcattaccctcaggagagtctgtgcgtcgtggcctctcctcccagagagctgaaggctctgagaactcctggaatccagcggcctgttgagccttgtctgatcagtgttccccaattgtatttgtttgtaaaatgcttttcttcatttaaaactaatgaacaccttgcagaacacatccc

SEQ ID NO: 253104 - DNA, 219 bp, Homo sapiens
gccagaaactgtgaaggaaggaccatgagggtcttggaggggaggaggatgttccttgggtggctagtgccaccgcctttggagagagctgaaggctctgagaactcctggaatccagcggcctgttgagccttgtctgatcagtgttccccaattgtatttgtttgtaaaatgcttttcttcatttaaaactaatgaacaccttgcagaacacatccc

SEQ ID NO: 253105 - DNA, 504 bp, Homo sapiens
  misc_feature (256)..(257): n is a, c, g, or t
tggaccatgagtccatgtttctggtactagctaagaccctaactctggtgtctattcataccaagacatgtccataaaacagccagcatttccgtaactctggcatctatttttctaaagctaaataatgaaacattgtatgaaactttgcttttaaattgtataaatgattctggattacaaaatggcatcttactttctgatagcaattaaaaataattgatattatggcccgtcacagtggctcacgcctgtnntcccagtactttgggaggctgaggtgggcggatcacctgaggtaggagttcgagaccagcctggccaacatagtgaaaccctgtcacaatacaaaaaattagccaggcatggtggcgggtgcctgtggtcccagctactctggaggctgaggcaggagaattgcttgaacctggaaggtggaggttgcagtgcagcgagatcacgccattgcactgcagcctggcgacaagagggaaatgctgtctg

SEQ ID NO: 253106 - DNA, 1047 bp, Homo sapiens
tcatttgtggaataaatcatgtgcccagtcacacggctccttacaggaaatggttggtgcatattagcttagcacaaaatacagtagtgagcttgtggtccccaacagtgagtcttcagttaacttctgctgtttttttttttttttttttaacataaagctttgaatgtttcatacagtatcaaatctctgcaggattttgcctgctgaaacagatgtgaaaatctgagtagcacagagtatgacattaaggccataacaataaacctattgttgctgcattctaaatttgatcaagatgtctgtttttgggaatccaaaatagttgcttcaaatttagcttttttcttttatgaagcagttttgttttgttttgttttgagacctctcatagcaagaaaaaacattacataaacttttttttgagacaaggtctcactttgttacccaggctggagtgcagtggcacgatcttggctcactgcagcctcgacctcctgggctcaagcagtcctcccaccttagtcccccacgtagctgggactacaggcacatgccaccacgcccggctaatttttgtatttttagtagagacagggtttcaccatgttgcccaggctggtctcgaactcctgagcacaagcgatctgcccgcctcggcctcccaaagtgctaagattataggcgtgagccaccatgcctggccacataaatataaacttaaaaatacacaggaaaacctttcagaacactttgaaacctattttggtcctattacgattgcactgaatgtcccccagcctaatgaagagcaattagatgtcatttggtggcattcttggtggagacagtaagctagggccgcaggagctgcttagtctcccagggtccagcattgtttcaggtaacgtgaacaggatgctcaagagctagtctaaataatgcttcatgtcttatttttcctgtttgttgataaggattcataaagatgtctttttctggtcatgtcaagggaaattcaaataaaaaacattgaattggtttgga

SEQ ID NO: 253107 - DNA, 675 bp, Homo sapiens
tgattatcattaatatcagttctttcaatattttcaataacataaaaagttgcttttagttataatttagtattttcaatactttcactaattgacatcataaatgttcaagatttttctttgcagggagagagaaggcatggagtctatccaaacgctaagtaagtggttggttattttacagactggctcttcaggacgtcactatggaccagacaggtggacttccaggccaacagcatggcaaggagcttcctggaatgccatgaaatccaaaagtcagaataaggtgagttttgcagcaacctgcagaacacatccacgcttcattgtgcctgagcctctgctccgctgcctccaccagcaccagcaatggcacagaaactgcatcaggagcaaggtggggtgcctcacagtctactgtaacttctgccggtgtggaccaggtggaattcctgggcttcccaggcaagatgaaaacactcaagctgcttccaagaatcccacagctttatccagatttggaaagttgggcaatccatggtgaataattgtttggccacattctttttcttcattttatgaaatattatggacctatgcacttcttgtggaaggagcaggtctttcagagaaagtgcctattttcttgaattacaacatcatgaagattta

SEQ ID NO: 253108 - DNA, 494 bp, Homo sapiens
atcacatgctcagaggcatcagatgaactttttcagtcgtgttctttttttcaataattattcaaccaactgccataggttatgtattggttgtttgtgagaaaattatatatttttttccagggacctctgtgaatggtgttagcacactcttaaatgcttatcgatgatcagtgaagagaccacagggatcccaaaaacccttacttccagctatcctgacttcccaaggtacatcttgaaatgctgttgcctccatgcagggagaggtgagggtgaatggactgggtgggtgggaaggcagcactgaaataaaagaaaaggcaccagagctgagcatctcctgctcccctggcctggaggcagcaagtaacagcagaaactgggggtagcacttcgtgtggacctggcagactccagaaagccagctttacatggcattaatgctcatggtaggggctgattgccacacattgggtatatcagagagatga

SEQ ID NO: 253109 - DNA, 2557 bp, Homo sapiens
tttttttttgagacagggtctctctctgtcacccaggatggagtgcagtgatgtgatctcagctcactgcaacctcaacctcctggctcaaatgatactcccgcctcagcctcccaagaaactgggaccacaggcgcgcaccacgatggctggctaatattttgtatattttgtagagatggagtttccccatgttgcccaggctggtctcaaactcctgagctcaggtgatccgcccaccttggcctcccaaagtgctgggattataggcatgagccactgcacccagcctttgtccatgattttgacagcatgacctgctaattctaccagagactccagtgggaacactcagcaaaataggctttgactcccacagtttccatccttttgcagataaataaggaagtaagtacacctttggctaaaactctggcactctgggcagttgatcctggcagagtccaagggtcagacccatggacctgtgaagtgggcaaccgtttccgggaactgtccatagcacttgctggggtgaccaggtcctgcctttcacgtcacctacttatccgactatttcctccatttgcttcttttctatttgccatcacctgtgacccgatggggccagacccctggttcatcccaaaccacatgacatgaacggactcttcctagggacagaggtttctccccagcagggatgccctcaccctcattcaatgtttatcgtctcttttcaattcctttagaacctcagccccacacatacatttattaaatgttcttttcttctcaaatatgaatggtaactctagtgagagcctacttgaacaggcttagggaaccatccctacaaacatgaagaagctgagatgcctcatgtaagtcacaagaagcagcagcatagaaatatgctcagaggggaatggggagttctggagggaacgccatgagtctggagactgtggctcttctgtgcggtggagcctgaccacgtgccccctgagttccttagaattcactaagtccatatcattcagaggttacaaaaccccagtttcaccaaagctacatgtccctggagctacaggaagcccacatgttgtgtagtgtgcagaaattctgttcttctccttcctgtaaactgtcagtgcactgtaaaatcaatagtagatggtgatgagtctggcctcaagaaaggaccctgaatagcactgggagccactttcaaagaatttaaatgtaagactaaagccaagcgagcttcctcatgaaaaccagcctatctgcaactgtattcagaaatgattaatgtcattttacatcaggtgcagaaaggtgtagcttaaaactatgtgttggtttttgttccacttgtaccaagaaaataggaagaaaggaagaattaaagaaagaagaaaggaaagaagaaaagaaggcaggaaggaagaacaaaaggagggaatgaaggacaaaaacaaagataaagaaagagagaatgaaaaggtcattcaggaatttaaaatgtgaaccgcaaagtttcaccaggacttccaaacagcccaggcctaaggaagagcggctttatgaaggagtttccaagacaggtgagagatcacactgtgaaagtccaacatgtgagggttcacgcgataagcgtggagtacagagccagaacatgtgaacggtagctacacagtgatggacaaacacaacttattccacagctggtaaaatacttagaatatatctgaaattatctaaacacttgctattctgtcaaataagagagagagagaaaggaagagagataaacaattttcctttgaacagtgtggtacgaaacaaaaatgggattcttttgcaatgctaatttcaaaggtttgtttatattattaacaacatgaagatcctgtagtgagggagggtgtttttcccaagtcattgcaaaagactcattaaagaccagcttcgatgccatttagaaaccatttcccatcaattccagtgaaacattcttgaaatattagaatcctctttaccagggaaaataaaatgtccctttaagcttacaaactattagggaagaagactcaaaaataactaaaatgtgctacaaagtgaaaatgtttttttcttacaagaaactgatgagatgagttgaaatatctgatgatgaaaatccagccgaggaacaattggagaaccatccggctagatttcccctactgagtatggactttgagcatgtgcatatagacagaagactctgacatatgaggaatgagtgagaggcaacatgaagtccccactgcaaagaccctgaatgtcattaatccaaaataacttacagagcccacctgccatttcaatactgtgtcatctctgtaaatctgggtatatgagaatattttgaactcaacaatattcattattaaacatagaattcttctaacactttctgaaattgtttctttaaattagaaacaaagataagggtaaaatcacatatgctaataaaattctatgttccttagtccccctactatatttt

SEQ ID NO: 253110 - DNA, 2209 bp, Homo sapiens
tttttttttgagacagggtctctctctgtcacccaggatggagtgcagtgatgtgatctcagctcactgcaacctcaacctcctggctcaaatgatactcccgcctcagcctcccaagaaactgggaccacaggcgcgcaccacgatggctggctaatattttgtatattttgtagagatggagtttccccatgttgcccaggctggtctcaaactcctgagctcaggtgatccgcccaccttggcctcccaaagtgctgggattataggcatgagccactgcacccagcctttgtccatgattttgacagcatgacctgctaattctaccagagactccagtgggaacactcagcaaaataggctttgactcccacagtttccatccttttgcagataaataaggaagtaagtacacctttggctaaaactctggcactctgggcagttgatcctggcagagtccaagggtcagacccatggacctgtgaagtgggcaaccgtttccgggaactgtccatagcacttgctggggtgaccaggtcctgcctttcacgtcacctacttatccgactatttcctccatttgcttcttttctatttgccatcacctgtgacccgatggggccagacccctggttcatcccaaaccacatgacatgaacggactcttcctagggacagaggtttctccccagcagggatgccctcaccctcattcaatgtttatcgtctcttttcaattcctttagaacctcagccccacacatacatttattaaatgttcttttcttctcaaatatgaatggtaactctagtgagagcctacttgaacaggcttagggaaccatccctacaaacatgaagaagctgagatgcctcatgtaagtcacaagaagcagcagcatagaaatatgctcagaggggaatggggagttctggagggaacgccatgagtctggagactgtggctcttctgtgcggtggagcctgaccacgtgccccctgagttccttagaattcactaagtccatatcattcagaggttacaaaaccccagtttcaccaaagctacatgtccctggagctacaggaagcccacatgttgtgtagtgtgcagaaattctgttcttctccttcctgtaaactgtcagtgcactgtaaaatcaatagtagatggtgatgagtctggcctcaagaaaggaccctgaatagcactgggagccactttcaaagaatttaaatgtaagactaaagccaagcgagcttcctcatgaaaaccagcctatctgcaactgtattcagaaatgattaatgtcattttacatcaggtgcagaaaggtgtagcttaaaactatgtgttggtttttgttccacttgtaccaagaaaataggaagaaaggaagaattaaagaaagaagaaaggaaagaagaaaagaaggcaggaaggaagaacaaaaggagggaatgaaggacaaaaacaaagataaagaaagagagaatgaaaaggtcattcaggaatttaaaatgtgaaccgcaaagtttcaccaggacttccaaacagcccaggcctaaggaagagcggctttatgaaggagtttccaagacagggacctctgtgaatggtgttagcacactcttaaatgcttatcgatgatcagtgaagagaccacagggatcccaaaaacccttacttccagctatcctgacttcccaagactggctcttcaggacgtcactatggaccagacaggtggacttccaggccaacagcatggcaaggagcttcctggaatgccatgaaatccaaaagtcagaataaggtgagttttgcagcaacctgcagaacacatccacgcttcattgtgcctgagcctctgctccgctgcctccaccagcaccagcaatggcacagaaactgcatcaggagcaaggtggggtgcctcacagtctactgtaacttctgccggtgtggaccaggtggaattcctgggcttcccaggcaagatgaaaacactcaagctgcttccaagaatcccacagctttatccagatttggaaagttgggcaatccatggtgaataattgtttggccacattctttttcttcattttatgaaatattatggacctatgcacttcttgtggaaggagcaggtctttcagagaaagtgcctattttcttgaattacaacatcatgaagattta

SEQ ID NO: 253111 - DNA, 2503 bp, Homo sapiens
tttttttttgagacagggtctctctctgtcacccaggatggagtgcagtgatgtgatctcagctcactgcaacctcaacctcctggctcaaatgatactcccgcctcagcctcccaagaaactgggaccacaggcgcgcaccacgatggctggctaatattttgtatattttgtagagatggagtttccccatgttgcccaggctggtctcaaactcctgagctcaggtgatccgcccacgtccatgattttgacagcatgacctgctaattctaccagagactccagtgggaacactcagcaaaataggctttgactcccacagtttccatccttttgcagataaataaggaagtaagtacacctttggctaaaactctggcactctgggcagttgatcctggcagagtccaagggtcagacccatggacctgtgaagtgggcaaccgtttccgggaactgtccatagcacttgctggggtgaccaggtcctgcctttcacgtcacctacttatccgactatttcctccatttgcttcttttctatttgccatcacctgtgacccgatggggccagacccctggttcatcccaaaccacatgacatgaacggactcttcctagggacagaggtttctccccagcagggatgccctcaccctcattcaatgtttatcgtctcttttcaattcctttagaacctcagccccacacatacatttattaaatgttcttttcttctcaaatatgaatggtaactctagtgagagcctacttgaacaggcttagggaaccatccctacaaacatgaagaagctgagatgcctcatgtaagtcacaagaagcagcagcatagaaatatgctcagaggggaatggggagttctggagggaacgccatgagtctggagactgtggctcttctgtgcggtggagcctgaccacgtgccccctgagttccttagaattcactaagtccatatcattcagaggttacaaaaccccagtttcaccaaagctacatgtccctggagctacaggaagcccacatgttgtgtagtgtgcagaaattctgttcttctccttcctgtaaactgtcagtgcactgtaaaatcaatagtagatggtgatgagtctggcctcaagaaaggaccctgaatagcactgggagccactttcaaagaatttaaatgtaagactaaagccaagcgagcttcctcatgaaaaccagcctatctgcaactgtattcagaaatgattaatgtcattttacatcaggtgcagaaaggtgtagcttaaaactatgtgttggtttttgttccacttgtaccaagaaaataggaagaaaggaagaattaaagaaagaagaaaggaaagaagaaaagaaggcaggaaggaagaacaaaaggagggaatgaaggacaaaaacaaagataaagaaagagagaatgaaaaggtcattcaggaatttaaaatgtgaaccgcaaagtttcaccaggacttccaaacagcccaggcctaaggaagagcggctttatgaaggagtttccaagacaggtgagagatcacactgtgaaagtccaacatgtgagggttcacgcgataagcgtggagtacagagccagaacatgtgaacggtagctacacagtgatggacaaacacaacttattccacagctggtaaaatacttagaatatatctgaaattatctaaacacttgctattctgtcaaataagagagagagagaaaggaagagagataaacaattttcctttgaacagtgtggtacgaaacaaaaatgggattcttttgcaatgctaatttcaaaggtttgtttatattattaacaacatgaagatcctgtagtgagggagggtgtttttcccaagtcattgcaaaagactcattaaagaccagcttcgatgccatttagaaaccatttcccatcaattccagtgaaacattcttgaaatattagaatcctctttaccagggaaaataaaatgtccctttaagcttacaaactattagggaagaagactcaaaaataactaaaatgtgctacaaagtgaaaatgtttttttcttacaagaaactgatgagatgagttgaaatatctgatgatgaaaatccagccgaggaacaattggagaaccatccggctagatttcccctactgagtatggactttgagcatgtgcatatagacagaagactctgacatatgaggaatgagtgagaggcaacatgaagtccccactgcaaagaccctgaatgtcattaatccaaaataacttacagagcccacctgccatttcaatactgtgtcatctctgtaaatctgggtatatgagaatattttgaactcaacaatattcattattaaacatagaattcttctaacactttctgaaattgtttctttaaattagaaacaaagataagggtaaaatcacatatgctaataaaattctatgttccttagtccccctactatatttt

SEQ ID NO: 253112 - DNA, 2501 bp, Homo sapiens
tttttttttgagacagggtctctctctgtcacccaggatggagtgcagtgatgtgatctcagctcactgcaacctcaacctcctggctcaaatgatactcccgctttgtatattttgtagagatggagtttccccatgttgcccaggctggtctcaaactcctgagctcaggtgatccgcccaccttggcctcccaaagtgctgggattataggcatgagccactgcacccagcctttgtccatgattttgacagcatgacctgctaattctaccagagactccagtgggaacactcagcaaaataggctttgactcccacagtttccatccttttgcagataaataaggaagtaagtacacctttggctaaaactctggcactctgggcagttgatcctggcagagtccaagggtcagacccatggacctgtgaagtgggcaaccgtttccgggaactgtccatagcacttgctggggtgaccaggtcctgcctttcacgtcacctacttatccgactatttcctccatttgcttcttttctatttgccatcacctgtgacccgatggggccagacccctggttcatcccaaaccacatgacatgaacggactcttcctagggacagaggtttctccccagcagggatgccctcaccctcattcaatgtttatcgtctcttttcaattcctttagaacctcagccccacacatacatttattaaatgttcttttcttctcaaatatgaatggtaactctagtgagagcctacttgaacaggcttagggaaccatccctacaaacatgaagaagctgagatgcctcatgtaagtcacaagaagcagcagcatagaaatatgctcagaggggaatggggagttctggagggaacgccatgagtctggagactgtggctcttctgtgcggtggagcctgaccacgtgccccctgagttccttagaattcactaagtccatatcattcagaggttacaaaaccccagtttcaccaaagctacatgtccctggagctacaggaagcccacatgttgtgtagtgtgcagaaattctgttcttctccttcctgtaaactgtcagtgcactgtaaaatcaatagtagatggtgatgagtctggcctcaagaaaggaccctgaatagcactgggagccactttcaaagaatttaaatgtaagactaaagccaagcgagcttcctcatgaaaaccagcctatctgcaactgtattcagaaatgattaatgtcattttacatcaggtgcagaaaggtgtagcttaaaactatgtgttggtttttgttccacttgtaccaagaaaataggaagaaaggaagaattaaagaaagaagaaaggaaagaagaaaagaaggcaggaaggaagaacaaaaggagggaatgaaggacaaaaacaaagataaagaaagagagaatgaaaaggtcattcaggaatttaaaatgtgaaccgcaaagtttcaccaggacttccaaacagcccaggcctaaggaagagcggctttatgaaggagtttccaagacaggtgagagatcacactgtgaaagtccaacatgtgagggttcacgcgataagcgtggagtacagagccagaacatgtgaacggtagctacacagtgatggacaaacacaacttattccacagctggtaaaatacttagaatatatctgaaattatctaaacacttgctattctgtcaaataagagagagagagaaaggaagagagataaacaattttcctttgaacagtgtggtacgaaacaaaaatgggattcttttgcaatgctaatttcaaaggtttgtttatattattaacaacatgaagatcctgtagtgagggagggtgtttttcccaagtcattgcaaaagactcattaaagaccagcttcgatgccatttagaaaccatttcccatcaattccagtgaaacattcttgaaatattagaatcctctttaccagggaaaataaaatgtccctttaagcttacaaactattagggaagaagactcaaaaataactaaaatgtgctacaaagtgaaaatgtttttttcttacaagaaactgatgagatgagttgaaatatctgatgatgaaaatccagccgaggaacaattggagaaccatccggctagatttcccctactgagtatggactttgagcatgtgcatatagacagaagactctgacatatgaggaatgagtgagaggcaacatgaagtccccactgcaaagaccctgaatgtcattaatccaaaataacttacagagcccacctgccatttcaatactgtgtcatctctgtaaatctgggtatatgagaatattttgaactcaacaatattcattattaaacatagaattcttctaacactttctgaaattgtttctttaaattagaaacaaagataagggtaaaatcacatatgctaataaaattctatgttccttagtccccctactatatttt

SEQ ID NO: 253113 - DNA, 2503 bp, Homo sapiens
tttttttttgagacagggtctctctctgtcacccaggatggagtgcagtgatgtgatctcagctcactgcaacctcaacctcctggctcaaatgatactcccgcctcagcctcccaagaaactgggaccacaggcgcgcaccacgatggctggctaatattttgtatattttgtagagatggagtttccccatgttgcccaggctggtctcaaactcctgagctcaggtgatccgcccaccttggcctcccaaagtgctgggattataggcatgagccactgcacccagcctttgtccatgattttgacagcatgacctgctaattctaccagagactccagtgggaacactcagcaaaataggctttgactcccacagtttccatccttttgcagataaataaggaagtaagtacacctttggctaaaactctggcactctgggcagttgatcctggcagagtccaagggtcagacccatggacctgtgaagtgggcaaccgtttccgggaactgtccatagcacttgctggggtgaccagtctatttgccatcacctgtgacccgatggggccagacccctggttcatcccaaaccacatgacatgaacggactcttcctagggacagaggtttctccccagcagggatgccctcaccctcattcaatgtttatcgtctcttttcaattcctttagaacctcagccccacacatacatttattaaatgttcttttcttctcaaatatgaatggtaactctagtgagagcctacttgaacaggcttagggaaccatccctacaaacatgaagaagctgagatgcctcatgtaagtcacaagaagcagcagcatagaaatatgctcagaggggaatggggagttctggagggaacgccatgagtctggagactgtggctcttctgtgcggtggagcctgaccacgtgccccctgagttccttagaattcactaagtccatatcattcagaggttacaaaaccccagtttcaccaaagctacatgtccctggagctacaggaagcccacatgttgtgtagtgtgcagaaattctgttcttctccttcctgtaaactgtcagtgcactgtaaaatcaatagtagatggtgatgagtctggcctcaagaaaggaccctgaatagcactgggagccactttcaaagaatttaaatgtaagactaaagccaagcgagcttcctcatgaaaaccagcctatctgcaactgtattcagaaatgattaatgtcattttacatcaggtgcagaaaggtgtagcttaaaactatgtgttggtttttgttccacttgtaccaagaaaataggaagaaaggaagaattaaagaaagaagaaaggaaagaagaaaagaaggcaggaaggaagaacaaaaggagggaatgaaggacaaaaacaaagataaagaaagagagaatgaaaaggtcattcaggaatttaaaatgtgaaccgcaaagtttcaccaggacttccaaacagcccaggcctaaggaagagcggctttatgaaggagtttccaagacaggtgagagatcacactgtgaaagtccaacatgtgagggttcacgcgataagcgtggagtacagagccagaacatgtgaacggtagctacacagtgatggacaaacacaacttattccacagctggtaaaatacttagaatatatctgaaattatctaaacacttgctattctgtcaaataagagagagagagaaaggaagagagataaacaattttcctttgaacagtgtggtacgaaacaaaaatgggattcttttgcaatgctaatttcaaaggtttgtttatattattaacaacatgaagatcctgtagtgagggagggtgtttttcccaagtcattgcaaaagactcattaaagaccagcttcgatgccatttagaaaccatttcccatcaattccagtgaaacattcttgaaatattagaatcctctttaccagggaaaataaaatgtccctttaagcttacaaactattagggaagaagactcaaaaataactaaaatgtgctacaaagtgaaaatgtttttttcttacaagaaactgatgagatgagttgaaatatctgatgatgaaaatccagccgaggaacaattggagaaccatccggctagatttcccctactgagtatggactttgagcatgtgcatatagacagaagactctgacatatgaggaatgagtgagaggcaacatgaagtccccactgcaaagaccctgaatgtcattaatccaaaataacttacagagcccacctgccatttcaatactgtgtcatctctgtaaatctgggtatatgagaatattttgaactcaacaatattcattattaaacatagaattcttctaacactttctgaaattgtttctttaaattagaaacaaagataagggtaaaatcacatatgctaataaaattctatgttccttagtccccctactatatttt

SEQ ID NO: 253114 - DNA, 2503 bp, Homo sapiens
tttttttttgagacagggtctctctctgtcacccaggatggagtgcagtgatgtgatctcagctcactgcaacctcaacctcctggctcaaatgatactcccgcctcagcctcccaagaaactgggaccacaggcgcgcaccacgatggctggctaatattttgtatattttgtagagatggagtttccccatgttgcccaggctggtctcaaactcctgagctcaggtgatccgcccaccttggcctcccaaagtgctgggattataggcatgagccactgcacccagcctttgtccatgattttgacagcatgactcccacagtttccatccttttgcagataaataaggaagtaagtacacctttggctaaaactctggcactctgggcagttgatcctggcagagtccaagggtcagacccatggacctgtgaagtgggcaaccgtttccgggaactgtccatagcacttgctggggtgaccaggtcctgcctttcacgtcacctacttatccgactatttcctccatttgcttcttttctatttgccatcacctgtgacccgatggggccagacccctggttcatcccaaaccacatgacatgaacggactcttcctagggacagaggtttctccccagcagggatgccctcaccctcattcaatgtttatcgtctcttttcaattcctttagaacctcagccccacacatacatttattaaatgttcttttcttctcaaatatgaatggtaactctagtgagagcctacttgaacaggcttagggaaccatccctacaaacatgaagaagctgagatgcctcatgtaagtcacaagaagcagcagcatagaaatatgctcagaggggaatggggagttctggagggaacgccatgagtctggagactgtggctcttctgtgcggtggagcctgaccacgtgccccctgagttccttagaattcactaagtccatatcattcagaggttacaaaaccccagtttcaccaaagctacatgtccctggagctacaggaagcccacatgttgtgtagtgtgcagaaattctgttcttctccttcctgtaaactgtcagtgcactgtaaaatcaatagtagatggtgatgagtctggcctcaagaaaggaccctgaatagcactgggagccactttcaaagaatttaaatgtaagactaaagccaagcgagcttcctcatgaaaaccagcctatctgcaactgtattcagaaatgattaatgtcattttacatcaggtgcagaaaggtgtagcttaaaactatgtgttggtttttgttccacttgtaccaagaaaataggaagaaaggaagaattaaagaaagaagaaaggaaagaagaaaagaaggcaggaaggaagaacaaaaggagggaatgaaggacaaaaacaaagataaagaaagagagaatgaaaaggtcattcaggaatttaaaatgtgaaccgcaaagtttcaccaggacttccaaacagcccaggcctaaggaagagcggctttatgaaggagtttccaagacaggtgagagatcacactgtgaaagtccaacatgtgagggttcacgcgataagcgtggagtacagagccagaacatgtgaacggtagctacacagtgatggacaaacacaacttattccacagctggtaaaatacttagaatatatctgaaattatctaaacacttgctattctgtcaaataagagagagagagaaaggaagagagataaacaattttcctttgaacagtgtggtacgaaacaaaaatgggattcttttgcaatgctaatttcaaaggtttgtttatattattaacaacatgaagatcctgtagtgagggagggtgtttttcccaagtcattgcaaaagactcattaaagaccagcttcgatgccatttagaaaccatttcccatcaattccagtgaaacattcttgaaatattagaatcctctttaccagggaaaataaaatgtccctttaagcttacaaactattagggaagaagactcaaaaataactaaaatgtgctacaaagtgaaaatgtttttttcttacaagaaactgatgagatgagttgaaatatctgatgatgaaaatccagccgaggaacaattggagaaccatccggctagatttcccctactgagtatggactttgagcatgtgcatatagacagaagactctgacatatgaggaatgagtgagaggcaacatgaagtccccactgcaaagaccctgaatgtcattaatccaaaataacttacagagcccacctgccatttcaatactgtgtcatctctgtaaatctgggtatatgagaatattttgaactcaacaatattcattattaaacatagaattcttctaacactttctgaaattgtttctttaaattagaaacaaagataagggtaaaatcacatatgctaataaaattctatgttccttagtccccctactatatttt

SEQ ID NO: 253115 - DNA, 7898 bp, Homo sapiens
gtcgctgtaagatcccgttttgggctgtcgtgctggtagacctgcgtcgtgtgattcatgattgcggaaacgcgtctccatcctctctctccttgcgttcatgattggaggcaccttgtcttgttcagtaatgtctccccatttcctagaagagggggtggcatatgcacccctgtggacacctgccttccccttgtagtgatgctgtcctggctgtggaatgggagtgtgatgaagctaccaaaaaggcctgttacagcaaaggcaaatcaaaggaggaatgtcagaactacatccgggtgcttctggtgggtggcgaccggttattcacctgtgggaccaatgcattcacgcctgtctgcaccaaccgctcgttgagcaacctggctgagatccatgatcagatcagtggcatggcccgctgtccctacagtccccagcacaattccacagcgctcctcacagctggtggggagctctatgctgctacagccatggattttccaggacgtgatcctgccatttaccgaagcctaggcattttacctcctctccgcacggcgcagtacaactccaaatggctcaatgagccaaactttgtgtcatcttatgacatcggaaattttacctacttctttttccgagaaaatgcagtagagcatgactgtgggaaaacagtgttctccagagctgcccgggtgtgcaagaacgatattggtgggcgcttcctgctggaagacacctggaccacattcatgaaggctcgcctgaactgctcccgtcctggggaagtccccttttactacaacgaattgcagagtactttcttcctgcctgagctggatttgatctatggcatctttaccaccaatgtgaacagcattgcggcctcagctgtgtgcgtcttcaacctgagcgccatcgcgcaggccttctctgggcccttcaagtaccaagaaaactcgcgctcggcctggctaccgtatcccaacccaaacccccacttccagtgtggcaccgtggaccagggcctgtacgtgaacctgaccgagagaaatctgcaggatgctcagaagttcattctggtgcatgaggtggtacagccagtgaccacagtgccctccttcatggaggacaatagccgcttttcccacgtggcagtcgacgtggtgcagggcagagaagcgctcgtccacatcatctatttggccacagattacggaaccattaagaaagtgcgggtacccctgaatcagacctcaagcagctgtttgctggaagagattgagctcttccctgagaggcggagggagcccatcaggagcctgcagatcctgcacagccagagtgtcctgttcgtggggctgcgggagcacgtggtcaagatccccctgaagaggtgccagttctaccgcacacgcagcacctgcattggggcccaggacccttactgtggctgggatgtggtaatgaagaaatgcacaagcctggaggagagcctgagcatgacgcagtgggaacagagcatctctgcgtgtccgaccaggaatctcaccgtggatgggcactttggtgtgtggtctccgtggacgccttgcacgcacacagatggcagcgccgtgggatcctgcctctgtcgaacccgctcctgcgacagcccggccccgcagtgtggtggctggcagtgcgagggccctggcatggagatcgccaactgttccaggaacggaggctggactccctggacctcgtggtctccctgcagcactacctgtgggatcggcttccaggtgcggcagcgctcctgcagcaaccccactcccaggcacgggggccgggtgtgcgtgggacagaaccgcgaggaaagatactgcaatgaacatttgctatgtcccccacacatgttctggacaggctggggtccttgggaacggtgcacagcccaatgcgggggtggcattcaagctcgccgcaggatctgtgagaatgggcctgactgtgcaggctgcaatgtggagtaccagtcttgcaacaccaacccgtgtcctgagctgaagaagaccacgccctggacaccctggacacctgtcaacatctctgacaacggcgaccactatgagcaacgattccgatacacatgcaaagcccgcctggctgatccgaatttgctggaagtgggaagacagagaatcgaaatgcggtactgttctagcgacggcaccagtggctgctccacagatgggctttctggggatttcctgcgtgctgggagatactctgcccacacggtcaacggggcttggtcagcctggacgtcgtggtcacagtgcagccgtgactgcagcaggggcattcggaaccggaagcgtgtttgcaacaaccccgaacccaagtatgggggaatgccttgccttggcccatctctggaataccaggaatgcaacactttgccctgcccagtggatggcgtgtggtcttgctggtccccctggacaaaatgttcagcaacatgcggcggtggacactatatgaggacccgctcttgctccaatccagccccggcctatggaggggacatctgcctggggctgcacacagaagaggcactctgcaacacgcagccctgcccagagagctggtcggagtggtcggactggtctgagtgtgaagcctctggcgtccaagtccgcgcccgccagtgcatcctcctgttccccatgggcagccagtgctccgggaacaccacggagagccggccgtgtgtgtttgactctaatttcatcccagaagtatctgtggcaagatccagtagcgtagaagagaaaaggtgtggagagttcaacatgttccacatgatcgccgtggggctgagcagctccatcctcggctgcctcctcaccctgctcgtctatacttactgccagcggtaccagcagcaatcccacgatgcgactgtcatccaccccgtctcacctgccccccttaataccagcataaccaaccacatcaacaaactggacaagtacgactcggtggaggccatcaaggcatttaacaaaaacaacttgatcctagaggaaagaaacaaatacttcaacccacatctcactgggaagacctattctaatgcctactttacagatctcaataattatgatgagtactaacagctttcatgttttgggcttcttgtaaatccccagttcctcaaggcctgtgccccatgactgcccatgtttctgaggcttcagagtcgaagtttggatacatttcaagtgcatttcaagccaccagagtgtcccattggtgccaaaaatacacgtctttaaaagcaacaaaaattgaaataagacatcgtgaaaatcttgaccattgttgattgagccagggtggtgaagtttttaattggtgttcatcctatttttctgacaagtccattggtttgttttttgagcattattttataaatgtgccacccacattggaaggagtctttctttagaactttggagtgtaaatcttcatgatgttgtaaattcaagaaaataggcactttctctgaaagacctgctccttccacaagaagtgcataggtccataatatttcataaaatgaagaaaaagaatgtggccaaacaattattcaccatggattgcccaactttccaaatctggataaagctgtgggattcttggaagcagcttgagtgttttcatcttgcctgggaagcccaggaattccacctggtccacaccggcagaagttacagtagactgtgaggcaccccaccttgctcctgatgcagtttctgtgccattgctggtgctggtggaggcagcggagcagaggctcaggcacaatgaagcgtggatgtgttctgcaggttgctgcaaaactcaccttattctgacttttggatttcatggcattccaggaagctccttgccatgctgttggcctggaagtccacctgtctggtccatagtgacgtcctgaagagccagtctgtaaaataaccaaccacttacttagcgtttggatagactccatgccttctctctccctgcaaagaaaaatcttgaacatttatgatgtcaattagtgaaagtattgaaaatactaaattataactaaaagcaactttttatgttattgaaaatattgaaagaactgatattaatgataatcattttatttttcatctctctgatatacccaatgtgtggcaatcagcccctaccatgagcattaatgccatgtaaagctggctttctggagtctgccaggtccacacgaagtgctacccccagtttctgctgttacttgctgcctccaggccaggggagcaggagatgctcagctctggtgccttttcttttatttcagtgctgccttcccacccacccagtccattcaccctcacctctccctgcatggaggcaacagcatttccaagatgtaccttgggaagtcaggatagctggaagtaagggtttttggggatccctgtggtctcttcactgatcatcgataagcatttaagagtgtgctaacaccattcacagaggtccctggaaaaaaatatataattttctcacaaacaaccaatacataacctatggcagttggttgaataattattgaaaaaaagaacacgactgaaaaagttcatctgatgcctctgagcatgtgataaagtcctgggtagacatggaaacgtgttcttacaaatgaaccttcggatctatgaaagaaaatatagtagggggactaaggaacatagaattttattagcatatgtgattttacccttatctttgtttctaatttaaagaaacaatttcagaaagtgttagaagaattctatgtttaataatgaatattgttgagttcaaaatattctcatatacccagatttacagagatgacacagtattgaaatggcaggtgggctctgtaagttatttggggattaatgaaatccagggtcttggcaggggggactcaatgtggccctctcactcatccctcatatgtcaagagtccttcctgtcttatatgcacatgctccaaggtccatactcagtagggggaaatctagccggatggttccccaattgttcctcggctggattttcatcatcagaaatttccaactcatctcatcagttttcttgtaagaaaaaaacatttttcactttgtagcacaattttagttatttttgagtcttcttccctaatagtttgtaagcttaaagggacaattttaattttcccctggttaaagagggattctaatatttccaagaatgttttccactggaattgatgggaaatggtttctaaatggcatcgaagctggtctttaatgatcttttgcaatgacttgggaaaaacaccctccctcactacaggatcttcatgttgttaataatataaacaaacctttgaaattagcattgcaaaagaatcccatttttgtttcgtaccacactgttcaaaggaaaattgtttatctctcttcctttctctctctctcttatttgacagaatagcaagtgtttagataatttcagatatattcctaagtattttaccagctgtggaataagttgtgtttgtccatcactgtgtagctaccgttcacatgttctggctctgtactccacgcttatcgcgtgaaccctcacatgttggactttcacagtgtgatctctcacctgtcttggaaactccttcataaagccgctcttccttaggcctgggctgtttggaagtcctggtgaaactttgcggttcacattttaaattcctgaatgaccttttcattctctctttctttatctttgtttttgtccttcattccctccttttgttcttccgtcctgcctttcacgtcacctacttatccgactatttcctccatttgcttcttttctatttgccatcacctgtgacccgatggggccagacccctggttcatcccaaaccacatgacatgaacggactcttcctagggacagaggtttctccccagcagggatgccctcaccctcattcaatgtttatcgtctcttttcaattcctttagaacctcagccccacacatacatttattaaatgttcttttcttctcaaatatgaatggtaactctagtgagagcctacttgaacaggcttagggaaccatccctacaaacatgaagaagctgagatgcctcatgtaagtcacaagaagcagcagcatagaaatatgctcagaggggaatggggagttctggagggaacgccatgagtctggagactgtggctcttctgtgcggtggagcctgaccacgtgccccctgagttccttagaattcactaagtccatatcattcagaggttacaaaaccccagtttcaccaaagctacatgtccctggagctacaggaagcccacatgttgtgtagtgtgcagaaattctgttcttctccttcctgtaaactgtcagtgcactgtaaaatcaatagtagatggtgatgagtctggcctcaagaaaggaccctgaatagcactgggagccactttcaaagaatttaaatgtaagactaaagccaagcgagcttcctcatgaaaaccagcctatctgcaactgtattcagaaatgattaatgtcattttacatcaggtgcagaaaggtgtagcttaaaactatgtgttggtttttgttccacttgtaccaagaaaataggaagaaaggaagaattaaagaaagaagaaaggaaagaagaaaagaaggcaggaaggaagaacaaaaggagggaatgaaggacaaaaacaaagataaagaaagagagaatgaaaaggtcattcaggaatttaaaatgtgaaccgcaaagtttcaccaggacttccaaacagcccaggcctaaggaagagcggctttatgaaggagtttccaagacaggtgagagatcacactgtgaaagtccaacatgtgagggttcacgcgataagcgtggagtacagagccagaacatgtgaacggtagctacacagtgatggacaaacacaacttattccacagctggtaaaatacttagaatatatctgaaattatctaaacacttgctattctgtcaaataagagagagagagaaaggaagagagataaacaattttcctttgaacagtgtggtacgaaacaaaaatgggattcttttgcaatgctaatttcaaaggtttgtttatattattaacaacatgaagatcctgtagtgagggagggtgtttttcccaagtcattgcaaaagactcattaaagaccagcttcgatgccatttagaaaccatttcccatcaattccagtgaaacattcttgaaatattagaatcctctttaccagggaaaataaaatgtccctttaagcttacaaactattagggaagaagactcaaaaataactaaaatgtgctacaaagtgaaaatgtttttttcttacaagaaactgatgagatgagttgaaatatctgatgatgaaaatccagccgaggaacaattggagaaccatccggctagatttcccctactgagtatggactttgagcatgtgcatatagacagaagactctgacatatgaggaatgagtgagaggcaacatgaagtccccactgcaaagaccctgaatgtcattaatccaaaataacttacagagcccacctgccatttcaatactgtgtcatctctgtaaatctgggtatatgagaatattttgaactcaacaatattcattattaaacatagaattcttctaacactttctgaaattgtttctttaaattagaaacaaagataagggtaaaatcacatatgctaataaaattctatgttccttagtccccctactatatttt

SEQ ID NO: 253116 - DNA, 1165 bp, Homo sapiens
ctgctctccctgagcccgctcccgagcgctgctttcccgccgcgggtgggcttcgcagcctcaggccagccgcggcccttggcccgctgcagccccggccctccaccttccccgtgcaggggcggcccggccagtgtcgctcatcccgggacgctcccttctcccacccaggactgccccgcggagctggcttggacacccaactttgccacctcgagggtcgtctctgctgggcgcgaacctgcccacccaccggttggccgcgcgctcggggaccgtgctcgtggcccccaagccggtgcccccattctggaactcagcgagtagggggcggctctggggaagtggcagggggcggctgcagctgctgcctccacttccctagccaggtgctgaagaggatcctcggagccgctctggcccccaggcgctggatgactggcaccagcgctcctcgcacctgtgttggtgtgtgagacttgggctggagtgcccacgtggctgtggagtcagtgtgattcatgattgaggaaacgcgtcctccatcctctctctccttggcactttccacacatgaggagaagaagagcttctgtttagaagacacgtgcccagagtcagaggccccttgcccaccatgaagggaacctgtgttatagcatggctgttctcaagcctggggctgtggagactcgcccacccagaggcccagggtacgactcagtgccagagaaccgagcatccagtcatctcctataaagaaattggcccctggttacgggagttcagagcgaagaatgctgtggatttctcgcagttaacatttgacccaggacagaaagaacttgttgtaggagcaagaaactacctcttcaggttacagcttgaggatctgtctcttatccaggtggccctgtttgttccgtggatgtgatcctgatttgtccttccttagatgacagaccattcaaggaacattgcttcaaagcctggacacattccttcccccacagttacagcaatcatcgattatttagtttgatgcatccgggcatcaatttcttgtaaaacagctttgtttcctctttataatttatattaacataaatatgaatacttgggttaaaagctatctataacaaagaataaagggaaatagatcaaa

SEQ ID NO: 253117 - DNA, 8056 bp, Homo sapiens
ctgctctccctgagcccgctcccgagcgctgctttcccgccgcgggtgggcttcgcagcctcaggccagccgcggcccttggcccgctgcagccccggccctccaccttccccgtgcaggggcggcccggccagtgtcgctcatcccgggacgctcccttctcccacccaggactgccccgcggagctggcttggacacccaactttgccacctcgagggtcgtctctgctgggcgcgaacctgcccacccaccggttggccgcgcgctcggggaccgtgctcgtggcccccaagccggtgcccccattctggaactcagcgagtagggggcggctctggggaagtggcagggggcggctgcagctgctgcctccacttccctagccaggtgctgaagaggatcctcggagccgctctggcccccaggcgctggatgactggcaccagcgctcctcgcacctgtgttggtgtgtgagacttgggctggagtgcccacgtggctgtggagtcagtgtgattcatgattgaggaaacgcgtcctccatcctctctctccttggcactttccacacatgaggagaagaagagcttctgtttagaagacacgtgcccagagtcagaggccccttgcccaccatgaagggaacctgtgttatagcatggctgttctcaagcctggggctgtggagactcgcccacccagaggcccagggtacgactcagtgccagagaaccgagcatccagtcatctcctataaagaaattggcccctggttacgggagttcagagcgaagaatgctgtggatttctcgcagttaacatttgacccaggacagaaagaacttgttgtaggagcaagaaactacctcttcaggttacagcttgaggatctgtctcttatccaggctgtggaatgggagtgtgatgaagctaccaaaaaggcctgttacagcaaaggcaaatcaaaggaggaatgtcagaactacatccgggtgcttctggtgggtggcgaccggttattcacctgtgggaccaatgcattcacgcctgtctgcaccaaccgctcgttgagcaacctggctgagatccatgatcagatcagtggcatggcccgctgtccctacagtccccagcacaattccacagcgctcctcacagctggtggggagctctatgctgctacagccatggattttccaggacgtgatcctgccatttaccgaagcctaggcattttacctcctctccgcacggcgcagtacaactccaaatggctcaatgagccaaactttgtgtcatcttatgacatcggaaattttacctacttctttttccgagaaaatgcagtagagcatgactgtgggaaaacagtgttctccagagctgcccgggtgtgcaagaacgatattggtgggcgcttcctgctggaagacacctggaccacattcatgaaggctcgcctgaactgctcccgtcctggggaagtccccttttactacaacgaattgcagagtactttcttcctgcctgagctggatttgatctatggcatctttaccaccaatgtgaacagcattgcggcctcagctgtgtgcgtcttcaacctgagcgccatcgcgcaggccttctctgggcccttcaagtaccaagaaaactcgcgctcggcctggctaccgtatcccaacccaaacccccacttccagtgtggcaccgtggaccagggcctgtacgtgaacctgaccgagagaaatctgcaggatgctcagaagttcattctggtgcatgaggtggtacagccagtgaccacagtgccctccttcatggaggacaatagccgcttttcccacgtggcagtcgacgtggtgcagggcagagaagcgctcgtccacatcatctatttggccacagattacggaaccattaagaaagtgcgggtacccctgaatcagacctcaagcagctgtttgctggaagagattgagctcttccctgagaggcggagggagcccatcaggagcctgcagatcctgcacagccagagtgtcctgttcgtggggctgcgggagcacgtggtcaagatccccctgaagaggtgccagttctaccgcacacgcagcacctgcattggggcccaggacccttactgtggctgggatgtggtaatgaagaaatgcacaagcctggaggagagcctgagcatgacgcagtgggaacagagcatctctgcgtgtccgaccaggaatctcaccgtggatgggcactttggtgtgtggtctccgtggacgccttgcacgcacacagatggcagcgccgtgggatcctgcctctgtcgaacccgctcctgcgacagcccggccccgcagtgtggtggctggcagtgcgagggccctggcatggagatcgccaactgttccaggaacggaggctggactccctggacctcgtggtctccctgcagcactacctgtgggatcggcttccaggtgcggcagcgctcctgcagcaaccccactcccaggcacgggggccgggtgtgcgtgggacagaaccgcgaggaaagatactgcaatgaacatttgctatgtcccccacacatgttctggacaggctggggtccttgggaacggtgcacagcccaatgcgggggtggcattcaagctcgccgcaggatctgtgagaatgggcctgactgtgcaggctgcaatgtggagtaccagtcttgcaacaccaacccgtgtcctgagctgaagaagaccacgccctggacaccctggacacctgtcaacatctctgacaacggcgaccactatgagcaacgattccgatacacatgcaaagcccgcctggctgatccgaatttgctggaagtgggaagacagagaatcgaaatgcggtactgttctagcgacggcaccagtggctgctccacagatgggctttctggggatttcctgcgtgctgggagatactctgcccacacggtcaacggggcttggtcagcctggacgtcgtggtcacagtgcagccgtgactgcagcaggggcattcggaaccggaagcgtgtttgcaacaaccccgaacccaagtatgggggaatgccttgccttggcccatctctggaataccaggaatgcaacactttgccctgcccagtggatggcgtgtggtcttgctggtccccctggacaaaatgttcagcaacatgcggcggtggacactatatgaggacccgctcttgctccaatccagccccggcctatggaggggacatctgcctggggctgcacacagaagaggcactctgcaacacgcagccctgcccagagagctggtcggagtggtcggactggtctgagtgtgaagcctctggcgtccaagtccgcgcccgccagtgcatcctcctgttccccatgggcagccagtgctccgggaacaccacggagagccggccgtgtgtgtttgactctaatttcatcccagaagtatctgtggcaagatccagtagcgtagaagagaaaaggtgtggagagttcaacatgttccacatgatcgccgtggggctgagcagctccatcctcggctgcctcctcaccctgctcgtctatacttactgccagcggtaccagcagcaatcccacgatgcgactgtcatccaccccgtctcacctgccccccttaataccagcataaccaaccacatcaacaaactggacaagtacgactcggtggaggccatcaaggcatttaacaaaaacaacttgatcctagaggaaagaaacaaatacttcaacccacatctcactgggaagacctattctaatgcctactttacagatctcaataattatgatgagtactaacagctttcatgttttgggcttcttgtaaatccccagttcctcaaggcctgtgccccatgactgcccatgtttctgaggcttcagagtcgaagtttggatacatttcaagtgcatttcaagccaccagagtgtcccattggtgccaaaaatacacgtctttaaaagcaacaaaaattgaaataagacatcgtgaaaatcttgaccattgttgattgagccagggtggtgaagtttttaattggtgttcatcctatttttctgacaagtccattggtttgttttttgagcattattttataaatgtgccacccacattggaaggagtctttctttagaactttggagtgtaaatcttcatgatgttgtaaattcaagaaaataggcactttctctgaaagacctgctccttccacaagaagtgcataggtccataatatttcataaaatgaagaaaaagaatgtggccaaacaattattcaccatggattgcccaactttccaaatctggataaagctgtgggattcttggaagcagcttgagtgttttcatcttgcctgggaagcccaggaattccacctggtccacaccggcagaagttacagtagactgtgaggcaccccaccttgctcctgatgcagtttctgtgccattgctggtgctggtggaggcagcggagcagaggctcaggcacaatgaagcgtggatgtgttctgcaggttgctgcaaaactcaccttattctgacttttggatttcatggcattccaggaagctccttgccatgctgttggcctggaagtccacctgtctggtccatagtgacgtcctgaagagccagtctgtaaaataaccaaccacttacttagcgtttggatagactccatgccttctctctccctgcaaagaaaaatcttgaacatttatgatgtcaattagtgaaagtattgaaaatactaaattataactaaaagcaactttttatgttattgaaaatattgaaagaactgatattaatgataatcattttatttttcatctctctgatatacccaatgtgtggcaatcagcccctaccatgagcattaatgccatgtaaagctggctttctggagtctgccaggtccacacgaagtgctacccccagtttctgctgttacttgctgcctccaggccaggggagcaggagatgctcagctctggtgccttttcttttatttcagtgctgccttcccacccacccagtccattcaccctcacctctccctgcatggaggcaacagcatttccaagatgtaccttgggaagtcaggatagctggaagtaagggtttttggggatccctgtggtctcttcactgatcatcgataagcatttaagagtgtgctaacaccattcacagaggtccctggaaaaaaatatataattttctcacaaacaaccaatacataacctatggcagttggttgaataattattgaaaaaaagaacacgactgaaaaagttcatctgatgcctctgagcatgtgataaagtcctgggtagacatggaaacgtgttcttacaaatgaaccttcggatctatgaaagaaaatatagtagggggactaaggaacatagaattttattagcatatgtgattttacccttatctttgtttctaatttaaagaaacaatttcagaaagtgttagaagaattctatgtttaataatgaatattgttgagttcaaaatattctcatatacccagatttacagagatgacacagtattgaaatggcaggtgggctctgtaagttatttggggattaatgaaatccagggtcttggcaggggggactcaatgtggccctctcactcatccctcatatgtcaagagtccttcctgtcttatatgcacatgctccaaggtccatactcagtagggggaaatctagccggatggttccccaattgttcctcggctggattttcatcatcagaaatttccaactcatctcatcagttttcttgtaagaaaaaaacatttttcactttgtagcacaattttagttatttttgagtcttcttccctaatagtttgtaagcttaaagggacaattttaattttcccctggttaaagagggattctaatatttccaagaatgttttccactggaattgatgggaaatggtttctaaatggcatcgaagctggtctttaatgatcttttgcaatgacttgggaaaaacaccctccctcactacaggatcttcatgttgttaataatataaacaaacctttgaaattagcattgcaaaagaatcccatttttgtttcgtaccacactgttcaaaggaaaattgtttatctctcttcctttctctctctctcttatttgacagaatagcaagtgtttagataatttcagatatattcctaagtattttaccagctgtggaataagttgtgtttgtccatcactgtgtagctaccgttcacatgttctggctctgtactccacgcttatcgcgtgaaccctcacatgttggactttcacagtgtgatctctcacctgtcttggaaactccttcataaagccgctcttccttaggcctgggctgtttggaagtcctggtgaaactttgcggttcacattttaaattcctgaatgaccttttcattctctctttctttatctttgtttttgtccttcattccctccttttgttcttccgtcctgcctttcacgtcacctacttatccgactatttcctccatttgcttcttttctatttgccatcacctgtgacccgagtggaacaaaaaccaacacatagttttaagctacacctttctgcacctgatgtaaaatgacattaatccactatttaacttctaaaattatttctgaatacagttgcagataggctggttttcatgaggaagctcgcttggctttagtcttacatttaaattctttgaaagtggctcccagtgctattcagggtcctttcttgaggccagactcatcaccatctactattgattttacagtgcactgacagtttacaggaaggagaagaacagaatttctgcacactacacaacatgtgggcttcctgtagctccagggacatgtagctttggtgaaactggggttttgtaacctctgaatgatatggacttagtgaattctaaggaactcagggggcacgtggtcaggctccaccgcacagaagagccacagtctccagactcatggcgttccctccagaactccccattcccctctgagcatatttctatgctgctgcttcttgtgacttacatgaggcatctcagcttcttcatgtttgtagggatggttccctaagcctgttcaagtaggctctcactagagttaccattcatatttgagaagaaaagaacatttattaaatgtatgtgtggggctgaggttctaaaggaattgaaaagagacgataaacattgaatgagggtgagggcatccctgctggggagaaacctctgtcccctaggaagagtccgttcatgtcatgtggtttgggatgaaccaggggtctgcccccatcgggtcacaggtgatgccaaatagaaaagaagcaaatggaggaaatagtcggataagtaggtgacgtgaaaggcaggacctggtcaccccagcaagtgctatggacagttcccggaaacggttgcccacttcacaggtccatgggtctgacccttggactctgccaggatcaactgcccagagtgccagagttttagccaaaggtgtacttacttccttatttatctccaaaaggatggaaactgtgggagtcaaagcctattttgctgagtgttcccactggatcctctgtagaattagcaggtcatgctgtcaaaatcatggacaaaggctgggtgcagtggctcatgcctataatcccagcactttgggaggccaaggtgggcggatcacctgagctcaggagtttaagaccagcctgggcaacatggggaaactccatctctacaaaatatacaaaatattagccagccatcgtggtgcgtgcctgtggtcccagtttcttgggaggctgaggcgggagtatcatttgagccaggaggttgaggttgcagtgagctgagatcacatcactgcactccatcctgggtgacagagagagaccctgtctcaaaaaaaaa

SEQ ID NO: 253118 - DNA, 805 bp, Homo sapiens
acagggcttccgaggcgatcaggcagcgtcagtcttcagccactaaaccgagaagatctgagaaagagtcagtcagagagccttgggccagagttccaggggctctgggagtggcttccagaaaataggaagaaaggaagaattaaagaaagaagaaaggaaagaagaaaagaaggcaggaaggaagaacaaaaggagggaatgaaggacaaaaacaaagataaagaaagagagaatgaaaaggtcattcaggaatttaaaatgtgaaccgcaaagtttcaccaggacttccaaacagcccaggcctaaggaagagcggctttatgaaggagtttccaagacagggacctctgtgaatggtgttagcacactcttaaatgcttatcgatgatcagtgaagagaccacagggatcccaaaaacccttacttccagctatcctgacttcccaagactggctcttcaggacgtcactatggaccagacaggtggacttccaggccaacagcatggcaaggagcttcctggaatgccatgaaatccaaaagtcagaataagattatttgcctcatggaggacttgcctaattaccagaataaggttggcagtttgtgatatcttctggttaagttttcaactttagttatgaagttaccacgagaagcaggagttatgaatacaaagcattcagaaaatttgccagcatggacttatatctctaaaataggattggctcaagtgatttcaaggcaccataccaagacctgtgttatgtcggagaaaacaaaagacaacagatattcctt

SEQ ID NO: 253119 - DNA, 454 bp, Homo sapiens
agcacctcagagatacctcagcccagggcacagtgcaccctggggatcctttgctcccaaccaccccgaaggatgcatctggaatttctgcttattgggtgaccaaaaaaagggagaagagggtttgttttcatcattgccatttttattcacgagactgtcaactaggtcagtaattcttcaaaaccaatcctggcaaagcatgggaaggaaccttcgttctgcagaagcgtacacaccctgataaggtgtcaagaacctccgtttgagtacccctcgggttaagcctgactgggctgccggccacccttcaggcagagctgatgttctgtgatgaccttcacatcaagcatgaggtcgtgccccaagaagggtttcactgtgcccagggaggttcccctgagaaggacaagccattggcaaattcatgaatcagagttctgtttttagttct

SEQ ID NO: 253120 - DNA, 252 bp, Homo sapiens
tcacagctcactgcacctgggctcaagtgatcctcctgcctcagtctcccgagtagctgagactacaggcgtgcaccaccacatctggctaatttttttttttgggttgagatggagtttaaccatgttgcccaggtgggtcttgaacccctgagctcaagcgattcactcatcttggcctctcaaagaaggccaagaaacacatttttacaattggtgtttttattttcagaacccagagacaattgttag

SEQ ID NO: 253121 - DNA, 409 bp, Homo sapiens
gacatataataattgatcttcctgggagtgctgtaatgtaaaaacaattcaggctgttggaagtatattttacaagtatgcgttgggccttggggatgttatattgaaaaacccaattgtacagttaccatgggaacccaattaaaatagattggttgatttttttttttgtctttcatcttgaccaaaaatctaatgtattttaaatgttttcatatggaattgtagtcatatactgacttgctgtgccaaagtattctgctcgttttttccaactttaagctaaaatagtgaaaagttctcgagtggatccttatgagaacgtctcccaaagagaatcagtcatgtttttgtggaaaagtttgtgtgagtgatgatggtagagtggaggtggtggaaagcttttatg

SEQ ID NO: 253122 - DNA, 415 bp, Homo sapiens
agaaatcttcctcgttaagtcattgatcccgtccttccgaagggatcttggctctctgtggtgaaaatccttcaaaccctgtcctgctttggtccaaggtcattccacttctaggaatctttcctgaaggatctaccagcaatgggaacaacagctgcagcttaagtggttgcatcatggcatcatttctaatgtcagaaaactggaaataacacgaagggctgacatggggaggactggtcagataaattcagggcacagctgtccaccggcctggcagaaccttgaaatcacatcattaaaagcctatttaatgatgagagaaattgctcaacggaggctaaaaacaggatacataaaactgtatactcacagttttttaaagtatgtctgcatgactgtacatgcaaagaaa

SEQ ID NO: 253123 - DNA, 1057 bp, Homo sapiens
ggaaacctggtgatatagaaatgctatgcaggagttccacaggtcttctcatctctttgcatttgggggtgagatatttcttcattgtataggacagggttcagcaagctctgactcctacaagccaaatcttgtccacaacctgttcttgtgtctgtttttaaatagttgaaaaaaatcaacagaattgtattttgtgacatgagaaaattatatgaaatccaaattttagtgtccataaataaaatgttattgaagcacagtcatgcttaaattttaacgtagtatttgtagttgttttcccattacaaacaaaattgagtagttgcagcagagaccctatagcctgctaagactaaagtactatctcctttacagaaaaagtttgttgaccctagggtgtaggctactgaaagcattgtgtttcgcctactcagttcccactccctagatgtcactagcatcttccactacagtgacagaaaaaaatgcccagctaggtttgcaaatggccccttggggtgtgggagtgagtagggagggtggtgagatgtacctctcccatttgagaaccaacacataatatgtggtatctcctttgttagtctttataggagtccataaggaatttctcttaggtctctatattaagaaatgttatgtttctcctggtgtgaatctcataactgattgtgtttccttttgttgagacttttggaaaaagagcccagatggttggaaacagcctgcctgtagtagctgtgtgaaaatttatgtgatctcctatcctatatatagatgttacccttgactatggtttattttccctatctttattttcatttacctgctttttacatcttttttaatataccactctattaggtgcattctttaaaaaaattattttattttatttttagagacatggtttttattactgtgctgcccaggctggtcttcagctcctgaactcaagcagagtcatcctgtctcagcctcccaagtagctgggatgtagatgtattcttaagttgaactgtaaatcctatttgga

SEQ ID NO: 253124 - DNA, 688 bp, Homo sapiens
agcgaagggaggccgggccgaggtcgcgccccaggcccaggcccgccctcacttggagaattgcgcctgcacggcggccaggcccaggctggccgggaccaggtgcgggaacttgcacacggcgcaggtgcagaggccggggccgcctgcgccgccgccggggagagcgaactggccgcacggcggctcgtccagcgccagcgacagatgaagagaaaactgagccataggatgaagagaaaactgaagcacaagatgactgcatgcttttggccatagacacagggacgaaaagtcgcactcacttgacactctctgggatataagaagtgctaccatttcttgaaaggagattaggaagcagccctgggaaaccctggtacctctgtggaaatcggcactctccatttccctgctgaactgtcagtgttgccgtgctgttggtggtcttggaccaccgagatcatattaataccaacaacaagccagcaactcagagggctgccatttgcttctccaaacccattcttcacttacctctgctctgttctgtgtcctttatctgcatgggttatagcaacaggttccctactctctggctcctggctatgtctgaccaatggcagaatgaccaatgatttagagaatcaacctgggacagggccatataagactataaaacaggctg

SEQ ID NO: 253125 - DNA, 433 bp, Homo sapiens
aaaagaacaaaaagataaagaactaaagattcagcctcaagaaaggaggaaattctgtcatatgctacaacgtggacaaacactgaaattatgctaagtgaaataagacaaccagagaaatactactcaatactccacttacaagatgtctctaaacagttaaactcagaaacagaaagtaaaatggtagttgccaaggattgactggagggggaaatagggagtgctgttcaaaggatacagaggttcagttgtgcaacacgaaaaactctagagatctgctttaccacactgttcttacatttaacaataccggattatacacttaaaattttgttaacagaattaaagaagtacagccatgttaacaaaaaggctttggatcagtttgtaaatttctctgagcagaaagaaaagttaataaagcgacaag

SEQ ID NO: 253126 - DNA, 578 bp, Homo sapiens
acgaactggaaatctgaatttttaaatttagatctttaaatcaaattatttttatgcatattttcatttaatatagagtataccaatcgattgaagcctttcacaagtagtgcgctgagcttttcttattgaagagagtgaattagtttctgagaagtcaatctattgtgaaaagtttcagatgagattattttcttttagtctttttaaatatcactatatgtatttaaatagaagcaataaactagagagagtgtttcttgaaaagacaatgttttatttgccaccaggcagaacagaatgagcattggtagagaaggctccctcttggtatgttactgataaacttgtacttcctcatacttgtttgtggttctactgacttatttccaaacttaagagtaatgtacttcgaaaacaacttggttattctttaaatttcaggtaaaaccccttttcctaacactcatcttatttccactgtcttatttcctctcagatgttcatatttcacatgttcaaaatgaagcgtactatttcccctccaataaacgaagtctcctgccaacttcactgtc

SEQ ID NO: 253127 - DNA, 493 bp, Homo sapiens
atccgtataaattcttcattgcttaaaatgacagactgaaagcaaagccacatgttgcttgcttcattgcctgttgtggcagcttttaaatccctgccttcctaggaagtgacctcataagaaaatcttataagactgtcctgtggggaaatcctcataacatttgggttaatgcgcttacactgcaggagaggtcaccaggaacatccaatcatcagaaagtcctacagggacgtgatgttacctgggtcatggaaggatctctctcaacacacatctggggtgttttgtggcatattctatagcaggccatgtggcttaatagttaaaatatggggctgaaagttacgagggttgggggatcatatggcagctgagctattgcctgacacgctgaccctacacaactcatgagttcgtggtacttcagtcagcttagctgtaaaattgggcacaaaggccagactttaccaaaaccagatgttggactcca

SEQ ID NO: 253128 - DNA, 375 bp, Homo sapiens
ggaaatggcagatgcttataaaaccatcagatctcatgagaacttactatcatgagaacagcatgggggaaactgcccccatgattcaattacccccacctggttccttcctcaacacctggggattatggggattacaattcaagatgagatttgggcagggttcagaaagcctaaccatatcagatgggaaggacatgagggttgacaaaatatgtattgggtacaatgttcactgtttgagtgatgggtccactagaagcccaaacttcaccattatgcaatgtaccatatatacgcaatgtaacaaacctgtacatgtaccccttcaatctgaaataaaagttgttttttttttttagatgcgaagttctg

SEQ ID NO: 253129 - DNA, 473 bp, Homo sapiens
gctgtgcattaaacactgtccgcagggaacttggttttggtgaacttcagttgcataaggaggtcttaccattcatcctctaaaattttggcattaaaattatgagtgcaaaatcattttgctgataaagcttatatgttattgttgaatattagcacattggatactagaatgaaatattagataactaaatgcattgtcctgagtacactttacaaatatgtatacatatatgtgggtgtgtatacgggtgtgtgcatcttatacatgtatacctgtgtgttcataccccatgaacttttcccttttctccatgttgtcacattttaaagcagttaaagcatttaaagcattttaaagcagttaagcatttaaagcagtttaggtcagccaaaccttgaggtggaggttgcagtgagctgagattgtgccactgcgctccaccctgggtgacagagcaagactctgtctcc

SEQ ID NO: 253130 - DNA, 603 bp, Homo sapiens
ttcattatcatatgttctcttaccttattctcttagcactcttaagggtttacaggcaagaattgcaacaaataaggaaactgagatccgagaaagctaagagaatcacatgagatgagagaattattaagtgactagtcttgagccaaattagggtcctgatttgccaaggatcgttctagttcacacgtattacctcaacataattattaaatgattccccttaactctcaaaaaagaatttgactgattccttggtcactctaagtagaacacacatttccttagccccagtcctgtgccctttccactgcatgaagctgggcttaaatgtatctgctccttcagaaaactaacatcctgtttcagtccgtgtctcactacttttgctgcttcagagcagagtggagataaaccgtaggtgtagtcaatgccatctctgcactaataaagcttctgtttcccggtcagcttcctgcagggcaagagctccttttcaaattacgatcaagagcattaatttatcagacatcatgctgaatatgccctgaagtttggtttgttttttctatcattacatctccccagagttgcagtcaagaa

SEQ ID NO: 253131 - DNA, 182 bp, Homo sapiens
caggagaaagggttagctgcctggaaaccactggtggtttctgcattggcagtttcgagtcattttatcctcactccgtgtatgaatcatacttattgtatattggttggattctacctagatgtagaggattatgagtgaaacagattggtttctgtaattatttgagactatgatgctat

SEQ ID NO: 253132 - DNA, 688 bp, Homo sapiens
aggtgtttctctggcttctgctgcagagaaaatgttgcagagggagtggaaagtagcaggtgccggtaacccccaaccagctcccagatacttggtaaggcagatctcacatctgcagtattctgctagcagcagtgagttaagttccaggtcattttcgattagaactcaaaactgcctcaggccataagccttcctcagggaagtagctatcccagctttcaggccacacccctcccagtctaaccacaaagctggggcaccccagctcttgcactcatggctgcagcacacttccactcacactacccctgattcagttctggccaagggacttcatccccccttgaggtcatattgcaaaattcaggtgggagtttcttttaacctatgaccactgcctgagttagttggtagaattctgtgaagtcccctgtgacacagaataagaaatggcttcccttgatccatgctggagactgggaatgcacacaaggctcttctcactgctgtttctccttttatattcctcaccactgcctatatcattgccagcactgggtaagattaagggccttcccctgtgacttggatttctaggttccccaatggagaggtgtatatcctggaggcagtctctcccaactcacactctgaggacttacagttttttgcctggctcatggtg

SEQ ID NO: 253133 - DNA, 443 bp, Homo sapiens
tattttttggccagcctgcttccttccccctttcccctccctccctgcctgccatcatctgcctggtgagtttgcatcactcctagggcccaggggtccaattaggggactcccccagggaagctgactgaggcaatccatgccccaagggggcctccctgagctgaagttttaattagccatcactgctctccctgaaactctgacctgcccatagctctaccatcccaggctggccttgtggcaggaggcagaaggcaggactggcgttcaacccagctgcgcagcagaagctgccctggcagagcagagagatgtggccaggcttccctcccacacagctctctgtatccacctcagcatcacctcatttagtccagtaaatggattacaaaataaatggactaagcgacttcatccattaaatagattaaatacattaa

SEQ ID NO: 253134 - DNA, 508 bp, Homo sapiens
ccactcattcactctttaacaagtattttgaagtatatatgtttgaattatgtgttcttctttttgacaatttgactatatgttgatagtgcaataattgtgcagtttaagccttcaataaagaggtagaatgtgatgaaaattggaaggaaacctgagggggcattcttagtgcttggttaaacagaaagcttaacagttcatgaaggctggtctaagaaaggaattataagcatgggtgacccacctggtgtagagagtgtatccccagatatataacattgcattttagaagtctaatatttggtatataatttttgaaatagtcctttatgtgatgtttccattagcaaacagcaaattgcatctgtaccaagagatttcacttccttttttgtttaaatatgcattttggacattgttcaaaacctatgacctaaggcttttccaagagccctttgcccataaagagaatgaataaattagaggccagagtcaaaaaaaaaaa

SEQ ID NO: 253135 - DNA, 747 bp, Homo sapiens
ttgacctacaggtttctctgaaatagtcctgctaccttgagggtcactcctaggattctgaaatcccccaggccttccaaagaccatagcctgatgtgggacacagatggttatgcatttactcagcaaatattaactgtttaaaatccttcccaagggccaagtgtcaagtgtcatgcacacatctgggtattggggattcagtggtgaccaacgggcaaagcatgtgcccgtagatcttatgttgtaggggagttgatgatgttggggagaggatggtgtatagtaggtaaacaaataaagtgcctggtcatttccgattgagatacaagtactgaaaacagtaaagcagggtgattttcagaatgatggccattggtttagattgggtgcccaggaaagccaatgggaagatctcacttgaactgagacctggagagataaaccatgtcggctgggcgcggtggctcatacctgtaatcccatcattttgggaggccgaaatgggataactgcttgagcctaggagttcaggaccggcctgggcaatatggcaaaactctgtctctacaaaaaatacaaaaattacccgggtgtggtggcacacgctgtggtcccagctactcaggaagctaaggcagaaggatcgcttgagcctgggaagcggaggttgcagtcagccgagattgcgccaccgtactccagtgcgggtaacagagtgagattatgcctcaagaaaaaaaaaaa

SEQ ID NO: 253136 - DNA, 200 bp, Homo sapiens
ggcccagcggagacactggaagaagggacagctcaggccacagggctgcttctagcggacagcacccagcaactcacagacaccgcatcaaagccttgaaaaatgaccatcgccagcctcccgtccatagacaggatgacactgtcagctcttctgtggggctcgccggccccctgcccatcactgtcagacacagcacc

SEQ ID NO: 253137 - DNA, 439 bp, Homo sapiens
agcatagcttgggttatgttttataagccaagtaacaacagacagaacatcccagcagaagaccctctttggaaacagcacaagatgtgccagcgaggtgctgtctaaggcactgcctggaacacctggccaggtgcagaatgggaggagtcagtcctgtgccactcaagatcctttggccctgcgctgtcctggacggaagctgcttatcacaggtggttgttgggtccttgcaatggagcaagtgacagagctgagatatgccgtgagcatcttacacactggatttcctataccttacacactggatttccaatactttgaatagaaaaaaagaatgtaaactgcctcgctaataacttttcatgttaattacatgtggaaatgatagtattttggatcccttggttctgataaaatacatccctaaattgaattt

SEQ ID NO: 253138 - DNA, 334 bp, Homo sapiens
cacctggctaattttttgtatttttaggagagacggagtttcaccatgttggccaggctggtcttgaactcctgacctcaggtgatccacctgcctcggcctcccaaagtgctgagattacagatgtgagccaccgtgcctggcctagtccccactttctaataccaccatcatggggatggaatttcaaacataaatttgggggatgggacacagattcagaccatagcacatcactttcttcttcctaacagatcttcaattttgttcaactatccacccatccatggattgactttaatcagtccattccaatgaatatttggcctttctc

SEQ ID NO: 253139 - DNA, 590 bp, Homo sapiens
ttgctgatgctgctggtgtcagagcaacatgatgaaaactactgatttgtttaatgaagacagttgatgccaaggacatagtcatgattatttaccccaaagagtttgtttactccttcatctggtggtctccttatcccccaatgggcagatttcccacttcatttacttcattttgtgctccattttagccttttttttttttttaaaccattgtctaccatattggctgtattattgtcagtattcaattagggtcttttggactgtaacaacagaaaagagaactcaaactggtttagaaagttattaaatggatttatgtctaataaacagaatttactagctcataaagagaaagtccaggatagggtagccttcagtgctgtttgatgatgtcatcaaggacccatgtgattcacttctgtttttttgctctgcaagccacagttttggcttcactttaagactggttccgcttgtggttttaggacagctgctggtagcaatcaagtttacaagttgcttgcttacaacccttggaaaagtaacttcctggggctttcttcagaataaagagaagttttcca

SEQ ID NO: 253140 - DNA, 195 bp, Homo sapiens
ttgggtggcagctaaccatctgcagctcccagacaagggccctgaccccctttcattccacagcactgttgtacttacaaaaagaatccacagcatactcaactagggagaagggaataaaagactcactgattgaatagaacatactgtttttggagtaggaagctagatattagaaaaaattttgggccaggc

SEQ ID NO: 253141 - DNA, 457 bp, Homo sapiens
tccccaacagccaaccttacttgagtaataggtttcagggaggccaaacgtgtgatttttggccttcttacttgtaagtgacagaaattcacaagagttagtataagcaagacatttattttaatgatacaggggtgtccccaggaaagcagagatgaaatgtaactaggccttcttaaaggtttctctctcagtgtttctcagctctgctctagtgcacacagttggaaacatggtgctgtcccccaccctaaaagttctggagctttattcttcacagtctatcacacagagagtcacttctctttctcaggcctgactgcaaaactctccattattcttggcctcacttaggtgctcacccactgtgtccagggatcaggattacatgtatgaaggttgggcgcatacgactataccccttcctccccaggagtacattgaaaagatgataaaa

SEQ ID NO: 253142 - DNA, 3858 bp, Homo sapiens
ctactttattctgataaaacaggtctatgcagctaccaggacaatggaatctacgttgactttagcaacggaacaacctgttaagaagaacactcttaagaaatataaaatagcttgcattgttcttcttgctttgctggtgatcatgtcacttggattaggcctggggcttggactcaggaaactggaaaagcaaggcagctgcaggaagaagtgctttgatgcatcatttagaggactggagaactgccggtgtgatgtggcatgtaaagaccgaggtgattgctgctgggattttgaagacacctgtgtggaatcaactcgaatatggatgtgcaataaatttcgttgtggagagaccagattagaggccagcctttgctcttgttcagatgactgtttgcagaagaaagattgctgtgctgactataagagtgtttgccaaggagaaacctcatggctggaagaaaactgtgacacagcccagcagtctcagtgcccagaagggtttgacctgccaccagttatcttgttttctatggatggatttagagctgaatatttatacacatgggatactttaatgccaaatatcaataaactgaaaacatgtggaattcattcaaaatacatgagagctatgtatcctaccaaaaccttcccaaatcattacaccattgtcacgggcttgtatccagagtcacatggcatcattgacaataatatgtatgatgtaaatctcaacaagaatttttcactttcttcaaaggaacaaaataatccagcctggtggcatgggcaaccaatgtggctgacagcaatgtatcaaggtttaaaagccgctacctacttttggcccggatcagaagtggctataaatggctcctttccttccatatacatgccttacaacggaagtgtcccatttgaagagaggatttctacactgttaaaatggctggacctgcccaaagctgaaagacccaggttttataccatgtattttgaagaacctgattcctctggacatgcaggtggaccagtcagtgccagagtaattaaagccttacaggtagtagatcatgcttttgggatgttgatggaaggcctgaagcagcggaatttgcacaactgtgtcaatatcatccttctggctgaccatggaatggaccagacttattgtaacaagatggaatacatgactgattattttcccagaataaacttcttctacatgtacgaagggcctgccccccgcatccgagctcataatatacctcatgacttttttagttttaattctgaggaaattgttagaaacctcagttgccgaaaacctgatcagcatttcaagccctatttgactcctgatttgccaaagcgactgcactatgccaagaacgtcagaatcgacaaagttcatctctttgtggatcaacagtggctggctgttaggagtaaatcaaatacaaattgtggaggaggcaaccatggttataacaatgagtttaggagcatggaggctatctttctggcacatggacccagttttaaagagaagactgaagttgaaccatttgaaaatattgaagtctataacctaatgtgtgatcttctacgcattcaaccagcaccaaacaatggaacccatggtagtttaaaccatcttctgaaggtgcctttttatgagccatcccatgcagaggaggtgtcaaagttttctgtttgtggctttgctaatccattgcccacagagtctcttgactgtttctgccctcacctacaaaatagtactcagctggaacaagtgaatcagatgctaaatctcacccaagaagaaataacagcaacagtgaaagtaaatttgccatttgggaggcctagggtactgcagaagaacgtggaccactgtctcctttaccacagggaatatgtcagtggatttggaaaagctatgaggatgcccatgtggagttcatacacagtcccccagttgggagacacatcgcctctgcctcccactgtcccagactgtctgcgggctgatgtcagggttcctccttctgagagccaaaaatgttccttctatttagcagacaagaatatcacccacggcttcctctatcctcctgccagcaatagaacatcagatagccaatatgatgctttaattactagcaatttggtacctatgtatgaagaattcagaaaaatgtgggactacttccacagtgttcttcttataaaacatgccacagaaagaaatggagtaaatgtggttagtggaccaatatttgattataattatgatggccattttgatgctccagatgaaattaccaaacatttagccaacactgatgttcccatcccaacacactactttgtggtgctgaccagttgtaaaaacaagagccacacaccggaaaactgccctgggtggctggatgtcctaccctttatcatccctcaccgacctaccaacgtggagagctgtcctgaaggtaaaccagaagctctttgggttgaagaaagatttacagctcacattgcccgggtccgtgatgtagaacttctcactgggcttgacttctatcaggataaagtgcagcctgtctctgaaattttgcaactaaagacatatttaccaacatttgaaaccactatttaacttaataatgtctacttaatatataatttactgtataaagtaattttggcaaaatataagtgattttttctggagaattgtaaaataaagttttctatttttccttaaaaaaaaaaccggaattccgggcttgggaggctgaggcaggagactcgcttgaacccgggaggcagaggttgcagtgagccaagattgcgccattgcactccagagcctgggtgacagagcaagactacatctcaaaaaataaataaataaaataaaagtaacaataaaaataaaaagaacagcagagagaatgagcaaggagaaatgtcacaaactattgcaaaatactgttacactgggttggctctccaagaagatactggaatctcttcagccatttgcttttcagaagtagaaaccagcaaaccacctctaagcggagaacatacgattctttattaagtagctctggggaaggaaagaataaaagttgatagctccctgattgggaaaaaatgcacaattaataaagaatgaagatgaaagaaagcatgcttatgttgtaacacaaaaaaaattcacaaacgttggtggaaggaaaacagtatagaaaacattactttaactaaaagctggaaaaattttcagttgggatgcgactgacaaaaagaacgggatttccaggcataaagttggcgtgagctacagagggcaccatgtggctcagtggaagacccttcaagattcaaagttccatttgacagagcaaaggcacttcgcaaggagaagggtttaaattatgggtccaaaagccaagtggtaaagcgagcaatttgcagcataactgcttctcctagacagggctgagtgggcaaaatacgacagtacacacagtgactattagccactgccagaaacaggctgaacagccctgggagacaagggaaggcaggtggtgggagttgttcatggagagaaaggagagttttagaaccagcacatccactggagatgctgggccaccagacccctcccagtcaataaagtctggtgcctcatttgatctcagcctcatcatgaccctggagagaccctgataccatctgccagtccccgacagcttaggcactccttgccatcaacctgaccccccgagtggttctccaggctccctgccccacccattcaggccggaattc

SEQ ID NO: 253143 - DNA, 459 bp, Homo sapiens
gtttctggaatcaccctccccgccacgtatatgagacatatccttgattgtccgtgaaatcaggtggtccagggccaggttggtccatagagatgttgacaaaacaatgtaaaagttcatctagagaactgagtacttaaggaactatcacaaaagaagaatgagagggaatgtccactgccagacaccaaaatgtgttctaaggtgaaagtgttaaaacagcatgttgctagtgccactccaggcaaaatcctcaagtgctctaagggcttgggcaagtaccttgctctaagatagccctgactttgtgagctgcctaaaggcatgaaaattcacaatattcaaacacacttctgacaaaaaccaaaacaagatcaaaaacacatctggagccctgaaatggggtacagggacccagtttatgatccttgacacaataaacagaatagaaaatccaaa

SEQ ID NO: 253144 - DNA, 488 bp, Homo sapiens
aatagacttacaaaatgtctaaatgatggttcagtatggtaaagctgtaaattccatccaaatgaatttaggaatttaatgcgattgcaatcaaaatttcagagagtttttttccccatagatgttgacaaaacaatgtaaaagttcatctagagaactgagtacttaaggaactatcacaaaagaagaatgagagggaatgtccactgccagacaccaaaatgtgttctaaggtgaaagtgttaaaacagcatgttgctagtgccactccaggcaaaatcctcaagtgctctaagggcttgggcaagtaccttgctctaagatagccctgactttgtgagctgcctaaaggcatgaaaattcacaatattcaaacacacttctgacaaaaaccaaaacaagatcaaaaacacatctggagccctgaaatggggtacagggacccagtttatgatccttgacacaataaacagaatagaaaatccaaa

SEQ ID NO: 253145 - DNA, 557 bp, Homo sapiens
gctaaactagacgctggggtaacaaagctgagttagataccctctcctctgaggcagctaaagagaaggaaagtctggtggctgacaagtaaaccaacagttatgttcttcagagaggagatctcagactctctaagcaaaagaaactaatagctgtatgacaacagccaaagagtaaatatcctttcaagtccaatcctgcctaagatgtcaaaatcaagaatgaagaggttatgtgctgaaacagaatgaccttcacaagatgcagcctctggatcttggacttccccagcctccagaactggcatcaaggtacatcttggtgttgaatgaagttgttccatatgggctcatttctcaggttgtttgcaaaaaagaaataatgtaatacagtgcaccaactgtatttcaaagatgcaggccaactcgacatttcatgtgctgaaaacaggtattaaatatactttataatctgatatctgatatgttattgcatttgggtaccactctctaagtatatttaatgttggaataaaaactgaattgaaaagtttttt

SEQ ID NO: 253146 - DNA, 502 bp, Homo sapiens
tttgcttccattacagctgagcagagccccataaatgagaagccacgaagactgaggttacacagtgatccacagttgccacaaaactgagcaggcatcaaggtacatcttggtgttgaatgaagttgttccatatgggctcatttctcaggaagcccgatcgggttaaaagagaaggcaaattccttttagctgcaattattatttgtggaatatctaatcacatgatgctgtgaagtgcacacaatacacagaagacaccaacattaactttgaggaatttatcttctgtatgtgaggatttgggttgtttgcaaaaaagaaataatgtaatacagtgcaccaactgtatttcaaagatgcaggccaactcgacatttcatgtgctgaaaacaggtattaaatatactttataatctgatatctgatatgttattgcatttgggtaccactctctaagtatatttaatgttggaataaaaactgaattgaaaagtttttt

SEQ ID NO: 253147 - DNA, 346 bp, Homo sapiens
aattcctaactcttaggctggagttcttcctgttatgtgaagccaaagtagggaatcattaggtccaagaataggaattacatttatattttaatgaaaaggtgcagtaaaatttaaaggaagagagagggttgcagatgacagaatacaaagaatgttgagagagatgaagcaagatgagtccatagaatcagaggcttagaagtaattcctatttatgaaagggagtgagaacaatgtggtgaggtgtatagagctatgtgaaagtgcttgtcaataacatggctgcagaatgctgatggtggtaattgaaaaggaagtaaaatataaaaacatttgcagaata

SEQ ID NO: 253148 - DNA, 225 bp, Homo sapiens
tgcctaacatagcagccgctatccacgtatggctatttaacataaatctattaaaattaaataaaattaaaaatctgtccctcagttgcactggccacattcaggagcacacgtagctagcgactttcatactgggcagtacagatatagaacatttcttttaccacaaataattttcctggacagcatcaacttgcaggatgcaagaatctgaaaggggctaag

SEQ ID NO: 253149 - DNA, 441 bp, Homo sapiens
tcttctatttttaatcctctttcctctgctttccctctcatgatccccctatcactccttagtttagagcctcatcagagctcacctatttgctaacgagggaagaaatgacctcctaaaggttcttcctgcctctagccttatatgctccatcatctttcatactgtggccagcattatctttcaaaaatacaaattaaattaatatttcaatgagaaatttatagatgtattgcactttccctggtaggttttttgtcactttccctctgagctcttgcctttccttctagtctttttgttgttgttgttgccaggctgggaggtggaggttgcagtgagccgagattgcaccattgcactccagcctgggcaaaaagagtgaaattccgtctcaaaaaaaaatatcattaagttatcttcttgaatcttaaaaaaaaa

SEQ ID NO: 253150 - DNA, 290 bp, Homo sapiens
gtcaggtggaccagctgctcctgtcctccctgtgggcaaacatacatagcaagcaaaataatcagaaggcagttcaatgagattagaagcagaacaagggaagaatgttatttaattttaatttttaatagctttgggccatgaaagcctgataattcatattccaaataaagatacaccttctacttggaccaactgtgcctgcccttgcattggggaactctctgtcctatccaagaacctcttccttacacagatagcttagcctacttctccagtgaggaggatta

SEQ ID NO: 253151 - DNA, 313 bp, Homo sapiens
attcctgagctgaatcttgaaggattaataggaagtggcagatgaatgaggcagaggtattcaggaactgtaagaataaggggggtactgctgccatctcggcacactgcagcctccctgcctgattctcctgcctcagcctgcggagtgcctgcgattgcaggcgcgcgccaccacgcctgactggttttcgtatttttttggtggagacggggtttcgctgtgttggccgggctggtctccagctcctaactgcgagtgatccgccagcctcggcctcccgaggtgccgggattgcagacggagtctggtt

SEQ ID NO: 253152 - DNA, 453 bp, Homo sapiens
ataattaactgtcattaagttaacttggtatttatttgaatattatgtattttgcattaaattatattttaaaattacataataaatcactgtgttgtacattattaaccacacaattgtataatcaaggtattaatgtattatatattagtaagtattaacatgtattcataaaaacattctatattagttgtagatttatgtactctgagaatgcttctttcctctgtatatatgagataattagtcttgaattatgttagttttgaattatttagttttttaggaacatatacctcatatttcatgtagctgccctatatatgttttccctatgtggagtatttctataattcaccagtcatttaaactatgttacagaatagttttgattaatatttttactttagtctataaaaagtataataaataatgtagtgctcttacaatgtg

SEQ ID NO: 253153 - DNA, 377 bp, Homo sapiens
tctgcaccccagctccaagcacaaggcattacaagaaggtccagtggttcctactttagactacacaacaaaagaaatgaaaacccagcccaccgaggcttggcccctgtggggatttccttcccctgctccatcagccagacaaggcacctgcatcgtgggtccttcattccatgtgaatggaaaccccggtccctggcagaagtattcatgctttggttgcatttaaattgctgttctctgggccattttcatccccttcttttccagcctccagcctctcatttctggggctcccagccctccctctctaatgcacccttttgtgttgctgcaaattgccttcagttccatcaaagcagactgccagctttcca

SEQ ID NO: 253154 - DNA, 273 bp, Homo sapiens
ttctttcccgtcaccataaccaccatcttgaatttgatttttattattttcgtacatttctttttacttttaccatgtaagtttttgtccctaagtgatatatagtatcagtttgcatgttcttaaaccttaggtcaatgtatcacactgttcttttttttttttttccagtggagactcactctgtcacccaggctggagtgcggaggttgcagtgagctgagatcacaccactgcactccatcctgggcgacagagcgagaccccgtctca

SEQ ID NO: 253155 - DNA, 410 bp, Homo sapiens
ataaaaaggaataaactgttgatacattcaaaaacctggatgaatattgggaagaatatgcggagtaaaaacagccagtctcaaacggtcgcaaaaaaccaaggcataattccacatatatagaacatttgtgaaatgacaaaattataaaatggaagacacattttttttccattatttaagaaggaatggggtcgtgtctataaaaggtcagcatgagggatccttgtggtgatggaaatgttgtatatcttgaatatattaatgttaatatcctggttgtaataccatatcagtttttcaaaatgttaccactgaggaagactggcttaagggaagactgatctctctgtactatttcttacaactatatgcttatctcaatcgcaaaataaaaattgtaattaatc

SEQ ID NO: 253156 - DNA, 488 bp, Homo sapiens
ttttaaatccaggctcttgtaaaatgagactagcagagccattcccaagttctcaggatggggagatggtagtcagagttaaaatatcacccaaatagtttaaaaactcaagagaagggcttaagagataagacattttttatgatcccaatacaactgcatctaacagatactgcatcttttctctggaagagaacattatagagctgaaacccttgccttttaacctgtctttgtaatgaaggcaagaatgaagttgtggatttgtaggagtccttttttcctatggtgcccagtatgttttcccacccactgcagtacagcaattagggttgttcttgagctcttaaagacccagtggacttgaacgggagcatttcttccagaaagggcctgtcctgcttactgtcatttcaggaaaaatgcagagaaatcagcactacctcctaagcctgccttcctaatggctttccctgatgaaataggag

SEQ ID NO: 253157 - DNA, 218 bp, Homo sapiens
accccacctttagggcctgagagaccaagtgcaaggaggggccgcactggccatttagagacattctcttccattatttctataagtggggacagaagaccagagagctaaagtgaattgtttaatgtcacccacctgtttctgtagaaaacaaccttggagttcagtaatagcacattggagcgtctatactttggaatgctcaggatacactaagt

SEQ ID NO: 253158 - DNA, 484 bp, Homo sapiens
gatcgcttgagtccaggagttctgggctgtagtgcgctatgccgatcgggtgtccgcactaagttcggcatcaatatggtgacctcccgggagcgggggaccaccaggttgcctcggcctcccaaagtgctgggatcacaggcgtgagccaccgcgcccggcctttattttatttttagtacagatggggtttcaccatcttggccaggctggtcttgaactcctgacctcgtgatccacctggctcaccctcaccaaatgctggaattacaggttgagccaccgtgcccagcggaaaacattctttagaaaaaagcagagtgagtttatctggtattttctgtctcatatttttttgttactatctttcggaggagctatcaggaatctgaagaaaataaaaatatccttttaaattttttcttacttcaacttgacaatgtttcttatctattttcctgatgaaatgtatggaaatattgat

SEQ ID NO: 253159 - DNA, 208 bp, Homo sapiens
tgcgataggacccaagatcctttccattatggctagatgctctctgttgtcatgggtctggaagacaagaaagcagaaatatttttaccggggtcgcctggattgggatgagaacacatcagctgggcgctatgttcgtgagaactgcaaaccgctgcgggtcagacagaaaagaataaactacctttgaagagcttacattttaatg

SEQ ID NO: 253160 - DNA, 894 bp, Homo sapiens
cgataggaaaatctgaagaaagactgggccatagctttcatacagttaaggtactttagacattgaaggtctgtaaatcattaaactattctggtagtagtagtcaaaatacacatgtataacaggcagaccccaaatgttaacatatttgacaggcctgtaagttaattgctttttaatgtcagtcaaatggattccactttggtttcttggccaggcttctatgggcccattaaaaccccatgaagctgaaaacatgaaacttaatatttgtaaaacatgtaaacagaatagcctttttctgccttaccgtgtggttaagaaattaggactaggatatttcagtttggtatctttctcagaatccaattagagtaagaatttattttattatcttttcaatattgttaataatctagtaacacatttttcacttaagagttttattttcataccaaatcaaaagaaaaaaaaattctatattgctttatgtttagagatgtgcatttggtcagacagtctaacttagtgtattcgtttggtcaggctgccataacaaaatgcctcataccacagagcgggaggcttaaacaacagagactggaagtccgaggttaaggtgttggcagttttggtttcttctgaggcctctcttcttttcttgcagatggccgccttctcactgtgtcctcacgtggtcacccctcagtccatgtgtcgtctgtgtcttaatctctaattataagggcaccagtcatattggattagggcccatccatttgacttcatttcttcttaattacctcttaaaaggccgtaagtccaaatccggtcacattctgaggtcctgagagttaggacttcagtatacaaattttggagagacgcaattca

SEQ ID NO: 253161 - DNA, 767 bp, Homo sapiens
ccaataatttcgccaggagctggccctgcccaaaccctctgcctcactaccaggagaaggtgctaaagctggccttgctgcccagcgcgcccctgagccaggacctcataagggatttccaaaccctgataaaggacagaactgccttacccctccaccatctctccaaggcacaagcaagcaaatccccagcaaggaagaggaagagaagacctggacacttctagaagggcttccagaggggacgatcgtgatacccagagccccaggctccagtgttctcaatcaatgctccttcagcaagaggccctggggtagcaaaaggactctggcttctgcagaacagcctctccaccatcctcccagcctcaagccacctctgtaccccaggctattggagattcaactgaaaaaaaaaaaaaaaaaaaaaaaaaaaaaaaaaaaaaaaaaaaaaaaaaaaaaaaacaaagaaaaaaaaaaaaaaaagaaaaaacaaaaaaacaaaaaaaaaaaaaagagagagagggggggggggcgcccgagcgcccaacctgtaccaggggagagcgaaaccacaccacgcaacaaagtatgaataaaagaagaggaggcaaaaagaaggggggacacagaaacaacaacagagggcgggggccgcgccccacaaacaagcgcgggacggaggagacaaaagacggaaaggaggaactaagaaaaaaacgcacaacacagcggggcgggaagcacagagaggggagaccagaact

SEQ ID NO: 253162 - DNA, 612 bp, Homo sapiens
caaggtaagttcttttctggcttgggctaatgggaagttgaatatgggatggaaagtctgtcttgtatcatgactccattgagctgccctataaaggagcagaggagggagaaaaggtctatattattgagtaatacggcaaatactcttttggaatatgtggatatcaactaagatttagaattgcaacggagggccacggtgccagtgaccagcagggcaaaattaggaaccaacaaagaaaaaatattttgtctctctcccaacttcttttccataatagaaatgtatagaaatagttaaaatggataggaagaattcagcatgtgcaaccctaaggaattctttctggtatttgtaatattcttaactcaacttcagcctcagtggaacaaaatgttgagtctttttggaagtctagctgttaagtgattctaagacatttgtaccaggcagaagtttttctctgttgggcacgttacgttttcttttttagtgtatatgtgtgcttcaaatgcataactctgggatcttccaaggagatcccctggtgcaggggtgaggtgagcactgcagtgtgtggttcctggcacctggtttctgctctcttgt

SEQ ID NO: 253163 - DNA, 461 bp, Homo sapiens
atctctgggtcttaactgatagctgcaaacactccatcatttaggtaaagtgtatattatgtccctttaaattcatttccttgtgtttgtctaaattgaaaatcatctgacacttttccacatgctcataaagcttcatgggtttttcctgaagtttaaccatgcttgctaccattatattatgtggaaaagcctaatatcctcctaaagtaggaaacttgacttccaagtcatatatcaatcattcagtcagttggcccagcccagctttccctctaatgatgagtctgtttgttccatcagccaaggccattaagcctgtaggtgttgagctgcagctctgcacaggtcctgtgctcagtgctgtgagggcctccctgccagctactgcacccttgcctccagagtgaattttctgctctaattgggcagattgtattactcctctgtactcacagaat

SEQ ID NO: 253164 - DNA, 441 bp, Homo sapiens
cactgaatggtaagagtcagaccaggcagcatcacccactggctgtgtgtccttacataggttgttaaacttcttgaaggctcattgtaccccagggctgttgggggtaatccctgagatacaaattacaaaccccctccagtcagtcagtcagtcagtcaacaaacagtaccacccaatggcaagagtcaggccaggcagcatcgcccactgcctgtgtctccttacataggtggttaaacttcttaaaagctcattgtaccccagggctgttgggggtgatccctgggattagtaaggtctcataatgggatgctgctgagctcctcacagaggaaaggaattacagggagaaggaggtgagcattcttggagagctcctacaataggcatggcatgtttgtgaggcctccctgccaagaagagagcgcatactccatg

SEQ ID NO: 253165 - DNA, 2659 bp, Homo sapiens
ccctgagaggccgtgctcgggctcgcctgctcagctcactccgaaagcctctgctcagacctgcacccagtcacagcagcacagatgtgcaggaggagaccatttccacggaccctccgactcctaggaggcagtcccttagggactggccctaacaacaaatgaggagaagccaagttctctgctttctgcagacagggcctcccctggatgggatcttcctctgaggcgagcttcagatctgctcaagcttcctgcagtggggccaggaggcagggcctgggcaggggagaccagaacctctcggtgatgcctccgaatggcagggctcagacacacacacctggctgggtaagtccctgcagtgaaaaccgagacggtcttttgcctgccacagccccgggcagactctgctctcaccgtggtgccgacatcccaagttttcagactcaccaggacccagtgacagcatctgggtcctcagagctgcatgcggactgtccccagttcagagcattggacagagctgggaactgacagccctgatcaatagtcccaagaggaaggccagccctcctcctcctcggaatcctgggtttctaggaggcagaaaggttttctgagaaacaaggcttttggaaggaaggtggtgcctggctgcatccagaaagtgagagctaaatggagaggctgaacaaaggacgcatgtggagcgcatggggagggaaggctggggtgcagggctccgggcctgctcttctgcgtccaccccggatcctgcttttgtccagatgggcctcggagcaccagtcacttactccaagaagtcgtttcctgtggccaataatgaagatgacgcactcggaagcttgtgggctctgaggagggggtaaggatgcaggggccatgcattcatcccagcacaggcagcgcatggctccggaagcagacacaggccaggcctgggccaggagtctgccaggagccaggagcgcctacacctccctggaggcccacacttctctccccagaagctcacacgcagcgtctgaggtgcagggcccaggtgtgctggggtgacaaagccccgagctgtggtgatgggagggaggaagcgccggtttatgtctgttctttgggctgatttgctgtctctgtctttgtctctaatgtcctttgcaccactgaccttgaggagccttttgttcctcctgtcccagtttggtttccatgggaacctgagtggcagcgtcatcactttgctgaggtgaaatgcccctggatgccatgaatacctaggggaaaacctgccagagaagaataaaccatccaagagacggcgctgcagggcctcacagtctgcttccatttcctctcaggtttcagatcccttagttttgggtgcccaagttcacggagggtgccggggaatagaagctctgtcagtctcgtctggatcttggtcctcagcaactgtctggatcctgacaggtgtgtgataattacttagtgaattcatgggtgtgggccgtgatagaattaagtgatttgatgtcctctcgataaatccaggtaacgacatagggttttttgagtttgaccctctcctgaaatttgccatctgacaaaatgacatcatggcagagttgtaaactgctgtggatgtattttatttaatttctcaaattaaaataaaaggtaacggtacacttaagagtggtcactacagccaagctaattgacacccactgaactttctggaatgggccataggatgctggacaataggacagatttggaatgagcagtcttccattccaactttagtttctgcaaagctgttgagagcatggagccaggctgcggggtctgggttcaaatcctgactctaccacttaggagctgtgtgtacatgggcaggacaactggcctgcctgagtctcagtgtaggtgtctgtaaaatggaatgataatagcttccatctcacagattcactgtgtgggtaaaatgatagatatgaaatgctaagaacagcacctgtacgtagtatgtcctacatatcttactgttatcattagcatattttgtttattccaagatacattttttttggcccatttgatatctatgaaatctaaagattttttttcctgtcttgggagatagaataatgatgtgccttacaatggattgtgttttagattcactgaaattcattattgttgtttttatccctggtctgtaacatgatatttggtaaataacaaggactccatacgttttgcaaagagtaaattctctccctccctactgaggccttggtctaggtctctccaggcctttccttcctggagccacagtgcttagagacaggccactggggtcagcatttgagctcagctatgatcagaaaaaagcaccgttgaggttgcagtgagccgagatcacgccactgcactccagcctgggcgacagagagagactccatctcaaaacaaaaacaaacaaacaaacagaaagcaccgtcgagaaatggctccagcgctgactagcggccacctcatttccccccttgaccactgggccagttgggtggctaggttgcctcattttgcatccttctgtatccccaaatctgaaataaaagctggaaaaaaa

SEQ ID NO: 253166 - DNA, 2627 bp, Homo sapiens
ccagatccaagtacaactgaaaccctaacagtagaaatcatcattgctggcccagcgctgccaccactgcttctgttcatagcctgttttgtttgtttttagtcccttagggactggccctaacaacaaatgaggagaagccaagttctctgctttctgcagacagggcctcccctggatgggatcttcctctgaggcgagcttcagatctgctcaagcttcctgcagtggggccaggaggcagggcctgggcaggggagaccagaacctctcggtgatgcctccgaatggcagggctcagacacacacacctggctgggtaagtccctgcagtgaaaaccgagacggtcttttgcctgccacagccccgggcagactctgctctcaccgtggtgccgacatcccaagttttcagactcaccaggacccagtgacagcatctgggtcctcagagctgcatgcggactgtccccagttcagagcattggacagagctgggaactgacagccctgatcaatagtcccaagaggaaggccagccctcctcctcctcggaatcctgggtttctaggaggcagaaaggttttctgagaaacaaggcttttggaaggaaggtggtgcctggctgcatccagaaagtgagagctaaatggagaggctgaacaaaggacgcatgtggagcgcatggggagggaaggctggggtgcagggctccgggcctgctcttctgcgtccaccccggatcctgcttttgtccagatgggcctcggagcaccagtcacttactccaagaagtcgtttcctgtggccaataatgaagatgacgcactcggaagcttgtgggctctgaggagggggtaaggatgcaggggccatgcattcatcccagcacaggcagcgcatggctccggaagcagacacaggccaggcctgggccaggagtctgccaggagccaggagcgcctacacctccctggaggcccacacttctctccccagaagctcacacgcagcgtctgaggtgcagggcccaggtgtgctggggtgacaaagccccgagctgtggtgatgggagggaggaagcgccggtttatgtctgttctttgggctgatttgctgtctctgtctttgtctctaatgtcctttgcaccactgaccttgaggagccttttgttcctcctgtcccagtttggtttccatgggaacctgagtggcagcgtcatcactttgctgaggtgaaatgcccctggatgccatgaatacctaggggaaaacctgccagagaagaataaaccatccaagagacggcgctgcagggcctcacagtctgcttccatttcctctcaggtttcagatcccttagttttgggtgcccaagttcacggagggtgccggggaatagaagctctgtcagtctcgtctggatcttggtcctcagcaactgtctggatcctgacaggtgtgtgataattacttagtgaattcatgggtgtgggccgtgatagaattaagtgatttgatgtcctctcgataaatccaggtaacgacatagggttttttgagtttgaccctctcctgaaatttgccatctgacaaaatgacatcatggcagagttgtaaactgctgtggatgtattttatttaatttctcaaattaaaataaaaggtaacggtacacttaagagtggtcactacagccaagctaattgacacccactgaactttctggaatgggccataggatgctggacaataggacagatttggaatgagcagtcttccattccaactttagtttctgcaaagctgttgagagcatggagccaggctgcggggtctgggttcaaatcctgactctaccacttaggagctgtgtgtacatgggcaggacaactggcctgcctgagtctcagtgtaggtgtctgtaaaatggaatgataatagcttccatctcacagattcactgtgtgggtaaaatgatagatatgaaatgctaagaacagcacctgtacgtagtatgtcctacatatcttactgttatcattagcatattttgtttattccaagatacattttttttggcccatttgatatctatgaaatctaaagattttttttcctgtcttgggagatagaataatgatgtgccttacaatggattgtgttttagattcactgaaattcattattgttgtttttatccctggtctgtaacatgatatttggtaaataacaaggactccatacgttttgcaaagagtaaattctctccctccctactgaggccttggtctaggtctctccaggcctttccttcctggagccacagtgcttagagacaggccactggggtcagcatttgagctcagctatgatcagaaaaaagcaccgttgaggttgcagtgagccgagatcacgccactgcactccagcctgggcgacagagagagactccatctcaaaacaaaaacaaacaaacaaacagaaagcaccgtcgagaaatggctccagcgctgactagcggccacctcatttccccccttgaccactgggccagttgggtggctaggttgcctcattttgcatccttctgtatccccaaatctgaaataaaagctggaaaaaaa

SEQ ID NO: 253167 - DNA, 430 bp, Homo sapiens
caacacctcttttgccttgttaaagtcattttggataattgctctttagttcgtcctgtgtgcacagaacacctaaaaatgaaaagattcatttaggcaatgatgtgggaaaagaatgtgtttaacttcatgtcttaacaacctatggcaactccacttctcctttaaaaggaaaaataccttacttacttttgaggagtaacatttctcaaaactttttttttctccctcacacatcaggatttggtgggggctggagggttctgacactttaattacagtgaaaacacttcaagtatactgaaaaagaaaggttcttggctgggcacggtggctcacacctgtaatctcagcacttggaggggccaaggctgtgaatccctgggcaacatggtgaaaccccatctacaaaaaatactaaaaaacattt

SEQ ID NO: 253168 - DNA, 562 bp, Homo sapiens
aagcagttaatacagactcatatttcattcattaagtcaacaaaaattaacttagtccctacaatgaacgaggtatcccctcatatgctcaagtgcctgacactccagaagcttcacaagaccgaggtggagacactggagtgttttaagtggagaaatgacacactccgactcacaggagcagggccactgtgaaaagaacagttacgttgcaggtcatgggacagtgctagtgtcacaattcatgagtgacagtatggtgggaactaaggggagaggagggcctgaaggatgagaaggatggagggaagggctggagaagcaggaggtgaggaaaaggagcagaggaaagaatttgaaagcagcagaattcttaggtttaaaaacattgttttatggattttaatacatcaatctacagagcctagcagggtgtccttggcagttgtcttttaatacctcatgtgggtctgccttaaaactattttttatgttaatcaggttgaaaaattactaagtgtacctatcaaatatacactacacttagaagtggatacttcct

SEQ ID NO: 253169 - DNA, 339 bp, Homo sapiens
gtttcattttccttttctggggtccagtgctcccagcatgtgtcttgcttgctgaatatacttcaagcaagagaaaacagtcctaagcctcctccaccggaccgagcgcttctgtgttcactctgctctctatgcagccttcacagccagaggcagatggggacctgtctctcagcacagaataagcccatagcaggggctcaagtcacatggaatctgttcttactcagccttcattgagcgtcctcaagaaaatcaagaaatggtgccctcagttctccagcagagggagggagggaaagaggagattttctcaaaatattgcacctccatcccctg

SEQ ID NO: 253170 - DNA, 399 bp, Homo sapiens
acatgttgactgttagtattatttcagcatcctccttgagcagcttggctttgctctgggacaatgcaccagcctgggatgctcagagatgcaggcacggaggttgtgcagcctctccgcacactgcgcatgcgcggctgccggttcaagtcgcggtccaggaccgcaaggaggcgggcaagcgaaactgagaaaaacccacccacggtccagggactgggggctcgggcgaacccacccagggacctcctgaccaaggccatttgtctgcaacctgatggctagaagtgataccaccctgagcatcttcaatcccctttccccactctacagccccttgtactgtccctccttcctcattcacacccctgatccaaactcaagcactgaatttgtccc

SEQ ID NO: 253171 - DNA, 549 bp, Homo sapiens
gtctcactctgttgcctaggctggagtgcagtggtgcaatcacagctcactacaatctccatctcccaggctcaagtgatcctcctccctcagcctcctgagtagctgggactacaggcatgtaccaccatgcccagctaattttgtaaaaaatttttattagagaagaggtctcgccacaatccctgggctggtcttgaactcttgagctgaagtgattctcctgcttcagcctcccaaaatgctgggattacaggtgtgagccactgcacctggcctttgtttactttcactgctgaataagaaacccatttacaatgccaaaccatgataacaaaattgatcctgttatggcaaatgtcattgccctggcctacagactattcattgcaaactacatttaataataaacatttgcagaaccaccaagaatggaaaaactatgagtgccatttcccattcaaaggtctacaggaaactgaatgggagacccacacagtgtaggagggtctccgctgttgaacttggtggagtgtatacttagcatat

SEQ ID NO: 253172 - DNA, 432 bp, Homo sapiens
agaaaagcagactttgactcaacagaagaagaaattggatcataacgcaatctactgcatggtgatgaagaagattaagaatgattccataacggtcagtacagtatttcacattcactgaccttttgtgtaatttgatatgctccttcaggaagtcagccatgctaaaccatcattcaagaatgagtgtgaaatcaagacatttcagcaatgcaattctaaggaagtttaccatctggagacccattgaaaatccacagaggtgtgggacacaagaaacaatcgtgagcaggcaagtgggaaatttagttaatttacttttcaaaagcttacattatataaaaagtaaaataaaatctctacataataaaaaaaacaacttaaaaatggagagaagtccaacaagggtctcactctgttgcccaggctgga

SEQ ID NO: 253173 - DNA, 259 bp, Homo sapiens
cgagtagctgtgactacaggcgttcaccaccactcctggctaatgtttttggcttttagtagagaccaggtctcactacattgtccaggctagtcttgaactcctgacctcaagtgattctcgagcctcagcctcccaaagtgctgggattacaggcatgagccattgtaacagactgtactatttttcacatcccacatttcccttgaagttcctaaagatactaaggggcctcagccgtatttcttagtttatctat

SEQ ID NO: 253174 - DNA, 513 bp, Homo sapiens
tctggctattggctttgtttttccacatgtaatcttgctttttgtggcctggggattggctgtgtgatcagcattgaaatgggttgttgcagtttgaagtctggaaggggtatgtccctgggttctaattctttccctctaggtttctgtactcagctcagagtctagaatggtagcttttaggattggaaaagaccaaagttacctaattcaactctttcatttttttttcagtggaaaaactaatacccagaaaagggaagagagttaacccaaaaattacatctagtgaattgtctgattagctttacaattgaggcattgtagagctctttgaggcattagtcttggttgtctgagtgcctggctattaaaggctgtctttgcctgttccctctttctgttagctgcctggaagtgcagggttgcttcacttttagcaccttgactctgtacctgacatggtgcttcaacaggatattgctttgttaccacaggccctttgaacttgga

SEQ ID NO: 253175 - DNA, 886 bp, Homo sapiens
gatcccttgttcactagaaacaaggagccccctgtcaccttcttttaaaacagatctttctgtctctgtcttcatttctctattcatcccccttcattcaatcctgtagcaactggcagtgacaagtggtgcccaggacagggacatgagcaaagaaggtctgctggagcagagaaagtgaaactgaccagatgagcaagaaaccttgggacaagtctgctggcagctaatataagcacataccaaggttaccagcactcggggaagcaaggacggaagaagaaaagaggatgctctttctccctcatgtaccccaggtatctgctagaaagagaagagaactagggacacctgccaccctcttcctaggttctgtggatggaaagagaccaaatactttagcatccaatactcagctgtacaagtggatatcccagaatgaccttcttggtcatccaaaaactaaatcttttatgactcatggtgaaaccagtggcatctatgaggcaatctaccatgggatccctatggtgggcattcctttgtttgcagatcaacctgataacattgctcacatgaaggccctcaatgtggacatcaggaccatgtcaagtacagatttgctcaatgcactgaagacagtcattaatgaccctgtctacaaagagaatgctatgaagttatcaataattcgccatgatttgccaattaagcccctggatcaagcagcttctggattgagtttgtcatgcagcacaaaggagccaagcaccttcgggttgcagcccacgacctcacctggttccaataccacaacttgcatgtgattaggttcctgctggcctatgtgtcaactgtgatcttcatcatcacaagatgttgcctg

SEQ ID NO: 253176 - DNA, 253 bp, Homo sapiens
ttttttttaactctttaatgaaatggaaaaatgataacctgaaaagtgacaatatcaggacataatatattataaccttcaaaaaataactgtatagggggaataaaaacctagaaggaaacatactaaagtgttaatgatgatttttctccaagtggtagaactataggaaaataattactgtgttcatttaaaacacagattatgtaaagcaagtattaataatcagaaattttatatatagattatattt

SEQ ID NO: 253177 - DNA, 221 bp, Homo sapiens
ccttgccccaagttatcacggagcccagagaaaccaggcctgggctgtgcttcctccataaagcagctgacatgtttccaactgttaatacttctcctaccgaggttctgaaaggggtctgttctcagcctttggaaacatcttcagaaagataaggatgattgtggttgttgaaaataaacacgcccccccccccccgcccccgtagttctaaagaagaa

SEQ ID NO: 253178 - DNA, 697 bp, Homo sapiens
tgcattttgtgttattgtactagaatgaaataatcttaatctgaaaagttttgatggttaaactctttaatatttttgtattcctgactattttcttcatttagctaagtttacactgaagtccttaattacccttctccttttatgataaaaataacatccttcattatctataattttccagtggcttccacatgccaaaaacgtcaactacacaatttttctcttatagtcagaacactggcttgtggaaatgaagcacttcattcgaaatttcaccagtaaatgttgttgatgtgtgatctctagcttacagaatagatggaactgcattcttacatttaaacaattatcctctgattaaataaattcaaatacatctaaggaatagaataattatcagttttaaatattagttagacaagtttaacaagatgcccaatgcgttgcagtacataatcctttttgtgaagtttttttttttttttttttaaagacgaattcttgctcttgtcatccaggctggagtgtaatggcgcgatcttggctcactctgcctcccagattcaaacgattctcctgcctcggcctcccgaacagctgggattacaggcgcccaccaccatgcctggctttttttccgacttctcagtatccaacgttatttgcactgtagcccagttctgccacgctttct

SEQ ID NO: 253179 - DNA, 496 bp, Homo sapiens
tatgccatcccccacatactcaagggagggagggaaaagaatgggctgggagctaccccggggtggggaaggggaagcggccaatgcattccattcccacggcattcagtgtgcagttgcagttgccaaccacccctggaaatgcagacttgcctcaccagccccttggaaaacatgccaggtcgcaggcagccccttgaggccaggtctctagtaaagcttgcctctggatggctgcagatggaaaggacttggttcttagcacccaggaagaatctctctcaattgattatttacttattaaggcaacgaggatccaagcagacatggattcatgcagggcttgtgccagcctgcagcctccagctctctccaggaaccagacctctctcatcccgcttctggaacagcgctgctacagatgcaataaacatttacggtgcatctactatgtgccagacactcgcaccagattaatctcattacatctccataa

SEQ ID NO: 253180 - DNA, 485 bp, Homo sapiens
ttaaattgaatttaaaaatgtgagtttactttgggttttcattttgactggctgaatctttaaatgttcggtgtattatttatactttgtagctttgctataacataactgatctataatagagaatttggtatatgttctatctatgactacattcaaagggttacgtaactataatatctttctaatatttctaccatttttcttacacatttacccaagaatttttctcaaacaactacctaagaatattcatcatgaatgcttggtgtatagtttatgatttgtagagttgctctgatatgaccaaccccttataatacagaatttggtgtaaggtaagttccaggattcaattcaagggatgttacaaacataacatcattctagaacttcttaatattgttcttaagcatttccccaaggatattagtataatgaaatgccagtaaatttataacaataaagcatctaaataatgaaac

SEQ ID NO: 253181 - DNA, 408 bp, Homo sapiens
tgtcgttgttgctagtgtttatctccacactcccacccagttttcttcttgggattccacttattcgacagctaattatggagtccctcctccctctcactctgttctagaccctggagttcagcagtaaacctgacatgttggccctgccctcggagcttgctccctgcccctgcctttccccagggctgtctcaccctctctatgcttcccctgtgctgcccacaccggaccccacctgtgggcattctaggctccgatgaagtagggaaaagacactccccatggctctggatttatgatgtaagccaaacgtggatactgagccagacacggagcagtgactttccattttcctacgacacctcaataccaatgttttattaaattgaaaggactaaaaacaac

SEQ ID NO: 253182 - DNA, 3984 bp, Homo sapiens
  misc_feature (59)..(59): n is a, c, g, or t
  misc_feature (62)..(62): n is a, c, g, or t
  misc_feature (291)..(291): n is a, c, g, or t
  misc_feature (437)..(437): n is a, c, g, or t
  misc_feature (2248)..(2249): n is a, c, g, or t
ggaaaaggcgccttgggagcgggcgctcggcggggcctcctcgggccccgggcgcgcgnggngagtgggagcgagcgcgccaggaccacgcaggcgccctgctccggctggccctcggccggcgcgcggcgcgggagcagcccgcagcccgcctcccgcgcccccggcagccccctggcagcccgcagccgcccgtccggagcagcccctcggcagcccgcgcaggccgccggcccgggagagcgcgcggcggcggcggcggcgggacggccccgagcgcgccctcccgcntgcggccactcgcagccggcgctggccgggccggcgcgccccgcaggcggctagagcagcggcctcggcctcggcgcgggcttgccccgggccgtagcccgcgagaggcggcgcgggcggccgagggcactgaacggcgtcgcggnacgctcccgggcggcggcgcagcggcagcggcagcggcagcggcagcgcagggggcggaggcagggggcgcccccagccaggatgctgcggttcctgcgccggacctttggccgccgctccatgcagcgctacgcgcggggcgcggcggggcgcggggccgccgggctgggggacgagcgcgatgggggccacgggggggcccggccgccgccgcctcctcctcggcgctgcccgccgcgcccgggggcagcgtgttcccggcgggcggcgggcccctgctcaccggcggcgcggccgtgcacatctccgccgccggcgccgccaaggccaccctctactgccgcgtcttcctgctcgacgggaccgaagtgagcgtggacctgccgaaacatgccaaaggccaggatttgtttgatcagattgtgtaccacttggaccttgtggaaacagattactttggcctccagttcctcgactctgcccaggttgcgcactggctggatcatgccaaacccataaaaaagcagatgaaaattggacctgcttatgctttacactttcgagttaaatactattcttcagaaccaaacaaccttcgtgaggagtttacaaggtacctgtttgttttacaactcaggcatgacattctttctggaaaattgaaatgcccttatgaaacagctgtggaattagctgctctctgtctacaagcggagcttggggagtgcgagcttccagaacacacaccagagcttgtgtctgagtttcggttcattccaaatcagacagaagcaatggaatttgatatcttccagagatggaaagagtgcaggggaaagagccctgcccaggcggaactctcctatctgaataaagcgaagtggctggaaatgtatggggtagacatgcacgttgtcaggggaagagatggctgtgaatattctcttggactgaccccgacaggcatattaatctttgaaggagctaacaaaataggcttattcttttggcctaaaattaccaaaatggattttaaaaagagcaaattgacactcgtggtggtcgaggatgatgatcagggacgtgagcaagagcacacgtttgtgttccggttagacagtgccaggacctgcaaacacctttggaagtgtgcagttgagcaccacgcattcttccgactgcggacgccaggaaacagcaaatccaatagatccgactttatcaggctgggctctcgcttcagattcagtgggcggacagaatatcaagctacacatggctccaggttacgaagaaccagcacctttgagaggaagcctagtaaacgttatccatcccggagacattcaacgttcaaagcaagcaacccagtgatagcagcccagctctgctctaaaacaaatccggaagtccataattaccagcctcaatatcatcctaatatccatcccagccagccccggtggcatcctcactctccaaatgtcaggccatcctttcaggatgacaggtcgcattggaaagcatcggccagtggagatgacagccattttgattatgtccacgaccagaaccagaagaacttaggagggatgcaaagtatgatgtatcgagataaactcatgactgcactttgagagactgaagcatctctcttccattcaccttcatagtttcattgcattccatgaaaagtgtcttggcctcagatggatggatgtgtttggacgagtgtctttaaggagtagtcctgaaaggtgtttttggtgtccatgtaaatatttgaagataaaaccactatagcttgtcnnaatttactgttgactgcattctcattaaaatgaaggtaaaggctcaggaatcatattgatgttctgattttaaaattggagtcaaagtctatgtttatcattttactatgttcctgatgttctttgttatttaattaatgggagcaaataaaaccagaagagcttgggaagattgctcagcatatattcctgtcgtagaagttgagattgctagggtccagtttccctagtgtggcctggacgagtcatttccccttcattgacctcattttccccatctgaaaagagagggcttggactaagtgatctccaaggtcctttccaactctaaaattctgcaatttgttaacatttcattttgtttaggttgaggacatacattcaaactaattttatcacaaggaaaacgtcaatacccacttccttgacagagttactctttcagaagctaaataaagtatataacttattagatgttatatagatacagggggactttgaatttcacatcttaaagcagttgagctactttgaatttaagcagtcgtactaatcttaaattgcatagcatttgttttgatcgaatttactgctcaagtatggaataatttttaatgtcttaatgattggtgctgctaacttgcgtgatttcagaagactgtacgaattgggggattggtttttaccctagacttcactcttaaaaagcaagctgcaatcaagatcatttatggctcaaatgaaagcatataaggttttcttgaagttgtgccaaagcattctgtagagtaggatgagatggttgttgccctagtctgttggtagaaccagaaatcaatatgttgtcttttaggttaaagcttgtaccaaaatatttatttcccccatttcaagccctgagtcaaacatttttttctcttaataatagacctgaaatgttttattagtatttctgtgaaatcagttgattcttgtgccatttttgtatatgtaattgtaattttgcccatgttaggccctctaaaaaatgtttgacatcctttgagatattttattactaaaatctgatcttttttggctactgcaaaaatctattcagcaagaaggtatcagctgcataccttgcacagtggagctgactacctataaactctccctaaggcatttgtttacaggtgtattccattttagcagacgttctgatgctcagtgtatgtgctgcatacaaataaatgtgttctgaatcttttcatcttattgatagcatttttacaaatgtgtttccaaggaataaagattattcttgctttttttttgactccatcttcattttttttaaattgattcttgttgctatgcagaagtctcatttgtgaatgaccttggtaacagaacagttggcttttggaagtctgaaggtgagcattcagttaggtgggtggagcaagatcatcctagaatgaggctgctcttggcaagagtggatcttataggcacagcagctgatgcctttcttcatctggggcaactctggtgaaggttgtcctgcctgtcacaggtgctgagtagagagaagtggtggcagtgggatttcctcagtaatagtcctgtaaaggtacgtgtttgtcctggctacttgtgctcttcctggcaggaaggcatccaaacccttatctgtgggctcctggaaattgtgtatgccatataataccctctaataaatacctctctgctt

SEQ ID NO: 253183 - DNA, 5810 bp, Homo sapiens
  misc_feature (59)..(59): n is a, c, g, or t
  misc_feature (62)..(62): n is a, c, g, or t
  misc_feature (291)..(291): n is a, c, g, or t
  misc_feature (437)..(437): n is a, c, g, or t
ggaaaaggcgccttgggagcgggcgctcggcggggcctcctcgggccccgggcgcgcgnggngagtgggagcgagcgcgccaggaccacgcaggcgccctgctccggctggccctcggccggcgcgcggcgcgggagcagcccgcagcccgcctcccgcgcccccggcagccccctggcagcccgcagccgcccgtccggagcagcccctcggcagcccgcgcaggccgccggcccgggagagcgcgcggcggcggcggcggcgggacggccccgagcgcgccctcccgcntgcggccactcgcagccggcgctggccgggccggcgcgccccgcaggcggctagagcagcggcctcggcctcggcgcgggcttgccccgggccgtagcccgcgagaggcggcgcgggcggccgagggcactgaacggcgtcgcggnacgctcccgggcggcggcgcagcggcagcggcagcggcagcggcagcgcagggggcggaggcagggggcgcccccagccaggatgctgcggttcctgcgccggacctttggccgccgctccatgcagcgctacgcgcggggcgcggcggggcgcggggccgccgggctgggggacgagcgcgatgggggccacgggggggcccggccgccgccgcctcctcctcggcgctgcccgccgcgcccgggggcagcgtgttcccggcgggcggcgggcccctgctcaccggcggcgcggccgtgcacatctccgccgccggcgccgccaaggccaccctctactgccgcgtcttcctgctcgacgggaccgaagtgagcgtggacctgccgaaacatgccaaaggccaggatttgtttgatcagattgtgtaccacttggaccttgtggaaacagattactttggcctccagttcctcgactctgcccaggttgcgcactggctggatcatgccaaacccataaaaaagcagatgaaaattggacctgcttatgctttacactttcgagttaaatactattcttcagaaccaaacaaccttcgtgaggagtttacaaggtacctgtttgttttacaactcaggcatgacattctttctggaaaattgaaatgcccttatgaaacagctgtggaattagctgctctctgtctacaagcggagcttggggagtgcgagcttccagaacacacaccagagcttgtgtctgagtttcggttcattccaaatcagacagaagcaatggaatttgatatcttccagagatggaaagagtgcaggggaaagagccctgcccaggcggaactctcctatctgaataaagcgaagtggctggaaatgtatggggtagacatgcacgttgtcaggggaagagatggctgtgaatattctcttggactgaccccgacaggcatattaatctttgaaggagctaacaaaataggcttattcttttggcctaaaattaccaaaatggattttaaaaagagcaaattgacactcgtggtggtcgaggatgatgatcagggacgtgagcaagagcacacgtttgtgttccggttagacagtgccaggacctgcaaacacctttggaagtgtgcagttgagcaccacgcattcttccgactgcggacgccaggaaacagcaaatccaatagatccgactttatcaggctgggctctcgcttcagattcagtgggcggacagaatatcaagctacacatggctccaggttacgaagaaccagcacctttgagaggaagcctagtaaacgttatccatcccggagacattcaacgttcaaagcaagcaacccagtgatagcagcccagctctgctctaaaacaaatccggaagtccataattaccagcctcaatatcatcctaatatccatcccagccagccccggtggcatcctcactctccaaatgtcagctacccgctcccttccccagtgcttagcagctcggaccggttgccttttggcattgaggagaatgggggcacaccgttcctcaccgcagcttcaggaaggcatcaccaccagcaccagcatcagcatcagcaccagcaccactcaaactacagcctctcactgaccctggagaacaaagaggggcctctgaggtccccaaactccagcagcaagtcccttacaaaactgagtccaggaacacctgccttgttcagtgaagccgctgcccatctaaagaagctggaactggaaactgtgaaggctgctggaccctggcctcctctgcacatcaacataaacaaggctgaagaaaagaaagtctcggagaaaactcttcagactccacttttgccttcccctgttgcggatcatgtgaagtgtaacattctgaaagcccagttggaaaatgcttcccgagtgaacatccagggtggaaaggaggaatcaccgtttgtaaatatcaataagaaatccagtcttcaggacgctagtgtaagaagtcctattcctattcgtgtggaaactgcccagccagctgtggaaaagccggaaatcaagcctccccgagtgaggaagttaacaagacagtatagttttgatgaagacgacctccctccagacctggccgaggcagtgggagtgaccacatctacaaccacaaacaccacaacggctgccacacaagtctccgtgccgctgccgtcccccaaggtccagaatgtcagctcgcctcacaagtcagaaggcaaaggcctgctgtcccctggggccaagagcccctctgaccgaggaggtgcctttaccctggagccgggtgatcttctgatggatttcacagaagccactcctctggcagagcccgccagcaacccccactgtgcccactctcgctgttctcctccactctctctccccatgaaggaagagaccactggagtttgcatgtaccctccaatcaaaacgaggctgataaaaacattcccggttgatacaatgaccccgtttcctgatactttcaccacagggccacagtttactgcagacttcagagacagtaaattacagtgctgtcctggcccgacttccccgctgatcccagcagcgaccctgaggcctttgacagagaccgtctccacagtgcagaccatttacaccaccccggaaacctgtttctctggcagccagtgcagagacactccggcaggaactggagagagagaagatgatgaaaagactgttgatgaccagactgtgaaattctccccttgtcacctggaagatggcatggtgccttctgtccatcttctttcttcgggctttgtgtgctcactctagcacagcatacaagtgtgtgctttgttcgcccaggtctccatggttagttgaagccaatttctggcttgacttttatgggaaaagttattttatgtctcctaagcattagagtttttctattactctatgtagttgagacaggatttgataagtctaggaaaagaaagatgggaaaacgggattccttttcagaagtacctgtgtgtatctgttaataaccacaggggttaatatgatgtaggatctttactatcaatttcaaccatttgattttgtatgattgaaacttgcaccgagctttgactgtttgttaaagagtcatttttaatgaaagaataattctttattgctggtttttcatttacactgataaatacacagatcttataaagtctttaacattcatttgtattcagatgtgagtagaagaactaaaaaaagaaagttacatatcactatgactgaaggtacttcagcttaatctgaaatataatttaacttgtgaactccttggatatgatattatttggaataaacagaatttatcattgaacccaaagtaggaaatgatagcttacattgtctaaaaatccttacaaggttaagatgattcaatatcaagaatattcagaaaattatttctaaagttgatcgattcatgtcgtattgatagaatcttgaccagaagaaattttgctctttttatatagtttcaagaaatgtgtttttaaatttttattaatgcacttgaacaactttgcaggaataaagcaaccccctaaccacaaaatatccctctaaattagttccctagctttctcaatgaatacacacatatttttacatagctatgatcgttgtgtacattctcctttgttttacttctcggcctaacacttgtctcctcttgtcaacacagattctgctctcaccaatttaaatgtctttatatccatgtaacatgggtaacctcacttcaccccattattagatatttgagttatatctaatttttcactcttataaatagtgctgctatgaatgtctgtaaaaaaaaaaaactgctccttcttttggattattcccttaggaatatctccaaagagggattacaaggtcaaagagcatgaagtattttatagctcttgttttatattgccagattgctttctagaaagatccaatctttgggttggaaggaccttaaaggtcatctagtttagcctccccaccccctctgaatgcttgaatcccctcgacaatttatgatgccaccagcaatgtataagcatttctgtttaccaatagctctgccagtattgggttttgccatttttatttatttttgctagtttaataggtatgtatagttgttcttgaagagttgttttatttcattaattgctagcaaggctgagcacttttccatgtgatgatttactagttgtatttccttgtgtgtaaaatgttcattcatttcttatgaccacttgttaagaggaactgatctcatatatttgtatcagaactgtatttttatgttatattgtatagtttgctctcctgcccctctccttaaaactgaatggtgccaataatttgatactaatgactacaaaaaaaggtaatgcctcatttactagtattgttgtaaaatgaggaatgtatgtgaatattcagataaccgaggattaaccctttaagtgctgaatctttaaaattttaatatatttttttttgagggaaatctttctaaaatgtattacgcacttccctgccttagtaaacagagtatactggagagtatttaaccttttcttgatgagtcatggtcatgattataaacatcagccccttttataccttggtacggtgcagtgatatcattaagagctatcaatatgtgtagggcttggcttggccttttataggatattatgctgttctcactgatggttttttactgctctctgctctgtcagtggagctatccggggcaattgtagcgtttgggtccttttacccctatgtcccccggctatacttttaaaacagctttagctgttctttatcttgtgcacatgatacaaaatatgttcccgtacaatatggggctgtcacttcttgccaacccagcaccctcttcctcttctaacctgctttctgaggcttctgctcttcacctcctgctcgctgatggaaacctccagggcaaagctgaaggtttcttggggaagccaggaaagccagtatttcctatgtgtcagatctgcttggcttccaagaagggatgcatgggctttttggccagtgtttccaggaggctctgggcttcctgcttcttccccgcttcccccagagttcacagatgttgaagtttctgaaggttgacgtcactggaagtctgaccacaaacaagttggctgttactgtatttgaaacccagtacctttggcagctcacctctaaccagtaaaataagaggattccatggtttctttttttttt

SEQ ID NO: 253184 - DNA, 980 bp, Homo sapiens
ttccttttctcctctgttggaaaccatagaacctgtcaacatactagatgttaaagatgactgtggcctccaactaagggtcagcgaggacacctgcccactgaatgttcattcttatgacccccaaggagaaggcagggtggatcctgatctgtccaagcctaaaaaccttgctcctttacaagagagtcaggagtcttacacaactgggactcccaaagcaacatcttctcaccagggccttggaagcactttgcctagaaggggaaccaggaatgccatagttccgagagaaacttctgttagtaaaacacacaggtcagcagacagggccaaaggaaaggagaaaaagaaaaaggaagcagaggaagaggatgaggaactctccaactttgcttacctcttggcctctaaacttagcctctcaccaagggagcatcccctcagtcctcaccatgcctcaggaggtcagggcagccagagagcatcccacctgctccctgctggagcaaaaggccccagcaaacttccatatcctgttgccaagtctgggaagcgagctctagctggaggtccagcccctactgaaaagacaccccactcaggagctcaacttggggtccccagggagaaacccctagctctgggagtagttcgaccctcacagcctcgtaaaaggcggtgtgacagttttgtcacgggcagaaggaagaaacgacgtcgtagccagtagggagcagcgggaccatctgaccccacttgccagtccctaaaggtgggtgccccagagtagattccacccctgctgcccaccaatggagaatcccaatgttgaatctcatcccaatgttgttttgttgttctgcaaaagtggcaagcatggagagagaggtcagactggctaggctgcagggggaattacctttggaaggagctatatagaaaaaaaatgaataaagtgttttgttggaaaatgctct

SEQ ID NO: 253185 - DNA, 924 bp, Homo sapiens
ttccttttctcctctgttggaaaccatagaacctgtcaacatactagatgttaaagatgactgtggcctccaactaagggtcagcgaggacacctgcccactgaatgttcattcttatgacccccaaggagaaggcagggtggatcctgatctgtccaagcctaaaaaccttgctcctttacaagagagtcaggagtcttacacaactgggactcccaaagcaacatcttctcaccagggccttggaagcactttgcctagaaggggaaccaggaatgccatagttccgagagaaacttctgttagtaaaacacacaggtcagcagacagggccaaaggaaaggagaaaaagaaaaaggaagcagaggaagaggatgaggaactctccaactttgcttacctcttggcctctaaacttagcctctcaccaagggagcatcccctcagtcctcaccatgcctcaggaggtcagggcagccagagagcatcccacctgctccctgctggagcaaaaggccccagcaaacttccatatcctgttgccaagtctgggaagcgagctctagctggaggtccagcccctacctctgggagtagttcgaccctcacagcctcgtaaaaggcggtgtgacagttttgtcacgggcagaaggaagaaacgacgtcgtagccagtagggagcagcgggaccatctgaccccacttgccagtccctaaaggtgggtgccccagagtagattccacccctgctgcccaccaatggagaatcccaatgttgaatctcatcccaatgttgttttgttgttctgcaaaagtggcaagcatggagagagaggtcagactggctaggctgcagggggaattacctttggaaggagctatatagaaaaaaaatgaataaagtgttttgttggaaaatgctct

SEQ ID NO: 253186 - DNA, 1250 bp, Homo sapiens
  misc_feature (28)..(28): n is a, c, g, or t
aaatgcaggctgtacggtctgggagtanggatctcctactgagccggccgcagaaattgcagccgctcagcttctaccccctcctgcctttccttcctctttccttacttccttcccttccctcggcttcccgctcttgcctcactctcagcggctgccttcgcccctgtctgcagacagcgccgctggatgctcccagctggacttcaaccccactcctctcagtccctctccccactgccttccagacgcgcctcttccccgccccgcgcccctctctcctctcccacccctgcccctctccgcggcgctcaccctcctcagtcccagtttctgaaaggactcagctgagaaaggacaactgggttccgctttccttaaccctacaccctttagctggatgctgtcagaggcgatggagaaacgcaaaggctactagacgcaacaatagaattaccatattgtttttcctggtttgaaaggaccagatggaaagaaactgggcaagccaatgaaagtctctggggatcatgggaattgagtgtctatgaaaaccatattccagacaagaatatagtctaaggacacagcaagaggcaacattttggaagcagagggcaactctcactggaaaccaaatctcctggcaccttgatcttggattttacagcctccagaactgatagctgggaggcattacatagtcatgtgcgaggtcaaaactgagtcaccaccacaaccaagttccagctggcaagaagaggaaaaataacacagaggagttatgaccagtgttgtaaggatctggcctagaaatggcatgcatctcttccactaatatcctattggtaaaaatgtagtcacatgggcacaccacctatctgcatggaaggctgggaaatgttgatcggtagggcagccatatgtgtaggaaggagaaaacagaatttggtggatacctagtagtctctgccatacccttgaccagaaatttttcttctaaagaatttaattctaaaagttatagacattcccaaagatatacctgcaagcatcacagctttgtgtataattgcaaaagttgaaatcaacatgaatgcccaaaatagtgaattatttaaacagattattacccatattatgaagaaatactctgcaactcttaaaaataaatgtaatgtgccaggcgcaatgggatatgcctgcaggcccagctacacgggaggccaaggcaggaggatcacttgaaa

SEQ ID NO: 253187 - DNA, 1007 bp, Homo sapiens
  misc_feature (28)..(28): n is a, c, g, or t
aaatgcaggctgtacggtctgggagtanggatctcctactgagccggccgcagaaattgcagccgctcagcttctaccccctcctgcctttccttcctctttccttacttccttcccttccctcggcttcccgctcttgcctcactctcagcggctgccttcgcccctgtctgcagacagcgccgctggatgctcccagctggacttcaaccccactcctctcagtccgctcaccctcctcagtcccagtttctgaaaggactcagctgagaaaggacaactgggttccgctttccttaaccctacaccctttagctggatgctgtcagaggcgatggagaaacgcaaaggctactagacgcaacaatagaattaccatattgtttttcctggtttgaaaggaccagatggaaagaaactgggcaagccaatgaaagtctctggggatcatgggaattgagtgtctatgaaaaccatattccagacaagaatatagtctaaggtttatgggactccccagtactctccatgtagagtctaatgtagaatccaggagtgcacagaaaagtcactggatgacacagcaagaggcaacattttggaagcagagggcaactctcactggaaaccaaatctcctggcaccttgatcttggattttacagcctccagaactttctcacacttccttttgaaagctattaaaaatctatggcagaaaaatggtcaaggaataggaactacaacttcataaatgaggaaccagaaaaggtaaaaaaaaaaaaaaaaactgaacagataatcaaatttcacagtaattcgttttcaaataaaaaatatacagattaaaatatgatttccccattgttgactagaatgcataaaaatggggccaagcatggtggctcatgcctgcaatcccagcacgttgggggtccaaggtgggagaatcacttgagcccaggagttcaagaccagcctgggcaatatgagcaagaaacataaatt

SEQ ID NO: 253188 - DNA, 1325 bp, Homo sapiens
  misc_feature (28)..(28): n is a, c, g, or t
aaatgcaggctgtacggtctgggagtanggatctcctactgagccggccgcagaaattgcagccgctcagcttctaccccctcctgcctttccttcctctttccttacttccttcccttccctcggcttcccgctcttgcctcactctcagcggctgccttcgcccctgtctgcagacagcgccgctggatgctcccagctggacttcaaccccactcctctcagtccctctccccactgccttccagacgcgcctcttccccgccccgcgcccctctctcctctcccacccctgcccctctccgcggcgctcaccctcctcagtcccagtttctgaaaggactcagctgagaaaggacaactgggttccgctttccttaaccctacaccctttagctggatgctgtcagaggcgatggagaaacgcaaaggctactagacgcaacaatagaattaccatattgtttttcctggtttgaaaggaccagatggaaagaaactgggcaagccaatgaaagtctctggggatcatgggaattgagtgtctatgaaaaccatattccagacaagaatatagtctaaggtttatgggactccccagtactctccatgtagagtctaatgtagaatccaggagtgcacagaaaagtcactggatgacacagcaagaggcaacattttggaagcagagggcaactctcactggaaaccaaatctcctggcaccttgatcttggattttacagcctccagaactgatagctgggaggcattacatagtcatgtgcgaggtcaaaactgagtcaccaccacaaccaagttccagctggcaagaagaggaaaaataacacagaggagttatgaccagtgttgtaaggatctggcctagaaatggcatgcatctcttccactaatatcctattggtaaaaatgtagtcacatgggcacaccacctatctgcatggaaggctgggaaatgttgatcggtagggcagccatatgtgtaggaaggagaaaacagaatttggtggatacctagtagtctctgccatacccttgaccagaaatttttcttctaaagaatttaattctaaaagttatagacattcccaaagatatacctgcaagcatcacagctttgtgtataattgcaaaagttgaaatcaacatgaatgcccaaaatagtgaattatttaaacagattattacccatattatgaagaaatactctgcaactcttaaaaataaatgtaatgtgccaggcgcaatgggatatgcctgcaggcccagctacacgggaggccaaggcaggaggatcacttgaaa

SEQ ID NO: 253189 - DNA, 1013 bp, Homo sapiens
  misc_feature (28)..(28): n is a, c, g, or t
aaatgcaggctgtacggtctgggagtanggatctcctactgagccggccgcagaaattgcagccgctcagcttctaccccctcctgcctttccttcctctttccttacttccttcccttccctcggcttcccgctcttgcctcactctcagcggctgccttcgcccctgtctgcagacagcgccgctggatgctcccagctggacttcaaccccactcctctcagtccctctccccactgccttccagacgcgcctcttccccgccccgcgcccctctctcctctcccacccctgcccctctccgcggcgctcaccctcctcagtcccagtttctgaaaggactcagctgagaaaggacaactgggttccgctttccttaaccctacaccctttagctggatgctgtcagaggcgatggagaaacgcaaaggctactagacgcaacaatagaattaccatattgtttttcctggtttgaaaggaccagatggaaagaaactgggcaagccaatgaaagtctctggggatcatgggaattgagtgtctatgaaaaccatattccagacaagaatatagtctaaggacacagcaagaggcaacattttggaagcagagggcaactctcactggaaaccaaatctcctggcaccttgatcttggattttacagcctccagaactttctcacacttccttttgaaagctattaaaaatctatggcagaaaaatggtcaaggaataggaactacaacttcataaatgaggaaccagaaaaggtaaaaaaaaaaaaaaaaactgaacagataatcaaatttcacagtaattcgttttcaaataaaaaatatacagattaaaatatgatttccccattgttgactagaatgcataaaaatggggccaagcatggtggctcatgcctgcaatcccagcacgttgggggtccaaggtgggagaatcacttgagcccaggagttcaagaccagcctgggcaatatgagcaagaaacataaatt

SEQ ID NO: 253190 - DNA, 572 bp, Homo sapiens
gttggttgtgtgctaagatgagaaaggctgggagagtgacctggtttgggaagaaaaaagtaaagttttaatttagggcatgttatgattgagatgcctgtgagccacatgaagctattaaatgtgcagtgagatatatgaatctgaagacagactcaccagactataaatggtgtattagtttcacatatgctgtaacaaattaccacaaaattagggtctttaaaacaacacaaattggccaggcgcggtggctcacgcctgtaatcctagcactttgggaggccgaggcgggcggatcacaaggtgaggagatcgagaccatcctggctaacatggtgaaaccccatctcaagaaaaaagaaaaatactgtgaggcaaaacaaatcattcatggttagtcaatttatatttattttacaaagaacagtaaatgttccatctggcagtactaaaatgcctcgtacttaccagtaactcaaaggttatactacctaaactgagcgcaagctggccatatgagtaaactgaaaaatagaacaatgttacctaaggccaggtttatagacaag

SEQ ID NO: 253191 - DNA, 493 bp, Homo sapiens
tgagttggagtctcgctctgttgcccaggctggagtgcagtagctcgatctcggctcactgcaagctccgtctcccgggttcacgccattctcctgcctcagcctcctgattagctgggactacaggcgcacaccaccatgcccggctaattttctgtatttttgtggagacggggtttcaccgtgttagccaggatggtctcaatctcctgatctcgtgatccgcccgcctcggcctcccaaagtgctgggattacaggcgtgagccaccgtgcccggcccactcaggatcatttttatctataaggctcacatgcgaaaaggatatgttttaggcaaatgctttataataaacaactctgagaattttctaggacctgagctttcatgaacactgatggtgataatttgtgatgacttggcagacacagagatttgacatttccataaaatcaaatctgagctttattgtggtaagaactgacattgtggg

SEQ ID NO: 253192 - DNA, 501 bp, Homo sapiens
gaacacagctgtaaaccacacagagaagatccagtctggacctcaaggggttcccattttagcttgaaggaaatgaggaaacaacaaaaaaagtaaactgaattttatcagataaggcaaaaactatgccaaaaaacccccaaacaaacaccaaagcaggatgatgataggttgaccagcttttcctagtttgcccagggctgccctggtgttagcacagaaaatcttgtgtcccaggtaagccctcagtcctaggcaaactgggttgattggccatcttagtaatgggaaagagagcagctaaatgagaatttattttggatgagtggtcagggaaggcctctctggggaggtgatacttgagttgagataagagcaatgcggggacccagagctcacactggtaatcccagcactttgggaggctgtagtgggaggatcgcttgagctcaggagtttgagaccagcctgggcagcttggagaaaccttgtctctaccga

SEQ ID NO: 253193 - DNA, 579 bp, Homo sapiens
ccacacgtactcttaagctccaggtacatcaaaatagatggaaaatagtagctggctcagagctgttgtgaagattaagattatgcacatagtattaacaagtgcctaatagatagtaagcagtaaataaatggcagtttctggtgatttcatagtcttcatcccgacatatagtaggcacccaaatgtttagatgagtaaatgacttacgcactagatcctttctaacttctgtttaagtcttaaatttagttattttgacatttaatcgcatattattttgtatgtgctattaatgactggtagcgaggtgttttttcattataacagactatatgtttctcaagggccttaaattccactgatttttaatatcctttacagcaaactaacatgctatgcacatagtatagtaatttcttcagttcttacagactgttgaaagtacaccaccttttttccaagtgaattcacatacagttggctattcttcctgtaacttgatgatgtgagtaatcattatttcatatgaatcctgattaggttaggatgcttaagcttagacatacctgtctagta

SEQ ID NO: 253194 - DNA, 403 bp, Homo sapiens
ctttcattgcagggattgcaaggacacctgctgtatttaaaatgctgcattttcttggcataccatttaagacaaattacaaaaacctataactgaagcctgtttttccaaaaggtctccagctgcctgaacattaaggagctgtgccagtaaggaggacaagacctggtaactggttaaaagaagctaacagagctcatgataaggcttgccagcctagaggacaaactgccagttgtctatagaacagacaggacttgtgggagcatagtgtgttaagtggaggcccctgagcttagaaaaaggggctttcctattaggcaggaaccaagagaagcacaaagagatcatagtttataaatatgcaacagacacctctgtttggaaggaggcacaacactta

SEQ ID NO: 253195 - DNA, 660 bp, Homo sapiens
caattacctaaaaatgtagtttaatatcaggcagaaaacatttcctcttatcggtcttttctagaatttaccatgttctttgtgcacattaatatgtgacttccattggcagctactctaatcttggtccacagaaaactgacagtgcatccagatgcggccctgaacaatccctgccgcccaacaccactgacaccataggaccctcaccccgtctccatccatgtctgtgtgtgagcccttcccaggaccatgcctactgcaacctcttctcatgttcatgtcattgggtcacgagagatggaatctaggtgagatgagagggactgagggaaggcatgggtgagtgtgagcaaacctgtcacgcaggatgcttcagactcagagaagtttcccaactccaaggcccagcatttctgaaaggaaggagacagaacaatccacagagaatatcatctcacctgaggaagagccatccctgactcctttgctttcctcttcctcttctgagtttcttcttcacatacccagagtctttagaagtcaatcatgaatgttagaaatatgttgtttattgctcagagtcaacataccccctccctgtaaaacaacgacacatacaaaggagacctcaccctgggaaatatggtccactctgct

SEQ ID NO: 253196 - DNA, 498 bp, Homo sapiens
tcacagttcaagggaacaagagatggattcacacgtgtcagccgctgcgtactgttggtgctcacttatgggaacgccattctgacctaggtcatattatacattttaggttcagagagtccttgaataactgggagcagactggtaaacagagattaacaagcttctttcccagtaaaggtgatgtactgggtgggattatattgagtaagtaacagacattaagtgtttggagctaacctggcaaactattataacacagaatggaagacagaaaaaaacaggcagttgaaataattttataattaaatctgttaatgcaattaatactgatcgaccatagtgggggtctgggcaatgagtgtccacaaagagcagctgggggcttactccggaggctgaggcaggagaatggcgtgaacctgggaggcggagcttgtagcgagccgagatcgcaccactgcactccagcctgggcgacagagcaagactccgtct

SEQ ID NO: 253197 - DNA, 439 bp, Homo sapiens
tatactgattttatggtttcaacatttctatgaagataatgcccatgtccctactctagccctgacttccttcctaaactccagtcctcattacaaactacgatatattcaaaaccaattcattttcctcttctaccaatcacattccttccataactgctatataataatttattgaacacttacaacattaccaggtattatgtattatcaaattaatcttgtacaaaatcatctccatagtttctcttttccctcattttacaaattggggaaatctgaggaattaagtaaaccttaccaaggttacaaaacccagcgcaaaataatccagaggatttgagtttggttaagaacaatgtcagtgaactcaggtctgactccaatgtcatcaacttttccacaaccaaactcaaaagcttactgttcaccttttgct

SEQ ID NO: 253198 - DNA, 618 bp, Homo sapiens
agtcagtgaattccagagagaagcaactcagccacactccccaggcagagcccgagagggacgcccacgcacagggaggcagagcccagcacctccgcagccagcaccacctgtgcacgggccaccaccttgcaggcacagagtgggtgctgagaggaggggcagggacaccaggcagggtgagcacccagagaaaactgcagacgcctcacacatccacctcagcctcccctgacctggacctcactggcctgggcctcacttaacctgggcttcacctgaccttggcctcacctgacttggacctcgcctgtcccaagctttacctgacctgggcctcaactcacctgaacgtctcctgacctgggtttaacctgtcctggaactcacctggccttggcttcccctgacctggacctcatctggcctgggcttcacctggcctgggcctcacctgacctggacctcatctggcctggacctcacctggcctggacttcacctggcctgggcttcacctgacctggacctcacctggcctcgggcctcacctgcacctgctccaggtcttgctggagcctgagtagcactgagggtgcagaagctcatccagggttg

SEQ ID NO: 253199 - DNA, 378 bp, Homo sapiens
tgttttgttttgttttgtttttttgtagcatgtactgacctggaaaacctcatgctaagtgaaagaaggcagttacaaaggaccacatatttttgataccatttatataacatgtctagaacaggcaaatctagagagatggaaagtaggttagtggttggctagtactagagtaagcaagcagggattggagggtattggctaaggaatacagggtttctttctgtggtgcttttcttaaaaagttctaaaattgattgttgtgttgtttgcacaatgctgtgaatatcctaaaagctactgaatgatacactttaaatgggtgaattatatggtaggtagattatgtctcaataaaactgttaaaaaacacaaaag

SEQ ID NO: 253200 - DNA, 369 bp, Homo sapiens
  misc_feature (137)..(137): n is a, c, g, or t
  misc_feature (294)..(294): n is a, c, g, or t
ctactgccctgtatctctcctggtgtccatccacccagggccaggcatgttatctgaatcatgactgtgctaatattttgtaagttggtttttgaagattttctcagagccagagtcaagtggaaatggtagaatanttatgactggagttctgttagtgacggagtctcatatgctattgagttctctacaaagacaaaattaaggtcatgctgagcaatcaggtattctgggagtttctcccttacttgacttggaaacacttctccactggctcttccccaccactgtganagtccctcgcagtcccacatgcactcctggtccagacatgtggctgccgctctgggctttttccacagcatggcc

SEQ ID NO: 253201 - DNA, 473 bp, Homo sapiens
cctgttgcccagttccaaagtcacttccacattttagggtatccttataacagcaccctatgtctgtggtaccaatttactgtattagtctgttttcatgctgttatgaagaactactcaagactgggtaatttataaagaaaagtttaattgactcatagtttgacatggctgggcatgcctcaggaaacttacaatcatggccgaaggcacctcttcacagggtggcagcagaaacaatgagttttgagtgaaggaagaagccccttataaaaccatcagatcttgtgagaactcactatcacgagaacagcgtggagaaaaccactcctatgattcaatcatgtccatctggtcccgcccttgacacatgaggattatgggaattacaagattacacattaatcttaaattacacattaataagtgtgtaatgaaacatcccctttttttatttgagttcatttcaatag

SEQ ID NO: 253202 - DNA, 2431 bp, Homo sapiens
atttctaattgtacagactttgcagtgtgcagagtcaaatctctcatatcctgtaactttgctgcatgctccttagttttttctttatctacacatatatctggtcagtttgatacatttttttcttttttggtcttctcagctattagaaacagacatgtttgtagaaaagaactcttaccatttgttgcgtctgggacttgtgtggagggtttttgttttggtctgggttggtttgctttttctatttaaaacttagattgtgtgtacacccacacagaaacttcatccagctaccaggctattcctttgtagagtggtgatcaaacaaaaatatgcatctggtgattctttcatttgatttgaaaactgatttcagaaacacattattttcttcttttacctggcagattatttctgagcaagctgaagaatggaggactcagcctacttataaagtaccaaactgttaaggtcacagaaaattatttctggaaggtacattagaagttgttctagcccaactctcttattttacagatggaaaacctggggcccaaaagagggcctggcttagcctaagctgtacaatgacttagtggtagaaaatgaactagaacatttctgaattcccagtccagcattctttccactaagctgatggctgtcttccaggtgcaggagtgcaggttggtacttattacaggactctgctggctgcagtggctctttctggtgctgtggaaagtaccctcttctttgctcagtctgattccatttatgggaagcagtggtggagtttgtacataagatttacagtaaagtctgctgctgtcccaagtttcttaacccttttaaagtcatcttccttccatttctgatttcctagtacatctattatttatttcaatgtaaacaaattccaaataatggaaatttgtctctactacagcttattcaagtttgaactttgagtatatatgctaatgtttacagactggtgagatcaggaaaattgaactgctgttatttcaaaagtgaaagctactctgggacttctaggtcagggtggcagagtgaatactcctgaatcttattcctctcattcaaaaacagagaaattatgcataaatatttttaaaggttttaaaaaatacatagttattcttaaaaataagaaagaaaagtctctttgggccagtaatagaaaagccactatgatggcaggggatcggggggtgctatgaatggatatgggcaattgggaccaggtttttttgcaatgatcctgtctgtgcatgaacccaggacccaagagcacaatacaaataggagctgggctaatctaacttatcccagcagtgtcacagccaggaataagctgcttgttcctgaccagaagtaaagaagaattggcagtcacaagcaagcgcaggaaaccactcaagataggacttggacccaaaatacttttgggctaaaaattcagaactgggctacctaggaggaaagaagacccagagctaccaacttaaggtctggttcaaggttggcacattatcagatttaagctgaggcaacttaaaactgccctatagatacaggtacttacattttttagttatcataaaaattgagcccccaaaacattacaaagaacccagtaaaacctaagatcatgaaaaagcagtcaagagaacccaacaaatgagagaatttatacctgagaaaagaagaacaatctggtgagagtttaaaaataagttaaaattctcaatatatgtacagaagaagttagattttacagaatgaagaacagataatgaaacaagaagagaaagctgtgagaaagaagcgtttagacatcttgaagtgaaaaatattataaatacaatattgaagtaaaagaacagttagactgcacatactttctatagcttaagagaaaattacagaattaggaaatagaactgagaaaatctttcagaatgcagtttagagagagttagaagaaaatgaaagagaaagatggacatgaaagatgacctgaggagctctaacatacatctgctaggagttgcaaaggagaaaaaagaatgaataaaaaagtggcaataataataacaataactgcagctaagaattttttcagaaatgaagctgagtcttcaaaatagaaaatgctgccatatgtaacacaggatagataaatccacaactacatacatgataataaaatcgtaggaaattaatgataaagagaaaatctgaaattctgaatacaagtataagaaaaaattctgaataatggaatggtagtcaaattggcagtaggctttggcaacagtagataccagaaaactgactagtatcttcaaagtgctgtagaaaaataactgtgagcttccagtttcatacagtggtttatata

SEQ ID NO: 253203 - DNA, 640 bp, Homo sapiens
cccccttagcctacatggcagcaaataccactgtgccagttatatctggactctagggtagtcttggccaactccaagactggccaactccaagacttgtccactgtgtgcagagtattttaagtatgttatctcatacaatccataaaaacaaccctatagtgttgggtattgctatttcttttatacacatgagaaaatggaggcagtaagaggaagaggaacttgttcaaagtcacacaactgttaggcagaaatgaggtcattcaaatccttaatcttctcctccagaccacacagcctcccaggaagagatgtgggcacctcctgttcttgccaggcaggaaaccgctccttatcaatgtctacggggtctgctctcacacccaggaaggactgtgacaagcatggactaacctgcggctccactcagcctgctgtcagcaccctcctgttcagcaggatgcaacatctgatgttctgccaggaggctgtagagctgcacatagaagtagccagtgtttcttcccattccaaaatggaaatatcactcagccttttttaaaattgacttcctatgttcattttgattgtaggtgatgcagcaagcctcagggctggggattttcaaaatcttgtt

SEQ ID NO: 253204 - DNA, 693 bp, Homo sapiens
ttcacttttcattttactgatgtctgtatttgaatatttataagtatttatcaaaatataattgcataatttagaaaatctttttttagacctatagagtatattattctctggattacacttctgatgacatggcttcctaaaatatatttttttttattctattttttaaaagattggatttcattctaaatgtaacagaacaggcttatagcagaggagtgacataatctgaattatgatctgaagaagtttgttttgatgactgtgagaagtggtttgtgggagaccaagatccagaagcagagacaatgttaaggagaccactgcagttgttgaaggaaaagatgacggcattaaccctgaggatgcccaaaaataaaatagagaagatggcctttatcattgctacccacaatatctagcatagcaaatggcatgtagtaagcctcctataaagaggtattcgggtaagaaagttaggaagagaggccagccatccagaaggctgggatggagattaccgcttttctaattggagctggagaagcgaaacatgtttcttgaagatgcttgtataatgtccatttatgaaagcagtttcctaatctcctaataaataaaagactcatataaccactaccacaacaaatttggaagcagggacaacaaaaattatttcaaaacaagctt

SEQ ID NO: 253205 - DNA, 324 bp, Homo sapiens
tctttagtagttatacatgcttaaaatatttattttggctggacacaatggctcattcctctaatcctaacactttgggaggccaaggtggtgaaaggattgcttgggttcaggagtttgaggtcagccagggcaacacagtgagaccccatctttacaaaaaataaaaaattagctgggtgtggtggttcagctctgaaaatgattgatttttttcctatatttcagtatagtaaagtaactgcctaaggggttcttcctgacttgtaataaggagagtttagtagatacgaggcctgcaacaccacatgggagatggagttt

SEQ ID NO: 253206 - DNA, 477 bp, Homo sapiens
tagcaatgtctactaaagaaaccaactggcttcttcctgttcgcccacctttcctttgtttattgatatttccaccagaggaaggaccaggcaaaagggagaataaattcactttttaagataatgcttctgagttttagcacagcatcccatttcccgggaagctttattgccaaggcaataaggagaccatgtgagtaggagttaaatgcacagccatttgtgaagtgagactgcttgggttcagatcttgattctgccctttattctatgttgtggaatatattacattgtgctgtgcctcttttaccttatttgtaaaatagagcaagcacccaactcaagcagttgttgcaagaactgcctgctatgctgtttaatacagtatgtggcaaatagcaagtgggtagtaaatgttaataatactgtttggattctcattttacatatgagaaactgaggtttaatgaagttaaa

SEQ ID NO: 253207 - DNA, 610 bp, Homo sapiens
tttcatcgtcttgtatagaatggtaccatccaattcagtacccactagccacatgccacgtgtcacaacccccttcttttcttagtacctttttgtcagaggtcccctctctgttcctccaacttgccaaaattcacctccatctcctttgcagcatttgagaaggaactggccaagaagtgtttttggaattcttagctgaccacccacctccagcctacagaggtggttgaaaagactaagaagagttttttggagaagatagagaattttgttagaaaatgtggtagtgctgggactgtaaccttcttaatcttagtgaggggggctatgagatgcccactaaaaaagccttgacatgagtcacctagagtttgggagacacaaaggactggcaccttatgcataaaaaatattgcttgagtagatggatgaaactcctgtggcagcagaatagagtggcatttgggaagaagaagaattggcactggtgggggtaaaagttataggacttcagccaccagatgtggaacctaaatgaggactgttcgtctgaggtcatttccaaggggatcctattcaacagggcttctgccagggagggaggttg

SEQ ID NO: 253208 - DNA, 389 bp, Homo sapiens
taatttgacttgtaccaggattataaaacatatagaaaatgattccttccgctgtgcatagagtttatcatcgtctttcttctgcttgtcacatccttgctttttagaccatttatcacccatcactctgacttttcagaccctcataatccacatgatacttatccttttgattaaaacaacttaatggccttttcacgaataattaatctgctgtctttactttcagctccaggcttttaactttaatgttgagttatccagcctgtgttgcctttcaaagtttcactccccttagccttttcccctcaaaggtttaatacttctttagaaacttcaatagttgctatacaaaggttttaaaaaatgcttctgagttactctcacat

SEQ ID NO: 253209 - DNA, 441 bp, Homo sapiens
taatcatatcttttagcaaatatagatagaactgcttgaatctgataaaatgcaccaacaaaaaacttacataaacattttgattaaatgttaaaaactttccctctgaaattgagaatagagaagagtgtcctggccaatctgatgagcaagagaaagcaagcataagaatgtgaacacaaggaccaaacctgttcctatttacaggcaacttagtgatgtacacagagaaatcaagcagaagaatgtgaacccaaggaccaaacctgtgcctatttacaggcaacttagtgatgtacacagaaaatccactgggcatggtggctcatgtctataatcccagcactttgggaggctgaggcaggaggatctcttgagcttaggagttcaagaccagcctgggcaacacagggagacccctatctttacagaaaattagga

SEQ ID NO: 253210 - DNA, 624 bp, Homo sapiens
gaacaggcagtccagcctgtcgggggtccctgagccctgctgtgctgcgaccgggctaaagcttgggagcattatcaaaccacagcacaagcactggagactgctcttctacattgtgttaacatatatccatgtccaaaaggcagtgaccattgcaagggaaaaaaaatcgggctgagcttttgcaatactgccgctatcaccactcattgctgtcactttgttgcagaaaaatatctgttctgttgataactggcctcctgagcatcattagaacagcattcctttctcactgttgatgcatttccaagagactgctgtattgacaggtggttctattttagctgctgagatcatggcttcaagttctcagaatctgaatcacagggtacatttgtttcatcacaggtggtactttttgttgactttctttggaaatccaaagccacatgggtcctggtgttcattcccttgtttgtggcttcatctgtctccatctcaccaatttttggcgggtcaggcctagggcccacactgtgttccgtcttcctcatagctgggccgcaagatttggactccagcttctccctctgggcctgacctcaggcaggaggaatttcacgg

SEQ ID NO: 253211 - DNA, 716 bp, Homo sapiens
tggtgtccaaaatatagagatagagatatataggagacagtgttatgaacctacattttaataattgttgctataaaagtaacgagagaaaacgtatttgaagttgaaaattgggacaaataatttcatatgtattaatgcagtaaaaatagcagtacatttgtagactggtgggaatattccagtaaaaagagaaaattagaaatgcataagagaagaaaaaatgctggagcagcttctagcatagcttgaatctcaagtgtaaggactggccttagctagtttattgggatgtatatagtaacagcaaaggagcggagggaatggacacagatgaggagagattatatggatttcaaatttattttcctttttgagcttaaaaataacttaaatccttaaatatgtgactctggagtacttgtaaatgttttcacgcattttccccatgaagagggctgttaaagtaattcactgaggctgggcatattgactcatgcctgtaatcccaggactttgggaggccaaggcaggcagatcacttgggcccagtagttagagagcagcttgggcaacatagggagacccatctctacaaaaaattaaaaattagctgggcatgttggtgtgtgcctgtggtactttaataccaacaaccatattttgaagtaaaataccatcaaaatgacaatccaaatagaaacattaacttagtg

SEQ ID NO: 253212 - DNA, 1767 bp, Homo sapiens
  misc_feature (1557)..(1557): n is a, c, g, or t
  misc_feature (1631)..(1631): n is a, c, g, or t
  misc_feature (1677)..(1677): n is a, c, g, or t
  misc_feature (1764)..(1766): n is a, c, g, or t
gatcatggtaaatgcacagagtgtgctctatgggatagctatgtgaatactcgagaagcaaaacaagtcttgcaaaattattaataatcctttctttcatttctatgaagtcaaggtgttactggagttgcttagaataagcatatccaccctctcaagtagcaaacacccttacactactctaaaagatagtgattttcatgaatcaatagctatttcttctttttatatatcaagagtataactattctttaaaaatatttttttaatcagacaaatgaagatgttctttagaatatgtatgtgagtgaaggtatccaaattggtaataaggggctaggttttaggaatgtagagaaaatggacttgggatattagatctgctaatatcaagacaaaatctgaatccttgttgaagttcaaaataatgactcagatttcaagggtttctttttcttccttctacaaagaaatacagtcacgtactgcataacaaggttttggccaaggacatgctgcctacatgatggtaggcccataagattataacatcatatttttactgtgtcttttctatgtttagatatgttatatacacaaatacttacctttgtgttacaattacctacaatattcagtacagtaacgtggtacaggtttgtagccgagaagcaataggctacatcacattctctaggtttatataaatagaccctgtatcagctatatcatctaggtttgtgtaaatacaccctatgatgttcccacaacaaaatcggcaaatgacgcatttctcaggatgtttccctgttgttaagcaaagtgtgactataacatttttattgagtatttgaacaagcctctccctatcacaatgaattcaatcactcatgaattatttcataaggtgctgtaatatggtataatacattatacatttttctcaggctataattttggtatttaatgaaactaagcagactgccttagtgttgttatgggaacatttatcagatgggaggaagttggcagtaagctgtctgctgccaaatgggaaaggattcattagctctagaagactggcagtcctaagaatcatttaaatacagacataaaaaaatgctcggttggcaattaggattttacacaattctaaaatctctttttaacacatacaggtgagagctttacaatacttggtaaacaattctgaacaaattcaagtaaagttgcaaatttcagaagaatacaggaaaaagaacagatggagttgatgtgtaagagaaaagtcatttgtttccaaaagaacagggaaggccagtgtctacactagcataccataataggagttgcctaaaagcaggcaaagtgatcattttgtcacaggcagacatttgacttggctatatatacattctatagaaaaattttaccttgatagtccacatcgaggttaaaaaaagtgaaataggccgggcgcggtgactcacacctgtaatcccagaactctgtgaggccgaggctggcggatcacctgaggtcaggagttcgaaaccngcctggccaacatggcgaaatcccatctctactaaaaatacaaaaattagccgggcatggtggcatgtgcctgnaatcccagatactggggaggctgagggaggagaaccacttgaaccnaggagggggaggttgtggtgagccaagatggcgccactgcactccagcctgggagacagagcaagactctggccaaaacaaaaaaannna

SEQ ID NO: 253213 - DNA, 392 bp, Homo sapiens
cttcaaagccttggggaaccagaatttatttttgctctgccctcattgaagatgtcttaagaacacaaccaaatacgaggaagcaagatggagaaaaagaagcagcatgctcctttcctttaaagtggtgacttggaatctgtacacgttgcttccacatgtgtacccatgtccataacctagtcacagagacacaactaatagttacctgggaggctgcagtctttagctgtgcagccagtgaccaactaaaattcaaggtttcaattactatagtaagaatggagaatggatattgaaaaccaactccactgctatctcagtgacatcaaatttggaatgtttattagacatccaaatctgcctcatgcaccaccactaaactgaaatca

SEQ ID NO: 253214 - DNA, 337 bp, Homo sapiens
gtgaaagttgtcagaatcaaaatggagtaactggcattaaacaaaccaacaaaaggaactttcacaaagcaccagggaaggccataaagagtgggttctcacgcctcgatgcctgataacaaaaaggactacaaaaaacacaaccttgcacaaaggccaccaccatgttacaggaaaacatacttctgcaagggcatttgaccagccactgcccatcccgccctggactggcatcatccttgttattcatctttgcagccaaagataattatcttaaaacagtgaagtaatcctcctcttgtattttcccattaaaaacctttgtcctcctttaccc

SEQ ID NO: 253215 - DNA, 748 bp, Homo sapiens
gacatctctagcaagctcattgtcttctgccttattaaactttaatgggtaactagtagacagtaacactctgggagggctcaaaccacataaccaaatgtgccaagataatcctgagctcactattgtcagtcctgaagattttcctcagataatctttcatctctttgttcctgagactatatattagaggattacagagtggtgttatcacagaatagaacaagtggatttttatctgagatctacaacttatgaagaatacaaatgatgtatattcttttctactcttcatgtatggactagaggggcttgcacagtagtaagaaaaaaatggctgagacccacaggaacaaagaaacaggacaggagttagatgcagagaagagatttcaacaaaagtttggaaaagatgctaacggtagcatatgagtcacagacagaacattggcacctttgtttaagaaactgaatgttaatgtcacatctgcctttggagattacaaatgaaatggctacctttctactggaaccctgaccagaagcctgccagttagtaagctggcttaagagatcaatctaaaatttacataaggcttttgaaaaaaagaaaaaaactcaagagaattgacatctggtgttaaaaaacaaaaaatcatacaaatgactgatatgtatcattttccttattaaatatggaagaaaggggaggaggatgcagaaatggttggctaaaagctccagagaa

SEQ ID NO: 253216 - DNA, 845 bp, Homo sapiens
aactttagttagtagttggtcccagtcagtaacgctctgggagggctcaggccacatcacgaaatgtgacaggatagccttgaactcatcaattgctgggggcacctcaaactcaactccaaaattgatctaatgaactttgccaaaccacattcccttcttgcatttctgagagaatggattcccattcatctgactacagtgctaccctgaaagcagatccagagactaagattcacctgcaggtgattcatttgcaaggtaagctgtcatcagttggaggtaagcggaagacagtagagagtacagagccctggactgtgactcagaggatgagcaccagatccagtttgctgtgccacagtgtcctgaagattttcctcagataatctttcatctctttgttcctgagactatatattagaggattacagagtggtgttatcacagaatagaacaaggtcacttgatattcttggcttgatgaaaaaaaacaagattctaacgtgacagaacttgttcttctgggcctatcatcttcttgggagctgcagctatttctcttattactatttttgtttttttacattgctattgtcctgggaaacctcttgatagtggtaacagtgcaagcccatgctcatctgctccaatctcctatgtattattttttaggtcatctctctttcattgacctatgcctaagctgtgttactctgccaaagatgttaggggatttcctacagcagggcaagagcatctctttttcaggatgcctggcccagatctacttcctccactttctaggagccagtgagatgtttctgctgacagttatggcctat

SEQ ID NO: 253217 - DNA, 1084 bp, Homo sapiens
aactttagttagtagttggtcccagtcagtaacgctctgggagggctcaggccacatcacgaaatgtgacaggatagccttgaactcatcaattgctgggtaagaaagaattttaatgcaatggcaaacaaccaatcaaacaagcaaacaaaaacaataaacccttccttgaggaccaagaagacattgattagctaacctaagagctccaggtggagacctaggtcctgattgggtttctgaatttgaccactaggcagaaaactagcacccaaaaccagttggaataaaattacccacctacagtggagccaaggcccccagatcctttttgtcaggggcacctcaaactcaactccaaaattgatctaatgaactttgccaaaccacattcccttcttgcatttctgagagaatggattcccattcatctgactacagtgctaccctgaaagcagatccagagactaagattcacctgcaggtgattcatttgcaaggtaagctgtcatcagttggaggtaagcggaagacagtagagagtacagagccctggactgtgactcagaggatgagcaccagatccagtttgctgtgccacagtgtcctgaagattttcctcagataatctttcatctctttgttcctgagactatatattagaggattacagagtggtgttatcacagaatagaacaaggtcacttgatattcttggcttgatgaaaaaaaacaagattctaacgtgacagaacttgttcttctgggcctatcatcttcttgggagctgcagctatttctcttattactatttttgtttttttacattgctattgtcctgggaaacctcttgatagtggtaacagtgcaagcccatgctcatctgctccaatctcctatgtattattttttaggtcatctctctttcattgacctatgcctaagctgtgttactctgccaaagatgttaggggatttcctacagcagggcaagagcatctctttttcaggatgcctggcccagatctacttcctccactttctaggagccagtgagatgtttctgctgacagttatggcctat

SEQ ID NO: 253218 - DNA, 1268 bp, Homo sapiens
aactttagttagtagttggtcccagtcagtaacgctctgggagggctcaggccacatcacgaaatgtgacaggatagccttgaactcatcaattgctgggtaagaaagaattttaatgcaatggcaaacaaccaatcaaacaagcaaacaaaaacaataaacccttccttgaggaccaagaagacattgattagctaacctaagagctccaggtggagacctaggtcctgattgggtttctgaatttgaccactaggcagaaaactagcacccaaaaccagttggaataaaattacccacctacagtggagccaaggcccccagatcctttttgtcaggggcacctcaaactcaactccaaaattgatctaatgaactttgccaaaccacattcccttcttgcatttctgagagaatggattcccattcatctgactacagtgctaccctgaaagcagatccagagactaagattcacctgcaggtgattcatttgcaaggtaagctgtcatcagttggaggtaagcggaagacagtagagagtacagagccctggactgtgactcagaggatgagcaccagatccagtttgctgtgccacagtgtcctgaagattttcctcagataatctttcatctctttgttcctgagactatatattagaggattacagagtggtgttatcacagaatagaacaagtggatttttatctgagatctacaacttatgaagaatacaaatgatgtatattcttttctactcttcatgtatggactagaggggcttgcacagtagtaagaaaaaaatggctgagacccacaggaacaaagaaacaggacaggagttagatgcagagaagagatttcaacaaaagtttggaaaagatgctaacggtagcatatgagtcacagacagaacattggcacctttgtttaagaaactgaatgttaatgtcacatctgcctttggagattacaaatgaaatggctacctttctactggaaccctgaccagaagcctgccagttagtaagctggcttaagagatcaatctaaaatttacataaggcttttgaaaaaaagaaaaaagaacccaaaggcacagattgacgttataagtcctgatttttgacttgacttctcatcacctggaagtgaataaagcagtagacttctctaacattttgtaacacagcatgaaaaaatatagagtacaaaagatatatatatataatatgataaaatgatgagttacgtttctaaatctt

SEQ ID NO: 253219 - DNA, 1309 bp, Homo sapiens
aactttagttagtagttggtcccagtcagtaacgctctgggagggctcaggccacatcacgaaatgtgacaggatagccttgaactcatcaattgctgggtaagaaagaattttaatgcaatggcaaacaaccaatcaaacaagcaaacaaaaacaataaacccttccttgaggaccaagaagacattgattagctaacctaagagctccaggtggagacctaggtcctgattgggtttctgaatttgaccactaggcagaaaactagcacccaaaaccagttggaataaaattacccacctacagtggagccaaggcccccagatcctttttgtcaggggcacctcaaactcaactccaaaattgatctaatgaactttgccaaaccacattcccttcttgcatttctgagagaatggattcccattcatctgactacagtgctaccctgaaagcagatccagagactaagattcacctgcaggtgattcatttgcaaggtaagctgtcatcagttggaggtaagcggaagacagtagagagtacagagccctggactgtgactcagaggatgagcaccagatccagtttgctgtgccacagtgtcctgaagattttcctcagataatctttcatctctttgttcctgagactatatattagaggattacagagtggtgttatcacagaatagaacaagtggatttttatctgagatctacaacttatgaagaatacaaatgatgtatattcttttctactcttcatgtatggactagaggggcttgcacagtagtaagaaaaaaatggctgagacccacaggaacaaagaaacaggacaggagttagatgcagagaagagatttcaacaaaagtttggaaaagatgctaacggtagcatatgagtcacagacagaacattggcacctttgtttaagaaactgaatgttaatgtcacatctgcctttggagattacaaatgaaatggctacctttctactggaaccctgaccagaagcctgccagttagtaagctggcttaagagatcaatctaaaatttacataaggcttttgaaaaaaagaaaaaagtaagtctttaaaaaagccaaaaggaaactggtggaattagaggtaattcggggcgggggggggggaactgtaaaaaactgtatcttctcatcaatgaaagaaaatatttgtaatcttgaaataagaatatgatgtactgaaaaaatatagaaaaattatttttggaaggtaaaatcaaaaagaacaataaacaaaattaatatggcattaaaagaaata

SEQ ID NO: 253220 - DNA, 391 bp, Homo sapiens
tgatatctgtcacatgtgttaccaattgctttagctcagtaatacaaaaaggacgtctgcattctttttaaaaagttgggttacatatacacgttctgattagcatagacatagaattttacatacgtattattcacttcaacagaaaatctaattcactgttgaaacattcttaaataagaccacagtaatgcagattgtggtgagtggtgtttaagatgttaatggctcattattatagcagttcttaaataaaacaataaatttgtagacaaatattcatgtataataaagttacatttgataaatgaaaattctcttatttatattttattaacatcttttccagtcctgaagattttcctcagataatctttcatctctttgttcc

SEQ ID NO: 253221 - DNA, 466 bp, Homo sapiens
aaagagtaaattgaagaaatggaaactgcaaattacaccaagcccctgaaatgctcatagacttctttgtggagaggaagataatttcttttgatggatgcattgcacagctcttcttcttacactttgctggggcttcggagatgttcttgctcacagtgatggcctttgacctctacactgctatctgccgacccctccactatgctaccatcatgaatcaacgtctctgctgtatcctggtggctctctcctggagggggggcttcattcattctatcatacaggaacccaaaggcacagattgacgttataagtcctgatttttgacttgacttctcatcacctggaagtgaataaagcagtagacttctctaacattttgtaacacagcatgaaaaaatatagagtacaaaagatatatatatataatatgataaaatgatgagttacgtttctaaatctt

SEQ ID NO: 253222 - DNA, 349 bp, Homo sapiens
ttactgcattttccaggaataaataaccttgtcccaaaaacaaacatatttaaagacatttccttctgtggacactgattccatgctatctgttttccaaggaagtggtgagcccgtttctgagaacacctggtatcaatggctgtcccttccaaaccaagcaaaaagtgatttcttgtcggtgtggatttggttttgttattaattttaaaacatacctttgaagacttagatctctgaaactactagatctctagaagtgtaattgtgaaaaaagtttgcttgcatcatcaacaacatgaaaaactctttctaaataaaatttgttttgaagttaaaaaaaagaata

SEQ ID NO: 253223 - DNA, 500 bp, Homo sapiens
gtgagtgccctccccatgaagctggagccactctggaccagactgctgtctgattctcttctgcagtgtcctaggaaccagcaaggtgcctggcacacagtaggtgcacaatcaatttttgagaaatgtatgcatcaatgccgtttactaacaatgactttggaaaatcactttttctcttcaaacttcaatactctcaactgaaaagcactgagcgtaatccctaccctttaaagctattgcatacaataagtacatacaaaatcactttgtctggccaggcacagtggctcatgcctgtaatcccaggactttgggaggccgaggcgggcagatcacttgaggccaggagtttgagaacagcctggcaacatggtgaaacctcctgtacaaacattacaaaaattagctgggcgtggtggcacacacctgtagtcccagctacttggaagcctgaggtgagaggattgcttgagcccaggaggtcaaggctgcagtga

SEQ ID NO: 253224 - DNA, 339 bp, Homo sapiens
tattttacatacattttacatgcactgggctagccattttctagactacacagatatataccagacagtatttccattgagaaacttactatagagttggggaaataaagaattgtcaaatgaaaagataagttatggtaatgaattcaaacaactttacaagaagaaatgctacaaggctaaacgtagctagttgccaaatggatgctccagtctgtaacacatgatagtggcacacatggaagcatgtaagagaaagctccaggcagtaatgaattgggagagtgggatttaagctgaaccttgttgaaaggaaggtagaatttagaagcaaaaaaa

SEQ ID NO: 253225 - DNA, 359 bp, Homo sapiens
cagcagaagtacactaaagcaccaagaccatctttaaaggttgagatgggtttaaaatggctattcacacacccatctgctcctctcaaaaattatctcacattcaatttcacaaagagcatttggaagacactggccatgtaacagagaaactgaaagctagagtcattattccattgctttccaaattccaaaaatagcacaaagtcatgtccagaagggcatgtgctccggaccttagtcaaacatctactttcaaagtttccataaagactctgaaaaggagggaatcctgttataaacacagtgtaaataataatatggcagtaccatttaattctattctgctggtgaagaaa

SEQ ID NO: 253226 - DNA, 873 bp, Homo sapiens
cctgtctcagcctcccgagtaactcggactacaggcatgtaccaccacgcccagctaatttttgtagttttagtagagacaggtcttcaccatgttggccatgctggtctcaaacttctgacctcaagcaatccacctgccttggcctcccaaagtgctgggattacaggcttgagccactgtgcctggcctcttgtcactttttaactgtgaccctaggcacatttcttaacctctctgaggctgtttccttatatgtagaagggggttgataacacctgctttgagaagctatttcacgtgttaggtaacataaaatgcatagttcaaagccttgcctatattaggtgcttaagaaatgttaatgtctttacatgtgtatctcctccattttagtgctccttaaatctgatttcagctggagttgccatactttgctgtagactttttattgtaaaaataatataaccatctgtacaaagtttagaaaatggaggaagaatttgctcatagtacagccactttgtgtgtgtgtgtgtgtgtgtgtgtgtgtgtgtgtgtgtgttttaacatgtttgtttctctgtaatagcattgaacacagaaatgcctctgcttctggacacgtttgttctgacagaccaacactgctttagcctacagttgtctctaccctgtttcactaatcactgccatctgctttgtgccttcctgtgggctgtagcttttttatgtctttgtcattttaatggtgtctcaggaaagtggtcagccaaccatcttgaaccagacatccatgaccattacttttaattgctgtgtaatatttcacagtaggttaaccattgtttacttatttccttattgttgtac

SEQ ID NO: 253227 - DNA, 572 bp, Homo sapiens
aattggtatctgattggcatagggaatgaagctgacctgcacacagttcactttcatggccatagctttgaatacaagaattagggagtgtatcaatctgatgtttatgaccttcctcctggggtctatcgaactgtaaaaatgtatcgaagagatgttggaacctggttattttattgccatgtttttgagcacattggtgctggaatggaaagcacttacactgtacttgaaagaaaagggctgatggagcagaacctctgaagcagacaaaggagagtcagcatgaacagtttctcagaatcttctctcaatatcaggactacatttgtcaacaaaaccaaaaactgattagccaccgatataatttttacctacaacatcctattaatgtcaataatatcattattgatacaattctaataatcactacccttattcctatcagtgttcatgtacattcttagtaaaagggactttggtgcgctgtccatgaaataaatcccccattgctaacattctttctttggaaaagtagattttgcatttcaaagaatataaagtcaaattgg

SEQ ID NO: 253228 - DNA, 409 bp, Homo sapiens
aattggtatctgattggcatagggaatgaagctgacctgcacacagttcactttcatggccatagctttgaatacaagggctgatggagcagaacctctgaagcagacaaaggagagtcagcatgaacagtttctcagaatcttctctcaatatcaggactacatttgtcaacaaaaccaaaaactgattagccaccgatataatttttacctacaacatcctattaatgtcaataatatcattattgatacaattctaataatcactacccttattcctatcagtgttcatgtacattcttagtaaaagggactttggtgcgctgtccatgaaataaatcccccattgctaacattctttctttggaaaagtagattttgcatttcaaagaatataaagtcaaattgg

SEQ ID NO: 253229 - DNA, 431 bp, Homo sapiens
cttgtttctcataattaggaacttctttggatttgatcaagtcagatagttcagatttaatcaagtagggtggagttgatcaaacccaatgggaaaaagaccaaaacaaaaacaaaaacagaaataacaaccaaaaaaaaagttaagtaaaacaaatgattgcccaacccatatgattactgaggtctctaatgataaggataaattaagaccagctggttgtcaatcttaactttagaaaaggcaaaccccaattcagttacttacttagggatgggtctcaggctgaagatggctctttaccatcctagaagcagaaaaaaaaccctcatcttccctgttgaaagcaagctcaaactccgtaaaggagttacctgactccattgtcacagaaaacttgcctaccttgtattggaagcaagtaaaactcc

SEQ ID NO: 253230 - DNA, 393 bp, Homo sapiens
gagagttgtccagagtcatacaagctcttaaccagcagagccaggatttcaaaccctagaagaatggctttggagtccaagttcataattgctctgcttttatacctctgcaacgaagtatagtgacatctacctaccaaagaagttaccttacaatgacacatttttccagatacttcgttgtcagtgatacaaatgatttgagagatagggggagacattttggggtaggacttctccttcttcagtaagacactacttcttcccctcccctcctaggacagcaggtcccctcatccgttgtactcattgaagcaatgttgcagcctctcttaggattaccatttccctagtgaacagaacagaaatgtcatacatggttatggcctgggc

SEQ ID NO: 253231 - DNA, 341 bp, Homo sapiens
gccagggcgggctctaggccgtggaatctggggccttaaagccccttcgtctccccagcacccactctctgggggcaggtgggcccggtgacagtaaccttcagggagccctgaagaccatggaggactactgaccaacaacctctgaccttcacccctctggatgggggacgaatcactaggcaaaggggaacaatgggaaggagacaaaatggctgcctttacagctgcagcaagatgtggaaacactggttccctaggcacctccattgtcttcccgccttgggagcatgaaataaataaagtgtgaaggggaacatgaggaagactgatccaagtca

SEQ ID NO: 253232 - DNA, 342 bp, Homo sapiens
gctagctactacatgatgcttcctacacgtgctctactaggcagtgtgttatttaatcttcatagcagtccactttttggatgaggaaactgaggttgaagatttgccaaggtgacgcaaggtaacagttggggctcaaagtcagtgccttgtcacctcaaaactggagcctttaatccctatgttaacaaccctctaggtatttttgatttggtgtaaggcactgtggtaactggcttgatttggaatcttaattgtcagaagtcaagataacctcggccctgtcactggttaatactctatggtgtgtatgccaagaatgtaatatccctgtggagttgg

SEQ ID NO: 253233 - DNA, 466 bp, Homo sapiens
gtgcaaaaacaattcaatggacaaaaaagagccttttcgacaaatatcatgttggagtaattgaatatccataggcaacaacaaaaaaaatgaacccagacctaagtctcacattttatacaaaattaactgaaaatggaatatagacttaaaagtaaaacgtaaactataatacttttagaaaacaacataaaagagaaaatttgggggatctaaggagagaggcaaagttcttgataccagaagcatgatccataaaaagaaaaatggatagagtggacttcatcaaaattaaacacttctgctctgtgaaaggcccagaaaagagaaatgaaaagacatgctactgactgggaggaaatatttgcaaatcacacatccaacaaaggactagtatctagaaaaaaatacacacacacacacacagaggcacacacacacattatttaaaagccctcaaaactca

SEQ ID NO: 253234 - DNA, 424 bp, Homo sapiens
tttctcaactcttattttcagagctttgtgggaaagccgtggatagttgggacccaaaggtcgttttcagtttcaggatcctgtggccaaagagaggagataaaaatgcttggggccattttaccttcaacatcttccaaactcctgttcatgttgctgttttgacctcctcccatgaatcatgaatgttcttaaggcatctagaatggtgaatcctttccagcaggtttttaaaaattttctcccagatccatcagaggaatcattgtctaaggcagctgtagccttatgaaatgtcttaaataataagacttgaaagttaattatggaagttaacttgaaagttaataagacttgaatgttgtgttaatggctattttaatattttaatggacttaaaatagtaaaccatgcagtaaacaga

SEQ ID NO: 253235 - DNA, 513 bp, Homo sapiens
gattatatagcaagtaaggctgaggtgctacaaaagaattcctatggaattgtcattgattggtcccctaaggggatttttaaaccaaattgcacaagaaggccctcttgtaaagcaaatttaacaaactgatggaatcgctggcaatgtaatcatacacaatacattcagatggaagctgatgcccctatcatatggaatcctgctggcattatcgcccctagtccaaaaatgatatctcctgccataggacaggaacattcagaattatgaaaattagctgtagctcaaagtccaattaaaatttgggagggtaaatatgaaaagtacagtggggagggaggtaaggataaatatgctctttcttttctttccaacaggacgttttggattcaaagttgcattcgaccaccttttatgttagcaataggaaatgttactattgatataaatacacactctgttacctgcccagaatgtcgcctatttacctgcattaactcaacttttgat

SEQ ID NO: 253236 - DNA, 545 bp, Homo sapiens
tcttcatttctataccttcttttatctgaggagcttaagccattttgtagaggcattaagtattgcctcagtcttaatatgtgagacaaggtgtgaggaatatagagattcataaaataatccccatcttcaaggaactcacagtcaggaagaacagagcctgcaacacaaataattgcaatatagtagaagtgccaataggagctctatgaagggcgtgaaacaggaaaggctacatagaggagatggcagacactctgtggattgtgacctgttggtgggccatgaaatcaatttgggggtttgagagcatcattcttttaataaaacagaagagaatcatctgcaataaggaacccatggatgaataccatctggtcctggtgatttactgcacagagtccctcaagttgctccatacctttctcctgagagactgaagaatctctgtcaaggccgttctctgctttgccataaaatgtgtccttggaacaagaatttccccattgtcttcttcaataaatactgattcaaagtattcaaaa

SEQ ID NO: 253237 - DNA, 350 bp, Homo sapiens
tttccgttcctctgtgtcgaagaggatgtggttacttacttactcttatttctctagacactctgtggattgtgacctgttggtgggccatgaaatcaatttgggggtttgagagcatcattcttttaataaaacagaagagaatcatctgcaataaggaacccatggatgaataccatctggtcctggtgatttactgcacagagtccctcaagttgctccatacctttctcctgagagactgaagaatctctgtcaaggccgttctctgctttgccataaaatgtgtccttggaacaagaatttccccattgtcttcttcaataaatactgattcaaagtattcaaaa

SEQ ID NO: 253238 - DNA, 496 bp, Homo sapiens
tatatttttaaagacactttcatttctaagtttcaaaatatttttgcaccaaaaacattgctcttattaggccaccttttctaaggaagtttttattcattttatggaaattcagaattttgtctacaagactaatgacaacaattgtatatttatatataatcgcctttttgtatatgtcttagtctcttcaggctgctataacaaaattccttcgactgtgtaatttataaacaatagaaatgtattgctgacagttctagatgccaggaaatccaaagtcaagacaccagcaaaattcgtgtcacaaatggtgcctcttgctgcatcttcatatggtgtaaagggcaaaatggctcccacaaacctcctttataagggcactaatcccattcatgagggtggagccatcatgaccgaatcacttcctaaagtccccacctcttcattctatcacattggggattaaatttcaacatatgaattttagggagac

SEQ ID NO: 253239 - DNA, 274 bp, Homo sapiens
ggtcgtgaagtcagtacttctaccttttgttctgaacacttgtagtggtaaacaatgcacttagtcatctatgaacattgtatgccttggtttttatcttttcattcaagtgattttataatagctatttaccaaattggaatatatttatatttcaagtgttttctaacttttcaattaaccttttttaattgtatgagatttatatagttataatcatacatagttactcttgtataattttacaataacattaaaatgaaattaaaaattc

SEQ ID NO: 253240 - DNA, 515 bp, Homo sapiens
atttagagatttctcaaagaacttagaacttccactggaattttgataaggattgcattgaatttggtctctctttgggtaccatgaacactttaacaatagtaatccataagcatgtggtatttttccatatatttgcttccattcaaatttttgaacactttgaagtttacataaatctttcttttcttttcattcctctttctttctgtctcttactttctttgttcttccttccttctttccttccttccttcctcttcttcttacttctagtggcaataagaacatattctagctttaatctggtgatttatatttagtgaatttttaaaaattgagaataatgattgaactgtaattggaaatagacctaaagcagagagaaacctttcctctttgtttttctctttttttttcctgttctccactgcttcttaattgatcgatttgcttttctagtcataaggaagttgtttattataaaattaaattgatattgtcatttctggaga

SEQ ID NO: 253241 - DNA, 317 bp, Homo sapiens
ggctacacacctgttacaatcactagaagtaaaaagactggccataccaactgctaatgagcaagtgaagaaactggaaccctcgtacactgctgatgggaatataaaatggtacaactactccagaaaacagtttggaaatttcttaaaaagttaaacataaacctaccacaggtcctggtcattccatttctaggtattaatgtaagagaaatgaaatgacacacccacacaaacactggtacatgaatattgatggcagcattatttgtaacagccccaaactgaaaacaacctgactgttcatcagcagggaa

SEQ ID NO: 253242 - DNA, 387 bp, Homo sapiens
  misc_feature (380)..(380): n is a, c, g, or t
cttttttttctctctctcttttttttaaattgagacagggtttcggtctgttgcccaggctgaggctggtggtgcaatcatagctcactgcaacctcgacctcctggggttgcagcatgggccaccgtgactggcctgaaatagttttcttagcatttaattttaagttcgagaccagcctgggcaacatggagaaactccacctctacaaaaaaatacaaaaattagctgggcttggtggcatgtgcctgtggtccccagctactagggaggctgaggtgggaggatcacctgagcccagcaggtggagtgcagtggtctgtcttggctcatacaggcagccttgagcccagagctcgagctgccgtgagccgtgattntaaaatt

SEQ ID NO: 253243 - DNA, 603 bp, Homo sapiens
ggcgggccgaccacttaaggccaggagttcgagaacggcctgggctacgtggtgaaaccccatctctactaaaaataatttatattcctgccagcagtgtattgagataatcatgtactttatgctactagaaaaaaagtcacatgaaattttaacacagaatgttcgacatttaatacttttgtaacataaatgtttttttatacttgtttgctgattgatttgcttctctttcctaaagatttgtggaactcagtagtattagtgttaatttgtaggtatgggtccagaagcaattcagagaggacctgaatatacctaaactgttccctgaagagtcagcagtagccattgggtagttcacttggaaatgatattcctctcctccaagttgggggtgtgtatttattggtcacagaacacacagtcatacagagcaagagagaatgactctggaatcagactgcctgaattcaaatcccacattctctacttactccgtgagcaatcctgagcaagttacttgtctcattctgggagtctgaggcaggcgaatcacttgagatcaggggttcaagaccagcctgggcaacatggtgaaac
